(19) United States
(12) Patent Application Publication
(10) Pub. No.: US 2009/0077685 A1
(43) Pub. Date: Mar. 19, 2009

(54) Nucleic acid molecules and other molecules associated with plants

(76) Inventors: Robert E. Buehler, Chesterfield, MO (US); Joseph R. Byrum, Des Moines, IA (US); Brian E. Coombs, Imperial, MO (US); Thomas J. La Rosa, Maryland Heights, MO (US)

Correspondence Address: ARNOLD & PORTER LLP, 555 TWELFTH STREET, N.W., ATTN: IP DOCKETING, WASHINGTON, DC, 20004, US

(21) Appl. No.: 11/978,191

(22) Filed: Oct. 29, 2007

Related U.S. Application Data
(63) Continuation of application No. 11/330,082, filed on Jan. 12, 2006, now abandoned.
Application No. 11/330,082 is a continuation of application No. 09/552,086, filed on Apr. 19, 2000, now abandoned.
Application No. 09/552,086 is a continuation-in-part of application No. 09/440,687, filed on Nov. 16, 1999, now abandoned.
Application No. 09/440,687 is a continuation-in-part of application No. 09/391,630, filed on Sep. 8, 1999, now abandoned.
Application No. 09/391,630 is a continuation-in-part of application No. 09/333,535, filed on Jun. 14, 1999, now abandoned.
(60) Provisional application No. 60/109,018, filed on Nov. 19, 1998.
(60) Provisional application No. 60/101,132, filed on Sep. 21, 1998.
(60) Provisional application No. 60/100,673, filed on Sep. 16, 1998.
(60) Provisional application No. 60/099,670, filed on Sep. 9, 1998.
(60) Provisional application No. 60/099,697, filed on Sep. 9, 1998.
(60) Provisional application No. 60/089,524, filed on Jun. 16, 1998.

(51) Int. Cl. C12N 15/82; C12N 15/29; C07K 14/415; A01H 5/00

(52) U.S. Cl. 800/278; 536/23.6; 530/370; 800/298; 800/312; 800/320.1; 800/320.3; 435/430

(57) ABSTRACT

Expressed Sequence Tags (ESTs) isolated from soybean are disclosed. The ESTs provide a unique molecular tool for the targeting and isolation of novel genes for plant protection and improvement. The disclosed ESTs have utility in the development of new strategies for understanding critical plant developmental and metabolic pathways. The disclosed ESTs have particular utility in isolating genes and promoters, identifying and mapping the genes involved in developmental and metabolic pathways, and determining gene function. Sequence homology analyses using the ESTs provided in the present invention, will result in more efficient gene screening for desirable agronomic traits. An expanding database of these select pieces of the plant genomics puzzle will quickly expand the knowledge necessary for subsequent functional validation, a key limitation in current plant biotechnology efforts.

### CROSS-REFERENCE TO RELATED APPLICATIONS

[0001] This application is a continuation of U.S. application Ser. No. 09/552,086 filed Apr. 19, 2000, which is a continuation-in-part of U.S. application Ser. No. 09/198,779, filed Nov. 24, 1998 (abandoned), which claims the benefit of U.S. Provisional Appln. Ser. No. 60/067,000, filed Nov. 24, 1997; and to U.S. Provisional Appln. Ser. No. 60/066,873, filed Nov. 25, 1997; and to U.S. Provisional Appln. Ser. No. 60/069,472, filed Dec. 9, 1997; and to U.S. Provisional Appln. Ser. No. 60/074,201, filed Feb. 10, 1998; and to U.S. Provisional Appln. Ser. No. 60/074,280, filed Feb. 10, 1998; and to U.S. Provisional Appln. Ser. No. 60/074,281, filed Feb. 10, 1998; and to U.S. Provisional Appln. Ser. No. 60/074,282, filed Feb. 10, 1998; and to U.S. Provisional Appln. Ser. No. 60/074,565, filed Feb. 12, 1998; and to U.S. Provisional Appln. Ser. No. 60/074,566, filed Feb. 12, 1998; and to U.S. Provisional Appln. Ser. No. 60/074,567, filed Feb. 12, 1998; and to U.S. Provisional Appln. Ser. No. 60/074,789, filed Feb. 19, 1998; and to U.S. Provisional Appln. Ser. No. 60/075,459, filed Feb. 19, 1998; and to U.S. Provisional Appln. Ser. No. 60/075,460, filed Feb. 19, 1998; and to U.S. Provisional Appln. Ser. No. 60/075,461, filed Feb. 19, 1998; and to U.S. Provisional Appln. Ser. No. 60/075,462, filed Feb. 19, 1998; and to U.S. Provisional Appln. Ser. No. 60/075,463, filed Feb. 19, 1998; and to U.S. Provisional Appln. Ser. No. 60/075,464, filed Feb. 19, 1998; and to U.S. Provisional Appln. Ser. No. 60/077,229, filed Mar. 9, 1998; and to U.S. Provisional Appln. Ser. No. 60/077,230, filed Mar. 9, 1998; and to U.S. Provisional Appln. Ser. No. 60/077,231, filed Mar. 9, 1998; and to U.S. Provisional Appln. Ser. No. 60/078,031, filed Mar. 16, 1998; and to U.S. Provisional Appln. Ser. No. 60/078,368, filed Mar. 18, 1998; and to U.S. Provisional Appln. Ser. No. 60/080,844, filed Apr. 7, 1998; and to U.S. Provisional Appln. Ser. No. 60/083,067, filed Apr. 27, 1998; and to U.S. Provisional Appln. Ser. No. 60/083,386, filed Apr. 29, 1998; and to U.S. Provisional Appln. Ser. No. 60/083,387, filed Apr. 29, 1998; and to U.S. Provisional Appln. Ser. No. 60/083,388, filed Apr. 29, 1998; and to U.S. Provisional Appln. Ser. No. 60/083,389, filed Apr. 29, 1998; and to U.S. Provisional Appln. Ser. No. 60/084,684, filed May 8, 1998; and to U.S. Provisional Appln. Ser. No. 60/085,222, filed May 13, 1998; and to U.S. Provisional Appln. Ser. No. 60/085,223, filed May 13, 1998; and to U.S. Provisional Appln. Ser. No. 60/085,224, filed May 13, 1998; and to U.S. Provisional Appln. Ser. No. 60/085,245, filed May 13, 1998; and to U.S. Provisional Appln. Ser. No. 60/086,183, filed May 21, 1998; and to U.S. Provisional Appln. Ser. No. 60/086,184, filed May 21, 1998; and to U.S. Provisional Appln. Ser. No. 60/086,185, filed May 21, 1998; and to U.S. Provisional Appln. Ser. No. 60/086,186, filed May 21, 1998; and to U.S. Provisional Appln. Ser. No. 60/086,187, filed May 21, 1998; and to U.S. Provisional Appln. Ser. No. 60/086,188, filed May 21, 1998; and to U.S. Provisional Appln. Ser. No. 60/086,339, filed May 21, 1998; and to U.S. Provisional Appln. Ser. No. 60/089,524, filed Jun. 16, 1998; and to U.S. Provisional Appln. Ser. No. 60/089,810, filed Jun. 18, 1998; and to U.S. Provisional Appln. Ser. No. 60/089,814, filed Jun. 18, 1998; and to U.S. Provisional Appln. Ser. No. 60/091,247, filed Jun. 30, 1998; and to U.S. Provisional Appln. Ser. No. 60/092,036, filed Jul. 8, 1998; and to U.S. Provisional Appln. Ser. No. 60/099,667, filed Sep. 9, 1998; and to U.S. Provisional Appln. Ser. No. 60/099,668, filed Sep. 9, 1998; and to U.S. Provisional Appln. Ser. No. 60/099,670, filed Sep. 9, 1998; and to U.S. Provisional Appln. Ser. No. 60/099,697, filed Sep. 9, 1998; and to U.S. Provisional Appln. Ser. No. 60/100,672, filed Sep. 16, 1998; and to U.S. Provisional Appln. Ser. No. 60/100,673, filed Sep. 16, 1998; and to U.S. Provisional Appln. Ser. No. 60/100,674, filed Sep. 16, 1998; and to U.S. Provisional Appln. Ser. No. 60/101,130, filed Sep. 21, 1998; and to U.S. Provisional Appln. Ser. No. 60/101,132, filed Sep. 21, 1998; and to U.S. Provisional Appln. Ser. No. 60/108,996, filed Nov. 18, 1998; and to U.S. Provisional Appln. Ser. No. 60/109,018, filed Nov. 18, 1998. U.S. application Ser. No. 09/552,086 is also a continuation-in-part of U.S. application Ser. No. 09/206,040, filed Dec. 4, 1998 (abandoned), which claims the benefit of U.S. Provisional Appln. Ser. No. 60/100,647, filed Sep. 16, 1998. U.S. application Ser. No. 09/552,086 is also a continuation-in-part of U.S. application Ser. No. 09/210,297, filed Dec. 8, 1998 (abandoned), which is a continuation-in-part of U.S. application Ser. No. 09/198,779, filed Nov. 24, 1998 (abandoned), which claims the benefit of U.S. Provisional Appln. Ser. No. 60/067,000, filed Nov. 24, 1997; and to U.S. Provisional Appln. Ser. No. 60/066,873, filed Nov. 25, 1997; and to U.S. Provisional Appln. Ser. No. 60/069,472, filed Dec. 9, 1997; and to U.S. Provisional Appln. Ser. No. 60/074,201, filed Feb. 10, 1998; and to U.S. Provisional Appln. Ser. No. 60/074,280, filed Feb. 10, 1998; and to U.S. Provisional Appln. Ser. No. 60/074,281, filed Feb. 10, 1998; and to U.S. Provisional Appln. Ser. No. 60/074,282, filed Feb. 10, 1998; and to U.S. Provisional Appln. Ser. No. 60/074,565, filed Feb. 12, 1998; and to U.S. Provisional Appln. Ser. No. 60/074,566, filed Feb. 12, 1998; and to U.S. Provisional Appln. Ser. No. 60/074,567, filed Feb. 12, 1998; and to U.S. Provisional Appln. Ser. No. 60/074,789, filed Feb. 19, 1998; and to U.S. Provisional Appln. Ser. No. 60/075,459, filed Feb. 19, 1998; and to U.S. Provisional Appln. Ser. No. 60/075,460, filed Feb. 19, 1998; and to U.S. Provisional Appln. Ser. No. 60/075,461, filed Feb. 19, 1998; and to U.S. Provisional Appln. Ser. No. 60/075,462, filed Feb. 19, 1998; and to U.S. Provisional Appln. Ser. No. 60/075,463, filed Feb. 19, 1998; and to U.S. Provisional Appln. Ser. No. 60/075,464, filed Feb. 19, 1998; and to U.S. Provisional Appln. Ser. No. 60/077,229, filed Mar. 9, 1998; and to U.S. Provisional Appln. Ser. No. 60/077,230, filed Mar. 9, 1998; and to U.S. Provisional Appln. Ser. No. 60/077,231, filed Mar. 9, 1998; and to U.S. Provisional Appln. Ser. No. 60/078,031, filed Mar. 16, 1998; and to U.S. Provisional Appln. Ser. No. 60/078,368, filed Mar. 18, 1998; and to U.S. Provisional Appln. Ser. No. 60/080,844, filed Apr. 7, 1998; and to U.S. Provisional Appln. Ser. No. 60/083,067, filed Apr. 27, 1998; and to U.S. Provisional Appln. Ser. No. 60/083,386, filed Apr. 29, 1998; and to U.S. Provisional Appln. Ser. No. 60/083,387, filed Apr. 29, 1998; and to U.S. Provisional Appln. Ser. No. 60/083,388, filed Apr. 29, 1998; and to U.S. Provisional Appln. Ser. No. 60/083,389, filed Apr. 29, 1998; and to U.S. Provisional Appln. Ser. No. 60/084,684, filed May 8, 1998; and to U.S. Provisional Appln. Ser. No. 60/085,222, filed May 13, 1998; and to U.S. Provisional Appln. Ser. No. 60/085,223, filed May 13, 1998; and to U.S. Provisional Appln. Ser. No. 60/085,224, filed May 13, 1998; and to U.S. Provisional Appln. Ser. No. 60/085,245, filed May 13, 1998; and to U.S. Provisional Appln. Ser. No. 60/086,183, filed May 21, 1998; and to U.S. Provisional Appln. Ser. No. 60/086,184, filed May 21, 1998; and to U.S. Provisional Appln. Ser. No. 60/086,185, filed May 21, 1998; and to U.S. Provisional Appln. Ser. No. 60/086,186, filed May 21, 1998; and to U.S. Provisional Appln. Ser. No. 60/086,187, filed May 21, 1998; and to U.S. Provisional Appln. Ser. No. 60/086,188, filed May 21, 1998; and to U.S. Provisional Appln. Ser. No. 60/086,339, filed May 21, 1998; and to U.S. Provisional Appln. Ser. No. 60/089,524, filed Jun. 16, 1998; and to U.S. Provisional Appln. Ser. No. 60/089,810, filed Jun. 18, 1998; and to U.S. Provisional Appln. Ser. No. 60/089,814, filed Jun. 18, 1998; and to U.S. Provisional Appln. Ser. No. 60/091,247, filed Jun. 30, 1998; and to U.S. Provisional Appln. Ser. No. 60/092,036, filed Jul. 8, 1998; and to U.S. Provisional Appln. Ser. No. 60/099,667, filed Sep. 9, 1998; and to U.S. Provisional Appln. Ser. No. 60/099,668, filed Sep. 9, 1998; and to U.S. Provisional Appln. Ser. No. 60/099,670, filed Sep. 9, 1998; and to U.S. Provisional Appln. Ser. No. 60/099,697, filed Sep. 9, 1998; and to U.S. Provisional Appln. Ser. No. 60/100,672, filed Sep. 16, 1998; and to U.S. Provisional Appln. Ser. No. 60/100,673, filed Sep. 16, 1998; and to U.S. Provisional Appln. Ser. No. 60/100,674, filed Sep. 16, 1998; and to U.S. Provisional Appln. Ser. No. 60/101,130, filed Sep. 21, 1998; and to U.S. Provisional Appln. Ser. No. 60/101,132, filed Sep. 21, 1998; and to U.S. Provisional Appln. Ser. No. 60/108,996, filed Nov. 18, 1998; and to U.S. Provisional Appln. Ser. No. 60/109,018, filed Nov. 18, 1998. U.S. application Ser. No. 09/552,086 is also a continuation-in-part of U.S. application Ser. No. 09/244,000, filed Feb. 8, 1999 (abandoned), which is a continuation-in-part of U.S. application Ser. No. 09/198,779, filed Nov. 24, 1998 (abandoned), which claims the benefit of U.S. Provisional Appln. Ser. No. 60/067,000, filed Nov. 24, 1997; and to U.S. Provisional Appln. Ser. No. 60/066,873, filed Nov. 25, 1997; and to U.S. Provisional Appln. Ser. No. 60/069,472, filed Dec. 9, 1997; and to U.S. Provisional Appln. Ser. No. 60/074,201, filed Feb. 10, 1998; and to U.S. Provisional Appln. Ser. No. 60/074,280, filed Feb. 10, 1998; and to U.S. Provisional Appln. Ser. No. 60/074,281, filed Feb. 10, 1998; and to U.S. Provisional Appln. Ser. No. 60/074,282, filed Feb. 10, 1998; and to U.S. Provisional Appln. Ser. No. 60/074,565, filed Feb. 12, 1998; and to U.S. Provisional Appln. Ser. No. 60/074,566, filed Feb. 12, 1998; and to U.S. Provisional Appln. Ser. No. 60/074,567, filed Feb. 12, 1998; and to U.S. Provisional Appln. Ser. No. 60/074,789, filed Feb. 19, 1998; and to U.S. Provisional Appln. Ser. No. 60/075,459, filed Feb. 19, 1998; and to U.S. Provisional Appln. Ser. No. 60/075,460, filed Feb. 19, 1998; and to U.S. Provisional Appln. Ser. No. 60/075,461, filed Feb. 19, 1998; and to U.S. Provisional Appln. Ser. No. 60/075,462, filed Feb. 19, 1998; and to U.S. Provisional Appln. Ser. No. 60/075,463, filed Feb. 19, 1998; and to U.S. Provisional Appln. Ser. No. 60/075,464, filed Feb. 19, 1998; and to U.S. Provisional Appln. Ser. No. 60/077,229, filed Mar. 9, 1998; and to U.S. Provisional Appln. Ser. No. 60/077,230, filed Mar. 9, 1998; and to U.S. Provisional Appln. Ser. No. 60/077,231, filed Mar. 9, 1998; and to U.S. Provisional Appln. Ser. No. 60/078,031, filed Mar. 16, 1998; and to U.S. Provisional Appln. Ser. No. 60/078,368, filed Mar. 18, 1998; and to U.S. Provisional Appln. Ser. No. 60/080,844, filed Apr. 7, 1998; and to U.S. Provisional Appln. Ser. No. 60/083,067, filed Apr. 27, 1998; and to U.S. Provisional Appln. Ser. No. 60/083,386, filed Apr. 29, 1998; and to U.S. Provisional Appln. Ser. No. 60/083,387, filed Apr. 29, 1998; and to U.S. Provisional Appln. Ser. No. 60/083,388, filed Apr. 29, 1998; and to U.S. Provisional Appln. Ser. No. 60/083,389, filed Apr. 29, 1998; and to U.S. Provisional Appln. Ser. No. 60/084,684, filed May 8, 1998; and to U.S. Provisional Appln. Ser. No. 60/085,222, filed May 13, 1998; and to U.S. Provisional Appln. Ser. No. 60/085,223, filed May 13, 1998; and to U.S. Provisional Appln. Ser. No. 60/085,224, filed May 13, 1998; and to U.S. Provisional Appln. Ser. No. 60/085,245, filed May 13, 1998; and to U.S. Provisional Appln. Ser. No. 60/086,183, filed May 21, 1998; and to U.S. Provisional Appln. Ser. No. 60/086,184, filed May 21, 1998; and to U.S. Provisional Appln. Ser. No. 60/086,185, filed May 21, 1998; and to U.S. Provisional Appln. Ser. No. 60/086,186, filed May 21, 1998; and to U.S. Provisional Appln. Ser. No. 60/086,187, filed May 21, 1998; and to U.S. Provisional Appln. Ser. No. 60/086,188, filed May 21, 1998; and to U.S. Provisional Appln. Ser. No. 60/086,339, filed May 21, 1998; and to U.S. Provisional Appln. Ser. No. 60/089,524, filed Jun. 16, 1998; and to U.S. Provisional Appln. Ser. No. 60/089,810, filed Jun. 18, 1998; and to U.S. Provisional Appln. Ser. No. 60/089,814, filed Jun. 18, 1998; and to U.S. Provisional Appln. Ser. No. 60/091,247, filed Jun. 30, 1998; and to U.S. Provisional Appln. Ser. No. 60/092,036, filed Jul. 8, 1998; and to U.S. Provisional Appln. Ser. No. 60/099,667, filed Sep. 9, 1998; and to U.S. Provisional Appln. Ser. No. 60/099,668, filed Sep. 9, 1998, and to U.S. Provisional Appln. Ser. No. 60/099,670, filed Sep. 9, 1998; and to U.S. Provisional Appln. Ser. No. 60/099,697, filed Sep. 9, 1998; and to U.S. Provisional Appln. Ser. No. 60/100,672, filed Sep. 16, 1998; and to U.S. Provisional Appln. Ser. No. 60/100,673, filed Sep. 16, 1998; and to U.S. Provisional Appln. Ser. No. 60/100,674, filed Sep. 16, 1998; and to U.S. Provisional Appln. Ser. No. 60/101,130, filed Sep. 21, 1998; and to U.S. Provisional Appln. Ser. No. 60/101,132, filed Sep. 21, 1998; and to U.S. Provisional Appln. Ser. No. 60/108,996, filed Nov. 18, 1998; and to U.S. Provisional Appln. Ser. No. 60/109,018, filed Nov. 18, 1998. U.S. application Ser. No. 09/244,000 also claims the benefit of U.S. Provisional Appln. Ser. No. 60/074,201, filed Feb. 10, 1998; and to U.S. Provisional Appln. Ser. No. 60/074,280, filed Feb. 10, 1998; and to U.S. Provisional Appln. Ser. No. 60/074,281, filed Feb. 10, 1998; and to U.S. Provisional Appln. Ser. No. 60/074,565, filed Feb. 12, 1998; and to U.S. Provisional Appln. Ser. No. 60/074,566, filed Feb. 12, 1998; and to U.S. Provisional Appln. Ser. No. 60/074,567, filed Feb. 12, 1998; and to U.S. Provisional Appln. Ser. No. 60/074,789, filed Feb. 19, 1998; and to U.S. Provisional Appln. Ser. No. 60/075,459, filed Feb. 19, 1998; and to U.S. Provisional Appln. Ser. No. 60/075,460, filed Feb. 19, 1998; and to U.S. Provisional Appln. Ser. No. 60/075,461, filed Feb. 19, 1998; and to U.S. Provisional Appln. Ser. No. 60/075,463, filed Feb. 19, 1998; and to U.S. Provisional Appln. Ser. No. 60/075,464, filed Feb. 19, 1998; and to U.S. Provisional Appln. Ser. No. 60/086,183, filed May 21, 1998; and to U.S. Provisional Appln. Ser. No. 60/086,188, filed May 21, 1998. U.S. application Ser. No. 09/552,086 is also a continuation-in-part of U.S. application Ser. No. 09/263,191, filed Mar. 5, 1999 (abandoned). U.S. application Ser. No. 09/552,086 is also a continuation-in-part of U.S. application Ser. No. 09/283,466, filed Apr. 2, 1999 (abandoned). U.S. application Ser. No. 09/552,086 is also a continuation-in-part of U.S. application Ser. No. 09/306,349, filed May 10, 1999 (abandoned). U.S. application Ser. No. 09/552,086 is also a continuation-in-part of U.S. application Ser. No. 09/391,630, filed Sep. 8, 1999 (abandoned). U.S. application Ser. No. 09/552,086 is also a continuation-in-part of U.S. application Ser. No. 09/440,687, filed Nov. 16, 1999 (abandoned). U.S. application Ser. No. 09/552,086 is also a continuation-in-part of U.S. application Ser. No. 09/199,129, filed Nov. 24, 1998, which is a continuation-in-part of U.S. application Ser. No. 09/198,779, filed Nov. 24, 1998 (abandoned), which claims the benefit of U.S. Provisional Appln. Ser. No. 60/067,000, filed Nov. 24, 1997; and to U.S. Provisional Appln. Ser. No. 60/066,873, filed Nov. 25, 1997; and to U.S. Provisional Appln. Ser. No. 60/069,472, filed Dec. 9, 1997; and to U.S. Provisional Appln. Ser. No. 60/074,201, filed Feb. 10, 1998; and to U.S. Provisional Appln. Ser. No. 60/074,280, filed Feb. 10, 1998; and to U.S. Provisional Appln. Ser. No. 60/074,281, filed Feb. 10, 1998; and to U.S. Provisional Appln. Ser. No. 60/074,282, filed Feb. 10, 1998; and to U.S. Provisional Appln. Ser. No. 60/074,565, filed Feb. 12, 1998; and to U.S. Provisional Appln. Ser. No. 60/074,566, filed Feb. 12, 1998; and to U.S. Provisional Appln. Ser. No. 60/074,567, filed Feb. 12, 1998; and to U.S. Provisional Appln. Ser. No. 60/074,789, filed Feb. 19, 1998; and to U.S. Provisional Appln. Ser. No. 60/075,459, filed Feb. 19, 1998; and to U.S. Provisional Appln. Ser. No. 60/075,460, filed Feb. 19, 1998; and to U.S. Provisional Appln. Ser. No. 60/075,461, filed Feb. 19, 1998; and to U.S. Provisional Appln. Ser. No. 60/075,462, filed Feb. 19, 1998; and to U.S. Provisional Appln. Ser. No. 60/075,463, filed Feb. 19, 1998; and to U.S. Provisional Appln. Ser. No. 60/075,464, filed Feb. 19, 1998; and to U.S. Provisional Appln. Ser. No. 60/077,229, filed Mar. 9, 1998; and to U.S. Provisional Appln. Ser. No. 60/077,230, filed Mar. 9, 1998; and to U.S. Provisional Appln. Ser. No. 60/077,231, filed Mar. 9, 1998; and to U.S. Provisional Appln. Ser. No. 60/078,031, filed Mar. 16, 1998; and to U.S. Provisional Appln. Ser. No. 60/078,368, filed Mar. 18, 1998; and to U.S. Provisional Appln. Ser. No. 60/080,844, filed Apr. 7, 1998; and to U.S. Provisional Appln. Ser. No. 60/083,067, filed Apr. 27, 1998; and to U.S. Provisional Appln. Ser. No. 60/083,386, filed Apr. 29, 1998; and to U.S. Provisional Appln. Ser. No. 60/083,387, filed Apr. 29, 1998; and to U.S. Provisional Appln. Ser. No. 60/083,388, filed Apr. 29, 1998; and to U.S. Provisional Appln. Ser. No. 60/083,389, filed Apr. 29, 1998; and to U.S. Provisional Appln. Ser. No. 60/084,684, filed May 8, 1998; and to U.S. Provisional Appln. Ser. No. 60/085,222, filed May 13, 1998; and to U.S. Provisional Appln. Ser. No. 60/085,223, filed May 13, 1998; and to U.S. Provisional Appln. Ser. No. 60/085,224, filed May 13, 1998; and to U.S. Provisional Appln. Ser. No. 60/085,245, filed May 13, 1998; and to U.S. Provisional Appln. Ser. No. 60/086,183, filed May 21, 1998; and to U.S. Provisional Appln. Ser. No. 60/086,184, filed May 21, 1998; and to U.S. Provisional Appln. Ser. No. 60/086,185, filed May 21, 1998; and to U.S. Provisional Appln. Ser. No. 60/086,186, filed May 21, 1998; and to U.S. Provisional Appln. Ser. No. 60/086,187, filed May 21, 1998; and to U.S. Provisional Appln. Ser. No. 60/086,188, filed May 21, 1998; and to U.S. Provisional Appln. Ser. No. 60/086,339, filed May 21, 1998; and to U.S. Provisional Appln. Ser. No. 60/089,524, filed Jun. 16, 1998; and to U.S. Provisional Appln. Ser. No. 60/089,810, filed Jun. 18, 1998; and to U.S. Provisional Appln. Ser. No. 60/089,814, filed Jun. 18, 1998; and to U.S. Provisional Appln. Ser. No. 60/091,247, filed Jun. 30, 1998; and to U.S. Provisional Appln. Ser. No. 60/092,036, filed Jul. 8, 1998; and to U.S. Provisional Appln. Ser. No. 60/099,667, filed Sep. 9, 1998; and to U.S. Provisional Appln. Ser. No. 60/099,668, filed Sep. 9, 1998; and to U.S. Provisional Appln. Ser. No. 60/099,670, filed Sep. 9, 1998; and to U.S. Provisional Appln. Ser. No. 60/099,697, filed Sep. 9, 1998; and to U.S. Provisional Appln. Ser. No. 60/100,672, filed Sep. 16, 1998; and to U.S. Provisional Appln. Ser. No. 60/100,673, filed Sep. 16, 1998; and to U.S. Provisional Appln. Ser. No. 60/100,674, filed Sep. 16, 1998; and to U.S. Provisional Appln. Ser. No. 60/101,130, filed Sep. 21, 1998; and to U.S. Provisional Appln. Ser. No. 60/101,132, filed Sep. 21, 1998; and to U.S. Provisional Appln. Ser. No. 60/108,996, filed Nov. 18, 1998; and to U.S. Provisional Appln. Ser. No. 60/109,018, filed Nov. 18, 1998. U.S. application Ser. No. 09/199,129 also claims the benefit of U.S. Provisional Appln. Ser. No. 60/067,000, filed Nov. 24, 1997; and to U.S. Provisional Appln. Ser. No. 60/069,472, filed Dec. 9, 1997; and to U.S. Provisional Appln. Ser. No. 60/074,201, filed Feb. 10, 1998; and to U.S. Provisional Appln. Ser. No. 60/074,280, filed Feb. 10, 1998; and to U.S. Provisional Appln. Ser. No. 60/074,281, filed Feb. 10, 1998; and to U.S. Provisional Appln. Ser. No. 60/074,282, filed Feb. 10, 1998; and to U.S. Provisional Appln. Ser. No. 60/074,565, filed Feb. 12, 1998; and to U.S. Provisional Appln. Ser. No. 60/074,566, filed Feb. 12, 1998; and to U.S. Provisional Appln. Ser. No. 60/074,567, filed Feb. 12, 1998; and to U.S. Provisional Appln. Ser. No. 60/074,789, filed Feb. 19, 1998; and to U.S. Provisional Appln. Ser. No. 60/075,459, filed Feb. 19, 1998; and to U.S. Provisional Appln. Ser. No. 60/075,460, filed Feb. 19, 1998; and to U.S. Provisional Appln. Ser. No. 60/075,461, filed Feb. 19, 1998; and to U.S. Provisional Appln. Ser. No. 60/075,462, filed Feb. 19, 1998; and to U.S. Provisional Appln. Ser. No. 60/075,463, filed Feb. 19, 1998; and to U.S. Provisional Appln. Ser. No. 60/075,464, filed Feb. 19, 1998; and to U.S. Provisional Appln. Ser. No. 60/077,229, filed Mar. 9, 1998; and to U.S. Provisional Appln. Ser. No. 60/077,230, filed Mar. 9, 1998; and to U.S. Provisional Appln. Ser. No. 60/077,231, filed Mar. 9, 1998; and to U.S. Provisional Appln. Ser. No. 60/078,368, filed Mar. 18, 1998; and to U.S. Provisional Appln. Ser. No. 60/080,844, filed Apr. 7, 1998; and to U.S. Provisional Appln. Ser. No. 60/083,067, filed Apr. 27, 1998; and to U.S. Provisional Appln. Ser. No. 60/083,386, filed Apr. 29, 1998; and to U.S. Provisional Appln. Ser. No. 60/083,387, filed Apr. 29, 1998; and to U.S. Provisional Appln. Ser. No. 60/083,388, filed Apr. 29, 1998; and to U.S. Provisional Appln. Ser. No. 60/083,389, filed Apr. 29, 1998; and to U.S. Provisional Appln. Ser. No. 60/085,222, filed May 13, 1998; and to U.S. Provisional Appln. Ser. No. 60/085,223, filed May 13, 1998; and to U.S. Provisional Appln. Ser. No. 60/085,224, filed May 13, 1998; and to U.S. Provisional Appln. Ser. No. 60/086,183, filed May 21, 1998; and to U.S. Provisional Appln. Ser. No. 60/086,184, filed May 21, 1998; and to U.S. Provisional Appln. Ser. No. 60/086,185, filed May 21, 1998; and to U.S. Provisional Appln. Ser. No. 60/086,186, filed May 21, 1998; and to U.S. Provisional Appln. Ser. No. 60/086,187, filed May 21, 1998; and to U.S. Provisional Appln. Ser. No. 60/086,188, filed May 21, 1998; and to U.S. Provisional Appln. Ser. No. 60/089,524, filed Jun. 16, 1998; and to U.S. Provisional Appln. Ser. No. 60/089,793, filed Jun. 18, 1998; and to U.S. Provisional Appln. Ser. No. 60/089,810, filed Jun. 18, 1998; and to U.S. Provisional Appln. Ser. No. 60/089,814, filed Jun. 18, 1998; and to U.S. Provisional Appln. Ser. No. 60/099,668, filed Sep. 9, 1998; and to U.S. Provisional Appln. Ser. No. 60/099,670, filed Sep. 9, 1998; and to U.S. Provisional Appln. Ser. No. 60/099,697, filed Sep. 9, 1998; and to U.S. Provisional Appln. Ser. No. 60/100,672, filed Sep. 16, 1998; and to U.S. Provisional Appln. Ser. No. 60/100,673, filed Sep. 16, 1998; and to U.S. Provisional Appln. Ser. No. 60/100,674, filed Sep. 16, 1998; and to U.S. Provisional Appln. Ser. No. 60/101,130, filed Sep. 21, 1998; and to U.S. Provisional Appln. Ser. No. 60/101,131, filed Sep. 21, 1998; and to U.S. Provisional Appln. Ser. No. 60/101,132, filed September 21, and to U.S. Provisional Appln. Ser. No. 60/108,996, filed Nov. 18, 1998; and to U.S. Provisional Appln. Ser. No. 60/109,018, filed Nov. 18, 1998. U.S. application Ser. No. 09/552,086 is also a continuation-in-part of U.S. application Ser. No. 09/333,535, filed Jun. 14, 1999, which is a continuation-in-part of U.S. application Ser. No. 09/198,779, filed Nov. 24, 1998 (abandoned), which claims the benefit of U.S. Provisional Appln. Ser. No. 60/067,000, filed Nov. 24, 1997; and to U.S. Provisional Appln. Ser. No. 60/066,873, filed Nov. 25, 1997; and to U.S. Provisional Appln. Ser. No. 60/069,472, filed Dec. 9, 1997; and to U.S. Provisional Appln. Ser. No. 60/074,201, filed Feb. 10, 1998; and to U.S. Provisional Appln. Ser. No. 60/074,280, filed Feb. 10, 1998; and to U.S. Provisional Appln. Ser. No. 60/074,281, filed Feb. 10, 1998; and to U.S. Provisional Appln. Ser. No. 60/074,282, filed Feb. 10, 1998; and to U.S. Provisional Appln. Ser. No. 60/074,565, filed Feb. 12, 1998; and to U.S. Provisional Appln. Ser. No. 60/074,566, filed Feb. 12, 1998; and to U.S. Provisional Appln. Ser. No. 60/074,567, filed Feb. 12, 1998; and to U.S. Provisional Appln. Ser. No. 60/074,789, filed Feb. 19, 1998; and to U.S. Provisional Appln. Ser. No. 60/075,459, filed Feb. 19, 1998; and to U.S. Provisional Appln. Ser. No. 60/075,460, filed Feb. 19, 1998; and to U.S. Provisional Appln. Ser. No. 60/075,461, filed Feb. 19, 1998; and to U.S. Provisional Appln. Ser. No. 60/075,462, filed Feb. 19, 1998; and to U.S. Provisional Appln. Ser. No. 60/075,463, filed Feb. 19, 1998; and to U.S. Provisional Appln. Ser. No. 60/075,464, filed Feb. 19, 1998; and to U.S. Provisional Appln. Ser. No. 60/077,229, filed Mar. 9, 1998; and to U.S. Provisional Appln. Ser. No. 60/077,230, filed Mar. 9, 1998; and to U.S. Provisional Appln. Ser. No. 60/077,231, filed Mar. 9, 1998; and to U.S. Provisional Appln. Ser. No. 60/078,031, filed Mar. 16, 1998; and to U.S. Provisional Appln. Ser. No. 60/078,368, filed Mar. 18, 1998; and to U.S. Provisional Appln. Ser. No. 60/080,844, filed Apr. 7, 1998; and to U.S. Provisional Appln. Ser. No. 60/083,067, filed Apr. 27, 1998; and to U.S. Provisional Appln. Ser. No. 60/083,386, filed Apr. 29, 1998; and to U.S. Provisional Appln. Ser. No. 60/083,387, filed Apr. 29, 1998; and to U.S. Provisional Appln. Ser. No. 60/083,388, filed Apr. 29, 1998; and to U.S. Provisional Appln. Ser. No. 60/083,389, filed Apr. 29, 1998; and to U.S. Provisional Appln. Ser. No. 60/084,684, filed May 8, 1998; and to U.S. Provisional Appln. Ser. No. 60/085,222, filed May 13, 1998; and to U.S. Provisional Appln. Ser. No. 60/085,223, filed May 13, 1998; and to U.S. Provisional Appln. Ser. No. 60/085,224, filed May 13, 1998; and to U.S. Provisional Appln. Ser. No. 60/085,245, filed May 13, 1998; and to U.S. Provisional Appln. Ser. No. 60/086,183, filed May 21, 1998; and to U.S. Provisional Appln. Ser. No. 60/086,184, filed May 21, 1998; and to U.S. Provisional Appln. Ser. No. 60/086,185, filed May 21, 1998; and to U.S. Provisional Appln. Ser. No. 60/086,186, filed May 21, 1998; and to U.S. Provisional Appln. Ser. No. 60/086,187, filed May 21, 1998; and to U.S. Provisional Appln. Ser. No. 60/086,188, filed May 21, 1998; and to U.S. Provisional Appln. Ser. No. 60/086,339, filed May 21, 1998; and to U.S. Provisional Appln. Ser. No. 60/089,524, filed Jun. 16, 1998; and to U.S. Provisional Appln. Ser. No. 60/089,810, filed Jun. 18, 1998; and to U.S. Provisional Appln. Ser. No. 60/089,814, filed Jun. 18, 1998; and to U.S. Provisional Appln. Ser. No. 60/091,247, filed Jun. 30, 1998; and to U.S. Provisional Appln. Ser. No. 60/092,036, filed Jul. 8, 1998; and to U.S. Provisional Appln. Ser. No. 60/099,667, filed Sep. 9, 1998; and to U.S. Provisional Appln. Ser. No. 60/099,668, filed Sep. 9, 1998; and to U.S. Provisional Appln. Ser. No. 60/099,670, filed Sep. 9, 1998; and to U.S. Provisional Appln. Ser. No. 60/099,697, filed Sep. 9, 1998; and to U.S. Provisional Appln. Ser. No. 60/100,672, filed Sep. 16, 1998; and to U.S. Provisional Appln. Ser. No. 60/100,673, filed Sep. 16, 1998; and to U.S. Provisional Appln. Ser. No. 60/100,674, filed Sep. 16, 1998; and to U.S. Provisional Appln. Ser. No. 60/101,130, filed Sep. 21, 1998; and to U.S. Provisional Appln. Ser. No. 60/101,132, filed Sep. 21, 1998; and to U.S. Provisional Appln. Ser. No. 60/108,996, filed Nov. 18, 1998; and to U.S. Provisional Appln. Ser. No. 60/109,018, filed Nov. 18, 1998. U.S. application Ser. No. 09/333,535 is also a continuation-in-part of U.S. application Ser. No. 09/206,040, filed Dec. 4, 1998 (abandoned), which claims the benefit of U.S. Provisional Appln. Ser. No. 60/100,647, filed Sep. 16, 1998. U.S. application Ser. No. 09/333,535 is also a continuation-in-part of U.S. application Ser. No. 09/210,297, filed Dec. 8, 1998 (abandoned), which is a continuation-in-part of U.S. application Ser. No. 09/198,779, filed Nov. 24, 1998 (abandoned), which claims the benefit of U.S. Provisional Appln. Ser. No. 60/067,000, filed Nov. 24, 1997; and to U.S. Provisional Appln. Ser. No. 60/066,873, filed Nov. 25, 1997; and to U.S. Provisional Appln. Ser. No. 60/069,472, filed Dec. 9, 1997; and to U.S. Provisional Appln. Ser. No. 60/074,201, filed Feb. 10, 1998; and to U.S. Provisional Appln. Ser. No. 60/074,280, filed Feb. 10, 1998; and to U.S. Provisional Appln. Ser. No. 60/074,281, filed Feb. 10, 1998; and to U.S. Provisional Appln. Ser. No. 60/074,282, filed Feb. 10, 1998; and to U.S. Provisional Appln. Ser. No. 60/074,565, filed Feb. 12, 1998; and to U.S. Provisional Appln. Ser. No. 60/074,566, filed Feb. 12, 1998; and to U.S. Provisional Appln. Ser. No. 60/074,567, filed Feb. 12, 1998; and to U.S. Provisional Appln. Ser. No. 60/074,789, filed Feb. 19, 1998; and to U.S. Provisional Appln. Ser. No. 60/075,459, filed Feb. 19, 1998; and to U.S. Provisional Appln. Ser. No. 60/075,460, filed Feb. 19, 1998; and to U.S. Provisional Appln. Ser. No. 60/075,461, filed Feb. 19, 1998; and to U.S. Provisional Appln. Ser. No. 60/075,462, filed Feb. 19, 1998; and to U.S. Provisional Appln. Ser. No. 60/075,463, filed Feb. 19, 1998; and to U.S. Provisional Appln. Ser. No. 60/075,464, filed Feb. 19, 1998; and to U.S. Provisional Appln. Ser. No. 60/077,229, filed Mar. 9, 1998; and to U.S. Provisional Appln. Ser. No. 60/077,230, filed Mar. 9, 1998; and to U.S. Provisional Appln. Ser. No. 60/077,231, filed Mar. 9, 1998; and to U.S. Provisional Appln. Ser. No. 60/078,031, filed Mar. 16, 1998; and to U.S. Provisional Appln. Ser. No. 60/078,368, filed Mar. 18, 1998; and to U.S. Provisional Appln. Ser. No. 60/080,844, filed Apr. 7, 1998; and to U.S. Provisional Appln. Ser. No. 60/083,067, filed Apr. 27, 1998; and to U.S. Provisional Appln. Ser. No. 60/083,386, filed Apr. 29, 1998; and to U.S. Provisional Appln. Ser. No. 60/083,387, filed Apr. 29, 1998; and to U.S. Provisional Appln. Ser. No. 60/083,388, filed Apr. 29, 1998; and to U.S. Provisional Appln. Ser. No. 60/083,389, filed Apr. 29, 1998; and to U.S. Provisional Appln. Ser. No. 60/084,684, filed May 8, 1998; and to U.S. Provisional Appln. Ser. No. 60/085,222, filed May 13, 1998; and to U.S. Provisional Appln. Ser. No. 60/085,223, filed May 13, 1998; and to U.S. Provisional Appln. Ser. No. 60/085,224, filed May 13, 1998; and to U.S. Provisional Appln. Ser. No. 60/085,245, filed May 13, 1998; and to U.S. Provisional Appln. Ser. No. 60/086,183, filed May 21, 1998; and to U.S. Provisional Appln. Ser. No. 60/086,184, filed May 21, 1998; and to U.S. Provisional Appln. Ser. No. 60/086,185, filed May 21, 1998; and to U.S. Provisional Appln. Ser. No. 60/086,186, filed May 21, 1998; and to U.S. Provisional Appln. Ser. No. 60/086,187, filed May 21, 1998; and to U.S. Provisional Appln. Ser. No. 60/086,188, filed May 21, 1998; and to U.S. Provisional Appln. Ser. No. 60/086,339, filed May 21, 1998; and to U.S. Provisional Appln. Ser. No. 60/089,524, filed Jun. 16, 1998; and to U.S. Provisional Appln. Ser. No. 60/089,810, filed Jun. 18, 1998; and to U.S. Provisional Appln. Ser. No. 60/089,814, filed Jun. 18, 1998; and to U.S. Provisional Appln. Ser. No. 60/091,247, filed Jun. 30, 1998; and to U.S. Provisional Appln. Ser. No. 60/092,036, filed Jul. 8, 1998; and to U.S. Provisional Appln. Ser. No. 60/099,667, filed Sep. 9, 1998; and to U.S. Provisional Appln. Ser. No. 60/099,668, filed Sep. 9, 1998; and to U.S. Provisional Appln. Ser. No. 60/099,670, filed Sep. 9, 1998; and to U.S. Provisional Appln. Ser. No. 60/099,697, filed Sep. 9, 1998; and to U.S. Provisional Appln. Ser. No. 60/100,672, filed Sep. 16, 1998; and to U.S. Provisional Appln. Ser. No. 60/100,673, filed Sep. 16, 1998; and to U.S. Provisional Appln. Ser. No. 60/100,674, filed Sep. 16, 1998; and to U.S. Provisional Appln. Ser. No. 60/101,130, filed Sep. 21, 1998; and to U.S. Provisional Appln. Ser. No. 60/101,132, filed Sep. 21, 1998; and to U.S. Provisional Appln. Ser. No. 60/108,996, filed Nov. 18, 1998; and to U.S. Provisional Appln. Ser. No. 60/109,018, filed Nov. 18, 1998. U.S. application Ser. No. 09/333,535 is also a continuation-in-part of U.S. application Ser. No. 09/244,000, filed Feb. 8, 1999 (abandoned), which is a continuation-in-part of U.S. application Ser. No. 09/198,779, filed Nov. 24, 1998 (abandoned), which claims the benefit of U.S. Provisional Appln. Ser. No. 60/067,000, filed Nov. 24, 1997; and to U.S. Provisional Appln. Ser. No. 60/066,873, filed Nov. 25, 1997; and to U.S. Provisional Appln. Ser. No. 60/069,472, filed Dec. 9, 1997; and to U.S. Provisional Appln. Ser. No. 60/074,201, filed Feb. 10, 1998; and to U.S. Provisional Appln. Ser. No. 60/074,280, filed Feb. 10, 1998; and to U.S. Provisional Appln. Ser. No. 60/074,281, filed Feb. 10, 1998; and to U.S. Provisional Appln. Ser. No. 60/074,282, filed Feb. 10, 1998; and to U.S. Provisional Appln. Ser. No. 60/074,565, filed Feb. 12, 1998; and to U.S. Provisional Appln. Ser. No. 60/074,566, filed Feb. 12, 1998; and to U.S. Provisional Appln. Ser. No. 60/074,567, filed Feb. 12, 1998; and to U.S. Provisional Appln. Ser. No. 60/074,789, filed Feb. 19, 1998; and to U.S. Provisional Appln. Ser. No. 60/075,459, filed Feb. 19, 1998; and to U.S. Provisional Appln. Ser. No. 60/075,460, filed Feb. 19, 1998; and to U.S. Provisional Appln. Ser. No. 60/075,461, filed Feb. 19, 1998; and to U.S. Provisional Appln. Ser. No. 60/075,462, filed Feb. 19, 1998; and to U.S. Provisional Appln. Ser. No. 60/075,463, filed Feb. 19, 1998; and to U.S. Provisional Appln. Ser. No. 60/075,464, filed Feb. 19, 1998; and to U.S. Provisional Appln. Ser. No. 60/077,229, filed Mar. 9, 1998; and to U.S. Provisional Appln. Ser. No. 60/077,230, filed Mar. 9, 1998; and to U.S. Provisional Appln. Ser. No. 60/077,231, filed Mar. 9, 1998; and to U.S. Provisional Appln. Ser. No. 60/078,031, filed Mar. 16, 1998; and to U.S. Provisional Appln. Ser. No. 60/078,368, filed Mar. 18, 1998; and to U.S. Provisional Appln. Ser. No. 60/080,844, filed Apr. 7, 1998; and to U.S. Provisional Appln. Ser. No. 60/083,067, filed Apr. 27, 1998; and to U.S. Provisional Appln. Ser. No. 60/083,386, filed Apr. 29, 1998; and to U.S. Provisional Appln. Ser. No. 60/083,387, filed Apr. 29, 1998; and to U.S. Provisional Appln. Ser. No. 60/083,388, filed Apr. 29, 1998; and to U.S. Provisional Appln. Ser. No. 60/083,389, filed Apr. 29, 1998; and to U.S. Provisional Appln. Ser. No. 60/084,684, filed May 8, 1998; and to U.S. Provisional Appln. Ser. No. 60/085,222, filed May 13, 1998; and to U.S. Provisional Appln. Ser. No. 60/085,223, filed May 13, 1998; and to U.S. Provisional Appln. Ser. No. 60/085,224, filed May 13, 1998; and to U.S. Provisional Appln. Ser. No. 60/085,245, filed May 13, 1998; and to U.S. Provisional Appln. Ser. No. 60/086,183, filed May 21, 1998; and to U.S. Provisional Appln. Ser. No. 60/086,184, filed May 21, 1998; and to U.S. Provisional Appln. Ser. No. 60/086,185, filed May 21, 1998; and to U.S. Provisional Appln. Ser. No. 60/086,186, filed May 21, 1998; and to U.S. Provisional Appln. Ser. No. 60/086,187, filed May 21, 1998; and to U.S. Provisional Appln. Ser. No. 60/086,188, filed May 21, 1998; and to U.S. Provisional Appln. Ser. No. 60/086,339, filed May 21, 1998; and to U.S. Provisional Appln. Ser. No. 60/089,524, filed Jun. 16, 1998; and to U.S. Provisional Appln. Ser. No. 60/089,810, filed Jun. 18, 1998; and to U.S. Provisional Appln. Ser. No. 60/089,814, filed Jun. 18, 1998; and to U.S. Provisional Appln. Ser. No. 60/091,247, filed Jun. 30, 1998; and to U.S. Provisional Appln. Ser. No. 60/092,036, filed Jul. 8, 1998; and to U.S. Provisional Appln. Ser. No. 60/099,667, filed Sep. 9, 1998; and to U.S. Provisional Appln. Ser. No. 60/099,668, filed Sep. 9, 1998; and to U.S. Provisional Appln. Ser. No. 60/099,670, filed Sep. 9, 1998; and to U.S. Provisional Appln. Ser. No. 60/099,697, filed Sep. 9, 1998; and to U.S. Provisional Appln. Ser. No. 60/100,672, filed Sep. 16, 1998; and to U.S. Provisional Appln. Ser. No. 60/100,673, filed Sep. 16, 1998; and to U.S. Provisional Appln. Ser. No. 60/100,674, filed Sep. 16, 1998; and to U.S. Provisional Appln. Ser. No. 60/101,130, filed Sep. 21, 1998; and to U.S. Provisional Appln. Ser. No. 60/101,132, filed Sep. 21, 1998; and to U.S. Provisional Appln. Ser. No. 60/108,996, filed Nov. 18, 1998; and to U.S. Provisional Appln. Ser. No. 60/109,018, filed Nov. 18, 1998. U.S. application Ser. No. 09/244,000 also claims the benefit of U.S. Provisional Appln. Ser. No. 60/074,201, filed Feb. 10, 1998; and to U.S. Provisional Appln. Ser. No. 60/074,280, filed Feb. 10, 1998; and to U.S. Provisional Appln. Ser. No. 60/074,281, filed Feb. 10, 1998; and to U.S. Provisional Appln. Ser. No. 60/074,565, filed Feb. 12, 1998; and to U.S. Provisional Appln. Ser. No. 60/074,566, filed Feb. 12, 1998; and to U.S. Provisional Appln. Ser. No. 60/074,567, filed Feb. 12, 1998; and to U.S. Provisional Appln. Ser. No. 60/074,789, filed Feb. 19, 1998; and to U.S. Provisional Appln. Ser. No. 60/075,459, filed Feb. 19, 1998; and to U.S. Provisional Appln. Ser. No. 60/075,460, filed Feb. 19, 1998; and to U.S. Provisional Appln. Ser. No. 60/075,461, filed Feb. 19, 1998; and to U.S. Provisional Appln. Ser. No. 60/075,463, filed Feb. 19, 1998; and to U.S. Provisional Appln. Ser. No. 60/075,464, filed Feb. 19, 1998; and to U.S. Provisional Appln. Ser. No. 60/086,183, filed May 21, 1998; and to U.S. Provisional Appln. Ser. No. 60/086,188, filed May 21, 1998. U.S. application Ser. No. 09/333,535 is also a continuation-in-part of U.S. application Ser. No. 09/263,191, filed Mar. 5, 1999 (abandoned). U.S. application Ser. No. 09/333,535 is also a continuation-in-part of U.S. application Ser. No. 09/283,466, filed Apr. 2, 1999 (abandoned). U.S. application Ser. No. 09/333,535 is also a continuation-in-part of U.S. application Ser. No. 09/306,349, filed May 10, 1999 (abandoned). U.S. application Ser. No. 09/333,535 is also a continuation-in-part of U.S. application Ser. No. 09/199,129, filed Nov. 24, 1998, which is a continuation-in-part of U.S. application Ser. No. 09/198,779, filed Nov. 24, 1998 (abandoned), which claims the benefit of U.S. Provisional Appln. Ser. No. 60/067,000, filed Nov. 24, 1997; and to U.S. Provisional Appln. Ser. No. 60/066,873, filed Nov. 25, 1997; and to U.S. Provisional Appln. Ser. No. 60/069,472, filed Dec. 9, 1997; and to U.S. Provisional Appln. Ser. No. 60/074,201, filed Feb. 10, 1998; and to U.S. Provisional Appln. Ser. No. 60/074,280, filed Feb. 10, 1998; and to U.S. Provisional Appln. Ser. No. 60/074,281, filed Feb. 10, 1998; and to U.S. Provisional Appln. Ser. No. 60/074,282, filed Feb. 10, 1998; and to U.S. Provisional Appln. Ser. No. 60/074,565, filed Feb. 12, 1998; and to U.S. Provisional Appln. Ser. No. 60/074,566, filed Feb. 12, 1998; and to U.S. Provisional Appln. Ser. No. 60/074,567, filed Feb. 12, 1998; and to U.S. Provisional Appln. Ser. No. 60/074,789, filed Feb. 19, 1998; and to U.S. Provisional Appln. Ser. No. 60/075,459, filed Feb. 19, 1998; and to U.S. Provisional Appln. Ser. No. 60/075,460, filed Feb. 19, 1998; and to U.S. Provisional Appln. Ser. No. 60/075,461, filed Feb. 19, 1998; and to U.S. Provisional Appln. Ser. No. 60/075,462, filed Feb. 19, 1998; and to U.S. Provisional Appln. Ser. No. 60/075,463, filed Feb. 19, 1998; and to U.S. Provisional Appln. Ser. No. 60/075,464, filed Feb. 19, 1998; and to U.S. Provisional Appln. Ser. No. 60/077,229, filed Mar. 9, 1998; and to U.S. Provisional Appln. Ser. No. 60/077,230, filed Mar. 9, 1998; and to U.S. Provisional Appln. Ser. No. 60/077,231, filed Mar. 9, 1998; and to U.S. Provisional Appln. Ser. No. 60/078,031, filed Mar. 16, 1998; and to U.S. Provisional Appln. Ser. No. 60/078,368, filed Mar. 18, 1998; and to U.S. Provisional Appln. Ser. No. 60/080,844, filed Apr. 7, 1998; and to U.S. Provisional Appln. Ser. No. 60/083,067, filed Apr. 27, 1998; and to U.S. Provisional Appln. Ser. No. 60/083,386, filed Apr. 29, 1998; and to U.S. Provisional Appln. Ser. No. 60/083,387, filed Apr. 29, 1998; and to U.S. Provisional Appln. Ser. No. 60/083,388, filed Apr. 29, 1998; and to U.S. Provisional Appln. Ser. No. 60/083,389, filed Apr. 29, 1998; and to U.S. Provisional Appln. Ser. No. 60/084,684, filed May 8, 1998; and to U.S. Provisional Appln. Ser. No. 60/085,222, filed May 13, 1998; and to U.S. Provisional Appln. Ser. No. 60/085,223, filed May 13, 1998; and to U.S. Provisional Appln. Ser. No. 60/085,224, filed May 13, 1998; and to U.S. Provisional Appln. Ser. No. 60/085,245, filed May 13, 1998; and to U.S. Provisional Appln. Ser. No. 60/086,183, filed May 21, 1998; and to U.S. Provisional Appln. Ser. No. 60/086,184, filed May 21, 1998; and to U.S. Provisional Appln. Ser. No. 60/086,185, filed May 21, 1998; and to U.S. Provisional Appln. Ser. No. 60/086,186, filed May 21, 1998; and to U.S. Provisional Appln. Ser. No. 60/086,187, filed May 21, 1998; and to U.S. Provisional Appln. Ser. No. 60/086,188, filed May 21, 1998; and to U.S. Provisional Appln. Ser. No. 60/086,339, filed May 21, 1998; and to U.S. Provisional Appln. Ser. No. 60/089,524, filed Jun. 16, 1998; and to U.S. Provisional Appln. Ser. No. 60/089,810, filed Jun. 18, 1998; and to U.S. Provisional Appln. Ser. No. 60/089,814, filed Jun. 18, 1998; and to U.S. Provisional Appln. Ser. No. 60/091,247, filed Jun. 30, 1998; and to U.S. Provisional Appln. Ser. No. 60/092,036, filed Jul. 8, 1998; and to U.S. Provisional Appln. Ser. No. 60/099,667, filed Sep. 9, 1998; and to U.S. Provisional Appln. Ser. No. 60/099,668, filed Sep. 9, 1998; and to U.S. Provisional Appln. Ser. No. 60/099,670, filed Sep. 9, 1998; and to U.S. Provisional Appln. Ser. No. 60/099,697, filed Sep. 9, 1998; and to U.S. Provisional Appln. Ser. No. 60/100,672, filed Sep. 16, 1998; and to U.S. Provisional Appln. Ser. No. 60/100,673, filed Sep. 16, 1998; and to U.S. Provisional Appln. Ser. No. 60/100,674, filed Sep. 16, 1998; and to U.S. Provisional Appln. Ser. No. 60/101,130, filed Sep. 21, 1998; and to U.S. Provisional Appln. Ser. No. 60/101,132, filed Sep. 21, 1998; and to U.S. Provisional Appln. Ser. No. 60/108,996, filed Nov. 18, 1998; and to U.S. Provisional Appln. Ser. No. 60/109,018, filed Nov. 18, 1998. U.S. application Ser. No. 09/199,129 also claims the benefit of U.S. Provisional Appln. Ser. No. 60/067,000, filed Nov. 24, 1997; and to U.S. Provisional Appln. Ser. No. 60/069,472, filed Dec. 9, 1997; and to U.S. Provisional Appln. Ser. No. 60/074,201, filed Feb. 10, 1998; and to U.S. Provisional Appln. Ser. No. 60/074,280, filed Feb. 10, 1998; and to U.S. Provisional Appln. Ser. No. 60/074,281, filed Feb. 10, 1998; and to U.S. Provisional Appln. Ser. No. 60/074,282, filed Feb. 10, 1998; and to U.S. Provisional Appln. Ser. No. 60/074,565, filed Feb. 12, 1998; and to U.S. Provisional Appln. Ser. No. 60/074,566, filed Feb. 12, 1998; and to U.S. Provisional Appln. Ser. No. 60/074,567, filed Feb. 12, 1998; and to U.S. Provisional Appln. Ser. No. 60/074,789, filed Feb. 19, 1998; and to U.S. Provisional Appln. Ser. No. 60/075,459, filed Feb. 19, 1998; and to U.S. Provisional Appln. Ser. No. 60/075,460, filed Feb. 19, 1998; and to U.S. Provisional Appln. Ser. No. 60/075,461, filed Feb. 19, 1998; and to U.S. Provisional Appln. Ser. No. 60/075,462, filed Feb. 19, 1998; and to U.S. Provisional Appln. Ser. No. 60/075,463, filed Feb. 19, 1998; and to U.S. Provisional Appln. Ser. No. 60/075,464, filed Feb. 19, 1998; and to U.S. Provisional Appln. Ser. No. 60/077,229, filed Mar. 9, 1998; and to U.S. Provisional Appln. Ser. No. 60/077,230, filed Mar. 9, 1998; and to U.S. Provisional Appln. Ser. No. 60/077,231, filed Mar. 9, 1998; and to U.S. Provisional Appln. Ser. No. 60/078,368, filed Mar. 18, 1998; and to U.S. Provisional Appln. Ser. No. 60/080,844, filed Apr. 7, 1998; and to U.S. Provisional Appln. Ser. No. 60/083,067, filed Apr. 27, 1998; and to U.S. Provisional Appln. Ser. No. 60/083,386, filed Apr. 29, 1998; and to U.S. Provisional Appln. Ser. No. 60/083,387, filed Apr. 29, 1998; and to U.S. Provisional Appln. Ser. No. 60/083,388, filed Apr. 29, 1998; and to U.S. Provisional Appln. Ser. No. 60/083,389, filed Apr. 29, 1998; and to U.S. Provisional Appln. Ser. No. 60/085,222, filed May 13, 1998; and to U.S. Provisional Appln. Ser. No. 60/085,223, filed May 13, 1998; and to U.S. Provisional Appln. Ser. No. 60/085,224, filed May 13, 1998; and to U.S. Provisional Appln. Ser. No. 60/086,183, filed May 21, 1998; and to U.S. Provisional Appln. Ser. No. 60/086,184, filed May 21, 1998; and to U.S. Provisional Appln. Ser. No. 60/086,185, filed May 21, 1998; and to U.S. Provisional Appln. Ser. No. 60/086,186, filed May 21, 1998; and to U.S. Provisional Appln. Ser. No. 60/086,187, filed May 21, 1998; and to U.S. Provisional Appln. Ser. No. 60/086,188, filed May 21, 1998; and to U.S. Provisional Appln. Ser. No. 60/089,524, filed Jun. 16, 1998; and to U.S. Provisional Appln. Ser. No. 60/089,793, filed Jun. 18, 1998; and to U.S. Provisional Appln. Ser. No. 60/089,810, filed Jun. 18, 1998; and to U.S. Provisional Appln. Ser. No. 60/089,814, filed Jun. 18, 1998; and to U.S. Provisional Appln. Ser. No. 60/099,668, filed Sep. 9, 1998; and to U.S. Provisional Appln. Ser. No. 60/099,670, filed Sep. 9, 1998; and to U.S. Provisional Appln. Ser. No. 60/099,697, filed Sep. 9, 1998; and to U.S. Provisional Appln. Ser. No. 60/100,672, filed Sep. 16, 1998; and to U.S. Provisional Appln. Ser. No. 60/100,673, filed Sep. 16, 1998; and to U.S. Provisional Appln. Ser. No. 60/100,674, filed Sep. 16, 1998; and to U.S. Provisional Appln. Ser. No. 60/101,130, filed Sep. 21, 1998; and to U.S. Provisional Appln. Ser. No. 60/101,131, filed Sep. 21, 1998; and to U.S. Provisional Appln. Ser. No. 60/101,132, filed September 21, and to U.S. Provisional Appln. Ser. No. 60/108,996, filed Nov. 18, 1998; and to U.S. Provisional Appln. Ser. No. 60/109,018, filed Nov. 18, 1998. U.S. application Ser. No. 09/333,535 also claims the benefit of U.S. Provisional Appln. Ser. No. 60/089,524, filed Jun. 16, 1998; and to U.S. Provisional Appln. Ser. No. 60/089,793, filed Jun. 18, 1998; and to U.S. Provisional Appln. Ser. No. 60/089,810, filed Jun. 18, 1998; and to U.S. Provisional Appln. Ser. No. 60/089,814, filed Jun. 18, 1998; and to U.S. Provisional Appln. Ser. No. 60/099,668, filed Sep. 9, 1998; and to U.S. Provisional Appln. Ser. No. 60/099,670, filed Sep. 9, 1998; and to U.S. Provisional Appln. Ser. No. 60/099,697, filed Sep. 9, 1998; and to U.S. Provisional Appln. Ser. No. 60/100,672, filed Sep. 16, 1998; and to U.S. Provisional Appln. Ser. No. 60/100,673, filed Sep. 16, 1998; and to U.S. Provisional Appln. Ser. No. 60/100,674, filed Sep. 16, 1998; and to U.S. Provisional Appln. Ser. No. 60/101,130, filed Sep. 21, 1998; and to U.S. Provisional Appln. Ser. No. 60/101,131, filed Sep. 21, 1998; and to U.S. Provisional Appln. Ser. No. 60/101,132, filed September 21, and to U.S. Provisional Appln. Ser. No. 60/108,996, filed Nov. 18, 1998; and to U.S. Provisional Appln. Ser. No. 60/109,018, filed Nov. 18, 1998; and to U.S. Provisional Appln. Ser. No. 60/111,981, filed Dec. 11, 1998; and to U.S. Provisional Appln. Ser. No. 60/112,221, filed Dec. 14, 1998; and to U.S. Provisional Appln. Ser. No. 60/112,229, filed Dec. 14, 1998; and to U.S. Provisional Appln. Ser. No. 60/112,808, filed Dec. 18, 1998; and to U.S. Provisional Appln. Ser. No. 60/113,224, filed Dec. 22, 1998; and to U.S. Provisional Appln. Ser. No. 60/125,816, filed Mar. 23, 1999; and to U.S. Provisional Appln. Ser. No. 60/125,817, filed Mar. 23, 1999; and to U.S. Provisional Appln. Ser. No. 60/125,818, filed Mar. 23, 1999; and to U.S. Provisional Appln. Ser. No. 60/130,174, filed Apr. 20, 1999; and to U.S. Provisional Appln. Ser. No. 60/130,464, filed Apr. 22, 1999; and to U.S. Provisional Appln. Ser. No. 60/133,690, filed May 10, 1999; and to U.S. Provisional Appln. Ser. No. 60/133,691, filed May 10, 1999; and to U.S. Provisional Appln. Ser. No. 60/133,692, filed May 10, 1999. U.S. application Ser. No. 09/552,086 is also a continuation-in-part of U.S. application Ser. No. 09/531,113, filed Mar. 22, 2000, which is a continuation-in-part of U.S. application Ser. No. 09/198,779, filed Nov. 24, 1998 (abandoned), which claims the benefit of U.S. Provisional Appln. Ser. No. 60/067,000, filed Nov. 24, 1997; and to U.S. Provisional Appln. Ser. No. 60/066,873, filed Nov. 25, 1997; and to U.S. Provisional Appln. Ser. No. 60/069,472, filed Dec. 9, 1997; and to U.S. Provisional Appln. Ser. No. 60/074,201, filed Feb. 10, 1998; and to U.S. Provisional Appln. Ser. No. 60/074,280, filed Feb. 10, 1998; and to U.S. Provisional Appln. Ser. No. 60/074,281, filed Feb. 10, 1998; and to U.S. Provisional Appln. Ser. No. 60/074,282, filed Feb. 10, 1998; and to U.S. Provisional Appln. Ser. No. 60/074,565, filed Feb. 12, 1998; and to U.S. Provisional Appln. Ser. No. 60/074,566, filed Feb. 12, 1998; and to U.S. Provisional Appln. Ser. No. 60/074,567, filed Feb. 12, 1998; and to U.S. Provisional Appln. Ser. No. 60/074,789, filed Feb. 19, 1998; and to U.S. Provisional Appln. Ser. No. 60/075,459, filed Feb. 19, 1998; and to U.S. Provisional Appln. Ser. No. 60/075,460, filed Feb. 19, 1998; and to U.S. Provisional Appln. Ser. No. 60/075,461, filed Feb. 19, 1998; and to U.S. Provisional Appln. Ser. No. 60/075,462, filed Feb. 19, 1998; and to U.S. Provisional Appln. Ser. No. 60/075,463, filed Feb. 19, 1998; and to U.S. Provisional Appln. Ser. No. 60/075,464, filed Feb. 19, 1998; and to U.S. Provisional Appln. Ser. No. 60/077,229, filed Mar. 9, 1998; and to U.S. Provisional Appln. Ser. No. 60/077,230, filed Mar. 9, 1998; and to U.S. Provisional Appln. Ser. No. 60/077,231, filed Mar. 9, 1998; and to U.S. Provisional Appln. Ser. No. 60/078,031, filed Mar. 16, 1998; and to U.S. Provisional Appln. Ser. No. 60/078,368, filed Mar. 18, 1998; and to U.S. Provisional Appln. Ser. No. 60/080,844, filed Apr. 7, 1998; and to U.S. Provisional Appln. Ser. No. 60/083,067, filed Apr. 27, 1998; and to U.S. Provisional Appln. Ser. No. 60/083,386, filed Apr. 29, 1998; and to U.S. Provisional Appln. Ser. No. 60/083,387, filed Apr. 29, 1998; and to U.S. Provisional Appln. Ser. No. 60/083,388, filed Apr. 29, 1998; and to U.S. Provisional Appln. Ser. No. 60/083,389, filed Apr. 29, 1998; and to U.S. Provisional Appln. Ser. No. 60/084,684, filed May 8, 1998; and to U.S. Provisional Appln. Ser. No. 60/085,222, filed May 13, 1998; and to U.S. Provisional Appln. Ser. No. 60/085,223, filed May 13, 1998; and to U.S. Provisional Appln. Ser. No. 60/085,224, filed May 13, 1998; and to U.S. Provisional Appln. Ser. No. 60/085,245, filed May 13, 1998; and to U.S. Provisional Appln. Ser. No. 60/086,183, filed May 21, 1998; and to U.S. Provisional Appln. Ser. No. 60/086,184, filed May 21, 1998; and to U.S. Provisional Appln. Ser. No. 60/086,185, filed May 21, 1998; and to U.S. Provisional Appln. Ser. No. 60/086,186, filed May 21, 1998; and to U.S. Provisional Appln. Ser. No. 60/086,187, filed May 21, 1998; and to U.S. Provisional Appln. Ser. No. 60/086,188, filed May 21, 1998; and to U.S. Provisional Appln. Ser. No. 60/086,339, filed May 21, 1998; and to U.S. Provisional Appln. Ser. No. 60/089,524, filed Jun. 16, 1998; and to U.S. Provisional Appln. Ser. No. 60/089,810, filed Jun. 18, 1998; and to U.S. Provisional Appln. Ser. No. 60/089,814, filed Jun. 18, 1998; and to U.S. Provisional Appln. Ser. No. 60/091,247, filed Jun. 30, 1998; and to U.S. Provisional Appln. Ser. No. 60/092,036, filed Jul. 8, 1998; and to U.S. Provisional Appln. Ser. No. 60/099,667, filed Sep. 9, 1998; and to U.S. Provisional Appln. Ser. No. 60/099,668, filed Sep. 9, 1998; and to U.S. Provisional Appln. Ser. No. 60/099,670, filed Sep. 9, 1998; and to U.S. Provisional Appln. Ser. No. 60/099,697, filed Sep. 9, 1998; and to U.S. Provisional Appln. Ser. No. 60/100,672, filed Sep. 16, 1998; and to U.S. Provisional Appln. Ser. No. 60/100,673, filed Sep. 16, 1998; and to U.S. Provisional Appln. Ser. No. 60/100,674, filed Sep. 16, 1998; and to U.S. Provisional Appln. Ser. No. 60/101,130, filed Sep. 21, 1998; and to U.S. Provisional Appln. Ser. No. 60/101,132, filed Sep. 21, 1998; and to U.S. Provisional Appln. Ser. No. 60/108,996, filed Nov. 18, 1998; and to U.S. Provisional Appln. Ser. No. 60/109,018, filed Nov. 18, 1998. U.S. application Ser. No. 09/531,113 is also a continuation-in-part of U.S. application Ser. No. 09/206,040, filed Dec. 4, 1998 (abandoned), which claims the benefit of U.S. Provisional Appln. Ser. No. 60/100,647, filed Sep. 16, 1998. U.S. application Ser. No. 09/531,113 is also a continuation-in-part of U.S. application Ser. No. 09/210,297, filed Dec. 8, 1998 (abandoned), which is a continuation-in-part of U.S. application Ser. No. 09/198,779, filed Nov. 24, 1998 (abandoned), which claims the benefit of U.S. Provisional Appln. Ser. No. 60/067,000, filed Nov. 24, 1997; and to U.S. Provisional Appln. Ser. No. 60/066,873, filed Nov. 25, 1997; and to U.S. Provisional Appln. Ser. No. 60/069,472, filed Dec. 9, 1997; and to U.S. Provisional Appln. Ser. No. 60/074,201, filed Feb. 10, 1998; and to U.S. Provisional Appln. Ser. No. 60/074,280, filed Feb. 10, 1998; and to U.S. Provisional Appln. Ser. No. 60/074,281, filed Feb. 10, 1998; and to U.S. Provisional Appln. Ser. No. 60/074,282, filed Feb. 10, 1998; and to U.S. Provisional Appln. Ser. No. 60/074,565, filed Feb. 12, 1998; and to U.S. Provisional Appln. Ser. No. 60/074,566, filed Feb. 12, 1998; and to U.S. Provisional Appln. Ser. No. 60/074,567, filed Feb. 12, 1998; and to U.S. Provisional Appln. Ser. No. 60/074,789, filed Feb. 19, 1998; and to U.S. Provisional Appln. Ser. No. 60/075,459, filed Feb. 19, 1998; and to U.S. Provisional Appln. Ser. No. 60/075,460, filed Feb. 19, 1998; and to U.S. Provisional Appln. Ser. No. 60/075,461, filed Feb. 19, 1998; and to U.S. Provisional Appln. Ser. No. 60/075,462, filed Feb. 19, 1998; and to U.S. Provisional Appln. Ser. No. 60/075,463, filed Feb. 19, 1998; and to U.S. Provisional Appln. Ser. No. 60/075,464, filed Feb. 19, 1998; and to U.S. Provisional Appln. Ser. No. 60/077,229, filed Mar. 9, 1998; and to U.S. Provisional Appln. Ser. No. 60/077,230, filed Mar. 9, 1998; and to U.S. Provisional Appln. Ser. No. 60/077,231, filed Mar. 9, 1998; and to U.S. Provisional Appln. Ser. No. 60/078,031, filed Mar. 16, 1998; and to U.S. Provisional Appln. Ser. No. 60/078,368, filed Mar. 18, 1998; and to U.S. Provisional Appln. Ser. No. 60/080,844, filed Apr. 7, 1998; and to U.S. Provisional Appln. Ser. No. 60/083,067, filed Apr. 27, 1998; and to U.S. Provisional Appln. Ser. No. 60/083,386, filed Apr. 29, 1998; and to U.S. Provisional Appln. Ser. No. 60/083,387, filed Apr. 29, 1998; and to U.S. Provisional Appln. Ser. No. 60/083,388, filed Apr. 29, 1998; and to U.S. Provisional Appln. Ser. No. 60/083,389, filed Apr. 29, 1998; and to U.S. Provisional Appln. Ser. No. 60/084,684, filed May 8, 1998; and to U.S. Provisional Appln. Ser. No. 60/085,222, filed May 13, 1998; and to U.S. Provisional Appln. Ser. No. 60/085,223, filed May 13, 1998; and to U.S. Provisional Appln. Ser. No. 60/085,224, filed May 13, 1998; and to U.S. Provisional Appln. Ser. No. 60/085,245, filed May 13, 1998; and to U.S. Provisional Appln. Ser. No. 60/086,183, filed May 21, 1998; and to U.S. Provisional Appln. Ser. No. 60/086,184, filed May 21, 1998; and to U.S. Provisional Appln. Ser. No. 60/086,185, filed May 21, 1998; and to U.S. Provisional Appln. Ser. No. 60/086,186, filed May 21, 1998; and to U.S. Provisional Appln. Ser. No. 60/086,187, filed May 21, 1998; and to U.S. Provisional Appln. Ser. No. 60/086,188, filed May 21, 1998; and to U.S. Provisional Appln. Ser. No. 60/086,339, filed May 21, 1998; and to U.S. Provisional Appln. Ser. No. 60/089,524, filed Jun. 16, 1998; and to U.S. Provisional Appln. Ser. No. 60/089,810, filed Jun. 18, 1998; and to U.S. Provisional Appln. Ser. No. 60/089,814, filed Jun. 18, 1998; and to U.S. Provisional Appln. Ser. No. 60/091,247, filed Jun. 30, 1998; and to U.S. Provisional Appln. Ser. No. 60/092,036, filed Jul. 8, 1998; and to U.S. Provisional Appln. Ser. No. 60/099,667, filed Sep. 9, 1998; and to U.S. Provisional Appln. Ser. No. 60/099,668, filed Sep. 9, 1998; and to U.S. Provisional Appln. Ser. No. 60/099,670, filed Sep. 9, 1998; and to U.S. Provisional Appln. Ser. No. 60/099,697, filed Sep. 9, 1998; and to U.S. Provisional Appln. Ser. No. 60/100,672, filed Sep. 16, 1998; and to U.S. Provisional Appln. Ser. No. 60/100,673, filed Sep. 16, 1998; and to U.S. Provisional Appln. Ser. No. 60/100,674, filed Sep. 16, 1998; and to U.S. Provisional Appln. Ser. No. 60/101,130, filed Sep. 21, 1998; and to U.S. Provisional Appln. Ser. No. 60/101,132, filed Sep. 21, 1998; and to U.S. Provisional Appln. Ser. No. 60/108,996, filed Nov. 18, 1998; and to U.S. Provisional Appln. Ser. No. 60/109,018, filed Nov. 18, 1998. U.S. application Ser. No. 09/531,113 is also a continuation-in-part of U.S. application Ser. No. 09/229,413, filed Jan. 12, 1999 (abandoned), which claims the benefit of U.S. Appln. Ser. No. 60/071,479, filed Jan. 13, 1998; and to U.S. Provisional Appln. Ser. No. 60/085,533, filed May 15, 1998; and to U.S. Provisional Appln. Ser. No. 60/089,806, filed Jun. 18, 1998; and to U.S. Provisional Appln. Ser. No. 60/089,807, filed Jun. 18, 1998; and to U.S. Provisional Appln. Ser. No. 60/089,808, filed Jun. 18, 1998; and to U.S. Provisional Appln. Ser. No. 60/089,811, filed Jun. 18, 1998; and to U.S. Provisional Appln. Ser. No. 60/089,812, filed Jun. 18, 1998; and to U.S. Provisional Appln. Ser. No. 60/089,813, filed Jun. 18, 1998; and to U.S. Provisional Appln. Ser. No. 60/091,247, filed Jun. 30, 1998; and to U.S. Provisional Appln. Ser. No. 60/091,405, filed Jun. 30, 1998; and to U.S. Provisional Appln. Ser. No. 60/099,697, filed Sep. 9, 1998; and to U.S. Provisional Appln. Ser. No. 60/100,963, filed Sep. 17, 1998; and to U.S. Provisional Appln. Ser. No. 60/101,343, filed Sep. 22, 1998; and to U.S. Provisional Appln. Ser. No. 60/101,344, filed Sep. 22, 1998; and to U.S. Provisional Appln. Ser. No. 60/101,347, filed Sep. 22, 1998; and to U.S. Provisional Appln. Ser. No. 60/101,508, filed Sep. 22, 1998; and to U.S. Provisional Appln. Ser. No. 60/101,707, filed Sep. 25, 1998; and to U.S. Provisional Appln. Ser. No. 60/104,124, filed Oct. 13, 1998; and to U.S. Provisional Appln. Ser. No. 60/104,126, filed Oct. 13, 1998; and to U.S. Provisional Appln. Ser. No. 60/104,127, filed Oct. 13, 1998; and to U.S. Provisional Appln. Ser. No. 60/104,128, filed Oct. 13, 1998; and to U.S. Provisional Appln. Ser. No. 60/111,981, filed Dec. 11, 1998. U.S. application Ser. No. 09/531,113 is also a continuation-in-part of U.S. application Ser. No. 09/244,000, filed Feb. 8, 1999 (abandoned), which is a continuation-in-part of U.S. application Ser. No. 09/198,779, filed Nov. 24, 1998 (abandoned), which claims the benefit of U.S. Provisional Appln. Ser. No. 60/067,000, filed Nov. 24, 1997; and to U.S. Provisional Appln. Ser. No. 60/066,873, filed Nov. 25, 1997; and to U.S. Provisional Appln. Ser. No. 60/069,472, filed Dec. 9, 1997; and to U.S. Provisional Appln. Ser. No. 60/074,201, filed Feb. 10, 1998; and to U.S. Provisional Appln. Ser. No. 60/074,280, filed Feb. 10, 1998; and to U.S. Provisional Appln. Ser. No. 60/074,281, filed Feb. 10, 1998; and to U.S. Provisional Appln. Ser. No. 60/074,282, filed Feb. 10, 1998; and to U.S. Provisional Appln. Ser. No. 60/074,565, filed Feb. 12, 1998; and to U.S. Provisional Appln. Ser. No. 60/074,566, filed Feb. 12, 1998; and to U.S. Provisional Appln. Ser. No. 60/074,567, filed Feb. 12, 1998; and to U.S. Provisional Appln. Ser. No. 60/074,789, filed Feb. 19, 1998; and to U.S. Provisional Appln. Ser. No. 60/075,459, filed Feb. 19, 1998; and to U.S. Provisional Appln. Ser. No. 60/075,460, filed Feb. 19, 1998; and to U.S. Provisional Appln. Ser. No. 60/075,461, filed Feb. 19, 1998; and to U.S. Provisional Appln. Ser. No. 60/075,462, filed Feb. 19, 1998; and to U.S. Provisional Appln. Ser. No. 60/075,463, filed Feb. 19, 1998; and to U.S. Provisional Appln. Ser. No. 60/075,464, filed Feb. 19, 1998; and to U.S. Provisional Appln. Ser. No. 60/077,229, filed Mar. 9, 1998; and to U.S. Provisional Appln. Ser. No. 60/077,230, filed Mar. 9, 1998; and to U.S. Provisional Appln. Ser. No. 60/077,231, filed Mar. 9, 1998; and to U.S. Provisional Appln. Ser. No. 60/078,031, filed Mar. 16, 1998; and to U.S. Provisional Appln. Ser. No. 60/078,368, filed Mar. 18, 1998; and to U.S. Provisional Appln. Ser. No. 60/080,844, filed Apr. 7, 1998; and to U.S. Provisional Appln. Ser. No. 60/083,067, filed Apr. 27, 1998; and to U.S. Provisional Appln. Ser. No. 60/083,386, filed Apr. 29, 1998; and to U.S. Provisional Appln. Ser. No. 60/083,387, filed Apr. 29, 1998; and to U.S. Provisional Appln. Ser. No. 60/083,388, filed Apr. 29, 1998; and to U.S. Provisional Appln. Ser. No. 60/083,389, filed Apr. 29, 1998; and to U.S. Provisional Appln. Ser. No. 60/084,684, filed May 8, 1998; and to U.S. Provisional Appln. Ser. No. 60/085,222, filed May 13, 1998; and to U.S. Provisional Appln. Ser. No. 60/085,223, filed May 13, 1998; and to U.S. Provisional Appln. Ser. No. 60/085,224, filed May 13, 1998; and to U.S. Provisional Appln. Ser. No. 60/085,245, filed May 13, 1998; and to U.S. Provisional Appln. Ser. No. 60/086,183, filed May 21, 1998; and to U.S. Provisional Appln. Ser. No. 60/086,184, filed May 21, 1998; and to U.S. Provisional Appln. Ser. No. 60/086,185, filed May 21, 1998; and to U.S. Provisional Appln. Ser. No. 60/086,186, filed May 21, 1998; and to U.S. Provisional Appln. Ser. No. 60/086,187, filed May 21, 1998; and to U.S. Provisional Appln. Ser. No. 60/086,188, filed May 21, 1998; and to U.S. Provisional Appln. Ser. No. 60/086,339, filed May 21, 1998; and to U.S. Provisional Appln. Ser. No. 60/089,524, filed Jun. 16, 1998; and to U.S. Provisional Appln. Ser. No. 60/089,810, filed Jun. 18, 1998; and to U.S. Provisional Appln. Ser. No. 60/089,814, filed Jun. 18, 1998; and to U.S. Provisional Appln. Ser. No. 60/091,247, filed Jun. 30, 1998; and to U.S. Provisional Appln. Ser. No. 60/092,036, filed Jul. 8, 1998; and to U.S. Provisional Appln. Ser. No. 60/099,667, filed Sep. 9, 1998; and to U.S. Provisional Appln. Ser. No. 60/099,668, filed Sep. 9, 1998; and to U.S. Provisional Appln. Ser. No. 60/099,670, filed Sep. 9, 1998; and to U.S. Provisional Appln. Ser. No. 60/099,697, filed Sep. 9, 1998; and to U.S. Provisional Appln. Ser. No. 60/100,672, filed Sep. 16, 1998; and to U.S. Provisional Appln. Ser. No. 60/100,673, filed Sep. 16, 1998; and to U.S. Provisional Appln. Ser. No. 60/100,674, filed Sep. 16, 1998; and to U.S. Provisional Appln. Ser. No. 60/101,130, filed Sep. 21, 1998; and to U.S. Provisional Appln. Ser. No. 60/101,132, filed Sep. 21, 1998; and to U.S. Provisional Appln. Ser. No. 60/108,996, filed Nov. 18, 1998; and to U.S. Provisional Appln. Ser. No. 60/109,018, filed Nov. 18, 1998. U.S. application Ser. No. 09/244,000 also claims the benefit of U.S. Provisional Appln. Ser. No. 60/074,201, filed Feb. 10, 1998; and to U.S. Provisional Appln. Ser. No. 60/074,280, filed Feb. 10, 1998; and to U.S. Provisional Appln. Ser. No. 60/074,281, filed Feb. 10, 1998; and to U.S. Provisional Appln. Ser. No. 60/074,565, filed Feb. 12, 1998; and to U.S. Provisional Appln. Ser. No. 60/074,566, filed Feb. 12, 1998; and to U.S. Provisional Appln. Ser. No. 60/074,567, filed Feb. 12, 1998; and to U.S. Provisional Appln. Ser. No. 60/074,789, filed Feb. 19, 1998; and to U.S. Provisional Appln. Ser. No. 60/075,459, filed Feb. 19, 1998; and to U.S. Provisional Appln. Ser. No. 60/075,460, filed Feb. 19, 1998; and to U.S. Provisional Appln. Ser. No. 60/075,461, filed Feb. 19, 1998; and to U.S. Provisional Appln. Ser. No. 60/075,463, filed Feb. 19, 1998; and to U.S. Provisional Appln. Ser. No. 60/075,464, filed Feb. 19, 1998; and to U.S. Provisional Appln. Ser. No. 60/086,183, filed May 21, 1998; and to U.S. Provisional Appln. Ser. No. 60/086,188, filed May 21, 1998. U.S. application Ser. No. 09/531,113 is also a continuation-in-part of U.S. application Ser. No. 09/252,974, filed Feb. 19, 1999 (abandoned), which claims the benefit of U.S. Provisional Appln. Ser. No. 60/076,709, filed Mar. 4, 1998; and to U.S. Provisional Appln. Ser. No. 60/084,684, filed May 8, 1998. U.S. application Ser. No. 09/531,113 is also a continuation-in-part of U.S. application Ser. No. 09/263,191, filed Mar. 5, 1999 (abandoned). U.S. application Ser. No. 09/531,113 is also a continuation-in-part of U.S. application Ser. No. 09/283,466, filed Apr. 2, 1999 (abandoned). U.S. application Ser. No. 09/531,113 is also a continuation-in-part of U.S. application Ser. No. 09/306,349, filed May 10, 1999 (abandoned). U.S. application Ser. No. 09/531,113 is also a continuation-in-part of U.S. application Ser. No. 09/391,630, filed Sep. 8, 1999 (abandoned). U.S. application Ser. No. 09/531,113 is also a continuation-in-part of U.S. application Ser. No. 09/440,687, filed Nov. 16, 1999 (abandoned). U.S. application Ser. No. 09/531,113 is also a continuation-in-part of U.S. application Ser. No. 09/199,129, filed Nov. 24, 1998, which is a continuation-in-part of U.S. application Ser. No. 09/198,779, filed Nov. 24, 1998 (abandoned), which claims the benefit of U.S. Provisional Appln. Ser. No. 60/067,000, filed Nov. 24, 1997; and to U.S. Provisional Appln. Ser. No. 60/066,873, filed Nov. 25, 1997; and to U.S. Provisional Appln. Ser. No. 60/069,472, filed Dec. 9, 1997; and to U.S. Provisional Appln. Ser. No. 60/074,201, filed Feb. 10, 1998; and to U.S. Provisional Appln. Ser. No. 60/074,280, filed Feb. 10, 1998; and to U.S. Provisional Appln. Ser. No. 60/074,281, filed Feb. 10, 1998; and to U.S. Provisional Appln. Ser. No. 60/074,282, filed Feb. 10, 1998; and to U.S. Provisional Appln. Ser. No. 60/074,565, filed Feb. 12, 1998; and to U.S. Provisional Appln. Ser. No. 60/074,566, filed Feb. 12, 1998; and to U.S. Provisional Appln. Ser. No. 60/074,567, filed Feb. 12, 1998; and to U.S. Provisional Appln. Ser. No. 60/074,789, filed Feb. 19, 1998; and to U.S. Provisional Appln. Ser. No. 60/075,459, filed Feb. 19, 1998; and to U.S. Provisional Appln. Ser. No. 60/075,460, filed Feb. 19, 1998; and to U.S. Provisional Appln. Ser. No. 60/075,461, filed Feb. 19, 1998; and to U.S. Provisional Appln. Ser. No. 60/075,462, filed Feb. 19, 1998; and to U.S. Provisional Appln. Ser. No. 60/075,463, filed Feb. 19, 1998; and to U.S. Provisional Appln. Ser. No. 60/075,464, filed Feb. 19, 1998; and to U.S. Provisional Appln. Ser. No. 60/077,229, filed Mar. 9, 1998; and to U.S. Provisional Appln. Ser. No. 60/077,230, filed Mar. 9, 1998; and to U.S. Provisional Appln. Ser. No. 60/077,231, filed Mar. 9, 1998; and to U.S. Provisional Appln. Ser. No. 60/078,031, filed Mar. 16, 1998; and to U.S. Provisional Appln. Ser. No. 60/078,368, filed Mar. 18, 1998; and to U.S. Provisional Appln. Ser. No. 60/080,844, filed Apr. 7, 1998; and to U.S. Provisional Appln. Ser. No. 60/083,067, filed Apr. 27, 1998; and to U.S. Provisional Appln. Ser. No. 60/083,386, filed Apr. 29, 1998; and to U.S. Provisional Appln. Ser. No. 60/083,387, filed Apr. 29, 1998; and to U.S. Provisional Appln. Ser. No. 60/083,388, filed Apr. 29, 1998; and to U.S. Provisional Appln. Ser. No. 60/083,389, filed Apr. 29, 1998; and to U.S. Provisional Appln. Ser. No. 60/084,684, filed May 8, 1998; and to U.S. Provisional Appln. Ser. No. 60/085,222, filed May 13, 1998; and to U.S. Provisional Appln. Ser. No. 60/085,223, filed May 13, 1998; and to U.S. Provisional Appln. Ser. No. 60/085,224, filed May 13, 1998; and to U.S. Provisional Appln. Ser. No. 60/085,245, filed May 13, 1998; and to U.S. Provisional Appln. Ser. No. 60/086,183, filed May 21, 1998; and to U.S. Provisional Appln. Ser. No. 60/086,184, filed May 21, 1998; and to U.S. Provisional Appln. Ser. No. 60/086,185, filed May 21, 1998; and to U.S. Provisional Appln. Ser. No. 60/086,186, filed May 21, 1998; and to U.S. Provisional Appln. Ser. No. 60/086,187, filed May 21, 1998; and to U.S. Provisional Appln. Ser. No. 60/086,188, filed May 21, 1998; and to U.S. Provisional Appln. Ser. No. 60/086,339, filed May 21, 1998; and to U.S. Provisional Appln. Ser. No. 60/089,524, filed Jun. 16, 1998; and to U.S. Provisional Appln. Ser. No. 60/089,810, filed Jun. 18, 1998; and to U.S. Provisional Appln. Ser. No. 60/089,814, filed Jun. 18, 1998; and to U.S. Provisional Appln. Ser. No. 60/091,247, filed Jun. 30, 1998; and to U.S. Provisional Appln. Ser. No. 60/092,036, filed Jul. 8, 1998; and to U.S. Provisional Appln. Ser. No. 60/099,667, filed Sep. 9, 1998; and to U.S. Provisional Appln. Ser. No. 60/099,668, filed Sep. 9, 1998; and to U.S. Provisional Appln. Ser. No. 60/099,670, filed Sep. 9, 1998; and to U.S. Provisional Appln. Ser. No. 60/099,697, filed Sep. 9, 1998; and to U.S. Provisional Appln. Ser. No. 60/100,672, filed Sep. 16, 1998; and to U.S. Provisional Appln. Ser. No. 60/100,673, filed Sep. 16, 1998; and to U.S. Provisional Appln. Ser. No. 60/100,674, filed Sep. 16, 1998; and to U.S. Provisional Appln. Ser. No. 60/101,130, filed Sep. 21, 1998; and to U.S. Provisional Appln. Ser. No. 60/101,132, filed Sep. 21, 1998; and to U.S. Provisional Appln. Ser. No. 60/108,996, filed Nov. 18, 1998; and to U.S. Provisional Appln. Ser. No. 60/109,018, filed Nov. 18, 1998. U.S. application Ser. No. 09/199,129 also claims the benefit of U.S. Provisional Appln. Ser. No. 60/067,000, filed Nov. 24, 1997; and to U.S. Provisional Appln. Ser. No. 60/069,472, filed Dec. 9, 1997; and to U.S. Provisional Appln. Ser. No. 60/074,201, filed Feb. 10, 1998; and to U.S. Provisional Appln. Ser. No. 60/074,280, filed Feb. 10, 1998; and to U.S. Provisional Appln. Ser. No. 60/074,281, filed Feb. 10, 1998; and to U.S. Provisional Appln. Ser. No. 60/074,282, filed Feb. 10, 1998; and to U.S. Provisional Appln. Ser. No. 60/074,565, filed Feb. 12, 1998; and to U.S. Provisional Appln. Ser. No. 60/074,566, filed Feb. 12, 1998; and to U.S. Provisional Appln. Ser. No. 60/074,567, filed Feb. 12, 1998; and to U.S. Provisional Appln. Ser. No. 60/074,789, filed Feb. 19, 1998; and to U.S. Provisional Appln. Ser. No. 60/075,459, filed Feb. 19, 1998; and to U.S. Provisional Appln. Ser. No. 60/075,460, filed Feb. 19, 1998; and to U.S. Provisional Appln. Ser. No. 60/075,461, filed Feb. 19, 1998; and to U.S. Provisional Appln. Ser. No. 60/075,462, filed Feb. 19, 1998; and to U.S. Provisional Appln. Ser. No. 60/075,463, filed Feb. 19, 1998; and to U.S. Provisional Appln. Ser. No. 60/075,464, filed Feb. 19, 1998; and to U.S. Provisional Appln. Ser. No. 60/077,229, filed Mar. 9, 1998; and to U.S. Provisional Appln. Ser. No. 60/077,230, filed Mar. 9, 1998; and to U.S. Provisional Appln. Ser. No. 60/077,231, filed Mar. 9, 1998; and to U.S. Provisional Appln. Ser. No. 60/078,368, filed Mar. 18, 1998; and to U.S. Provisional Appln. Ser. No. 60/080,844, filed Apr. 7, 1998; and to U.S. Provisional Appln. Ser. No. 60/083,067, filed Apr. 27, 1998; and to U.S. Provisional Appln. Ser. No. 60/083,386, filed Apr. 29, 1998; and to U.S. Provisional Appln. Ser. No. 60/083,387, filed Apr. 29, 1998; and to U.S. Provisional Appln. Ser. No. 60/083,388, filed Apr. 29, 1998; and to U.S. Provisional Appln. Ser. No. 60/083,389, filed Apr. 29, 1998; and to U.S. Provisional Appln. Ser. No. 60/085,222, filed May 13, 1998; and to U.S. Provisional Appln. Ser. No. 60/085,223, filed May 13, 1998; and to U.S. Provisional Appln. Ser. No. 60/085,224, filed May 13, 1998; and to U.S. Provisional Appln. Ser. No. 60/086,183, filed May 21, 1998; and to U.S. Provisional Appln. Ser. No. 60/086,184, filed May 21, 1998; and to U.S. Provisional Appln. Ser. No. 60/086,185, filed May 21, 1998; and to U.S. Provisional Appln. Ser. No. 60/086,186, filed May 21, 1998; and to U.S. Provisional Appln. Ser. No. 60/086,187, filed May 21, 1998; and to U.S. Provisional Appln. Ser. No. 60/086,188, filed May 21, 1998; and to U.S. Provisional Appln. Ser. No. 60/089,524, filed Jun. 16, 1998; and to U.S. Provisional Appln. Ser. No. 60/089,793, filed Jun. 18, 1998; and to U.S. Provisional Appln. Ser. No. 60/089,810, filed Jun. 18, 1998; and to U.S. Provisional Appln. Ser. No. 60/089,814, filed Jun. 18, 1998; and to U.S. Provisional Appln. Ser. No. 60/099,668, filed Sep. 9, 1998; and to U.S. Provisional Appln. Ser. No. 60/099,670, filed Sep. 9, 1998; and to U.S. Provisional Appln. Ser. No. 60/099,697, filed Sep. 9, 1998; and to U.S. Provisional Appln. Ser. No. 60/100,672, filed Sep. 16, 1998; and to U.S. Provisional Appln. Ser. No. 60/100,673, filed Sep. 16, 1998; and to U.S. Provisional Appln. Ser. No. 60/100,674, filed Sep. 16, 1998; and to U.S. Provisional Appln. Ser. No. 60/101,130, filed Sep. 21, 1998; and to U.S. Provisional Appln. Ser. No. 60/101,131, filed Sep. 21, 1998; and to U.S. Provisional Appln. Ser. No. 60/101,132, filed September 21, and to U.S. Provisional Appln. Ser. No. 60/108,996, filed Nov. 18, 1998; and to U.S. Provisional Appln. Ser. No. 60/109,018, filed Nov. 18, 1998. U.S. application Ser. No. 09/531,113 is also a continuation-in-part of U.S. application Ser. No. 09/333,535, filed Jun. 14, 1999, which is a continuation-in-part of U.S. application Ser. No. 09/198,779, filed Nov. 24, 1998 (abandoned), which claims the benefit of U.S. Provisional Appln. Ser. No. 60/067,000, filed Nov. 24, 1997; and to U.S. Provisional Appln. Ser. No. 60/066,873, filed Nov. 25, 1997; and to U.S. Provisional Appln. Ser. No. 60/069,472, filed Dec. 9, 1997; and to U.S. Provisional Appln. Ser. No. 60/074,201, filed Feb. 10, 1998; and to U.S. Provisional Appln. Ser. No. 60/074,280, filed Feb. 10, 1998; and to U.S. Provisional Appln. Ser. No. 60/074,281, filed Feb. 10, 1998; and to U.S. Provisional Appln. Ser. No. 60/074,282, filed Feb. 10, 1998; and to U.S. Provisional Appln. Ser. No. 60/074,565, filed Feb. 12, 1998; and to U.S. Provisional Appln. Ser. No. 60/074,566, filed Feb. 12, 1998; and to U.S. Provisional Appln. Ser. No. 60/074,567, filed Feb. 12, 1998; and to U.S. Provisional Appln. Ser. No. 60/074,789, filed Feb. 19, 1998; and to U.S. Provisional Appln. Ser. No. 60/075,459, filed Feb. 19, 1998; and to U.S. Provisional Appln. Ser. No. 60/075,460, filed Feb. 19, 1998; and to U.S. Provisional Appln. Ser. No. 60/075,461, filed Feb. 19, 1998; and to U.S. Provisional Appln. Ser. No. 60/075,462, filed Feb. 19, 1998; and to U.S. Provisional Appln. Ser. No. 60/075,463, filed Feb. 19, 1998; and to U.S. Provisional Appln. Ser. No. 60/075,464, filed Feb. 19, 1998; and to U.S. Provisional Appln. Ser. No. 60/077,229, filed Mar. 9, 1998; and to U.S. Provisional Appln. Ser. No. 60/077,230, filed Mar. 9, 1998; and to U.S. Provisional Appln. Ser. No. 60/077,231, filed Mar. 9, 1998; and to U.S. Provisional Appln. Ser. No. 60/078,031, filed Mar. 16, 1998; and to U.S. Provisional Appln. Ser. No. 60/078,368, filed Mar. 18, 1998; and to U.S. Provisional Appln. Ser. No. 60/080,844, filed Apr. 7, 1998; and to U.S. Provisional Appln. Ser. No. 60/083,067, filed Apr. 27, 1998; and to U.S. Provisional Appln. Ser. No. 60/083,386, filed Apr. 29, 1998; and to U.S. Provisional Appln. Ser. No. 60/083,387, filed Apr. 29, 1998; and to U.S. Provisional Appln. Ser. No. 60/083,388, filed Apr. 29, 1998; and to U.S. Provisional Appln. Ser. No. 60/083,389, filed Apr. 29, 1998; and to U.S. Provisional Appln. Ser. No. 60/084,684, filed May 8, 1998; and to U.S. Provisional Appln. Ser. No. 60/085,222, filed May 13, 1998; and to U.S. Provisional Appln. Ser. No. 60/085,223, filed May 13, 1998; and to U.S. Provisional Appln. Ser. No. 60/085,224, filed May 13, 1998; and to U.S. Provisional Appln. Ser. No. 60/085,245, filed May 13, 1998; and to U.S. Provisional Appln. Ser. No. 60/086,183, filed May 21, 1998; and to U.S. Provisional Appln. Ser. No. 60/086,184, filed May 21, 1998; and to U.S. Provisional Appln. Ser. No. 60/086,185, filed May 21, 1998; and to U.S. Provisional Appln. Ser. No. 60/086,186, filed May 21, 1998; and to U.S. Provisional Appln. Ser. No. 60/086,187, filed May 21, 1998; and to U.S. Provisional Appln. Ser. No. 60/086,188, filed May 21, 1998; and to U.S. Provisional Appln. Ser. No. 60/086,339, filed May 21, 1998; and to U.S. Provisional Appln. Ser. No. 60/089,524, filed Jun. 16, 1998; and to U.S. Provisional Appln. Ser. No. 60/089,810, filed Jun. 18, 1998; and to U.S. Provisional Appln. Ser. No. 60/089,814, filed Jun. 18, 1998; and to U.S. Provisional Appln. Ser. No. 60/091,247, filed Jun. 30, 1998; and to U.S. Provisional Appln. Ser. No. 60/092,036, filed Jul. 8, 1998; and to U.S. Provisional Appln. Ser. No. 60/099,667, filed Sep. 9, 1998; and to U.S. Provisional Appln. Ser. No. 60/099,668, filed Sep. 9, 1998; and to U.S. Provisional Appln. Ser. No. 60/099,670, filed Sep. 9, 1998; and to U.S. Provisional Appln. Ser. No. 60/099,697, filed Sep. 9, 1998; and to U.S. Provisional Appln. Ser. No. 60/100,672, filed Sep. 16, 1998; and to U.S. Provisional Appln. Ser. No. 60/100,673, filed Sep. 16, 1998; and to U.S. Provisional Appln. Ser. No. 60/100,674, filed Sep. 16, 1998; and to U.S. Provisional Appln. Ser. No. 60/101,130, filed Sep. 21, 1998; and to U.S. Provisional Appln. Ser. No. 60/101,132, filed Sep. 21, 1998; and to U.S. Provisional Appln. Ser. No. 60/108,996, filed Nov. 18, 1998; and to U.S. Provisional Appln. Ser. No. 60/109,018, filed Nov. 18, 1998. U.S. application Ser. No. 09/333,535 is also a continuation-in-part of U.S. application Ser. No. 09/206,040, filed Dec. 4, 1998 (abandoned), which claims the benefit of U.S. Provisional Appln. Ser. No. 60/100,647, filed Sep. 16, 1998. U.S. application Ser. No. 09/333,535 is also a continuation-in-part of U.S. application Ser. No. 09/210,297, filed Dec. 8, 1998 (abandoned), which is a continuation-in-part of U.S. application Ser. No. 09/198,779, filed Nov. 24, 1998 (abandoned), which claims the benefit of U.S. Provisional Appln. Ser. No. 60/067,000, filed Nov. 24, 1997; and to U.S. Provisional Appln. Ser. No. 60/066,873, filed Nov. 25, 1997; and to U.S. Provisional Appln. Ser. No. 60/069,472, filed Dec. 9, 1997; and to U.S. Provisional Appln. Ser. No. 60/074,201, filed Feb. 10, 1998; and to U.S. Provisional Appln. Ser. No. 60/074,280, filed Feb. 10, 1998; and to U.S. Provisional Appln. Ser. No. 60/074,281, filed Feb. 10, 1998; and to U.S. Provisional Appln. Ser. No. 60/074,282, filed Feb. 10, 1998; and to U.S. Provisional Appln. Ser. No. 60/074,565, filed Feb. 12, 1998; and to U.S. Provisional Appln. Ser. No. 60/074,566, filed Feb. 12, 1998; and to U.S. Provisional Appln. Ser. No. 60/074,567, filed Feb. 12, 1998; and to U.S. Provisional Appln. Ser. No. 60/074,789, filed Feb. 19, 1998; and to U.S. Provisional Appln. Ser. No. 60/075,459, filed Feb. 19, 1998; and to U.S. Provisional Appln. Ser. No. 60/075,460, filed Feb. 19, 1998; and to U.S. Provisional Appln. Ser. No. 60/075,461, filed Feb. 19, 1998; and to U.S. Provisional Appln. Ser. No. 60/075,462, filed Feb. 19, 1998; and to U.S. Provisional Appln. Ser. No. 60/075,463, filed Feb. 19, 1998; and to U.S. Provisional Appln. Ser. No. 60/075,464, filed Feb. 19, 1998; and to U.S. Provisional Appln. Ser. No. 60/077,229, filed Mar. 9, 1998; and to U.S. Provisional Appln. Ser. No. 60/077,230, filed Mar. 9, 1998; and to U.S. Provisional Appln. Ser. No. 60/077,231, filed Mar. 9, 1998; and to U.S. Provisional Appln. Ser. No. 60/078,031, filed Mar. 16, 1998; and to U.S. Provisional Appln. Ser. No. 60/078,368, filed Mar. 18, 1998; and to U.S. Provisional Appln. Ser. No. 60/080,844, filed Apr. 7, 1998; and to U.S. Provisional Appln. Ser. No. 60/083,067, filed Apr. 27, 1998; and to U.S. Provisional Appln. Ser. No. 60/083,386, filed Apr. 29, 1998; and to U.S. Provisional Appln. Ser. No. 60/083,387, filed Apr. 29, 1998; and to U.S. Provisional Appln. Ser. No. 60/083,388, filed Apr. 29, 1998; and to U.S. Provisional Appln. Ser. No. 60/083,389, filed Apr. 29, 1998; and to U.S. Provisional Appln. Ser. No. 60/084,684, filed May 8, 1998; and to U.S. Provisional Appln. Ser. No. 60/085,222, filed May 13, 1998; and to U.S. Provisional Appln. Ser. No. 60/085,223, filed May 13, 1998; and to U.S. Provisional Appln. Ser. No. 60/085,224, filed May 13, 1998; and to U.S. Provisional Appln. Ser. No. 60/085,245, filed May 13, 1998; and to U.S. Provisional Appln. Ser. No. 60/086,183, filed May 21, 1998; and to U.S. Provisional Appln. Ser. No. 60/086,184, filed May 21, 1998; and to U.S. Provisional Appln. Ser. No. 60/086,185, filed May 21, 1998; and to U.S. Provisional Appln. Ser. No. 60/086,186, filed May 21, 1998; and to U.S. Provisional Appln. Ser. No. 60/086,187, filed May 21, 1998; and to U.S. Provisional Appln. Ser. No. 60/086,188, filed May 21, 1998; and to U.S. Provisional Appln. Ser. No. 60/086,339, filed May 21, 1998; and to U.S. Provisional Appln. Ser. No. 60/089,524, filed Jun. 16, 1998; and to U.S. Provisional Appln. Ser. No. 60/089,810, filed Jun. 18, 1998; and to U.S. Provisional Appln. Ser. No. 60/089,814, filed Jun. 18, 1998; and to U.S. Provisional Appln. Ser. No. 60/091,247, filed Jun. 30, 1998; and to U.S. Provisional Appln. Ser. No. 60/092,036, filed Jul. 8, 1998; and to U.S. Provisional Appln. Ser. No. 60/099,667, filed Sep. 9, 1998; and to U.S. Provisional Appln. Ser. No. 60/099,668, filed Sep. 9, 1998; and to U.S. Provisional Appln. Ser. No. 60/099,670, filed Sep. 9, 1998; and to U.S. Provisional Appln. Ser. No. 60/099,697, filed Sep. 9, 1998; and to U.S. Provisional Appln. Ser. No. 60/100,672, filed Sep. 16, 1998; and to U.S. Provisional Appln. Ser. No. 60/100,673, filed Sep. 16, 1998; and to U.S. Provisional Appln. Ser. No. 60/100,674, filed Sep. 16, 1998; and to U.S. Provisional Appln. Ser. No. 60/101,130, filed Sep. 21, 1998; and to U.S. Provisional Appln. Ser. No. 60/101,132, filed Sep. 21, 1998; and to U.S. Provisional Appln. Ser. No. 60/108,996, filed Nov. 18, 1998; and to U.S. Provisional Appln. Ser. No. 60/109,018, filed Nov. 18, 1998. U.S. application Ser. No. 09/333,535 is also a continuation-in-part of U.S. application Ser. No. 09/244,000, filed Feb. 8, 1999 (abandoned), which is a continuation-in-part of U.S. application Ser. No. 09/198,779, filed Nov. 24, 1998 (abandoned), which claims the benefit of U.S. Provisional Appln. Ser. No. 60/067,000, filed Nov. 24, 1997; and to U.S. Provisional Appln. Ser. No. 60/066,873, filed Nov. 25, 1997; and to U.S. Provisional Appln. Ser. No. 60/069,472, filed Dec. 9, 1997; and to U.S. Provisional Appln. Ser. No. 60/074,201, filed Feb. 10, 1998; and to U.S. Provisional Appln. Ser. No. 60/074,280, filed Feb. 10, 1998; and to U.S. Provisional Appln. Ser. No. 60/074,281, filed Feb. 10, 1998; and to U.S. Provisional Appln. Ser. No. 60/074,282, filed Feb. 10, 1998; and to U.S. Provisional Appln. Ser. No. 60/074,565, filed Feb. 12, 1998; and to U.S. Provisional Appln. Ser. No. 60/074,566, filed Feb. 12, 1998; and to U.S. Provisional Appln. Ser. No. 60/074,567, filed Feb. 12, 1998; and to U.S. Provisional Appln. Ser. No. 60/074,789, filed Feb. 19, 1998; and to U.S. Provisional Appln. Ser. No. 60/075,459, filed Feb. 19, 1998; and to U.S. Provisional Appln. Ser. No. 60/075,460, filed Feb. 19, 1998; and to U.S. Provisional Appln. Ser. No. 60/075,461, filed Feb. 19, 1998; and to U.S. Provisional Appln. Ser. No. 60/075,462, filed Feb. 19, 1998; and to U.S. Provisional Appln. Ser. No. 60/075,463, filed Feb. 19, 1998; and to U.S. Provisional Appln. Ser. No. 60/075,464, filed Feb. 19, 1998; and to U.S. Provisional Appln. Ser. No. 60/077,229, filed Mar. 9, 1998; and to U.S. Provisional Appln. Ser. No. 60/077,230, filed Mar. 9, 1998; and to U.S. Provisional Appln. Ser. No. 60/077,231, filed Mar. 9, 1998; and to U.S. Provisional Appln. Ser. No. 60/078,031, filed Mar. 16, 1998; and to U.S. Provisional Appln. Ser. No. 60/078,368, filed Mar. 18, 1998; and to U.S. Provisional Appln. Ser. No. 60/080,844, filed Apr. 7, 1998; and to U.S. Provisional Appln. Ser. No. 60/083,067, filed Apr. 27, 1998; and to U.S. Provisional Appln. Ser. No. 60/083,386, filed Apr. 29, 1998; and to U.S. Provisional Appln. Ser. No. 60/083,387, filed Apr. 29, 1998; and to U.S. Provisional Appln. Ser. No. 60/083,388, filed Apr. 29, 1998; and to U.S. Provisional Appln. Ser. No. 60/083,389, filed Apr. 29, 1998; and to U.S. Provisional Appln. Ser. No. 60/084,684, filed May 8, 1998; and to U.S. Provisional Appln. Ser. No. 60/085,222, filed May 13, 1998; and to U.S. Provisional Appln. Ser. No. 60/085,223, filed May 13, 1998; and to U.S. Provisional Appln. Ser. No. 60/085,224, filed May 13, 1998; and to U.S. Provisional Appln. Ser. No. 60/085,245, filed May 13, 1998; and to U.S. Provisional Appln. Ser. No. 60/086,183, filed May 21, 1998; and to U.S. Provisional Appln. Ser. No. 60/086,184, filed May 21, 1998; and to U.S. Provisional Appln. Ser. No. 60/086,185, filed May 21, 1998; and to U.S. Provisional Appln. Ser. No. 60/086,186, filed May 21, 1998; and to U.S. Provisional Appln. Ser. No. 60/086,187, filed May 21, 1998; and to U.S. Provisional Appln. Ser. No. 60/086,188, filed May 21, 1998; and to U.S. Provisional Appln. Ser. No. 60/086,339, filed May 21, 1998; and to U.S. Provisional Appln. Ser. No. 60/089,524, filed Jun. 16, 1998; and to U.S. Provisional Appln. Ser. No. 60/089,810, filed Jun. 18, 1998; and to U.S. Provisional Appln. Ser. No. 60/089,814, filed Jun. 18, 1998; and to U.S. Provisional Appln. Ser. No. 60/091,247, filed Jun. 30, 1998; and to U.S. Provisional Appln. Ser. No. 60/092,036, filed Jul. 8, 1998; and to U.S. Provisional Appln. Ser. No. 60/099,667, filed Sep. 9, 1998; and to U.S. Provisional Appln. Ser. No. 60/099,668, filed Sep. 9, 1998; and to U.S. Provisional Appln. Ser. No. 60/099,670, filed Sep. 9, 1998; and to U.S. Provisional Appln. Ser. No. 60/099,697, filed Sep. 9, 1998; and to U.S. Provisional Appln. Ser. No. 60/100,672, filed Sep. 16, 1998; and to U.S. Provisional Appln. Ser. No. 60/100,673, filed Sep. 16, 1998; and to U.S. Provisional Appln. Ser. No. 60/100,674, filed Sep. 16, 1998; and to U.S. Provisional Appln. Ser. No. 60/101,130, filed Sep. 21, 1998; and to U.S. Provisional Appln. Ser. No. 60/101,132, filed Sep. 21, 1998; and to U.S. Provisional Appln. Ser. No. 60/108,996, filed Nov. 18, 1998; and to U.S. Provisional Appln. Ser. No. 60/109,018, filed Nov. 18, 1998. U.S. application Ser. No. 09/244,000 also claims the benefit of U.S. Provisional Appln. Ser. No. 60/074,201, filed Feb. 10, 1998; and to U.S. Provisional Appln. Ser. No. 60/074,280, filed Feb. 10, 1998; and to U.S. Provisional Appln. Ser. No. 60/074,281, filed Feb. 10, 1998; and to U.S. Provisional Appln. Ser. No. 60/074,565, filed Feb. 12, 1998; and to U.S. Provisional Appln. Ser. No. 60/074,566, filed Feb. 12, 1998; and to U.S. Provisional Appln. Ser. No. 60/074,567, filed Feb. 12, 1998; and to U.S. Provisional Appln. Ser. No. 60/074,789, filed Feb. 19, 1998; and to U.S. Provisional Appln. Ser. No. 60/075,459, filed Feb. 19, 1998; and to U.S. Provisional Appln. Ser. No. 60/075,460, filed Feb. 19, 1998; and to U.S. Provisional Appln. Ser. No. 60/075,461, filed Feb. 19, 1998; and to U.S. Provisional Appln. Ser. No. 60/075,463, filed Feb. 19, 1998; and to U.S. Provisional Appln. Ser. No. 60/075,464, filed Feb. 19, 1998; and to U.S. Provisional Appln. Ser. No. 60/086,183, filed May 21, 1998; and to U.S. Provisional Appln. Ser. No. 60/086,188, filed May 21, 1998. U.S. application Ser. No. 09/333,535 is also a continuation-in-part of U.S. application Ser. No. 09/263,191, filed Mar. 5, 1999 (abandoned). U.S. application Ser. No. 09/333,535 is also a continuation-in-part of U.S. application Ser. No. 09/283,466, filed Apr. 2, 1999 (abandoned). U.S. application Ser. No. 09/333,535 is also a continuation-in-part of U.S. application Ser. No. 09/306,349, filed May 10, 1999 (abandoned). U.S. application Ser. No. 09/333,535 is also a continuation-in-part of U.S. application Ser. No. 09/199,129, filed Nov. 24, 1998, which is a continuation-in-part of U.S. application Ser. No. 09/198,779, filed Nov. 24, 1998 (abandoned), which claims the benefit of U.S. Provisional Appln. Ser. No. 60/067,000, filed Nov. 24, 1997; and to U.S. Provisional Appln. Ser. No. 60/066,873, filed Nov. 25, 1997; and to U.S. Provisional Appln. Ser. No. 60/069,472, filed Dec. 9, 1997; and to U.S. Provisional Appln. Ser. No. 60/074,201, filed Feb. 10, 1998; and to U.S. Provisional Appln. Ser. No. 60/074,280, filed Feb. 10, 1998; and to U.S. Provisional Appln. Ser. No. 60/074,281, filed Feb. 10, 1998; and to U.S. Provisional Appln. Ser. No. 60/074,282, filed Feb. 10, 1998; and to U.S. Provisional Appln. Ser. No. 60/074,565, filed Feb. 12, 1998; and to U.S. Provisional Appln. Ser. No. 60/074,566, filed Feb. 12, 1998; and to U.S. Provisional Appln. Ser. No. 60/074,567, filed Feb. 12, 1998; and to U.S. Provisional Appln. Ser. No. 60/074,789, filed Feb. 19, 1998; and to U.S. Provisional Appln. Ser. No. 60/075,459, filed Feb. 19, 1998; and to U.S. Provisional Appln. Ser. No. 60/075,460, filed Feb. 19, 1998; and to U.S. Provisional Appln. Ser. No. 60/075,461, filed Feb. 19, 1998; and to U.S. Provisional Appln. Ser. No. 60/075,462, filed Feb. 19, 1998; and to U.S. Provisional Appln. Ser. No. 60/075,463, filed Feb. 19, 1998; and to U.S. Provisional Appln. Ser. No. 60/075,464, filed Feb. 19, 1998; and to U.S. Provisional Appln. Ser. No. 60/077,229, filed Mar. 9, 1998; and to U.S. Provisional Appln. Ser. No. 60/077,230, filed Mar. 9, 1998; and to U.S. Provisional Appln. Ser. No. 60/077,231, filed Mar. 9, 1998; and to U.S. Provisional Appln. Ser. No. 60/078,031, filed Mar. 16, 1998; and to U.S. Provisional Appln. Ser. No. 60/078,368, filed Mar. 18, 1998; and to U.S. Provisional Appln. Ser. No. 60/080,844, filed Apr. 7, 1998; and to U.S. Provisional Appln. Ser. No. 60/083,067, filed Apr. 27, 1998; and to U.S. Provisional Appln. Ser. No. 60/083,386, filed Apr. 29, 1998; and to U.S. Provisional Appln. Ser. No. 60/083,387, filed Apr. 29, 1998; and to U.S. Provisional Appln. Ser. No. 60/083,388, filed Apr. 29, 1998; and to U.S. Provisional Appln. Ser. No. 60/083,389, filed Apr. 29, 1998; and to U.S. Provisional Appln. Ser. No. 60/084,684, filed May 8, 1998; and to U.S. Provisional Appln. Ser. No. 60/085,222, filed May 13, 1998; and to U.S. Provisional Appln. Ser. No. 60/085,223, filed May 13, 1998; and to U.S. Provisional Appln. Ser. No. 60/085,224, filed May 13, 1998; and to U.S. Provisional Appln. Ser. No. 60/085,245, filed May 13, 1998; and to U.S. Provisional Appln. Ser. No. 60/086,183, filed May 21, 1998; and to U.S. Provisional Appln. Ser. No. 60/086,184, filed May 21, 1998; and to U.S. Provisional Appln. Ser. No. 60/086,185, filed May 21, 1998; and to U.S. Provisional Appln. Ser. No. 60/086,186, filed May 21, 1998; and to U.S. Provisional Appln. Ser. No. 60/086,187, filed May 21, 1998; and to U.S. Provisional Appln. Ser. No. 60/086,188, filed May 21, 1998; and to U.S. Provisional Appln. Ser. No. 60/086,339, filed May 21, 1998; and to U.S. Provisional Appln. Ser. No. 60/089,524, filed Jun. 16, 1998; and to U.S. Provisional Appln. Ser. No. 60/089,810, filed Jun. 18, 1998; and to U.S. Provisional Appln. Ser. No. 60/089,814, filed Jun. 18, 1998; and to U.S. Provisional Appln. Ser. No. 60/091,247, filed Jun. 30, 1998; and to U.S. Provisional Appln. Ser. No. 60/092,036, filed Jul. 8, 1998; and to U.S. Provisional Appln. Ser. No. 60/099,667, filed Sep. 9, 1998; and to U.S. Provisional Appln. Ser. No. 60/099,668, filed Sep. 9, 1998; and to U.S. Provisional Appln. Ser. No. 60/099,670, filed Sep. 9, 1998; and to U.S. Provisional Appln. Ser. No. 60/099,697, filed Sep. 9, 1998; and to U.S. Provisional Appln. Ser. No. 60/100,672, filed Sep. 16, 1998; and to U.S. Provisional Appln. Ser. No. 60/100,673, filed Sep. 16, 1998; and to U.S. Provisional Appln. Ser. No. 60/100,674, filed Sep. 16, 1998; and to U.S. Provisional Appln. Ser. No. 60/101,130, filed Sep. 21, 1998; and to U.S. Provisional Appln. Ser. No. 60/101,132, filed Sep. 21, 1998; and to U.S. Provisional Appln. Ser. No. 60/108,996, filed Nov. 18, 1998; and to U.S. Provisional Appln. Ser. No. 60/109,018, filed Nov. 18, 1998. U.S. application Ser. No. 09/199,129 also claims the benefit of U.S. Provisional Appln. Ser. No. 60/067,000, filed Nov. 24, 1997; and to U.S. Provisional Appln. Ser. No. 60/069,472, filed Dec. 9, 1997; and to U.S. Provisional Appln. Ser. No. 60/074,201, filed Feb. 10, 1998; and to U.S. Provisional Appln. Ser. No. 60/074,280, filed Feb. 10, 1998; and to U.S. Provisional Appln. Ser. No. 60/074,281, filed Feb. 10, 1998; and to U.S. Provisional Appln. Ser. No. 60/074,282, filed Feb. 10, 1998; and to U.S. Provisional Appln. Ser. No. 60/074,565, filed Feb. 12, 1998; and to U.S. Provisional Appln. Ser. No. 60/074,566, filed Feb. 12, 1998; and to U.S. Provisional Appln. Ser. No. 60/074,567, filed Feb. 12, 1998; and to U.S. Provisional Appln. Ser. No. 60/074,789, filed Feb. 19, 1998; and to U.S. Provisional Appln. Ser. No. 60/075,459, filed Feb. 19, 1998; and to U.S. Provisional Appln. Ser. No. 60/075,460, filed Feb. 19, 1998; and to U.S. Provisional Appln. Ser. No. 60/075,461, filed Feb. 19, 1998; and to U.S. Provisional Appln. Ser. No. 60/075,462, filed Feb. 19, 1998; and to U.S. Provisional Appln. Ser. No. 60/075,463, filed Feb. 19, 1998; and to U.S. Provisional Appln. Ser. No. 60/075,464, filed Feb. 19, 1998; and to U.S. Provisional Appln. Ser. No. 60/077,229, filed Mar. 9, 1998; and to U.S. Provisional Appln. Ser. No. 60/077,230, filed Mar. 9, 1998; and to U.S. Provisional Appln. Ser. No. 60/077,231, filed Mar. 9, 1998; and to U.S. Provisional Appln. Ser. No. 60/078,368, filed Mar. 18, 1998; and to U.S. Provisional Appln. Ser. No. 60/080,844, filed Apr. 7, 1998; and to U.S. Provisional Appln. Ser. No. 60/083,067, filed Apr. 27, 1998; and to U.S. Provisional Appln. Ser. No. 60/083,386, filed Apr. 29, 1998; and to U.S. Provisional Appln. Ser. No. 60/083,387, filed Apr. 29, 1998; and to U.S. Provisional Appln. Ser. No. 60/083,388, filed Apr. 29, 1998; and to U.S. Provisional Appln. Ser. No. 60/083,389, filed Apr. 29, 1998; and to U.S. Provisional Appln. Ser. No. 60/085,222, filed May 13, 1998; and to U.S. Provisional Appln. Ser. No. 60/085,223, filed May 13, 1998; and to U.S. Provisional Appln. Ser. No. 60/085,224, filed May 13, 1998; and to U.S. Provisional Appln. Ser. No. 60/086,183, filed May 21, 1998; and to U.S. Provisional Appln. Ser. No. 60/086,184, filed May 21, 1998; and to U.S. Provisional Appln. Ser. No. 60/086,185, filed May 21, 1998; and to U.S. Provisional Appln. Ser. No. 60/086,186, filed May 21, 1998; and to U.S. Provisional Appln. Ser. No. 60/086,187, filed May 21, 1998; and to U.S. Provisional Appln. Ser. No. 60/086,188, filed May 21, 1998; and to U.S. Provisional Appln. Ser. No. 60/089,524, filed Jun. 16, 1998; and to U.S. Provisional Appln. Ser. No. 60/089,793, filed Jun. 18, 1998; and to U.S. Provisional Appln. Ser. No. 60/089,810, filed Jun. 18, 1998; and to U.S. Provisional Appln. Ser. No. 60/089,814, filed Jun. 18, 1998; and to U.S. Provisional Appln. Ser. No. 60/099,668, filed Sep. 9, 1998; and to U.S. Provisional Appln. Ser. No. 60/099,670, filed Sep. 9, 1998; and to U.S. Provisional Appln. Ser. No. 60/099,697, filed Sep. 9, 1998; and to U.S. Provisional Appln. Ser. No. 60/100,672, filed Sep. 16, 1998; and to U.S. Provisional Appln. Ser. No. 60/100,673, filed Sep. 16, 1998; and to U.S. Provisional Appln. Ser. No. 60/100,674, filed Sep. 16, 1998; and to U.S. Provisional Appln. Ser. No. 60/101,130, filed Sep. 21, 1998; and to U.S. Provisional Appln. Ser. No. 60/101,131, filed Sep. 21, 1998; and to U.S. Provisional Appln. Ser. No. 60/101,132, filed September 21, and to U.S. Provisional Appln. Ser. No. 60/108,996, filed Nov. 18, 1998; and to U.S. Provisional Appln. Ser. No. 60/109,018, filed Nov. 18, 1998. U.S. application Ser. No. 09/333,535 also claims the benefit of U.S. Provisional Appln. Ser. No. 60/089,524, filed Jun. 16, 1998; and to U.S. Provisional Appln. Ser. No. 60/089,793, filed Jun. 18, 1998; and to U.S. Provisional Appln. Ser. No. 60/089,810, filed Jun. 18, 1998; and to U.S. Provisional Appln. Ser. No. 60/089,814, filed Jun. 18, 1998; and to U.S. Provisional Appln. Ser. No. 60/099,668, filed Sep. 9, 1998; and to U.S. Provisional Appln. Ser. No. 60/099,670, filed Sep. 9, 1998; and to U.S. Provisional Appln. Ser. No. 60/099,697, filed Sep. 9, 1998; and to U.S. Provisional Appln. Ser. No. 60/100,672, filed Sep. 16, 1998; and to U.S. Provisional Appln. Ser. No. 60/100,673; filed Sep. 16, 1998; and to U.S. Provisional Appln. Ser. No. 60/100,674, filed Sep. 16, 1998; and to U.S. Provisional Appln. Ser. No. 60/101,130, filed Sep. 21, 1998; and to U.S. Provisional Appln. Ser. No. 60/101,131, filed Sep. 21, 1998; and to U.S. Provisional Appln. Ser. No. 60/101,132, filed September 21, and to U.S. Provisional Appln. Ser. No. 60/108,996, filed Nov. 18, 1998; and to U.S. Provisional Appln. Ser. No. 60/109,018, filed Nov. 18, 1998; and to U.S. Provisional Appln. Ser. No. 60/111,981, filed Dec. 11, 1998; and to U.S. Provisional Appln. Ser. No. 60/112,221, filed Dec. 14, 1998; and to U.S. Provisional Appln. Ser. No. 60/112,229, filed Dec. 14, 1998; and to U.S. Provisional Appln. Ser. No. 60/112,808, filed Dec. 18, 1998; and to U.S. Provisional Appln. Ser. No. 60/113,224, filed Dec. 22, 1998; and to U.S. Provisional Appln. Ser. No. 60/125,816, filed Mar. 23, 1999; and to U.S. Provisional Appln. Ser. No. 60/125,817, filed Mar. 23, 1999; and to U.S. Provisional Appln. Ser. No. 60/125,818, filed Mar. 23, 1999; and to U.S. Provisional Appln. Ser. No. 60/130,174, filed Apr. 20, 1999; and to U.S. Provisional Appln. Ser. No. 60/130,464, filed Apr. 22, 1999; and to U.S. Provisional Appln. Ser. No. 60/133,690, filed May 10, 1999; and to U.S. Provisional Appln. Ser. No. 60/133,691, filed May 10, 1999; and to U.S. Provisional Appln. Ser. No. 60/133,692, filed May 10, 1999. U.S. application Ser. No. 09/531,113 also claims the benefit of U.S. Provisional Appln. Ser. No. 60/125,816, filed Mar. 23, 1999; and to U.S. Provisional Appln. Ser. No. 60/125,817, filed Mar. 23, 1999; and to U.S. Provisional Appln. Ser. No. 60/125,818, filed Mar. 23, 1999; and to U.S. Provisional Appln. Ser. No. 60/130,174, filed Apr. 20, 1999; and to U.S. Provisional Appln. Ser. No. 60/130,464, filed Apr. 22, 1999; and to U.S. Provisional Appln. Ser. No. 60/133,690, filed May 10, 1999; and to U.S. Provisional Appln. Ser. No. 60/133,691, filed May 10, 1999; and to U.S. Provisional Appln. Ser. No. 60/133,692, filed May 10, 1999; and to U.S. Provisional Appln. Ser. No. 60/141,129, filed Jun. 28, 1999; and to U.S. Provisional Appln. Ser. No. 60/141,132, filed Jun. 28, 1999; and to U.S. Provisional Appln. Ser. No. 60/141,135, filed Jun. 28, 1999; and to U.S. Provisional Appln. Ser. No. 60/141,136, filed Jun. 28, 1999; and to U.S. Provisional Appln. Ser. No. 60/141,137, filed Jun. 28, 1999; and to U.S. Provisional Appln. Ser. No. 60/141,139, filed Jun. 28, 1999; and to U.S. Provisional Appln. Ser. No. 60/144,084, filed Jul. 16, 1999; and to U.S. Provisional Appln. Ser. No. 60/154,375, filed Sep. 17, 1999; and to U.S. Provisional Appln. Ser. No. 60/179,730, filed Feb. 2, 2000. U.S. application Ser. No. 09/552,086 also claims the benefit of U.S. Provisional Appln. Ser. No. 60/130,174, filed Apr. 20, 1999; and to U.S. Provisional Appln. Ser. No. 60/130,464, filed Apr. 22, 1999; and to U.S. Provisional Appln. Ser. No. 60/133,690, filed May 10, 1999; and to U.S. Provisional Appln. Ser. No. 60/133,691, filed May 10, 1999; and to U.S. Provisional Appln. Ser. No. 60/133,692, filed May 10, 1999; and to U.S. Provisional Appln. Ser. No. 60/141,129, filed Jun. 28, 1999; and to U.S. Provisional Appln. Ser. No. 60/141,132, filed Jun. 28, 1999; and to U.S. Provisional Appln. Ser. No. 60/141,135, filed Jun. 28, 1999; and to U.S. Provisional Appln. Ser. No. 60/141,136, filed Jun. 28, 1999; and to U.S. Provisional Appln. Ser. No. 60/141,137, filed Jun. 28, 1999; and to U.S. Provisional Appln. Ser. No. 60/141,139, filed Jun. 28, 1999; and to U.S. Provisional Appln. Ser. No. 60/144,084, filed Jul. 16, 1999; and to U.S. Provisional Appln. Ser. No. 60/154,375, filed Sep. 17, 1999; and to U.S. Provisional Appln. Ser. No. 60/179,730, filed Feb. 2, 2000. All of the above-listed applications are herein incorporated by reference in their entirety.

### INCORPORATION OF SEQUENCE LISTING

[0002] This application contains a sequence listing, which is contained on three identical CD-ROMs: two copies of a sequence listing (Copy 1 and Copy 2) and a sequence listing Computer Readable Form (CRF), all of which are herein incorporated by reference. All three CD-ROMs each contain one file called “15760C seq list.txt” which is 16,515,072 bytes in size (measured in Windows XP) and which was created on Jan. 12, 2006.

### FIELD OF THE INVENTION

[0003] The present invention is in the field of plant biochemistry. More specifically the invention relates to nucleic acid molecules that encode proteins and fragments of proteins produced in plant cells, in particular, soybean plants. The invention also relates to proteins and fragments of proteins so encoded and antibodies capable of binding the proteins. The invention also relates to methods of using the nucleic acid molecules, proteins and fragments of proteins.

### BACKGROUND OF THE INVENTION

### I. Expressed Sequence Tag Nucleic Acid Molecules

[0004] Expressed sequence tags, or ESTs, are short sequences of randomly selected clones from a cDNA (or complementary DNA) library which are representative of the cDNA inserts of these randomly selected clones. McCombie, et al., Nature Genetics, 1:124-130 (1992); Kurata, et al., Nature Genetics, 8: 365-372 (1994); Okubo, et al., Nature Genetics, 2: 173-179 (1992), all of which references are incorporated herein in their entirety.

[0005] Using conventional methodologies, cDNA libraries can be constructed from the mRNA (messenger RNA) of a given tissue or organism using poly dT primers and reverse transcriptase (Efstratiadis, et al., Cell 7:279-288 (1976), the entirety of which is herein incorporated by reference; Higuchi, et al., Proc. Natl. Acad. Sci. (U.S.A.) 73:3146-3150 (1976), the entirety of which is herein incorporated by reference; Maniatis, et al., Cell 8:163 (1976) the entirety of which is herein incorporated by reference; Land, et al., Nucleic Acids Res. 9:2251-2266 (1981), the entirety of which is herein incorporated by reference; Okayama, et al., Mol. Cell. Biol. 2:161-170 (1982), the entirety of which is herein incorporated by reference; Gubler, et al., Gene 25:263 (1983), the entirety of which is herein incorporated by reference).

[0006] Several methods may be employed to obtain full-length cDNA constructs. For example, terminal transferase can be used to add homopolymeric tails of dC residues to the free 3′ hydroxyl groups (Land, et al., Nucleic Acids Res. 9:2251-2266 (1981), the entirety of which is herein incorporated by reference). This tail can then be hybridized by a poly dG oligo which can act as a primer for the synthesis of full length second strand cDNA. Okayama and Berg, report a method for obtaining full length cDNA constructs. This method has been simplified by using synthetic primer-adapters that have both homopolymeric tails for priming the synthesis of the first and second strands and restriction sites for cloning into plasmids (Coleclough, et al., Gene 34:305-314 (1985), the entirety of which is herein incorporated by reference) and bacteriophage vectors (Krawinkel, et al., Nucleic Acids Res. 14:1913 (1986), the entirety of which is herein incorporated by reference; and Han, et al., Nucleic Acids Res. 15:6304 (1987), the entirety of which is herein incorporated by reference).

[0007] These strategies have been coupled with additional strategies for isolating rare mRNA populations. For example, a typical mammalian cell contains between 10,000 and 30,000 different mRNA sequences. Davidson, Gene Activity in Early Development, 2nd ed., Academic Press, New York (1976). The number of clones required to achieve a given probability that a low-abundance mRNA will be present in a cDNA library is N=(ln(1−P))/(ln(1−1/n)) where N is the number of clones required, P is the probability desired, and 1/n is the fractional proportion of the total mRNA that is represented by a single rare mRNA. (Sambrook, et al., Molecular Cloning: A Laboratory Manual, 2nd ed., Cold Spring Harbor Laboratory Press (1989), the entirety of which is herein incorporated by reference.).

[0008] A method to enrich preparations of mRNA for sequences of interest is to fractionate by size. One such method is to fractionate by electrophoresis through an agarose gel (Pennica, et al., Nature 301:214-221 (1983), the entirety of which is herein incorporated by reference). Another such method employs sucrose gradient centr ifugation in the presence of an agent, such as methylmercuric hydroxide, that denatures secondary structure in RNA (Schweinfest, et al., Proc. Natl. Acad. Sci. (U.S.A.) 79:4997-5000 (1982), the entirety of which is herein incorporated by reference).

[0009] A frequently adopted method is to construct equalized or normalized cDNA libraries (Ko, Nucleic Acids Res. 18:5705-5711 (1990), the entirety of which is herein incorporated by reference; Patanjali, S. R. et al., Proc. Natl. Acad. Sci. (U.S.A.) 88:1943-1947 (1991), the entirety of which is herein incorporated by reference). Typically, the cDNA population is normalized by subtractive hybridization. Schmid, et al., J. Neurochem. 48:307-312 (1987) the entirety of which is herein incorporated by reference; Fargnoli, et al., Anal. Biochem. 187:364-373 (1990) the entirety of which is herein incorporated by reference; Travis, et al., Proc. Natl. Acad. Sci. (U.S.A.) 85:1696-1700 (1988) the entirety of which is herein incorporated by reference; Kato, Eur. J. Neurosci. 2:704 (1990); and Schweinfest, et al., Genet. Anal. Tech. Appl. 7:64 (1990), the entirety of which is herein incorporated by reference). Subtraction represents another method for reducing the population of certain sequences in the cDNA library. Swaroop, et al., Nucleic Acids Res. 19:1954 (1991), the entirety of which is herein incorporated by reference).

[0010] ESTs can be sequenced by a number of methods. Two basic methods may be used for DNA sequencing, the chain termination method of Sanger et al., Proc. Natl. Acad. Sci. (U.S.A.) 74: 5463-5467 (1977), the entirety of which is herein incorporated by reference and the chemical degradation method of Maxam and Gilbert, Proc. Nat. Acad. Sci. (U.S.A.) 74: 560-564 (1977), the entirety of which is herein incorporated by reference. Automation and advances in technology such as the replacement of radioisotopes with fluorescence-based sequencing have reduced the effort required to sequence DNA (Craxton, Methods, 2: 20-26 (1991), the entirety of which is herein incorporated by reference; Ju et al., Proc. Natl. Acad. Sci. (U.S.A.) 92: 4347-4351 (1995), the entirety of which is herein incorporated by reference; Tabor and Richardson, Proc. Natl. Acad. Sci. (U.S.A.) 92: 6339-6343 (1995), the entirety of which is herein incorporated by reference). Automated sequencers are available from, for example, Pharmacia Biotech, Inc., Piscataway, N.J. (Pharmacia ALF), LI-COR, Inc., Lincoln, Nebr. (LI-COR 4,000) and Millipore, Bedford, Mass. (Millipore BaseStation).

[0011] In addition, advances in capillary gel electrophoresis have also reduced the effort required to sequence DNA and such advances provide a rapid high resolution approach for sequencing DNA samples (Swerdlow and Gesteland, Nucleic Acids Res. 18:1415-1419 (1990); Smith, Nature 349:812-813 (1991); Luckey et al., Methods Enzymol. 218:154-172 (1993); Lu et al., J. Chromatog. A. 680:497-501 (1994); Carson et al., Anal. Chem. 65:3219-3226 (1993); Huang et al., Anal. Chem. 64:2149-2154 (1992); Kheterpal et al., Electrophoresis 17:1852-1859 (1996); Quesada and Zhang, Electrophoresis 17:1841-1851 (1996); Baba, Yakugaku Zasshi 117:265-281 (1997), all of which are herein incorporated by reference in their entirety).

[0012] ESTs longer than 150 bases have been found to be useful for similarity searches and mapping. (Adams, et al., Science 252:1651-1656 (1991), herein incorporated by reference.) EST sequences normally range from 150-450 bases. This is the length of sequence information that is routinely and reliably generated using single run sequence data. Typically, only single run sequence data is obtained from the cDNA library, Adams, et al., Science 252:1651-1656 (1991). Automated single run sequencing typically results in an approximately 2-3% error or base ambiguity rate. (Boguski, et al., Nature Genetics, 4:332-333 (1993), the entirety of which is herein incorporated by reference).

[0013] EST databases have been constructed or partially constructed from, for example, C. elegans (McCombrie, et al., Nature Genetics 1: 124-131 (1992), human liver cell line HepG2 (Okubo, et al., Nature Genetics 2:173-179 (1992)), human brain RNA (Adams, et al., Science 252:1651-1656 (1991); Adams, et al., Nature 355:632-635 (1992)), Arabidopsis, (Newman, et al., Plant Physiol. 106:1241-1255 (1994)); and rice (Kurata, et al., Nature Genetics 8:365-372 (1994).

### II. Sequence Comparisons

[0014] A characteristic feature of a protein or DNA sequence is that it can be compared with other known protein or DNA sequences. Sequence comparisons can be undertaken by determining the similarity of the test or query sequence with sequences in publicly available or propriety databases (“similarity analysis”) or by searching for certain motifs (“intrinsic sequence analysis”) (e.g. cis elements) (Coulson, Trends in Biotechnology, 12: 76-80 (1994), the entirety of which is herein incorporated by reference; Birren, et al., Genome Analysis, 1: 543-559 (1997), the entirety of which is herein incorporated by reference).

[0015] Similarity analysis includes database search and alignment. Examples of public databases include the DNA Database of Japan (DDBJ) (available on the Worldwide Web at ddbj.nig.acjp/); Genebank (available on the Worldwide Web at ncbi.nlm.nih.gov/web/Genbank/Index.htlm); and the European Molecular Biology Laboratory Nucleic Acid Sequence Database (EMBL) (available on the Worldwide Web at ebi.ac.uk/ebi_docs/embl_db.html). A number of different search algorithms have been developed, one example of which are the suite of programs referred to as BLAST programs. There are five implementations of BLAST, three designed for nucleotide sequences queries (BLASTN, BLASTX, and TBLASTX) and two designed for protein sequence queries (BLASTP and TBLASTN) (Coulson, Trends in Biotechnology, 12: 76-80 (1994); Birren, et al., Genome Analysis, 1: 543-559 (1997)).

[0016] BLASTN takes a nucleotide sequence (the query sequence) and its reverse complement and searches them against a nucleotide sequence database. BLASTN was designed for speed, not maximum sensitivity, and may not find distantly related coding sequences. BLASTX takes a nucleotide sequence, translates it in three forward reading frames and three reverse complement reading frames, and then compares the six translations against a protein sequence database. BLASTX is useful for sensitive analysis of preliminary (single-pass) sequence data and is tolerant of sequencing errors (Gish and States, Nature Genetics, 3: 266-272 (1993), the entirety of which is herein incorporated by reference). BLASTN and BLASTX may be used in concert for analyzing EST data (Coulson, Trends in Biotechnology, 12: 76-80 (1994); Birren, et al., Genome Analysis, 1: 543-559 (1997).

[0017] Given a coding nucleotide sequence and the protein it encodes, it is often preferable to use the protein as the query sequence to search a database because of the greatly increased sensitivity to detect more subtle relationships. This is due to the larger alphabet of proteins (20 amino acids) compared with the alphabet of nucleic acid sequences (4 bases), where it is far easier to obtain a match by chance. In addition, with nucleotide alignments, only a match (positive score) or a mismatch (negative score) is obtained, but with proteins, the presence of conservative amino acid substitutions can be taken into account. Here, a mismatch may yield a positive score if the non-identical residue has physical/chemical properties similar to the one it replaced. Various scoring matrices are used to supply the substitution scores of all possible amino acid pairs. A general purpose scoring system is the BLOSUM62 matrix (Henikoff and Henikoff, Proteins, 17: 49-61 (1993), the entirety of which is herein incorporated by reference), which is currently the default choice for BLAST programs. BLOSUM62 is tailored for alignments of moderately diverged sequences and thus may not yield the best results under all conditions. Altschul, J. Mol. Biol. 36: 290-300 (1993), the entirety of which is herein incorporated by reference, uses a combination of three matrices to cover all contingencies. This may improve sensitivity, but at the expense of slower searches. In practice, a single BLOSUM62 matrix is often used but others (PAM40 and PAM250) may be attempted when additional analysis is necessary. Low PAM matrices are directed at detecting very strong but localized sequence similarities, whereas high PAM matrices are directed at detecting long but weak alignments between very distantly related sequences.

[0018] Homologues in other organisms are available that can be used for comparative sequence analysis. Multiple alignments are performed to study similarities and differences in a group of related sequences. CLUSTAL W is a multiple sequence alignment package available that performs progressive multiple sequence alignments based on the method of Feng and Doolittle, J. Mol. Evol. 25: 351-360 (1987), the entirety of which is herein incorporated by reference. Each pair of sequences is aligned and the distance between each pair is calculated; from this distance matrix, a guide tree is calculated, and all of the sequences are progressively aligned based on this tree. A feature of the program is its sensitivity to the effect of gaps on the alignment; gap penalties are varied to encourage the insertion of gaps in probable loop regions instead of in the middle of structured regions. Users can specify gap penalties, choose between a number of scoring matrices, or supply their own scoring matrix for both the pairwise alignments and the multiple alignments. CLUSTAL W for UNIX and VMS systems is available at: ftp.ebi.ac.uk. Another program is MACAW (Schuler et al., Proteins, Struct. Func. Genet, 9:180-190 (1991), the entirety of which is herein incorporated by reference, for which both Macintosh and Microsoft Windows versions are available. MACAW uses a graphical interface, provides a choice of several alignment algorithms, and is available by anonymous ftp at: ncbi.nlm.nih.gov (directory/pub/macaw).

[0019] Sequence motifs are derived from multiple alignments and can be used to examine individual sequences or an entire database for subtle patterns. With motifs, it is sometimes possible to detect distant relationships that may not be demonstrable based on comparisons of primary sequences alone. Currently, the largest collection of sequence motifs in the world is PROSITE (Bairoch and Bucher, Nucleic Acid Research, 22: 3583-3589 (1994), the entirety of which is herein incorporated by reference.) PROSITE may be accessed via either the ExPASy server on the World Wide Web or anonymous ftp site. Many commercial sequence analysis packages also provide search programs that use PROSITE data.

[0020] A resource for searching protein motifs is the BLOCKS E-mail server developed by S. Henikoff, Trends Biochem Sci., 18:267-268 (1993), the entirety of which is herein incorporated by reference; Henikoff and Henikoff, Nucleic Acid Research, 19:6565-6572 (1991), the entirety of which is herein incorporated by reference; Henikoli and Henikoff, Proteins, 17: 49-61 (1993). BLOCKS searches a protein or nucleotide sequence against a database of protein motifs or “blocks.” Blocks are defined as short, ungapped multiple alignments that represent highly conserved protein patterns. The blocks themselves are derived from entries in PROSITE as well as other sources. Either a protein or nucleotide query can be submitted to the BLOCKS server; if a nucleotide sequence is submitted, the sequence is translated in all six reading frames and motifs are sought in these conceptual translations. Once the search is completed, the server will return a ranked list of significant matches, along with an alignment of the query sequence to the matched BLOCKS entries.

[0021] Conserved protein domains can be represented by two-dimensional matrices, which measure either the frequency or probability of the occurrences of each amino acid residue and deletions or insertions in each position of the domain. This type of model, when used to search against protein databases, is sensitive and usually yields more accurate results than simple motif searches. Two popular implementations of this approach are profile searches (such as GCG program ProfileSearch) and Hidden Markov Models (HMMs)(Krough et al., J. Mol. Biol. 235:1501-1531 (1994); Eddy, Current Opinion in Structural Biology 6:361-365 (1996), both of which are herein incorporated by reference in their entirety). In both cases, a large number of common protein domains have been converted into profiles, as present in the PROSITE library, or HHM models, as in the Pfam protein domain library (Sonnhammer et al., Proteins 28:405-420 (1997), the entirety of which is herein incorporated by reference). Pfam contains more than 500 HMM models for enzymes, transcription factors, signal transduction molecules, and structural proteins. Protein databases can be queried with these profiles or HMM models, which will identify proteins containing the domain of interest. For example, HMMSW or HMMFS, two programs in a public domain package called HMMER (Sonnhammer et al., Proteins 28:405-420 (1997)) can be used.

[0022] PROSITE and BLOCKS represent collected families of protein motifs. Thus, searching these databases entails submitting a single sequence to determine whether or not that sequence is similar to the members of an established family. Programs working in the opposite direction compare a collection of sequences with individual entries in the protein databases. An example of such a program is the Motif Search Tool, or MoST (Tatusov et al. Proc. Natl. Acad. Sci. 91: 12091-12095 (1994), the entirety of which is herein incorporated by reference.) On the basis of an aligned set of input sequences, a weight matrix is calculated by using one of four methods (selected by the user); a weight matrix is simply a representation, position by position in an alignment, of how likely a particular amino acid will appear. The calculated weight matrix is then used to search the databases. To increase sensitivity, newly found sequences are added to the original data set, the weight matrix is recalculated, and the search is performed again. This procedure continues until no new sequences are found.

### SUMMARY OF THE INVENTION

[0023] The present invention provides a substantially purified nucleic acid molecule that encodes a soybean protein or fragment thereof comprising a nucleic acid sequence selected from the group consisting of SEQ ID NO: 1 through SEQ ID NO: 27278.

[0024] The present invention also provides one or more substantially purified nucleic acid molecules comprising a nucleic acid sequence selected from the group consisting of SEQ ID NO: 1 through SEQ ID NO: 27278 or complements thereof.

[0025] The present invention also provides a substantially purified soybean protein or fragment thereof, wherein said soybean protein is encoded by a nucleic acid molecule that comprises a nucleic acid sequence selected from the group consisting of SEQ ID NO: 1 through SEQ ID NO: 27278.

[0026] The present invention further provides a substantially purified protein, peptide, or fragment thereof encoded by a nucleic acid sequence which specifically hybridizes to a nucleic acid molecule comprising a nucleic acid sequence selected from the group consisting of a complement of SEQ ID NO: 1 through SEQ ID NO:27278.

[0027] The present invention further provides a substantially purified antibody capable of specifically binding to a protein or fragment thereof encoded by a nucleic acid sequence which specifically hybridizes to a nucleic acid molecule having a nucleic acid sequence selected from the group consisting of a complement of SEQ ID NO:1 through SEQ ID NO:27278.

[0028] The present invention also provides a transformed plant transformed to contain a nucleic acid molecule which comprises: (A) an exogenous promoter region which functions in plant cells to cause the production of an mRNA molecule; which is linked to (B) a structural nucleic acid molecule, wherein said structural nucleic acid molecule comprises a nucleic acid molecule that encodes a protein, peptide, or fragment thereof which hybridizes to a nucleic acid sequence selected from the group consisting of a complement of SEQ ID NO:1 through SEQ ID NO:27278 expressed in an effective amount to produce a desirable agronomic effect; which is linked to (C) a 3′ non-translated sequence that functions in plant cells to cause the termination of transcription and the addition of polyadenylated ribonucleotides to the 3′ end of the mRNA sequence.

[0029] The present invention also provides a transformed plant cell containing a nucleic acid molecule whose non-transcribed strand encodes a protein or fragment thereof, wherein the transcribed strand of said nucleic acid is complementary to a nucleic acid molecule that encodes a protein or fragment thereof. The present invention also provides bacterial, viral, microbial, and plant cells comprising a nucleic acid molecule of the present invention.

[0030] The present invention also provides a method of producing a plant containing one or more proteins encoded by sequences comprising SEQ ID NO:1 or complement thereof through SEQ ID NO: 27278 or complements thereof, expressed in a sufficient amount and/or fashion to produce a desirable agronomic effect.

[0031] In accomplishing the foregoing, there is provided, in accordance with one aspect of the present invention, methods of producing genetically transformed plants, comprising the steps of:
[0032] (a) inserting into the genome of a plant cell a recombinant, double-stranded DNA molecule comprising
   [0033] (i) a promoter which functions in plant cells to cause the production of an RNA sequence,
   [0034] (ii) a structural DNA sequence that causes the production of an RNA sequence which encodes a desired protein.
   [0035] (iii) a 3′ non-translated DNA sequence which functions in plant cells to cause the addition of polyadenylated nucleotides to the 3′ end of RNA sequence; where the promoter is homologous or heterologous with respect to the coding sequence and adapted to cause sufficient expression of a protein in desired plant tissues to enhance the agronomic utility of a plant transformed with said gene.
[0036] (b) obtaining a transformed plant cell with said nucleic acid molecule that encodes one or more proteins, wherein said nucleic acid molecule is transcribed and results in expression of said protein(s); and
[0037] (c) regenerating from the transformed plant cell a genetically transformed plant

[0038] The present invention also encompasses differentiated plants, seeds, and progeny comprising said transformed plant cells and which exhibit novel properties of agronomic significance.

[0039] The present invention also provides a method of producing a plant containing reduced levels of a protein comprising: (A) transforming a plant cell with a nucleic acid molecule that encodes a protein, wherein said nucleic acid molecule is transcribed and results in co-suppression of endogenous protein synthesis activity, and (B) regenerating plants and producing subsequent progeny from the transformed plant.

[0040] The present invention also provides a method of determining an association between a polymorphism and a plant trait comprising: (A) hybridizing a nucleic acid molecule specific for a polymorphism to genetic material of a plant, wherein said nucleic acid molecule comprising a nucleic acid sequence selected from the group consisting of SEQ ID NO: 1 through SEQ ID NO: 27278 or complements thereof; and (B) calculating the degree of association between the polymorphism and the plant trait.

[0041] The present invention also provides a method of isolating a genetic region, or nucleic acid that encodes a protein or fragment thereof comprising: (A) incubating under conditions permitting nucleic acid hybridization: a marker nucleic acid molecule, preferably an EST, with a complementary nucleic acid molecule obtained from a plant cell or plant tissue; (B) permitting hybridization between said marker nucleic acid molecule, preferably an EST, and said complementary nucleic acid molecule obtained from said plant cell or plant tissue; and (C) isolating said complementary nucleic acid molecule.

[0042] The present invention also provides a method for determining a level or pattern in a plant cell of a protein in a plant comprising: (A) incubating, under conditions permitting nucleic acid hybridization, a marker nucleic acid molecule, the marker nucleic acid molecule selected from the group of marker nucleic acid molecules which specifically hybridize to a nucleic acid molecule having the nucleic acid sequence selected from the group consisting of SEQ ID NO: 1 through SEQ ID NO: 27278 or complements thereof or fragments of either, with a complementary nucleic acid molecule obtained from the plant cell or plant tissue, wherein nucleic acid hybridization between the marker nucleic acid molecule and the complementary nucleic acid molecule obtained from the plant cell or plant tissue permits the detection of an mRNA for the enzyme; (B)

[0043] permitting hybridization between the marker nucleic acid molecule and the complementary nucleic acid molecule obtained from the plant cell or plant tissue; and (C) detecting the level or pattern of the complementary nucleic acid, wherein the detection of the complementary nucleic acid is predictive of the level or pattern of the protein.

[0044] The present invention also provides a method for determining the level or pattern of a protein in a plant cell or plant tissue comprising: (A) incubating under conditions permitting nucleic acid hybridization: a marker nucleic acid molecule, the marker nucleic acid molecule comprising a nucleotide sequence selected from the group consisting of SEQ ID NO: 1 through SEQ ID NO: 27278 or complements thereof, with a complementary nucleic acid molecule obtained from a plant cell or plant tissue, wherein nucleic acid hybridization between the marker nucleic acid molecule, and the complementary nucleic acid molecule obtained from the plant cell or plant tissue permits the detection of said protein; (B) permitting hybridization between the marker nucleic acid molecule and the complementary nucleic acid molecule obtained from the plant cell or plant tissue; and (C) detecting the level or pattern of the complementary nucleic acid, wherein the detection of said complementary nucleic acid is predictive of the level or pattern of the protein synthesis.

[0045] The present invention also provides a method for determining a level or pattern of a protein in a plant cell or plant tissue which comprises assaying the concentration of a molecule, whose concentration is dependent upon the expression of a gene, the gene having a nucleic acid sequence which specifically hybridizes to a protein marker nucleic acid molecule, the molecule being present in a plant cell or plant tissue, in comparison to the concentration of that molecule present in a plant cell or plant tissue with a known level or pattern of said protein, wherein an assayed concentration of the molecule is compared to the assayed concentration of the molecule in a plant cell or plant tissue with a known level or pattern of said protein.

[0046] The present invention also provides a method of determining a mutation in a plant whose presence is predictive of a mutation affecting a level or pattern of a protein comprising the steps: (A) incubating, under conditions permitting nucleic acid hybridization, a marker nucleic acid, the marker nucleic acid selected from the group of marker nucleic acid molecules which specifically hybridize to a nucleic acid molecule consisting of the nucleic acid sequence selected from the group consisting of SEQ ID NO: 1 through SEQ ID NO: 27278 or complements thereof or fragments of either and a complementary nucleic acid molecule obtained from the plant, wherein nucleic acid hybridization between the marker nucleic acid molecule and the complementary nucleic acid molecule obtained from the plant permits the detection of a polymorphism whose presence is predictive of a mutation affecting the level or pattern of the protein in the plant; (B) permitting hybridization between the marker nucleic acid molecule and the complementary nucleic acid molecule obtained from the plant; and (C) detecting the presence of the polymorphism, wherein the detection of the polymorphism is predictive of the mutation.

[0047] The present invention also provides a method for determining a mutation in a plant whose presence is predictive of a mutation affecting the level or pattern of protein synthesis comprising the steps: (A) incubating under conditions permitting nucleic acid hybridization: a marker nucleic acid molecule, the marker nucleic acid molecule comprising a nucleic acid molecule that is linked to gene, the gene having a nucleic acid sequence which specifically hybridizes to a sequence selected from the group consisting of SEQ ID NO: 1 through SEQ ID NO: 27278 and complements thereof, and a complementary nucleic acid molecule obtained from a plant tissue or plant cell of the plant, wherein nucleic acid hybridization between the marker nucleic acid molecule and the complementary nucleic acid molecule obtained from the plant permits the detection of a polymorphism whose presence is predictive of a mutation affecting said level or pattern of a protein synthesis in the plant; (B) permitting hybridization between said marker nucleic acid molecule and said complementary nucleic acid molecule obtained from said plant; and; (C) detecting the presence of the polymorphism, wherein the detection of the polymorphism is predictive of the mutation.

[0048] The present invention also provides a method for reducing expression of a protein in a plant cell, the method comprising: growing a transformed plant cell containing a nucleic acid molecule whose non-transcribed strand encodes a protein or fragment thereof, wherein the transcribed strand of said nucleic acid is complementary to a nucleic acid molecule that encodes the protein in said plant cell, and whereby the strand that is complementary to the nucleic acid molecule that encodes the protein reduces or depresses expression of the protein.

[0049] The present invention provides soybean nucleic acid molecules for use as molecular tags to isolate genetic regions (i.e. promoters and flanking sequences), isolate genes, map genes, and determine gene function. The present invention further provides soybean nucleic acid molecules for use in determining if genes are members of a particular gene family.

[0050] The present invention also provides a method of obtaining full length genes using soybean ESTs or complements thereof or fragments of either.

[0051] The present invention also provides a method of isolating promoters and flanking sequences using soybean ESTs or complements thereof or fragments of either.

[0052] The present invention also provides soybean ESTs or complements thereof or fragments of either for use in marker-assisted breeding programs.

[0053] The present invention also provides a method of identifying tissues comprising hybridizing nucleic acids from the tissue with soybean ESTs or complements thereof or fragments of either.

[0054] The present invention also provides a method for production of antibodies targeted against the proteins, peptides, or fragments produced by the disclosed or complements thereof or fragments of either.

[0055] The present invention also provides a method for the transformation and regeneration of plants comprising sequences hybridizable to the disclosed ESTs or complements thereof or fragments of either.

[0056] The present invention also provides a method of modifying plant protein expression by inserting in a chimeric gene sense or antisense constructs of the soybean ESTs.

### DETAILED DESCRIPTION OF THE INVENTION

### Agents

[0057] (a) Nucleic Acid Molecules

[0058] Agents of the present invention include nucleic acid molecules and more specifically EST nucleic acid molecules or nucleic acid fragment molecules thereof. Fragment EST nucleic acid molecules may encode significant portion(s) of, or indeed most of, the EST nucleic acid molecule. Alternatively, the fragments may comprise smaller oligonucleotides (having from about 15 to about 250 nucleotide residues, and more preferably, about 15 to about 30 nucleotide residues).

[0059] A subset of the nucleic acid molecules of the present invention includes nucleic acid molecules that are marker molecules. Another subset of the nucleic acid molecules of the present invention include nucleic acid molecules that encode a protein or fragment thereof. Another subset of the nucleic acid molecules of the present invention are EST molecules.

[0060] The term “substantially purified”, as used herein, refers to a molecule separated from substantially all other molecules normally associated with it in its native state. More preferably a substantially purified molecule is the predominant species present in a preparation. A substantially purified molecule may be greater than 60% free, preferably 75% free, more preferably 90% free, and most preferably 95% free from the other molecules (exclusive of solvent) present in the natural mixture. The term “substantially purified” is not intended to encompass molecules present in their native state.

[0061] The agents of the present invention will preferably be “biologically active” with respect to either a structural attribute, such as the capacity of a nucleic acid to hybridize to another nucleic acid molecule, or the ability of a protein to be bound by antibody (or to compete with another molecule for such binding). Alternatively, such an attribute may be catalytic, and thus involve the capacity of the agent to mediate a chemical reaction or response.

[0062] The agents of the present invention may also be recombinant. As used herein, the term recombinant means any agent (e.g. DNA, peptide etc.), that is, or results, however indirect, from human manipulation of a nucleic acid molecule.

[0063] It is understood that the agents of the present invention may be labeled with reagents that facilitate detection of the agent (e.g. fluorescent labels (Prober, et al., Science 238:336-340 (1987); Albarella et al., EP 144914, chemical labels (Sheldon et al., U.S. Pat. No. 4,582,789; Albarella et al., U.S. Pat. No. 4,563,417, modified bases (Miyoshi et al., EP 119448, all of which are hereby incorporated by reference in their entirety).

[0064] It is further understood, that the present invention provides bacterial, viral, microbial, and plant cells comprising the agents of the present invention.

[0065] Nucleic acid molecules or fragment thereof of the present invention are capable of specifically hybridizing to other nucleic acid molecules under certain circumstances. As used herein, two nucleic acid molecules are said to be capable of specifically hybridizing to one another if the two molecules are capable of forming an anti-parallel, double-stranded nucleic acid structure. A nucleic acid molecule is said to be the “complement” of another nucleic acid molecule if they exhibit complete complementarity. As used herein, molecules are said to exhibit “complete complementarity” when every nucleotide of one of the molecules is complementary to a nucleotide of the other. Two molecules are said to be “minimally complementary” if they can hybridize to one another with sufficient stability to permit them to remain annealed to one another under at least conventional “low-stringency” conditions. Similarly, the molecules are said to be “complementary” if they can hybridize to one another with sufficient stability to permit them to remain annealed to one another under conventional “high-stringency” conditions. Conventional stringency conditions are described by Sambrook, et al., In: Molecular Cloning, A Laboratory Manual, 2nd Edition, Cold Spring Harbor Press, Cold Spring Harbor, N.Y. (1989), and by Haymes, et al. In: Nucleic Acid Hybridization, A Practical Approach, IRL Press, Washington, D.C. (1985), the entirety of which is herein incorporated by reference. Departures from complete complementarity are therefore permissible, as long as such departures do not completely preclude the capacity of the molecules to form a double-stranded structure. Thus, in order for an nucleic acid molecule or fragment of the present invention to serve as a primer or probe it need only be sufficiently complementary in sequence to be able to form a stable double-stranded structure under the particular solvent and salt concentrations employed.

[0066] Appropriate stringency conditions which promote DNA hybridization are, for example, 6.0× sodium chloride/sodium citrate (SSC) at about 45° C., followed by a wash of 2.0×SSC at 50° C., are known to those skilled in the art or can be found in Current Protocols in Molecular Biology, John Wiley & Sons, N.Y. (1989), 6.3.1.-6.3.6. For example, the salt concentration in the wash step can be selected from a low stringency of about 2.0×SSC at 50° C. to a high stringency of about 0.2×SSC at 50° C. In addition, the temperature in the wash step can be increased from low stringency conditions at room temperature, about 22° C., to high stringency conditions at about 65° C. Both temperature and salt may be varied, or either the temperature or the salt concentration may be held constant while the other variable is changed.

[0067] In a preferred embodiment, a nucleic acid of the present invention will specifically hybridize to one or more of the nucleic acid molecules set forth in SEQ ID NO: 1 through SEQ ID NO: 27278 or complements thereof under moderately stringent conditions, for example, at about 2.0×SSC and about 65° C.

[0068] In a particularly preferred embodiment, a nucleic acid of the present invention will include those nucleic acid molecules that specifically hybridize to one or more of the nucleic acid molecules set forth in SEQ ID NO: 1 through SEQ ID NO: 27278 or complements thereof under high stringency conditions.

[0069] In one aspect of the present invention, the nucleic acid molecules of the present invention have one or more of the nucleic acid sequences set forth in SEQ ID NO: 1 through SEQ ID NO: 27278 or complements thereof. In another aspect of the present invention, one or more of the nucleic acid molecules of the present invention share between 100% and 90% sequence identity with one or more of the nucleic acid sequences set forth in SEQ ID NO: 1 through SEQ ID NO: 27278 or complements thereof. In a further aspect of the present invention, one or more of the nucleic acid molecules of the present invention share between 100% and 95% sequence identity with one or more of the nucleic acid sequences set forth in SEQ ID NO: 1 through SEQ ID NO: 27278 or complements thereof. In a more preferred aspect of the present invention, one or more of the nucleic acid molecules of the present invention share between 100% and 98% sequence identity with one or more of the nucleic acid sequences set forth in SEQ ID NO: 1 through SEQ ID NO: 27278 or complements thereof. In an even more preferred aspect of the present invention, one or more of the nucleic acid molecules of the present invention share between 100% and 99% sequence identity with one or more of the sequences set forth in SEQ ID NO: 1 through SEQ ID NO: 27278 or complements thereof. In a further, even more preferred aspect of the present invention, one or more of the nucleic acid molecules of the present invention exhibit 100% sequence identity with one or more nucleic acid molecules present within the cDNA libraries SOYMON018, and SOYMON028 (Monsanto Company, St. Louis, Mo., United States of America).

[0070] In a preferred embodiment of the present invention, a soybean protein or fragment thereof of the present invention is a homologue of another plant protein. In another preferred embodiment of the present invention, a soybean protein or fragment thereof of the present invention is a homologue of a fungal protein. In another preferred embodiment of the present invention, a soybean protein or fragment thereof of the present invention is a homologue of mammalian protein. In another preferred embodiment of the present invention, a soybean protein or fragment thereof of the present invention is a homologue of a bacterial protein. In another preferred embodiment of the present invention, a soybean protein or fragment thereof of the present invention is a homologue of a maize protein.

[0071] In a preferred embodiment of the present invention, the nucleic molecule of the present invention encodes a soybean protein or fragment thereof where a soybean protein or fragment thereof exhibits a BLAST probability score of greater than 1E-12, preferably a BLAST probability score of between about 1E-30 and about 1E-12, even more preferably a BLAST probability score of greater than 1E-30 with its homologue.

[0072] In another preferred embodiment of the present invention, the nucleic acid molecule encoding a soybean protein or fragment thereof exhibits a % identity with its homologue of between about 25% and about 40%, more preferably of between about 40 and about 70%, even more preferably of between about 70% and about 90% and even more preferably between about 90% and 99%. In another preferred embodiment, of the present invention, a soybean protein or fragment thereof exhibits a % identity with its homologue of 100%.

[0073] In a preferred embodiment of the present invention, the nucleic molecule of the present invention encodes a soybean protein or fragment thereof where the soybean protein exhibits a BLAST score of greater than 120, preferably a BLAST score of between about 1450 and about 120, even more preferably a BLAST score of greater than 1450 with its homologue.

[0074] Nucleic acid molecules of the present invention also include non-soybean homologues. Preferred non-homologues are selected from the group consisting of alfalfa, Arabidopsis, barley, Brassica, broccoli, cabbage, citrus, cotton, garlic, oat, oilseed rape, onion, canola, flax, an ornamental plant, maize, pea, peanut, pepper, potato, rice, rye, sorghum, strawberry, sugarcane, sugarbeet, tomato, wheat, poplar, pine, fir, eucalyptus, apple, lettuce, lentils, grape, banana, tea, turf grasses, sunflower, oil palm and Phaseolus.

[0075] The degeneracy of the genetic code, which allows different nucleic acid sequences to code for the same protein or peptide, is known in the literature. (U.S. Pat. No. 4,757,006, the entirety of which is herein incorporated by reference).

[0076] In an aspect of the present invention, one or more of the nucleic acid molecules of the present invention differ in nucleic acid sequence from those encoding a soybean protein or fragment thereof in SEQ ID NO: 1 through SEQ ID NO: 27278 due to the degeneracy in the genetic code in that they encode the same protein but differ in nucleic acid sequence.

[0077] In another further aspect of the present invention, one or more of the nucleic acid molecules of the present invention differ in nucleic acid sequence from those encoding a soybean protein or fragment thereof in SEQ ID NO: 1 through SEQ ID NO: 27278 due to fact that the different nucleic acid sequences encode a protein having one or more conservative amino acid residues. It is understood that codons capable of coding for such conservative substitutions are known in the art.

[0078] It is well known in the art that one or more amino acids in a native sequence can be substituted with another amino acid(s), the charge and polarity of which are similar to that of the native amino acid, i.e., a conservative amino acid substitution, resulting in a silent change. Conserved substitutes for an amino acid within the native polypeptide sequence can be selected from other members of the class to which the naturally occurring amino acid belongs. Amino acids can be divided into the following four groups: (1) acidic amino acids, (2) basic amino acids, (3) neutral polar amino acids, and (4) neutral nonpolar amino acids. Representative amino acids within these various groups include, but are not limited to, (1) acidic (negatively charged) amino acids such as aspartic acid and glutamic acid; (2) basic (positively charged) amino acids such as arginine, histidine, and lysine; (3) neutral polar amino acids such as glycine, serine, threonine, cysteine, cystine, tyrosine, asparagine, and glutamine; and (4) neutral nonpolar (hydrophobic) amino acids such as alanine, leucine, isoleucine, valine, proline, phenylalanine, tryptophan, and methionine.

[0079] Conservative amino acid changes within the native polypeptides sequence can be made by substituting one amino acid within one of these groups with another amino acid within the same group. Biologically functional equivalents of the proteins or fragments thereof of the present invention can have 10 or fewer conservative amino acid changes, more preferably seven or fewer conservative amino acid changes, and most preferably five or fewer conservative amino acid changes. The encoding nucleotide sequence will thus have corresponding base substitutions, permitting it to encode biologically functional equivalent forms of the proteins or fragments of the present invention.

[0080] It is understood that certain amino acids may be substituted for other amino acids in a protein structure without appreciable loss of interactive binding capacity with structures such as, for example, antigent-binding regions of antibodies or binding sites on substrate molecules. Because it is the interactive capacity and nature of a protein that defines that protein's biological functional activity, certain amino acid sequence substitutions can be made in a protein sequence and, of course, its underlying DNA coding sequence and, nevertheless, obtain a protein with like properties. It is thus contemplated by the inventors that various changes may be made in the peptide sequences of the proteins or fragments of the present invention, or corresponding DNA sequences that encode said peptides, without appreciable loss of their biological utility or activity. It is understood that codons capable of coding for such amino acid changes are known in the art.

[0081] In making such changes, the hydropathic index of amino acids may be considered. The importance of the hydropathic amino acid index in conferring interactive biological function on a protein is generally understood in the art (Kyte and Doolittle, J. Mol. Biol. 157, 105-132 (1982), herein incorporated by reference in its entirety). It is accepted that the relative hydropathic character of the amino acid contributes to the secondary structure of the resultant protein, which in turn defines the interaction of the protein with other molecules, for example, enzymes, substrates, receptors, DNA, antibodies, antigens, and the like.

[0082] Each amino acid has been assigned a hydropathic index on the basis of its hydrophobicity and charge characteristics (Kyte and Doolittle, 1982); these are isoleucine (+4.5), valine (+4.2), leucine (+3.8), phenylalanine (+2.8), cysteine/cystine (+2.5), methionine (+1.9), alanine (+1.8), glycine (−0.4), threonine (−0.7), serine (−0.8), tryptophan (−0.9), tyrosine (−1.3), proline (−1.6), histidine (−3.2), glutamate (−3.5), glutamine (−3.5), aspartate (−3.5), asparagine (−3.5), lysine (−3.9), and arginine (−4.5).

[0083] In making such changes, the substitution of amino acids whose hydropathic indices are within ±2 is preferred, those which are within ±1 are particularly preferred, and those within ±0.5 are even more particularly preferred.

[0084] It is also understood in the art that the substitution of like amino acids can be made effectively on the basis of hydrophilicity. U.S. Pat. No. 4,554,101, incorporated herein by reference in its entirety, states that the greatest local average hydrophilicity of a protein, as govern by the hydrophilicity of its adjacent amino acids, correlates with a biological property of the protein.

[0085] As detailed in U.S. Pat. No. 4,554,101, the following hydrophilicity values have been assigned to amino acid residues: arginine (+3.0), lysine (+3.0), aspartate (+3.0±1), glutamate (+3.0±1), serine (+0.3), asparagine (+0.2), glutamine (+0.2), glycine (0), threonine (−0.4), proline (−0.5±1), alanine (−0.5), histidine (−0.5), cysteine (−1.0), methionine (−1.3), valine (−1.5), leucine (−1.8), isoleucine (−1.8), tyrosine (−2.3), phenylalanine (−2.5), and tryptophan (−3.4).

[0086] In making such changes, the substitution of amino acids whose hydrophilicity values are within ±2 is preferred, those which are within ±1 are particularly preferred, and those within ±0.5 are even more particularly preferred.

[0087] In a further aspect of the present invention, one or more of the nucleic acid molecules of the present invention differ in nucleic acid sequence from those encoding a soybean protein or fragment thereof set forth in SEQ ID NO: 1 through SEQ ID NO: 27278 or fragment thereof due to the fact that one or more codons encoding an amino acid has been substituted for a codon that encodes a nonessential substitution of the amino acid originally encoded.

[0088] One aspect of the present invention concerns markers that include nucleic acid molecules SEQ ID NO: 1 through SEQ ID NO: 27278 or complements thereof or fragments of either that can act as markers or other nucleic acid molecules of the present invention that can act as markers. Genetic markers of the present invention include “dominant” or “codominant” markers “Codominant markers” reveal the presence of two or more alleles (two per diploid individual) at a locus. “Dominant markers” reveal the presence of only a single allele per locus. The presence of the dominant marker phenotype (e.g., a band of DNA) is an indication that one allele is present in either the homozygous or heterozygous condition. The absence of the dominant marker phenotype (e.g. absence of a DNA band) is merely evidence that “some other” undefined allele is present. In the case of populations where individuals are predominantly homozygous and loci are predominately dimorphic, dominant and codominant markers can be equally valuable. As populations become more heterozygous and multi-allelic, codominant markers often become more informative of the genotype than dominant markers. Marker molecules can be, for example, capable of detecting polymorphisms such as single nucleotide polymorphisms (SNPs).

[0089] SNPs are single base changes in genomic DNA sequence. They occur at greater frequency and are spaced with a greater uniformity throughout a genome than other reported forms of polymorphism. The greater frequency and uniformity of SNPs means that there is greater probability that such a polymorphism will be found near or in a genetic locus of interest than would be the case for other polymorphisms. SNPs are located in protein-coding regions and noncoding regions of a genome. Some of these SNPs may result in defective or variant protein expression (e.g., as a results of mutations or defective splicing). Analysis (genotyping) of characterized SNPs can require only a plus/minus assay rather than a lengthy measurement, permitting easier automation.

[0090] SNPs can be characterized using any of a variety of methods. Such methods include the direct or indirect sequencing of the site, the use of restriction enzymes (Botstein et al., Am. J. Hum. Genet. 32:314-331 (1980), the entirety of which is herein incorporated reference; Konieczny and Ausubel, Plant J 4:403-410 (1993), the entirety of which is herein incorporated by reference), enzymatic and chemical mismatch assays (Myers et al., Nature 313:495-498 (1985), the entirety of which is herein incorporated by reference), allele-specific PCR (Newton et al., Nucl. Acids Res. 17:2503-2516 (1989), the entirety of which is herein incorporated by reference; Wu et al., Proc. Natl. Acad. Sci. (U.S.A.) 86:2757-2760 (1989), the entirety of which is herein incorporated by reference), ligase chain reaction (Barany, Proc. Natl. Acad. Sci. (U.S.A.) 88:189-193 (1991), the entirety of which is herein incorporated by reference), single-strand conformation polymorphism analysis (Labrune et al., Am. J. Hum. Genet. 48: 1115-1120 (1991), the entirety of which is herein incorporated by reference), primer-directed nucleotide incorporation assays (Kuppuswami et al., Proc. Natl. Acad. Sci. USA 88:1143-1147 (1991), the entirety of which is herein incorporated by reference), dideoxy fingerprinting (Sarkar et al., Genomics 13:441-443 (1992), the entirety of which is herein incorporated by reference), solid-phase ELISA-based oligonucleotide ligation assays (Nikiforov et al., Nucl. Acids Res. 22:4167-4175 (1994), the entirety of which is herein incorporated by reference), oligonucleotide fluorescence-quenching assays (Livak et al., PCR Methods Appl. 4:357-362 (1995), the entirety of which is herein incorporated by reference), 5′-nuclease allele-specific hybridization TaqMan assay (Livak et al., Nature Genet. 9:341-342 (1995), the entirety of which is herein incorporated by reference), template-directed dye-terminator incorporation (TDI) assay (Chen and Kwok, Nucl. Acids Res. 25:347-353 (1997), the entirety of which is herein incorporated by reference), allele-specific molecular beacon assay (Tyagi et al., Nature Biotech. 16: 49-53 (1998), the entirety of which is herein incorporated by reference), PinPoint assay (Haff and Smirnov, Genome Res. 7: 378-388 (1997), the entirety of which is herein incorporated by reference) and dCAPS analysis (Neff et al., Plant J 14:387-392 (1998), the entirety of which is herein incorporated by reference).

[0091] Additional markers, such as AFLP markers, RFLP markers and RAPD markers, can be utilized (Walton, Seed World 22-29 (July, 1993), the entirety of which is herein incorporated by reference; Burow and Blake, Molecular Dissection of Complex Traits, 13-29, Paterson (ed.), CRC Press, New York (1988), the entirety of which is herein incorporated by reference). DNA markers can be developed from nucleic acid molecules using restriction endonucleases, the PCR and/or DNA sequence information. RFLP markers result from single base changes or insertions/deletions. These codominant markers are highly abundant in plant genomes, have a medium level of polymorphism and are developed by a combination of restriction endonuclease digestion and Southern blotting hybridization. CAPS are similarly developed from restriction nlclease digestion but only of specific PCR products. These markers are also codominant, have a medium level of polymorphism and are highly abundant in the genome. The CAPS result from single base changes and insertions/deletions.

[0092] Another marker type, RAPDs, are developed from DNA amplification with random primers and result from single base changes and insertions/deletions in plant genomes. They are dominant markers with a medium level of polymorphisms and are highly abundant. AFLP markers require using the PCR on a subset of restriction fragments from extended adapter primers. These markers are both dominant and codominant are highly abundant in genomes and exhibit a medium level of polymorphism.

[0093] SSRs require DNA sequence information. These codominant markers result from repeat length changes, are highly polymorphic and do not exhibit as high a degree of abundance in the genome as CAPS, AFLPs and RAPDs, SNPs also require DNA sequence information. These codominant markers result from single base substitutions. They are highly abundant and exhibit a medium of polymorphism (Rafalski et al., In: Nonmammalian Genomic Analysis, Birren and Lai (ed.), Academic Press, San Diego, Calif., pp. 75-134 (1996), the entirety of which is herein incorporated by reference). It is understood that a nucleic acid molecule of the present invention may be used as a marker.

[0094] A PCR probe is a nucleic acid molecule capable of initiating a polymerase activity while in a double-stranded structure with another nucleic acid. Various methods for determining the structure of PCR probes and PCR techniques exist in the art. Computer generated searches using programs such as Primer3 (available on the Worldwide Web at genome.wi.mit.edu/cgi-bin/primer/primer3.cgi), STSPipeline (available on the Worldwide Web at genome.wi.mit.edu/cgi-bin/www-STS_Pipeline), or GeneUp (Pesole et al., BioTechniques 25:112-123 (1998) the entirety of which is herein incorporated by reference), for example, can be used to identify potential PCR primers.

[0095] It is understood that a fragment of one or more of the nucleic acid molecules of the present invention may be a probe and specifically a PCR probe.

[0096] (b) Protein and Peptide Molecules

[0097] A class of agents comprises one or more of the protein or peptide molecules encoded by SEQ ID NO: 1 through SEQ ID NO: 27278 or one or more of the protein or fragment thereof or peptide molecules encoded by other nucleic acid agents of the present invention. As used herein, the term “protein molecule” or “peptide molecule” includes any molecule that comprises five or more amino acids. It is well know in the art that proteins may undergo modification, including post-translational modifications, such as, but not limited to, disulfide bond formation, glycosylation, phosphorylation, or oligomerization. Thus, as used herein, the term “protein molecule” or “peptide molecule” includes any protein molecule that is modified by any biological or non-biological process. The terms “amino acid” and “amino acids” refer to all naturally occurring L-amino acids. This definition is meant to include norleucine, ornithine, homocysteine, and homoserine.

[0098] One or more of the protein or fragment of peptide molecules may be produced via chemical synthesis, or more preferably, by expression in a suitable bacterial or eukaryotic host. Suitable methods for expression are described by Sambrook, et al., (In: Molecular Cloning, A Laboratory Manual, 2nd Edition, Cold Spring Harbor Press, Cold Spring Harbor, N.Y. (1989)), or similar texts.

[0099] A “protein fragment” is a peptide or polypeptide molecule whose amino acid sequence comprises a subset of the amino acid sequence of that protein. A protein or fragment thereof that comprises one or more additional peptide regions not derived from that protein is a “fusion” protein. Such molecules may be derivatized to contain carbohydrate or other moieties (such as keyhole limpet hemocyanin, etc.). Fusion protein or peptide molecule of the present invention are preferably produced via recombinant means.

[0100] Another class of agents comprise protein or peptide molecules encoded by SEQ ID NO: 1 through SEQ ID NO: 27278 or complements thereof or, fragments or fusions thereof in which non-essential, or not relevant, amino acid residues have been added, replaced, or deleted. An example of such a homologue is the homologue protein of all non-soybean plant species, including but not limited to alfalfa, Arabidopsis, barley, Brassica, broccoli, cabbage, citrus, cotton, garlic, oat, oilseed rape, onion, canola, flax, maize, an ornamental plant, pea, peanut, pepper, potato, rice, rye, sorghum, strawberry, sugarcane, sugarbeet, tomato, wheat, poplar, pine, fir, eukalyptus, apple, lettuce, peas, lentils, grape, banana, tea, turf grasses, etc. Particularly preferred non-soybean plants to utilize for the isolation of homologues would include alfalfa, Arabidopsis, barley, cotton, corn, oat, oilseed rape, rice, corn, canola, ornamentals, sugarcane, sugarbeet, tomato, potato, wheat, and turf grasses. Such a homologue can be obtained by any of a variety of methods. Most preferably, as indicated above, one or more of the disclosed sequences (SEQ ID NO: 1 through SEQ ID NO: 27278 or complements thereof) will be used to define a pair of primers that may be used to isolate the homologue-encoding nucleic acid molecules from any desired species. Such molecules can be expressed to yield homologues by recombinant means.

[0101] (c) Antibodies

[0102] One aspect of the present invention concerns antibodies, single-chain antigen binding molecules, or other proteins that specifically bind to one or more of the protein or peptide molecules of the present invention and their homologues, fusions or fragments. Such antibodies may be used to quantitatively or qualitatively detect the protein or peptide molecules of the present invention. As used herein, an antibody or peptide is said to “specifically bind” to a protein or peptide molecule of the present invention if such binding is not competitively inhibited by the presence of non-related molecules.

[0103] Nucleic acid molecules that encode all or part of the protein of the present invention can be expressed, via recombinant means, to yield protein or peptides that can in turn be used to elicit antibodies that are capable of binding the expressed protein or peptide. Such antibodies may be used in immunoassays for that protein. Such protein-encoding molecules, or their fragments may be a “fusion” molecule (i.e., a part of a larger nucleic acid molecule) such that, upon expression, a fusion protein is produced. It is understood that any of the nucleic acid molecules of the present invention may be expressed, via recombinant means, to yield proteins or peptides encoded by these nucleic acid molecules.

[0104] The antibodies that specifically bind proteins and protein fragments of the present invention may be polyclonal or monoclonal, and may comprise intact immunoglobulins, or antigen binding portions of immunoglobulins (such as (F(ab′), F(ab′)₂) fragments, or single-chain immunoglobulins producible, for example, via recombinant means). It is understood that practitioners are familiar with the standard resource materials which describe specific conditions and procedures for the construction, manipulation and isolation of antibodies (see, for example, Harlow and Lane, In Antibodies: A Laboratory Manual, Cold Spring Harbor Press, Cold Spring Harbor, N.Y. (1988), the entirety of which is herein incorporated by reference).

[0105] Murine monoclonal antibodies are particularly preferred. BALB/c mice are preferred for this purpose, however, equivalent strains may also be used. The animals are preferably immunized with approximately 25 μg of purified protein (or fragment thereof) that has been emulsified a suitable adjuvant (such as TiterMax adjuvant (Vaxcel, Norcross, Ga.)). Immunization is preferably conducted at two intramuscular sites, one intraperitoneal site, and one subcutaneous site at the base of the tail. An additional i.v. injection of approximately 25 μg of antigen is preferably given in normal saline three weeks later. After approximately 11 days following the second injection, the mice may be bled and the blood screened for the presence of anti-protein or peptide antibodies. Preferably, a direct binding Enzyme-Linked Immunoassay (ELISA) is employed for this purpose.

[0106] More preferably, the mouse having the highest antibody titer is given a third i.v. injection of approximately 25 μg of the same protein or fragment. The splenic leukocytes from this animal may be recovered 3 days later, and are then permitted to fuse, most preferably, using polyethylene glycol, with cells of a suitable myeloma cell line (such as, for example, the P3X63Ag8.653 myeloma cell line). Hybridoma cells are selected by culturing the cells under “HAT” (hypoxanthine-aminopterin-thymine) selection for about one week. The resulting clones may then be screened for their capacity to produce monoclonal antibodies (“mAbs), preferably by direct ELISA.

[0107] In one embodiment, anti-protein or peptide monoclonal antibodies are isolated using a fusion of a protein, protein fragment, or peptide of the present invention, or conjugate of a protein, protein fragment, or peptide of the present invention, as immunogens. Thus, for example, a group of mice can be immunized using a fusion protein emulsified in Freund's complete adjuvant (e.g. approximately 50 μg of antigen per immunization). At three week intervals, an identical amount of antigen is emulsified in Freund's incomplete adjuvant and used to immunize the animals. Ten days following the third immunization, serum samples are taken and evaluated for the presence of antibody. If antibody titers are too low, a fourth booster can be employed. Polysera capable of binding the protein or peptide can also be obtained using this method.

[0108] In a preferred procedure for obtaining monoclonal antibodies, the spleens of the above-described immunized mice are removed, disrupted, and immune splenocytes are isolated over a ficoll gradient. The isolated splenocytes are fused, using polyethylene glycol with BALB/c-derived HGPRT (hypoxanthine guanine phosphoribosyl transferase) deficient P3×63xAg8.653 plasmacytoma cells. The fused cells are plated into 96-well microtiter plates and screened for hybridoma fusion cells by their capacity to grow in culture medium supplemented with hypothanthine, aminopterin and thymidine for approximately 2-3 weeks.

[0109] Hybridoma cells that arise from such incubation are preferably screened for their capacity to produce an immunoglobulin that binds to a protein of interest. An indirect ELISA may be used for this purpose. In brief, the supernatants of hybridomas are incubated in microtiter wells that contain immobilized protein. After washing, the titer of bound immunoglobulin can be determined using, for example, a goat anti-mouse antibody conjugated to horseradish peroxidase. After additional washing, the amount of immobilized enzyme is determined (for example through the use of a chromogenic substrate). Such screening is performed as quickly as possible after the identification of the hybridoma in order to ensure that a desired clone is not overgrown by non-secreting neighbors. Desirably, the fusion plates are screened several times since the rates of hybridoma growth vary. In a preferred sub-embodiment, a different antigenic form of immunogen may be used to screen the hybridoma. Thus, for example, the splenocytes may be immunized with one immunogen, but the resulting hybridomas can be screened using a different immunogen. It is understood that any of the protein or peptide molecules of the present invention may be used to raise antibodies.

[0110] As discussed below, such antibody molecules or their fragments may be used for diagnostic purposes. Where the antibodies are intended for diagnostic purposes, it may be desirable to derivatize them, for example with a ligand group (such as biotin) or a detectable marker group (such as a fluorescent group, a radioisotope or an enzyme).

[0111] The ability to produce antibodies that bind the protein or peptide molecules of the present invention permits the identification of mimetic compounds of those molecules. A “mimetic compound” is a compound that is not that compound, or a fragment of that compound, but which nonetheless exhibits an ability to specifically bind to antibodies directed against that compound.

[0112] It is understood that any of the agents of the present invention can be substantially purified and/or be biologically active and/or recombinant.

[0113] Uses of the Agents of the Invention

[0114] The nucleic acid molecules and fragments thereof of the present invention from library SOYMON018 are from soybean leaf tissue. Leaves are the carbohydrate factories of crop plants, therefore, the nucleic acid molecules of the present invention will find great use in the isolation of a variety of agronomically significant genes, including but not limited to genes that are necessary for the interception and transformation of light energy via photosynthesis linked with plant growth, quality and yield. Genes isolated using the disclosed nucleic acid molecules would also be in pathways including but not limited to a pathway such as nitrogen metabolism linked to fruiting and mobilization and distribution of nitrogen.

[0115] The nucleic acid molecules and fragments thereof from library SOYMON028 are from drought stressed soybean root tissue at the R3 and R5 developmental stage. Roots play a role in major vegetative organs which supply water, minerals, and substances essential for plant growth and development, therefore, the ESTs of the present invention will find great use in the isolation of a variety of agronomically significant genes, including but not limited to genes that result from drought stress, genes for absorption, anchorage, storage, transport, propagation, and nitrogen fixation. Such genes are associated with plant growth, quality, and yield and could also serve as links in important plant developmental, metabolic and catabolic pathways.

[0116] The nucleic acid molecules and fragments thereof of the present invention from libraries SOYMON018, and SOYMON028, are from soybean genotype A3244. This genotype has disease resistance to brown stem rot (Phialophora gregata) and Phytophthora root rot (Phytophthora sojae). Libraries from this genotype are likely to find use in the isolation of genes involved in disease resistance against a number of agronomically important fungal pathogens.

[0117] Nucleic acid molecules and fragments thereof of the present invention may be employed to obtain other nucleic acid molecules. Such molecules include the nucleic acid molecules of other plants or other organisms (e.g., alfalfa, rice, potato, cotton, oat, rye, barley, maize, wheat, Arabidopsis, Brassica, etc.) including the nucleic acid molecules that encode, in whole or in part, protein homologues of other plant species or other organisms, and sequences of genetic elements such as promoters and transcriptional regulatory elements. Such molecules can be readily obtained by using the above-described nucleic acid molecules or fragments thereof to screen cDNA or genomic libraries obtained from such plant species. Methods for forming such libraries are well known in the art. Such homologue molecules may differ in their nucleotide sequences from those found in one or more of SEQ ID NO:1 through SEQ ID NO: 27278 or complements thereof because complete complementarity is not needed for stable hybridization. The nucleic acid molecules of the present invention therefore also include molecules that, although capable of specifically hybridizing with the nucleic acid molecules may lack “complete complementarity.”

[0118] Any of a variety of methods may be used to obtain one or more of the above-described nucleic acid molecules (Zamechik et al., Proc. Natl. Acad. Sci. (U.S.A) 83:4143-4146 (1986), the entirety of which is herein incorporated by reference; Goodchild et al., Proc. Natl. Acad. Sci. (U.S.A.) 85:5507-5511 (1988), the entirety of which is herein incorporated by reference; Wickstrom et al., Proc. Natl. Acad. Sci. (U.S.A.) 85:1028-1032 (1988), the entirety of which is herein incorporated by reference; Holt, et al., Molec. Cell. Biol. 8:963-973 (1988), the entirety of which is herein incorporated by reference; Gerwirtz, et al., Science 242:1303-1306 (1988), the entirety of which is herein incorporated by reference; Anfossi, et al., Proc. Natl. Acad. Sci. (U.S.A.) 86:3379-3383 (1989), the entirety of which is herein incorporated by reference; Becker, et al., EMBO J. 8:3685-3691 (1989); the entirety of which is herein incorporated by reference). Automated nucleic acid synthesizers may be employed for this purpose. In lieu of such synthesis, the disclosed nucleic acid molecules may be used to define a pair of primers that can be used with the polymerase chain reaction (Mullis, et al., Cold Spring Harbor Symp. Quant. Biol. 51:263-273 (1986); Erlich et al., EP 50,424; EP 84,796, EP 258,017, EP 237,362; Mullis, EP 201,184; Mullis et al., U.S. Pat. No. 4,683,202; Erlich, U.S. Pat. No. 4,582,788; and Saiki, R. et al., U.S. Pat. No. 4,683,194, all of which are hereby incorporated by reference in their entirety) to amplify and obtain any desired nucleic acid molecule or fragment.

[0119] Promoter sequence(s) and other genetic elements including but not limited to transcriptional regulatory elements associated with one or more of the disclosed nucleic acid sequences can also be obtained using the disclosed nucleic acid sequences provided herein.

[0120] In one embodiment, such sequences are obtained by incubating EST nucleic acid molecules or preferably fragments thereof with members of genomic libraries (e.g. maize and soybean) and recovering clones that hybridize to the EST nucleic acid molecule or fragment thereof. In a second embodiment, methods of “chromosome walking,” or inverse PCR may be used to obtain such sequences (Frohman, et al., Proc. Natl. Acad. Sci. (U.S.A.) 85:8998-9002 (1988); Ohara, et al., Proc. Natl. Acad. Sci. (U.S.A.) 86: 5673-5677 (1989); Pang et al., Biotechniques, 22(6); 1046-1048 (1977); Huang et al., Methods Mol. Biol. 69: 89-96 (1977); Hartl et al., Methods Mol. Biol. 58: 293-301 (1996), all of which are hereby incorporated by reference in their entirety). In one embodiment, the disclosed nucleic acid molecules are used to identify cDNAs whose analogous genes contain promoters with desirable expression patterns. The nucleic acid molecules isolated from the library of the present invention are used to isolate promoters of tissue-enhanced, tissue-specific, developmentally- or environmentally-regulated expression profiles. Isolation and functional analysis of the 5′ flanking promoter sequences of these genes from genomic libraries, for example, using genomic screening methods and PCR techniques would result in the isolation of useful promoters and transcriptional regulatory elements. These methods are known to those of skill in the art and have been described (See for example Birren et al., Genome Analysis: Analyzing DNA, 1, (1997), Cold Spring Harbor Laboratory Press, Cold Spring Harbor, N.Y., the entirety of which is herein incorporated by reference).

[0121] Promoters obtained utilizing the nucleic acid molecules of the present invention could also be modified to affect their control characteristics. Examples of such modifications would include but are not limited to enhancer sequences as reported by Kay et al., Science 236:1299 (1987), herein incorporated by reference in its entirety. Such genetic elements could be used to enhance gene expression of new and existing traits for crop improvements.

[0122] The nucleic acid molecules of the present invention may be used to isolate promoters of tissue enhanced tissue specific, cell-specific, cell-type, developmentally or environmentally regulated expression profiles. Isolation and functional analysis of the 5′ flanking promoter sequences of these genes from genomic libraries, for example, using genomic screening methods and PCR techniques would result in the isolation of useful promoters and transcriptional regulatory elements. These methods are known to those of skill in the art and have been described (See, for example, Birren et. al., Genome Analysis: Analyzing DNA, 1, Cold Spring Harbor Laboratory Press, Cold Spring Harbor, N.Y. (1997), the entirety of which is herein incorporated by reference). Promoters obtained utilizing the nucleic acid molecules of the present invention could also be modified to affect their control characteristics. Examples of such modifications would include but are not limited to enhancer sequences as reported by Kay, et al Science 236:1299 (1987), herein incorporated reference in its entirety. Such genetic elements could be used to enhance gene expression of new and existing traits for crop improvements.

[0123] In an aspect of the present invention, one or more of the nucleic molecules of the present invention are used to determine whether a plant (preferably soybean) has a mutation affecting the level (i.e., the concentration of mRNA in a sample, etc.) or pattern (i.e., the kinetics of expression, rate of decomposition, stability profile, etc.) of the expression encoded in part or whole by one or more of the nucleic acid molecules of the present invention (collectively, the “Expression Response” of a cell or tissue). As used herein, the Expression Response manifested by a cell or tissue is said to be “altered” if it differs from the Expression Response of cells or tissues of plants not exhibiting the phenotype. To determine whether a Expression Response is altered, the Expression Response manifested by the cell or tissue of the plant exhibiting the phenotype is compared with that of a similar cell or tissue sample of a plant not exhibiting the phenotype. As will be appreciated, it is not necessary to re-determine the Expression Response of the cell or tissue sample of plants not exhibiting the phenotype each time such a comparison is made; rather, the Expression Response of a particular plant may be compared with previously obtained values of normal plants. As used herein, the phenotype of the organism is any of one or more characteristics of an organism (e.g. disease resistance, pest tolerance, environmental tolerance, male sterility, yield, quality improvements, etc.). A change in genotype or phenotype may be transient or permanent. Also as used herein, a tissue sample is any sample that comprises more than one cell. In a preferred aspect, a tissue sample comprises cells that share a common characteristic (e.g. derived from leaf, root, or pollen etc).

[0124] In one sub-aspect, such an analysis is conducted by determining the presence and/or identity of polymorphism(s) by one or more of the nucleic acid molecules of the present invention and more specifically, one or more of the EST nucleic acid molecules or fragments thereof which are associated with phenotype, or a predisposition to phenotype.

[0125] Any of a variety of molecules can be used to identify such polymorphism(s). In one embodiment, one or more of the EST nucleic acid molecules (or a sub-fragment thereof) may be employed as a marker nucleic acid molecule to identify such polymorphism(s). Alternatively, such polymorphisms can be detected through the use of a marker nucleic acid molecule or a marker protein that is genetically linked to (i.e., a polynucleotide that co-segregates with) such polymorphism(s).

[0126] In an alternative embodiment, such polymorphisms can be detected through the use of a marker nucleic acid molecule that is physically linked to such polymorphism(s). For this purpose, marker nucleic acid molecules comprising a nucleotide sequence of a polynucleotide located within 1 mb of the polymorphism(s), and more preferably within 100 kb of the polymorphism(s), and most preferably within 10 kb of the polymorphism(s) can be employed.

[0127] The genomes of animals and plants naturally undergo spontaneous mutation in the course of their continuing evolution (Gusella, Ann. Rev. Biochem. 55:831-854 (1986)). A “polymorphism” is a variation or difference in the sequence of the gene or its flanking regions that arises in some of the members of a species. The variant sequence and the “original” sequence co-exist in the species' population. In some instances, such co-existence is in stable or quasi-stable equilibrium.

[0128] A polymorphism is thus said to be “allelic,” in that, due to the existence of the polymorphism, some members of a species may have the original sequence (i.e., the original “allele”) whereas other members may have the variant sequence (i.e., the variant “allele”). In the simplest case, only one variant sequence may exist, and the polymorphism is thus said to be di-allelic. In other cases, the species' population may contain multiple alleles, and the polymorphism is termed tri-allelic, etc. A single gene may have multiple different unrelated polymorphisms. For example, it may have a di-allelic polymorphism at one site, and a multi-allelic polymorphism at another site.

[0129] The variation that defines the polymorphism may range from a single nucleotide variation to the insertion or deletion of extended regions within a gene. In some cases, the DNA sequence variations are in regions of the genome that are characterized by short tandem repeats (STRs) that include tandem di- or tri-nucleotide repeated motifs of nucleotides. Polymorphisms characterized by such tandem repeats are referred to as “variable number tandem repeat” (“VNTR”) polymorphisms. VNTRs have been used in identity analysis (Weber, U.S. Pat. No. 5,075,217; Armour, et al., FEBS Lett. 307:113-115 (1992); Jones, et al., Eur. J. Haematol. 39:144-147 (1987); Horn, et al., PCT Application WO91/14003; Jeffreys, European Patent Application 370,719; Jeffreys, U.S. Pat. No. 5,699,082; Jeffreys. et al., Amer. J. Hum. Genet. 39:11-24 (1986); Jeffreys. et al., Nature 316:76-79 (1985); Gray, et al., Proc. R. Acad. Soc. Lond. 243:241-253 (1991); Moore, et al., Genomics 10:654-660 (1991); Jeffreys, et al., Anim. Genet. 18:1-15 (1987); Hillel, et al., Anim. Genet. 20:145-155 (1989); Hillel, et al., Genet. 124:783-789 (1990), all of which are herein incorporated by reference in their entirety).

[0130] The detection of polymorphic sites in a sample of DNA may be facilitated through the use of nucleic acid amplification methods. Such methods specifically increase the concentration of polynucleotides that span the polymorphic site, or include that site and sequences located either distal or proximal to it. Such amplified molecules can be readily detected by gel electrophoresis or other means.

[0131] The most preferred method of achieving such amplification employs the polymerase chain reaction (“PCR”) (Mullis, et al., Cold Spring Harbor Symp. Quant. Biol. 51:263-273 (1986); Erlich, et al., European Patent Appln. 50,424; European Patent Appln. 84,796, European Patent Application 258,017, European Patent Appln. 237,362; Mullis, European Patent Appln. 201,184; Mullis, et al., U.S. Pat. No. 4,683,202; Erlich., U.S. Pat. No. 4,582,788; and Saiki, et al., U.S. Pat. No. 4,683,194, all of which are herein incorporated by reference), using primer pairs that are capable of hybridizing to the proximal sequences that define a polymorphism in its double-stranded form.

[0132] In lieu of PCR, alternative methods, such as the “Ligase Chain Reaction” (“LCR”) may be used (Barany, Proc. Natl. Acad. Sci. (U.S.A.) 88:189-193 (1991), the entirety of which is herein incorporated by reference). LCR uses two pairs of oligonucleotide probes to exponentially amplify a specific target. The sequences of each pair of oligonucleotides is selected to permit the pair to hybridize to abutting sequences of the same strand of the target. Such hybridization forms a substrate for a template-dependent ligase. As with PCR, the resulting products thus serve as a template in subsequent cycles and an exponential amplification of the desired sequence is obtained.

[0133] LCR can be performed with oligonucleotides having the proximal and distal sequences of the same strand of a polymorphic site. In one embodiment, either oligonucleotide will be designed to include the actual polymorphic site of the polymorphism. In such an embodiment, the reaction conditions are selected such that the oligonucleotides can be ligated together only if the target molecule either contains or lacks the specific nucleotide that is complementary to the polymorphic site present on the oligonucleotide. Alternatively, the oligonucleotides may be selected such that they do not include the polymorphic site (see, Segev, PCT Application WO 90/01069, the entirety of which is herein incorporated by reference).

[0134] The “Oligonucleotide Ligation Assay” (“OLA”) may alternatively be employed (Landegren, et al., Science 241:1077-1080 (1988), the entirety of which is herein incorporated by reference). The OLA protocol uses two oligonucleotides which are designed to be capable of hybridizing to abutting sequences of a single strand of a target. OLA, like LCR, is particularly suited for the detection of point mutations. Unlike LCR, however, OLA results in “linear” rather than exponential amplification of the target sequence.

[0135] Nickerson, et al. have described a nucleic acid detection assay that combines attributes of PCR and OLA (Nickerson, et al., Proc. Natl. Acad. Sci. (U.S.A) 87:8923-8927 (1990), the entirety of which is herein incorporated by reference). In this method, PCR is used to achieve the exponential amplification of target DNA, which is then detected using OLA. In addition to requiring multiple, and separate, processing steps, one problem associated with such combinations is that they inherit all of the problems associated with PCR and OLA.

[0136] Schemes based on ligation of two (or more) oligonucleotides in the presence of nucleic acid having the sequence of the resulting “di-oligonucleotide”, thereby amplifying the di-oligonucleotide, are also known (Wu, et al., Genomics 4:560 (1989), the entirety of which is herein incorporated by reference), and may be readily adapted to the purposes of the present invention.

[0137] Other known nucleic acid amplification procedures, such as allele-specific oligomers, branched DNA technology, transcription-based amplification systems, or isothermal amplification methods may also be used to amplify and analyze such polymorphisms (Malek, et al., U.S. Pat. No. 5,130,238; Davey, et al., European Patent Application 329,822; Schuster et al., U.S. Pat. No. 5,169,766; Miller, et al., PCT Application WO 89/06700; Kwoh, et al., Proc. Natl. Acad. Sci. (U.S.A.) 86:1173-1177 (1989); Gingeras, et al., PCT Application WO 88/10315; Walker, et al., Proc. Natl. Acad Sci. (U.S.A.) 89:392-396 (1992), all of which are herein incorporated by reference in their entirety).

[0138] The identification of a polymorphism can be determined in a variety of ways. By correlating the presence or absence of it in a plant with the presence or absence of a phenotype, it is possible to predict the phenotype of that plant. If a polymorphism creates or destroys a restriction endonuclease cleavage site, or if it results in the loss or insertion of DNA (e.g., a VNTR polymorphism), it will alter the size or profile of the DNA fragments that are generated by digestion with that restriction endonuclease. As such, individuals that possess a variant sequence can be distinguished from those having the original sequence by restriction fragment analysis. Polymorphisms that can be identified in this manner are termed “restriction fragment length polymorphisms” (“RFLPs”). RFLPs have been widely used in human and plant genetic analyses (Glassberg, UK Patent Application 2135774; Skolnick, et al., Cytogen. Cell Genet. 32:58-67 (1982); Botstein, et al., Ann. J. Hum. Genet. 32:314-331 (1980); Fischer, et al. (PCT Application WO90/13668); Uhlen, PCT Application WO90/11369).

[0139] Polymorphisms can also be identified by Single Strand Conformation Polymorphism (SSCP) analysis. The SSCP technique is a method capable of identifying most sequence variations in a single strand of DNA, typically between 150 and 250 nucleotides in length (Elles, Methods in Molecular Medicine: Molecular Diagnosis of Genetic Diseases, Humana Press (1996), the entirety of which is herein incorporated by reference); Orita et al., Genomics 5: 874-879 (1989), the entirety of which is herein incorporated by reference). Under denaturing conditions a single strand of DNA will adopt a conformation that is uniquely dependent on its sequence conformation. This conformation usually will be different, even if only a single base is changed. Most conformations have been reported to alter the physical configuration or size sufficiently to be detectable by electrophoresis. A number of protocols have been described for SSCP including, but not limited to Lee et al., Anal. Biochem. 205: 289-293 (1992), the entirety of which is herein incorporated by reference; Suzuki et al., Anal. Biochem. 192: 82-84 (1991), the entirety of which is herein incorporated by reference; Lo et al., Nucleic Acids Research 20: 1005-1009 (1992), the entirety of which is herein incorporated by reference; Sarkar et al., Genomics 13: 441-443 (1992), the entirety of which is herein incorporated by reference). It is understood that one or more of the nucleic acids of the present invention, may be utilized as markers or probes to detect polymorphisms by SSCP analysis.

[0140] Polymorphisms may also be found using a DNA fingerprinting technique called amplified fragment length polymorphism (AFLP), which is based on the selective PCR amplification of restriction fragments from a total digest of genomic DNA to profile that DNA. Vos, et al., Nucleic Acids Res. 23:4407-4414 (1995), the entirety of which is herein incorporated by reference. This method allows for the specific co-amplification of high numbers of restriction fragments, which can be visualized by PCR without knowledge of the nucleic acid sequence.

[0141] AFLP employs basically three steps. Initially, a sample of genomic DNA is cut with restriction enzymes and oligonucleotide adapters are ligated to the restriction fragments of the DNA. The restriction fragments are then amplified using PCR by using the adapter and restriction sequence as target sites for primer annealing. The selective amplification is achieved by the use of primers that extend into the restriction fragments, amplifying only those fragments in which the primer extensions match the nucleotide flanking the restriction sites. These amplified fragments are then visualized on a denaturing polyacrylamide gel.

[0142] AFLP analysis has been performed on Salix (Beismann, et al., Mol. Ecol. 6:989-993 (1997), the entirety of which is herein incorporated by reference); Acinetobacter (Janssen, et al., Int. J. Syst. Bacteriol 47:1179-1187 (1997), the entirety of which is herein incorporated by reference), Aeromonas popoffi (Huys, et al., Int. J. Syst. Bacteriol. 47:1165-1171 (1997), the entirety of which is herein incorporated by reference), rice (McCouch, et al., Plant Mol. Biol. 35:89-99 (1997), the entirety of which is herein incorporated by reference); Nandi, et al., Mol. Gen. Genet. 255:1-8 (1997); Cho, et al., Genome 39:373-378 (1996), herein incorporated by reference), barley (Hordeum vulgare) (Simons, et al., Genomics 44:61-70 (1997), the entirety of which is herein incorporated by reference; Waugh, et al., Mol. Gen. Genet. 255:311-321 (1997), the entirety of which is herein incorporated by reference; Qi, et al., Mol. Gen. Genet. 254:330-336 (1997), the entirety of which is herein incorporated by reference; Becker, et al., Mol. Gen. Genet. 249:65-73 (1995), the entirety of which is herein incorporated by reference), potato (Van der Voort, et al., Mol. Gen. Genet. 255:438-447 (1997), the entirety of which is herein incorporated by reference; Meksem, et al., Mol. Gen. Genet. 249:74-81 (1995), the entirety of which is herein incorporated by reference), Phytophthora infestans (Van der Lee, et al., Fungal Genet. Biol. 21:278-291 (1997), the entirety of which is herein incorporated by reference), Bacillus anthracis (Keim, et al., J. Bacteriol. 179:818-824 (1997)), Astragalus cremnophylax (Travis, et al., Mol. Ecol. 5:735-745 (1996), the entirety of which is herein incorporated by reference), Arabidopsis (Cnops, et al., Mol. Gen. Genet. 253:32-41 (1996), the entirety of which is herein incorporated by reference), Escherichia coli (Lin, et al., Nucleic Acids Res. 24:3649-3650 (1996), the entirety of which is herein incorporated by reference), Aeromonas (Huys, et al., Int. J. Syst. Bacteriol. 46:572-580 (1996), the entirety of which is herein incorporated by reference), nematode (Folkertsma, et al., Mol. Plant. Microbe Interact. 9:47-54 (1996), the entirety of which is herein incorporated by reference), tomato (Thomas, et al., Plant J 8:785-794 (1995), the entirety of which is herein incorporated by reference), and human (Latorra, et al., PCR Methods Appl. 3:351-358 (1994)). AFLP analysis has also been used for fingerprinting mRNA (Money, et al., Nucleic Acids Res. 24:2616-2617 (1996), the entirety of which is herein incorporated by reference; Bachem, et al., Plant J 9:745-753 (1996), the entirety of which is herein incorporated by reference). It is understood that one or more of the nucleic acids of the present invention, may be utilized as markers or probes to detect polymorphisms by AFLP analysis for fingerprinting mRNA.

[0143] Polymorphisms may also be found using random amplified polymorphic DNA (RAPD) (Williams et al., Nucl. Acids Res. 18: 6531-6535 (1990), the entirety of which is herein incorporated by reference) and cleaveable amplified polymorphic sequences (CAPS) (Lyamichev et al., Science 260: 778-783 (1993), the entirety of which is herein incorporated by reference). It is understood that one or more of the nucleic acids of the present invention, may be utilized as markers or probes to detect polymorphisms by RAPD or CAPS analysis.

[0144] Polymorphisms are useful, through linkage analysis, to define the genetic distances or physical distances between polymorphic traits. A physical map or ordered array of genomic DNA fragments in the desired region containing the gene may be used to characterize and isolate genes corresponding to desirable traits. For this purpose, yeast artificial chromosomes (YACs), bacterial artificial chromosomes (BACs), and cosmids are appropriate vectors for cloning large segments of DNA molecules. Although fewer clones are needed to make a contig for a specific genomic region by using YACs (Agyare et al., Genome Res. 7: 1-9 (1997), the entirety of which is herein incorporated by reference; James et al., Genomics 32: 425-430 (1996), the entirety of which is herein incorporated by reference), chimerism in the inserted DNA fragment can arise. Cosmids are convenient for handling smaller-size DNA molecules and may be used for transformation in developing transgenic plants. BACs also carry DNA fragments and are less prone to chimerism.

[0145] Through genetic mapping, a fine scale linkage map can be developed using DNA markers and, then, a genomic DNA library of large-sized fragments can be screened with molecular markers linked to the desired trait. Molecular markers are advantageous for agronomic traits that are otherwise difficult to tag, such as resistance to pathogens, insects and nematodes, tolerance to abiotic stress, quality parameters and quantitative traits such as high yield potential.

[0146] The essential requirements for marker-assisted selection in a plant breeding program are: (1) the marker(s) should co-segregate or be closely linked with the desired trait; (2) an efficient means of screening large populations for the molecular marker(s) should be available; and (3) the screening technique should have high reproducibility across laboratories and preferably be economical to use and be user-friendly.

[0147] The genetic linkage of marker molecules can be established by a gene mapping model such as, without limitation, the flanking marker model reported by Lander and Botstein, Genetics 121:185-199 (1989) and the interval mapping, based on maximum likelihood methods described by Lander and Botstein, Genetics 121:185-199 (1989) and implemented in the software package MAPMAKER/QTL (Lincoln and Lander, Mapping Genes Controlling Quantitative. Traits Using MAPMAKER/QTL, Whitehead Institute for Biomedical Research, Massachusetts, (1990). Additional software includes Qgene, Version 2.23 (1996), Department of Plant Breeding and Biometry, 266 Emerson Hall, Cornell University, Ithaca, N.Y., the manual of which is herein incorporated by reference in its entirety). Use of Qgene software is a particularly preferred approach.

[0148] A maximum likelihood estimate (MLE) for the presence of a marker is calculated, together with an MLE assuming no QTL effect, to avoid false positives. A log₁₀ of an odds ratio (LOD) is then calculated as: LOD=log₁₀ (MLE for the presence of a QTL/MLE given no linked QTL).

[0149] The LOD score essentially indicates how much more likely the data are to have arisen assuming the presence of a QTL than in its absence. The LOD threshold value for avoiding a false positive with a given confidence, say 95%, depends on the number of markers and the length of the genome. Graphs indicating LOD thresholds are set forth in Lander and Botstein, Genetics 121:185-199 (1989) the entirety of which is herein incorporated by reference and further described by Arús and Moreno-González, Plant Breeding, Hayward et al., (eds.) Chapman & Hall, London, pp. 314-331 (1993), the entirety of which is herein incorporated by reference.

[0150] Additional models can be used. Many modifications and alternative approaches to interval mapping have been reported, including the use of non-parametric methods (Kruglyak and Lander, Genetics 139:1421-1428 (1995), the entirety of which is herein incorporated by reference). Multiple regression methods or models can be also be used, in which the trait is regressed on a large number of markers (Jansen, Biometrics in Plant Breeding, van Oijen and Jansen (eds.), Proceedings of the Ninth Meeting of the Eucarpia Section Biometrics in Plant Breeding, The Netherlands, pp. 116-124 (1994); Weber and Wricke, Advances in Plant Breeding, Blackwell, Berlin, 16 (1994), both of which is herein incorporated by reference in their entirety). Procedures combining interval mapping with regression analysis, whereby the phenotype is regressed onto a single putative QTL at a given marker interval and at the same time onto a number of markers that serve as ‘cofactors,’ have been reported by Jansen and Stam, Genetics 136:1447-1455 (1994), the entirety of which is herein incorporated by reference and Zeng, Genetics 136:1457-1468 (1994) the entirety of which is herein incorporated by reference. Generally, the use of cofactors reduces the bias and sampling error of the estimated QTL positions (Utz and Melchinger, Biometrics in Plant Breeding, van Oijen and Jansen (eds.) Proceedings of the Ninth Meeting of the Eucarpia Section Biometrics in Plant Breeding, The Netherlands, pp. 195-204 (1994), the entirety of which is herein incorporated by reference, thereby improving the precision and efficiency of QTL mapping (Zeng, Genetics 136:1457-1468 (1994)). These models can be extended to multi-environment experiments to analyze genotype-environment interactions (Jansen et al., Theo. Appl. Genet. 91:33-37 (1995), the entirety of which is herein incorporated by reference).

[0151] Selection of an appropriate mapping population is important to map construction. The choice of an appropriate mapping population depends on the type of marker systems employed (Tanksley et al., Molecular mapping plant chromosomes. Chromosome structure and function: Impact of new concepts, Gustafson and Appels (eds.), Plenum Press, New York, pp 157-173 (1988), the entirety of which is herein incorporated by reference). Consideration must be given to the source of parents (adapted vs. exotic) used in the mapping population. Chromosome pairing and recombination rates can be severely disturbed (suppressed) in wide crosses (adapted×exotic) and generally yield greatly reduced linkage distances. Wide crosses will usually provide segregating populations with a relatively large array of polymorphisms when compared to progeny in a narrow cross (adapted×adapted).

[0152] An F₂ population is the first generation of selfing after the hybrid seed is produced. Usually a single F₁ plant is selfed to generate a population segregating for all the genes in Mendelian (1:2:1) fashion. Maximum genetic information is obtained from a completely classified F₂ population using a codominant marker system (Mather, Measurement of Linkage in Heredity, Methuen and Co., (1938), the entirety of which is herein incorporated by reference). In the case of dominant markers, progeny tests (e.g. F₃, BCF₂) are required to identify the heterozygotes, thus making it equivalent to a completely classified F₂ population. However, this procedure is often prohibitive because of the cost and time involved in progeny testing. Progeny testing of F₂ individuals is often used in map construction where phenotypes do not consistently reflect genotype (e.g. disease resistance) or where trait expression is controlled by a QTL. Segregation data from progeny test populations (e.g. F₃ or BCF₂) can be used in map construction. Marker-assisted selection can then be applied to cross progeny based on marker-trait map associations (F₂, F₃), where linkage groups have not been completely disassociated by recombination events (i.e., maximum disequilibrium).

[0153] Recombinant inbred lines (RIL) (genetically related lines; usually >F₅, developed from continuously selfing F₂ lines towards homozygosity) can be used as a mapping population. Information obtained from dominant markers can be maximized by using RIL because all loci are homozygous or nearly so. Under conditions of tight linkage (i.e., about <10% recombination), dominant and co-dominant markers evaluated in RIL populations provide more information per individual than either marker type in backcross populations (Reiter et al., Proc. Natl. Acad. Sci. (U.S.A.) 89:1477-1481 (1992), the entirety of which is herein incorporated by reference). However, as the distance between markers becomes larger (i.e., loci become more independent), the information in RIL populations decreases dramatically when compared to codominant markers.

[0154] Backcross populations (e.g., generated from a cross between a successful variety (recurrent parent) and another variety (donor parent) carrying a trait not present in the former) can be utilized as a mapping population. A series of backcrosses to the recurrent parent can be made to recover most of its desirable traits. Thus a population is created consisting of individuals nearly like the recurrent parent but each individual carries varying amounts or mosaic of genomic regions from the donor parent. Backcross populations can be useful for mapping dominant markers if all loci in the recurrent parent are homozygous and the donor and recurrent parent have contrasting polymorphic marker alleles (Reiter et al., Proc. Natl. Acad. Sci. (U.S.A.) 89:1477-1481 (1992)). Information obtained from backcross populations using either codominant or dominant markers is less than that obtained from F₂ populations because one, rather than two, recombinant gametes are sampled per plant. Backcross populations, however, are more informative (at low marker saturation) when compared to RILs as the distance between linked loci increases in RIL populations (i.e. about 15% recombination). Increased recombination can be beneficial for resolution of tight linkages, but may be undesirable in the construction of maps with low marker saturation.

[0155] Near-isogenic lines (NIL) created by many backcrosses to produce an array of individuals that are nearly identical in genetic composition except for the trait or genomic region under interrogation can be used as a mapping population. In mapping with NILs, only a portion of the polymorphic loci are expected to map to a selected region.

[0156] Bulk segregant analysis (BSA) is a method developed for the rapid identification of linkage between markers and traits of interest (Michelmore et al., Proc. Natl. Acad. Sci. (USA) 88:9828-9832 (1991), the entirety of which is herein incorporated by reference). In BSA, two bulked DNA samples are drawn from a segregating population originating from a single cross. These bulks contain individuals that are identical for a particular trait (resistant or susceptible to particular disease) or genomic region but arbitrary at unlinked regions (i.e. heterozygous). Regions unlinked to the target region will not differ between the bulked samples of many individuals in BSA.

[0157] It is understood that one or more of the nucleic acid molecules of the present invention may be used as molecular markers. It is also understood that one or more of the protein molecules of the present invention may be used as molecular markers.

[0158] In accordance with this aspect of the present invention, a sample nucleic acid is obtained from plants cells or tissues. Any source of nucleic acid may be used. Preferably, the nucleic acid is genomic DNA. The nucleic acid is subjected to restriction endonuclease digestion. For example, one or more EST nucleic acid molecule or fragment thereof can be used as a probe in accordance with the above-described polymorphic methods. The polymorphism obtained in this approach can then be cloned to identify the mutation at the coding region which alters the protein's structure or regulatory region of the gene which affects its expression level.

[0159] In one aspect of the present invention, an evaluation can be conducted to determine whether a particular mRNA molecule is present. One or more of the nucleic acid molecules of the present invention, preferably one or more of the EST nucleic acid molecules of the present invention are utilized to detect the presence or quantity of the mRNA species. Such molecules are then incubated with cell or tissue extracts of a plant under conditions sufficient to permit nucleic acid hybridization. The detection of double-stranded probe-mRNA hybrid molecules is indicative of the presence of the mRNA; the amount of such hybrid formed is proportional to the amount of mRNA. Thus, such probes may be used to ascertain the level and extent of the mRNA production in a plant's cells or tissues. Such nucleic acid hybridization may be conducted under quantitative conditions (thereby providing a numerical value of the amount of the mRNA present). Alternatively, the assay may be conducted as a qualitative assay that indicates either that the mRNA is present, or that its level exceeds a user set, predefined value.

[0160] A principle of in situ hybridization is that a labeled, single-stranded nucleic acid probe will hybridize to a complementary strand of cellular DNA or RNA and, under the appropriate conditions, these molecules will form a stable hybrid. When nucleic acid hybridization is combined with histological techniques, specific DNA or RNA sequences can be identified within a single cell. An advantage of in situ hybridization over more conventional techniques for the detection of nucleic acids is that it allows an investigator to determine the precise spatial population (Angerer et al., Dev. Biol. 101: 477-484 (1984), the entirety of which is herein incorporated by reference; Angerer et al., Dev. Biol. 112: 157-166 (1985), the entirety of which is herein incorporated by reference; Dixon et al., EMBO J. 10: 1317-1324 (1991), the entirety of which is herein incorporated by reference). In situ hybridization may be used to measure the steady-state level of RNA accumulation. It is a sensitive technique and RNA sequences present in as few as 5-10 copies per cell can be detected (Hardin et al., J. Mol. Biol. 202: 417-431. (1989), the entirety of which is herein incorporated by reference). A number of protocols have been devised for in situ hybridization, each with tissue preparation, hybridization, and washing conditions (Meyerowitz, Plant Mol. Biol. Rep. 5: 242-250 (1987), the entirety of which is herein incorporated by reference; Cox and Goldberg, In: Plant Molecular Biology: A Practical Approach (ed. C. H. Shaw), pp. 1-35. IRL Press, Oxford (1988), the entirety of which is herein incorporated by reference; Raikhel et al., In situ RNA hybridization in plant tissues. In Plant Molecular Biology Manual, vol. B9: 1-32. Kluwer Academic Publisher, Dordrecht, Belgium (1989), the entirety of which is herein incorporated by reference).

[0161] In situ hybridization also allows for the localization of proteins within a tissue or cell (Wilkinson, In Situ Hybridization, Oxford University Press, Oxford (1992), the entirety of which is herein incorporated by reference; Langdale, In Situ Hybridization 165-179 In: The Maize Handbook, eds. Freeling and Walbot, Springer-Verlag, New York (1994), the entirety of which is herein incorporated by reference). It is understood that one or more of the molecules of the present invention, preferably one or more of the EST nucleic acid molecules of the present invention or one or more of the antibodies of the present invention may be utilized to detect the level or pattern of a protein or fragment thereof by in situ hybridization.

[0162] Fluorescent in situ hybridization also enables the localization of a particular DNA sequence along a chromosome which is useful, among other uses, for gene mapping, following chromosomes in hybrid lines or detecting chromosomes with translocations, transversions or deletions. In situ hybridization has been used to identify chromosomes in several plant species (Griffor et al., Plant Mol. Biol. 17: 101-109 (1991), the entirety of which is herein incorporated by reference; Gustafson et al., Proc. Nat'l. Acad. Sci. (U.S.A.). 87: 1899-1902 (1990), herein incorporated by reference; Mukai and Gill, Genome 34: 448-452. (1991); Schwarzacher and Heslop-Harrison, Genome 34: 317-323 (1991); Wang et al., Jpn. J. Genet. 66: 313-316 (1991), the entirety of which is herein incorporated by reference; Parra and Windle, Nature Genetics, 5: 17-21 (1993), the entirety of which is herein incorporated by reference). It is understood that the nucleic acid molecules of the present invention may be used as probes or markers to localize sequences along a chromosome.

[0163] It is also understood that one or more of the molecules of the present invention, preferably one or more of the EST nucleic acid molecules of the present invention or one or more of the antibodies of the present invention may be utilized to detect the expression level or pattern of a protein or mRNA thereof by in situ hybridization.

[0164] Another method to localize the expression of a molecule is tissue printing. Tissue printing provides a way to screen, at the same time on the same membrane many tissue sections from different plants or different developmental stages. Tissue-printing procedures utilize films designed to immobilize proteins and nucleic acids. In essence, a freshly cut section of an organ is pressed gently onto nitrocellulose paper, nylon membrane or polyvinylidene difluoride membrane. Such membranes are commercially available (e.g. Millipore, Bedford, Mass.). The contents of the cut cell transfer onto the membrane, and the molecules are immobilized to the membrane. The immobilized molecules form a latent print that can be visualized with appropriate probes. When a plant tissue print is made on nitrocellulose paper, the cell walls leave a physical print that makes the anatomy visible without further treatment (Varner amd Taylor, Plant Physiol. 91: 31-33 (1989), the entirety of which is herein incorporated by reference).

[0165] Tissue printing on substrate films is described by Daoust, Exp. Cell Res. 12: 203-211 (1957), the entirety of which is herein incorporated by reference, who detected amylase, protease, ribonuclease, and deoxyribonuclease in animal tissues using starch, gelatin, and agar films. These techniques can be applied to plant tissues (Yomo and Taylor, Planta 112:35-43 (1973); Harris and Chrispeels, Plant Physiol. 56: 292-299 (1975). Advances in membrane technology have increased the range of applications of Daoust's tissue-printing techniques allowing (Cassab and Varner, J. Cell. Biol. 105: 2581-2588 (1987), the entirety of which is herein incorporated by reference; the histochemical localization of various plant enzymes and deoxyribonuclease on nitrocellulose paper and nylon (Spruce et al., Phytochemistry, 26: 2901-2903 (1987), the entirety of which is herein incorporated by reference; Barres et al. Neuron 5: 527-544 (1990), the entirety of which is herein incorporated by reference; the entirety of which is herein incorporated by reference; Reid and Pont-Lezica, Tissue Printing: Tools for the Study of Anatomy, Histochemistry, and Gene Expression, Academic Press, New York, N.Y. (1992), the entirety of which is herein incorporated by reference; Reid et al. Plant Physiol. 93: 160-165 (1990), herein incorporate by reference; Ye et al. Plant J. 1: 175-183 (1991), the entirety of which is herein incorporated by reference).

[0166] It is understood that one or more of the molecules of the present invention, preferably one or more of the EST nucleic acid-molecules of the present invention or one or more of the antibodies of the present invention may be utilized to detect the presence or quantity of a protein by tissue printing.

[0167] Further, it is also understood that any of the nucleic acid molecules of the present invention may be used as marker nucleic acids and or probes in connection with methods that require probes or marker nucleic acids. As used herein, a probe is an agent that is utilized to determine an attribute or feature (e.g. presence or absence, location, correlation, etc.) or a molecule, cell, tissue or plant. As used herein, a marker nucleic acid is a nucleic acid molecule that is utilized to determine an attribute, or feature (e.g., presence or absence, location, correlation, etc.) or a molecule, cell, tissue or plant.

[0168] A microarray-based method for high-throughput monitoring of plant gene expression may be utilized to measure gene-specific hybridization targets. This ‘chip’-based approach involves using microarrays of nucleic acid molecules as gene-specific hybridization targets to quantitatively measure expression of the corresponding plant genes (Schena et al., Science 270: 467-470 (1995), the entirety of which is herein incorporated by reference; Shalon, Ph.D. Thesis. Stanford University (1996), the entirety of which is herein incorporated by reference). Every nucleotide in a large sequence can be queried at the same time. Hybridization can be used to efficiently analyze large amounts of nucleotide sequence.

[0169] Several microarray methods have been described. One method compares the sequences to be analyzed by hybridization to a set of oligonucleotides representing all possible subsequences (Bains and Smith, J. Theor. Biol. 135: 303 (1989), the entirety of which is herein incorporated by reference). A second method hybridizes the sample to an array of oligonucleotide probes. An array consisting of oligonucleotides complementary to subsequences of a target sequence can be used to determine the identity of a target sequence, measure its amount, and detect differences between the target and a reference sequence. Nucleic acid molecules microarrays may also be screened with protein molecules or fragments thereof to determine nucleic acid molecules that specifically bind protein molecules or fragments thereof.

[0170] The microarray approach may be used with polypeptide targets (U.S. Pat. No. 5,445,934; U.S. Pat. No. 5,143,854; U.S. Pat. No. 5,079,600; U.S. Pat. No. 4,923,901, all of which are herein incorporated by reference in their entirety). Essentially, polypeptides are synthesized on a substrate (microarray) and these polypeptides can be screened with either protein molecules or fragments thereof or nucleic acid molecules in order to screen for either protein molecules or fragments thereof or nucleic acid molecules that specifically bind the target polypeptides. Implementation of these techniques rely on recently developed combinatorial technologies to generate any ordered array of a large number of oligonucleotide probes (Fodor et al., Science 251:767-773 (1991), the entirety of which is herein incorporated by reference).

[0171] It is understood that one or more of the molecules of the present invention, preferably one or more of the nucleic acid molecules or protein molecules or fragments thereof of the present invention may be utilized in a microarray based method.

[0172] In a preferred embodiment of the present invention microarrays may be prepared that comprise nucleic acid molecules where preferably at least 10%, preferably at least 25%, more preferably at least 50% and even more preferably at least 75%, 80%, 85%, 90% or 95% of the nucleic acid molecules located on that array are selected from the group of nucleic acid molecules that specifically hybridize to one or more nucleic acid molecule having a nucleic acid sequence selected from the group of SEQ ID NO: 1 through SEQ ID NO: 27278 or complement thereof or fragments of either.

[0173] A particular preferred microarray embodiment of the present invention is a microarray comprising nucleic acid molecules encoding genes or fragments thereof that are homologues of known genes or nucleic acid molecules that comprise genes or fragment thereof that elicit only limited or no matches to known genes. A further preferred microarray embodiment of the present invention is a microarray comprising nucleic acid molecules having genes or fragments thereof that are homologues of known genes and nucleic acid molecules that comprise genes or fragment thereof that elicit only limited or no matches to known genes. Site-directed mutagenesis may be utilized to modify nucleic acid sequences, particularly as it is a technique that allows one or more of the amino acids encoded by a nucleic acid molecule to be altered (e.g. a threonine to be replaced by a methionine). Three basic methods for site-directed mutagenesis are often employed. These are cassette mutagenesis (Wells et al., Gene 34:315-23 (1985), the entirety of which is herein incorporated by reference), primer extension (Gilliam et al., Gene 12:129-137 (1980), the entirety of which is herein incorporated by reference); Zoller and Smith, Methods Enzymol. 100:468-500 (1983), the entirety of which is herein incorporated by reference; and Dalbadie-McFarland et al., Proc. Natl. Acad. Sci. (U.S.A.) 79:6409-6413 (1982), the entirety of which is herein incorporated by reference) and methods based upon PCR (Scharf et al., Science 233:1076-1078 (1986), the entirety of which is herein incorporated by reference; Higuchi et al., Nucleic Acids Res. 16:7351-7367 (1988), the entirety of which is herein incorporated by reference). Site-directed mutagenesis approaches are also described in European Patent 0 385 962, the entirety of which is herein incorporated by reference, European Patent 0 359 472, the entirety of which is herein incorporated by reference, and PCT Patent Application WO 93/07278, the entirety of which is herein incorporated by reference.

[0174] Site-directed mutagenesis strategies have been applied to plants for both in vitro as well as in vivo site-directed mutagenesis (Lanz et al., J. Biol. Chem. 266:9971-6 (1991), the entirety of which is herein incorporated by reference; Kovgan and Zhdanov, Biotekhnologiya 5:148-154; No. 207160n, Chemical Abstracts 110:225 (1989), the entirety of which is herein incorporated by reference; Ge et al., Proc. Natl. Acad. Sci. (U.S.A.) 86:4037-4041 (1989), the entirety of which is herein incorporated by reference, Zhu et al., J. Biol. Chem. 271:18494-18498 (1996), Chu et al., Biochemistry 33:6150-6157 (1994), the entirety of which is herein incorporated by reference, Small et al., EMBO J. 11:1291-1296 (1992), the entirety of which is herein incorporated by reference, Cho et al., Mol. Biotechnol. 8:13-16 (1997), Kita et al., J. Biol. Chem. 271:26529-26535 (1996), the entirety of which is herein incorporated by reference, Jin et al., Mol. Microbiol. 7:555-562 (1993), the entirety of which is herein incorporated by reference, Hatfield and Vierstra, J. Biol. Chem. 267:14799-14803 (1992), the entirety of which is herein incorporated by reference, Zhao et al., Biochemistry 31:5093-5099 (1992), the entirety of which is herein incorporated by reference).

[0175] Any of the nucleic acid molecules of the present invention may either be modified by site-directed mutagenesis or used as, for example, nucleic acid molecules that are used to target other nucleic acid molecules for modification. It is understood that mutants with more than one altered nucleotide can be constructed using techniques that practitioners skilled in the art are familiar with such as isolating restriction fragments and ligating such fragments into an expression vector (see, for example, Sambrook et al., Molecular Cloning. A Laboratory Manual, Cold Spring Harbor Press (1989)).

[0176] Sequence-specific DNA-binding proteins play a role in the regulation of transcription. The isolation of recombinant cDNAs encoding these proteins facilitates the biochemical analysis of their structural and functional properties. Genes encoding such DNA-binding proteins have been isolated using classical genetics (Vollbrecht et al., Nature 350: 241-243 (1991), the entirety of which is herein incorporated by reference) and molecular biochemical approaches, including the screening of recombinant cDNA libraries with antibodies (Landschulz et al., Genes Dev. 2: 786-800 (1988), the entirety of which is herein incorporated by reference) or DNA probes (Bodner et al., Cell 55: 505-518 (1988), the entirety of which is herein incorporated by reference). In addition, an in situ screening procedure has been used and has facilitated the isolation of sequence-specific DNA-binding proteins from various plant species (Gilmartin et al., Plant Cell 4: 839-849 (1992), the entirety of which is herein incorporated by reference; Schindler et al., EMBO J. 11: 1261-1273 (1992) the entirety of which is herein incorporated by reference). An in situ screening protocol does not require the purification of the protein of interest (Vinson et al., Genes Dev. 2: 801-806 (1988), the entirety of which is herein incorporated by reference; Singh et al., Cell 52: 415-423 (1988), the entirety of which is herein incorporated by reference).

[0177] Steps may be employed to characterize DNA-protein interactions. The first is to identify promoter fragments that interact with DNA-binding proteins, to titrate binding activity, to determine the specificity of binding, and to determine whether a given DNA-binding activity can interact with related DNA sequences (Sambrook et al., Molecular Cloning: A Laboratory Manual, 2^{nd} edition. Cold Spring Harbor Laboratory Press, Cold Spring Harbor, N.Y. (1989). Electrophoretic mobility-shift assay is a widely used assay. The assay provides a simple, rapid, and sensitive method for detecting DNA-binding proteins based on the observation that the mobility of a DNA fragment through a nondenaturing, low-ionic strength polyacrylamide gel is retarded upon association with a DNA-binding protein (Fried and Crother, Nucleic Acids Res. 9: 6505-6525 (1981), the entirety of which is herein incorporated by reference). When one or more specific binding activities have been identified, the exact sequence of the DNA bound by the protein may be determined. Several procedures for characterizing protein/DNA-binding sites are used, including methylation and ethylation interference assays (Maxam and Gilbert, Methods Enzymol. 65: 499-560 (1980), the entirety of which is herein incorporated by reference; Wissman and Hillen, Methods Enzymol. 208: 365-379 (1991), the entirety of which is herein incorporated by reference) and footprinting techniques employing DNase I (Galas and Schmitz, Nucleic Acids Res. 5: 3157-3170 (1978), the entirety of which is herein incorporated by reference), 1,10-phenanthroline-copper ion methods (Sigman et al., Methods Enzymol. 208: 365-379 (1991), the entirety of which is herein incorporated by reference) or hydroxyl radical methods (Dixon et al., Methods Enzymol. 208: 380-413 (1991), the entirety of which is herein incorporated by reference). It is understood that one or more of the nucleic acid molecules of the present invention, preferably one or more of the EST nucleic acid molecules of the present invention may be utilized to identify a protein or fragment thereof that specifically binds to a nucleic acid molecule of the present invention. It is also understood that one or more of the protein molecules or fragments thereof of the present invention may be utilized to identify a nucleic acid molecule that specifically binds to it.

[0178] The two-hybrid system is based on the fact that many cellular functions are carried out by proteins that interact (physically) with one another. Two-hybrid systems have been used to probe the function of new proteins (Chien et al., Proc. Natl. Acad. Sci. (U.S.A.) 88: 9578-9582 (1991) the entirety of which is herein incorporated by reference; Durfee et al., Genes Dev. 7: 555-569 (1993) the entirety of which is herein incorporated by reference; Choi et al., Cell 78: 499-512 (1994), the entirety of which is herein incorporated by reference; Kranz et al., Genes Dev. 8: 313-327 (1994), the entirety of which is herein incorporated by reference).

[0179] Interaction mating techniques have facilitated a number of two-hybrid studies of protein-protein interaction. Interaction mating has been used to examine interactions between small sets of tens of proteins (Finley and Brent, Proc. Natl. Acad. Sci. (U.S.A.) 91: 12098-12984 (1994), the entirety of which is herein incorporated by reference), larger sets of hundreds of proteins, (Bendixen et al., Nucl, Acids Res. 22: 1778-1779 (1994), the entirety of which is herein incorporated by reference) and to comprehensively map proteins encoded by a small genome (Bartel et al., Nature Genetics 12: 72-77 (1996), the entirety of which is herein incorporated by reference). This technique utilizes proteins fused to the DNA-binding domain and proteins fused to the activation domain. They are expressed in two different haploid yeast strains of opposite mating type, and the strains are mated to determine if the two proteins interact. Mating occurs when haploid yeast strains come into contact and result in the fusion of the two haploids into a diploid yeast strain. An interaction can be determined by the activation of a two-hybrid reporter gene in the diploid strain. The primary advantage of this technique is that it reduces the number of yeast transformations needed to test individual interactions. It is understood that the protein-protein interactions of protein or fragments thereof of the present invention may be investigated using the two-hybrid system and that any of the nucleic acid molecules of the present invention that encode such proteins or fragments thereof may be used to transform yeast in the two-hybrid system.

[0180] Synechocystis 6803 is a photosynthetic Cyanobacterium capable of oxygenic photosynthesis as well as heterotrophic growth in the absence of light. The entire genome has been sequenced, and it is reported to have a circular genome size of 3.57 Mbp containing 3168 potential open reading frames. Open reading frames (ORFs) were identified based upon their homology to other reported ORFs and by using ORF identification computer programs. Sixteen hundred potential ORFs were assigned based on their homology to previously identified ORFs. Of these 1600 ORFs, 145 were identical to reported ORFs (Kaneko et al., DNA Research 3:109-36 (1996), herein incorporated by reference in its entirety).

[0181] Several prokaryote promoters have been used in Synechocystis to express heterologous genes including the tac, lac, and lambda phage promoters (Bryant (ed.), The Molecular Biology of Cyanobacteria, Kluwer Academic Publishers, (1994); Ferino and Chauvat, Gene 84:257-266 (1989), both of which are herein incorporated by reference in their entirety). Several bacterial origins of replication such as RSF1010 and ACYC are reported to replicate in Synechocystis (Mermet-Bouvier and Chauvat, Current Microbiology 28:145-148 (1994); Kuhlemeier et al., Mol. Gen. Genet. 184:249-254 (1981), both of which are herein incorporated by reference in their entirety).

[0182] Synechocystis has been used to study gene regulation by gene replacement through homologous recombination or by gene disruption using antibiotic resistance markers (Pakrasi et al., EMBO 7:325-332 (1988), herein incorporated by reference in its entirety). In such gene regulation studies, double reciprocal homologous regions of the host genome flanking the gene of interest recombine to stably integrate the gene of interest into the genome. The gene of interest can be expressed once that gene has been stably integrated into the geriome. Biochemical analysis can be performed to study the effect of the replaced or deleted gene.

[0183] It is understood that the agents of the present invention may be employed in a Synechocystis system.

[0184] Exogenous genetic material may be transferred into a plant cell and the plant cell regenerated into a whole, fertile or sterile plant. Exogenous genetic material is any genetic material, whether naturally occurring or otherwise, from any source that is capable of being inserted into any organism. Such genetic material may be transferred into either monocotyledons and dicotyledons including but not limited to the crops, maize and soybean (See specifically, Chistou, Particle Bombardment for Genetic Engineering of Plants, pp 63-69 (maize), pp 50-60 (soybean), Biotechnology Intelligence Unit. Academic Press, San Diego, Calif. (1996), the entirety of which is herein incorporated by reference and generally Chistou, Particle Bombardment for Genetic Engineering of Plants, Biotechnology Intelligence Unit. Academic Press, San Diego, Calif. (1996), the entirety of which is herein incorporated by reference).

[0185] Transfer of a nucleic acid that encodes for a protein can result in overexpression of that protein in a transformed cell or transgenic plant. One or more of the proteins or fragments thereof encoded by nucleic acid molecules of the present invention may be overexpressed in a transformed cell or transformed plant. Such overexpression may be the result of transient or stable transfer of the exogenous material.

[0186] Exogenous genetic material may be transferred into a plant cell by the use of a DNA vector or construct designed for such a purpose. Design of such a vector is generally within the skill of the art (See, Plant Molecular Biology: A Laboratory Manual eds. Clark, Springer, New York (1997), the entirety of which is herein incorporated by reference).

[0187] A construct or vector may include a plant promoter to express the protein or protein fragment of choice. A number of promoters which are active in plant cells have been described in the literature. These include the nopaline synthase (NOS) promoter (Ebert et al., Proc. Natl. Acad. Sci. (U.S.A.) 84:5745-5749 (1987), the entirety of which is herein incorporated by reference), the octopine synthase (OCS) promoter (which are carried on tumor-inducing plasmids of Agrobacterium tumefaciens), the caulimovirus promoters such as the cauliflower mosaic virus (CaMV) 19S promoter (Lawton et al., Plant Mol. Biol. 9:315-324 (1987), the entirety of which is herein incorporated by reference) and the CAMV 35S promoter (Odell et al., Nature 313:810-812 (1985), the entirety of which is herein incorporated by reference), the figwort mosaic virus 35S-promoter, the light-inducible promoter from the small subunit of ribulose-1,5-bis-phosphate carboxylase (ssRULBISCO), the Adh promoter (Walker et al., Proc. Natl. Acad. Sci. (U.S.A.) 84:6624-6628 (1987), the entirety of which is herein incorporated by reference), the sucrose synthase promoter (Yang et al., Proc. Natl. Acad. Sci. (U.S.A.) 87:4144-4148 (1990), the entirety of which is herein incorporated by reference), the R gene complex promoter (Chandler et al., The Plant Cell 1:1175-1183 (1989), the entirety of which is herein incorporated by reference), and the chlorophyll a/b binding protein gene promoter, etc. These promoters have been used to create DNA constructs which have been expressed in plants; see, e.g., PCT publication WO 84/02913, herein incorporated by reference in its entirety.

[0188] Promoters which are known or are found to cause transcription of DNA in plant cells can be used in the present invention. Such promoters may be obtained from a variety of sources such as plants and plant viruses. It is preferred that the particular promoter selected should be capable of causing sufficient expression to result in the production of an effective amount of a protein to cause the desired phenotype. In addition to promoters which are known to cause transcription of DNA in plant cells, other promoters may be identified for use in the current invention by screening a plant cDNA library for genes which are selectively or preferably expressed in the target tissues or cells.

[0189] For the purpose of expression in source tissues of the plant, such as the leaf, seed, root or stem, it is preferred that the promoters utilized in the present invention have relatively high expression in these specific tissues. For this purpose, one may choose from a number of promoters for genes with tissue- or cell-specific or -enhanced expression. Examples of such promoters reported in the literature include the chloroplast glutamine synthetase GS2 promoter from pea (Edwards et al., Proc. Natl. Acad. Sci. (U.S.A.) 87:3459-3463 (1990), herein incorporated by reference in its entirety), the chloroplast fructose-1,6-biphosphatase (FBPase) promoter from wheat (Lloyd et al., Mol. Gen. Genet. 225:209-216 (1991), herein incorporated by reference in its entirety), the nuclear photosynthetic ST-LS1 promoter from potato (Stockhaus et al., EMBO J. 8:2445-2451 (1989), herein incorporated by reference in its entirety), the phenylalanine ammonia-lyase (PAL) promoter and the chalcone synthase (CHS) promoter from Arabidopsis thaliana. Also reported to be active in photosynthetically active tissues are the ribulose-1,5-bisphosphate carboxylase (RbcS) promoter from eastern larch (Larix laricina), the promoter for the cab gene, cab6, from pine (Yamamoto et al., Plant Cell Physiol. 35:773-778 (1994), herein incorporated by reference in its entirety), the promoter for the Cab-1 gene from wheat (Fejes et al., Plant Mol. Biol. 15:921-932 (1990), herein incorporated by reference in its entirety), the promoter for the CAB-1 gene from spinach (Lubberstedt et al., Plant Physiol. 104:997-1006 (1994), herein incorporated by reference in its entirety), the promoter for the cabIR gene from rice (Luan et al., Plant Cell. 4:971-981 (1992), the entirety of which is herein incorporated by reference), the pyruvate, orthophosphate dikinase (PPDK) promoter from maize (Matsuoka et al., Proc. Natl. Acad. Sci. (U.S.A.) 90: 9586-9590 (1993), herein incorporated by reference in its entirety), the promoter for the tobacco Lhcb1*2 gene (Cerdan et al., Plant Mol. Biol. 33: 245-255. (1997), herein incorporated by reference in its entirety), the Arabidopsis thaliana SUC2 sucrose-H+ symporter promoter (Truemit et al., Planta. 196: 564-570 (1995), herein incorporated by reference in its entirety), and the promoter for the thylacoid membrane proteins from spinach (psaD, psaF, psaE, PC, FNR, atpC, atpD, cab, rbcS). Other promoters for the chlorophyl a/b-binding proteins may also be utilized in the present invention, such as the promoters for LhcB gene and PsbP gene from white mustard (Sinapis alba; Kretsch et al., Plant Mol. Biol. 28: 219-229 (1995), the entirety of which is herein incorporated by reference).

[0190] For the purpose of expression in sink tissues of the plant, such as the tuber of the potato plant, the fruit of tomato, or the seed of maize, wheat, rice, and barley, it is preferred that the promoters utilized in the present invention have relatively high expression in these specific tissues. A number of promoters for genes with tuber-specific or -enhanced expression are known, including the class I patatin promoter (Bevan et al., EMBO J. 8: 1899-1906 (1986); Jefferson et al., Plant Mol. Biol. 14: 995-1006 (1990), both of which are herein incorporated by reference in its entirety), the promoter for the potato tuber ADPGPP genes, both the large and small subunits, the sucrose synthase promoter (Salanoubat and Belliard, Gene. 60: 47-56 (1987), Salanoubat and Belliard, Gene. 84: 181-185 (1989), both of which are incorporated by reference in their entirety), the promoter for the major tuber proteins including the 22 kd protein complexes and proteinase inhibitors (Hanapel, Plant Physiol. 101: 703-704 (1993), herein incorporated by reference in its entirety), the promoter for the granule bound starch synthase gene (GBSS) (Visser et al., Plant Mol. Biol. 17: 691-699 (1991), herein incorporated by reference in its entirety), and other class I and II patatins promoters (Koster-Topfer et al., Mol Gen Genet. 219: 390-396 (1989); Mignery et al., Gene. 62: 27-44 (1988), both of which are herein incorporated by reference in their entirety).

[0191] Other promoters can also be used to express a fructose 1,6 bisphosphate aldolase gene in specific tissues, such as seeds or fruits. The promoter for β-conglycinin (Chen et al., Dev. Genet. 10: 112-122 (1989), herein incorporated by reference in its entirety) or other seed-specific promoters such as the napin and phaseolin promoters, can be used. The zeins are a group of storage proteins found in maize endosperm. Genomic clones for zein genes have been isolated (Pedersen et al., Cell 29: 1015-1026 (1982), herein incorporated by reference in its entirety), and the promoters from these clones, including the 15 kD, 16 kD, 19 kD, 22 kD, 27 kD, and gamma genes, could also be used. Other promoters known to function, for example, in maize, include the promoters for the following genes: waxy, Brittle, Shrunken 2, Branching enzymes I and II, starch synthases, debranching enzymes, oleosins, glutelins, and sucrose synthases. A particularly preferred promoter for maize endosperm expression is the promoter for the glutelin gene from rice, more particularly the Osgt-1 promoter (Zheng et al., Mol. Cell. Biol. 13: 5829-5842 (1993), herein incorporated by reference in its entirety). Examples of promoters suitable for expression in wheat include those promoters for the ADPglucose pyrophosphorylase (ADPGPP) subunits, the granule bound and other starch synthases, the branching and debranching enzymes, the embryogenesis-abundant proteins, the gliadins, and the glutenins. Examples of such promoters in rice include those promoters for the ADPGPP subunits, the granule bound and other starch synthases, the branching enzymes, the debranching enzymes, sucrose synthases, and the glutelins. A particularly preferred promoter is the promoter for rice glutelin, Osgt-1. Examples of such promoters for barley include those for the ADPGPP subunits, the granule bound and other starch synthases, the branching enzymes, the debranching enzymes, sucrose synthases, the hordeins, the embryo globulins, and the aleurone specific proteins.

[0192] Root specific promoters may also be used. An example of such a promoter is the promoter for the acid chitinase gene (Samac et al., Plant Mol. Biol. 25: 587-596 (1994), the entirety of which is herein incorporated by reference). Expression in root tissue could also be accomplished by utilizing the root specific subdomains of the CaMV35S promoter that have been identified (Lam et al., Proc. Natl. Acad. Sci. (U.S.A.) 86:7890-7894 (1989), herein incorporated by reference in its entirety). Other root cell specific promoters include those reported by Conkling et al. (Conkling et al., Plant Physiol 93:1203-1211 (1990), the entirety of which is herein incorporated by reference).

[0193] Additional promoters that may be utilized are described, for example, in U.S. Pat. Nos. 5,378,619, 5,391,725, 5,428,147, 5,447,858, 5,608,144, 5,608,144, 5,614,399, 5,633,441, 5,633,435, and 4,633,436, all of which are herein incorporated in their entirety. In addition, a tissue specific enhancer may be used (Fromm et al., The Plant Cell 1:977-984 (1989), the entirety of which is herein incorporated by reference).

[0194] Constructs or vectors may also include, with the coding region of interest, a nucleic acid sequence that acts, in whole or in part, to terminate transcription of that region. For example, such sequences have been isolated including the Tr7 3′ sequence and the nos 3′ sequence (Ingelbrecht et al., The Plant Cell 1:671-680 (1989), the entirety of which is herein incorporated by reference; Bevan et al., Nucleic Acids Res. 11:369-385 (1983), the entirety of which is herein incorporated by reference), or the like.

[0195] A vector or construct may also include regulatory elements. Examples of such include the Adh intron 1 (Callis et al., Genes and Develop. 1:1183-1200 (1987), the entirety of which is herein incorporated by reference), the sucrose synthase intron (Vasil et al., Plant Physiol. 91:1575-1579 (1989), the entirety of which is herein incorporated by reference) and the TMV omega element (Gallie et al., The Plant Cell 1:301-311 (1989), the entirety of which is herein incorporated by reference). These and other regulatory elements may be included when appropriate.

[0196] A vector or construct may also include a selectable marker. Selectable markers may also be used to select for plants or plant cells that contain the exogenous genetic material. Examples of such include, but are not limited to, a neo gene (Potrykus et al., Mol. Gen. Genet. 199:183-188 (1985), the entirety of which is herein incorporated by reference) which codes for kanamycin resistance and can be selected for using kanamycin, G418, etc.; a bar gene which codes for bialaphos resistance; a mutant EPSP synthase gene (Hinchee et al., Bio/Technology 6:915-922 (1988), the entirety of which is herein incorporated by reference) which encodes glyphosate resistance; a nitrilase gene which confers resistance to bromoxynil (Stalker et al., J. Biol. Chem. 263:6310-6314 (1988), the entirety of which is herein incorporated by reference); a mutant acetolactate synthase gene (ALS) which confers imidazolinone or sulphonylurea resistance (European Patent Application 154,204 (Sep. 11, 1985), the entirety of which is herein incorporated by reference); and a methotrexate resistant DHFR gene (Thillet et al., J. Biol. Chem. 263:12500-12508 (1988), the entirety of which is herein incorporated by reference).

[0197] A vector or construct may also include a transit peptide. Incorporation of a suitable chloroplast transit peptide may also be employed (European Patent Application Publication Number 0218571, the entirety of which is herein incorporated by reference). Translational enhancers may also be incorporated as part of the vector DNA. DNA constructs could contain one or more 5′ non-translated leader sequences which may serve to enhance expression of the gene products from the resulting mRNA transcripts. Such sequences may be derived from the promoter selected to express the gene or can be specifically modified to increase translation of the mRNA. Such regions may also be obtained from viral RNAs, from suitable eukaryotic genes, or from a synthetic gene sequence. For a review of optimizing expression of transgenes, see Koziel et al., Plant Mol. Biol. 32:393-405 (1996), the entirety of which is herein incorporated by reference.

[0198] A vector or construct may also include a screenable marker. Screenable markers may be used to monitor expression. Exemplary screenable markers include a glucuronidase or uida gene (GUS) which encodes an enzyme for which various chromogenic substrates are known (Jefferson, Plant Mol. Biol, Rep. 5: 387-405 (1987), the entirety of which is herein incorporated by reference; Jefferson et al., EMBO J. 6: 3901-3907 (1987), the entirety of which is herein incorporated by reference); an R-locus gene, which encodes a product that regulates the production of anthocyanin pigments (red color) in plant tissues ((Dellaporta et al., Stadler Symposium 11:263-282 (1988), the entirety of which is herein incorporated by reference); a β-lactamase gene (Sutcliffe et al., Proc. Natl. Acad. Sci. (U.S.A.) 75: 3737-3741 (1978), the entirety of which is herein incorporated by reference), a gene which encodes an enzyme for which various chromogenic substrates are known (e.g., PADAC, a chromogenic cephalosporin); a luciferase gene (Ow et al., Science 234: 856-859 (1986), the entirety of which is herein incorporated by reference) a xylE gene (Zukowsky et al., Proc. Natl. Acad. Sci. (U.S.A.) 80:1101-1105 (1983), the entirety of which is herein incorporated by reference) which encodes a catechol diozygenase that can convert chromogenic catechols; an α-amylase gene (Ikatu et al., Bio/Technol. 8:241-242 (1990), the entirety of which is herein incorporated by reference); a tyrosinase gene (Katz et al., J. Gen. Microbiol. 129:2703-2714 (1983), the entirety of which is herein incorporated by reference) which encodes an enzyme capable of oxidizing tyrosine to DOPA and dopaquinone which in turn condenses to melanin; an α-galactosidase, which will turn a chromogenic α-galactose substrate.

[0199] Included within the terms “selectable or screenable marker genes” are also genes which encode a scriptable marker whose secretion can be detected as a means of identifying or selecting for transformed cells. Examples include markers which encode a secretable antigen that can be identified by antibody interaction, or even secretable enzymes which can be detected catalytically. Secretable proteins fall into a number of classes, including small, diffusible proteins detectable, e.g., by ELISA, small active enzymes detectable in extracellular solution (e.g., α-amylase, β-lactamase, phosphinothricin transferase), or proteins which are inserted or trapped in the cell wall (such as proteins which include a leader sequence such as that found in the expression unit of extension or tobacco PR-S). Other possible selectable and/or screenable marker genes will be apparent to those of skill in the art.

[0200] Methods and compositions for transforming a bacteria and other microorganisms are known in the art (see for example Sambrook et al., Molecular Cloning: A Laboratory Manual, Second Edition, Cold Spring Harbor Laboratory Press, Cold Spring Harbor, N.Y., (1989), the entirety of which is herein incorporated by reference).

[0201] There are many methods for introducing transforming nucleic acid molecules into plant cells. Suitable methods are believed to include virtually any method by which nucleic acid molecules may be introduced into a cell, such as by Agrobacterium infection or direct delivery of nucleic acid molecules such as, for example, by PEG-mediated transformation, by electroporation or by acceleration of DNA coated particles, etc. (Pottykus, Ann. Rev. Plant Physiol. Plant Mol. Biol. 42:205-225 (1991), the entirety of which is herein incorporated by reference; Vasil, Plant Mol. Biol. 25: 925-937 (1994), the entirety of which is herein incorporated by reference. For example, electroporation has been used to transform maize protoplasts (Fromm et al., Nature 312:791-793 (1986), the entirety of which is herein incorporated by reference).

[0202] Other vector systems suitable for introducing transforming DNA into a host plant cell includes but is not limited to binary artificial chromosome (BIBAC) vectors (Hamilton et al., Gene 200:107-116, (1997), the entirety of which is herein incorporated by reference, and transfection with RNA viral vectors (Della-Cioppa et al., Ann. N.Y. Acad. Sci. (1996), 792 (Engineering Plants for Commercial Products and Applications), 57-61, the entirety of which is herein incorporated by reference.

[0203] Technology for introduction of DNA into cells is well known to those of skill in the art. Four general methods for delivering a gene into cells have been described: (1) chemical methods (Graham and van der Eb, Virology, 54:536-539 (1973), the entirety of which is herein incorporated by reference); (2) physical methods such as microinjection (Capecchi, Cell 22:479-488 (1980), electroporation (Wong and Neumann, Biochem. Biophys. Res. Commun., 107:584-587 (1982); Fromm et al., Proc. Natl. Acad. Sci. USA, 82:5824-5828 (1985); U.S. Pat. No. 5,384,253; and the gene gun (Johnston and Tang, Methods Cell Biol. 43:353-365 (1994), all of which the entirety is herein incorporated by reference; (3) viral vectors (Clapp, Clin. Perinatol., 20:155-168 (1993); Lu et al., J. Exp. Med., 178:2089-2096 (1993); Eglitis and Anderson, Biotechniques, 6:608-614 (1988), all of which the entirety is herein incorporated by reference); and (4) receptor-mediated mechanisms (Curiel et al., Hum. Gen. Ther., 3:147-154 (1992); Wagner et al., Proc. Natl. Acad. Sci. USA, 89:6099-6103 (1992), all of which the entirety is herein incorporated by reference).

[0204] Acceleration methods that may be used include, for example, microprojectile bombardment and the like. One example of a method for delivering transforming nucleic acid molecules to plant cells is microprojectile bombardment. This method has been reviewed by Yang and Christou, eds., Particle Bombardment Technology for Gene Transfer, Oxford Press, Oxford, England (1994), the entirety of which is herein incorporated by reference). Non-biological particles (microprojectiles) that may be coated with nucleic acids and delivered into cells by a propelling force. Exemplary particles include those comprised of tungsten, gold, platinum, and the like.

[0205] A particular advantage of microprojectile bombardment, in addition to it being an effective means of reproducibly, and stably transforming monocotyledons, is that neither the isolation of protoplasts (Cristou et al., Plant Physiol. 87:671-674 (1988), the entirety of which is herein incorporated by reference) nor the susceptibility of Agrobacterium infection is required. An illustrative embodiment of a method for delivering DNA into maize cells by acceleration is a biolistics g-particle delivery system, which can be used to propel particles coated with DNA through a screen, such as a stainless steel or Nytex screen, onto a filter surface covered with corn cells cultured in suspension. Gordon-Kamm et al., describes the basic procedure for coating tungsten particles with DNA (Gordon-Kamm et al., Plant Cell 2: 603-618 (1990), the entirety of which is herein incorporated by reference). The screen disperses the tungsten nucleic acid particles so that they are not delivered to the recipient cells in large aggregates. A particle delivery system suitable for use with the present invention is the helium acceleration PDS-1000/He gun which is available from Bio-Rad Laboratories (Bio-Rad, Hercules, California) (Sanford et al., Technique 3:3-16 (1991), the entirety of which is herein incorporated by reference).

[0206] For the bombardment, cells in suspension may be concentrated on filters. Filters containing the cells to be bombarded are positioned at an appropriate distance below the microprojectile stopping plate. If desired, one or more screens are also positioned between the gun and the cells to be bombarded.

[0207] Alternatively, immature embryos or other target cells may be arranged on solid culture medium. The cells to be bombarded are positioned at an appropriate distance below the macroprojectile stopping plate. If desired, one or more screens are also positioned between the acceleration device and the cells to be bombarded. Through the use of techniques set forth herein one may obtain up to 1000 or more foci of cells transiently expressing a marker gene. The number of cells in a focus which express the exogenous gene product 48 hours post-bombardment often range from one to ten and average one to three.

[0208] In bombardment transformation, one may optimize the prebombardment culturing conditions and the bombardment parameters to yield the maximum numbers of stable transformants. Both the physical and biological parameters for bombardment are important in this technology. Physical factors are those that involve manipulating the DNA/microprojectile precipitate or those that affect the flight and velocity of either the macro- or microprojectiles. Biological factors include all steps involved in manipulation of cells before and immediately after bombardment, the osmotic adjustment of target cells to help alleviate the trauma associated with bombardment, and also the nature of the transforming DNA, such as linearized DNA or intact supercoiled plasmids. It is believed that pre-bombardment manipulations are especially important for successful transformation of immature embryos. In another alternative embodiment, plastids can be stably transformed. Methods disclosed for plastid transformation in higher plants include the particle gun delivery of DNA containing a selectable marker and targeting of the DNA to the plastid genome through homologous recombination (Svab et al., Proc. Natl. Acad. Sci. (U.S.A.) 87:8526-8530 (1990); Svab and Maliga, Proc. Natl. Acad. Sci. (U.S.A.) 90:913-917 (1993); Staub and Maliga, EMBO J. 12:601-606 (1993); U.S. Pat. Nos. 5,451,513 and 5,545,818, all of which are herein incorporated by reference in their entirety).

[0209] Accordingly, it is contemplated that one may wish to adjust various aspects of the bombardment parameters in small scale studies to fully optimize the conditions. One may particularly wish to adjust physical parameters such as gap distance, flight distance, tissue distance, and helium pressure. One may also minimize the trauma reduction factors by modifying conditions which influence the physiological state of the recipient cells and which may therefore influence transformation and integration efficiencies. For example, the osmotic state, tissue hydration and the subculture stage or cell cycle of the recipient cells may be adjusted for optimum transformation. The execution of other routine adjustments will be known to those of skill in the art in light of the present disclosure.

[0210] Agrobacterium-mediated transfer is a widely applicable system for introducing genes into plant cells because the DNA can be introduced into whole plant tissues, thereby bypassing the need for regeneration of an intact plant from a protoplast. The use of Agrobacterium-mediated plant integrating vectors to introduce DNA into plant cells is well known in the art. See, for example the methods described (Fraley et al., Biotechnology 3:629-635 (1985); Rogers et al., Meth. In Enzymol, 153:253-277 (1987), both of which are herein incorporated by reference in their entirety. Further, the integration of the Ti-DNA is a relatively precise process resulting in few rearrangements. The region of DNA to be transferred is defined by the border sequences, and intervening DNA is usually inserted into the plant genome as described (Spielmann et al., Mol. Gen. Genet., 205:34 (1986), the entirety of which is herein incorporated by reference).

[0211] Modern Agrobacterium transformation vectors are capable of replication in E. coli as well as Agrobacterium, allowing for convenient manipulations as described (Klee et al., In: Plant DNA Infectious Agents, T. Hohn and J. Schell, eds., Springer-Verlag, New York, pp. 179-203 (1985), the entirety of which is herein incorporated by reference. Moreover, recent technological advances in vectors for Agrobacterium-mediated gene transfer have improved the arrangement of genes and restriction sites in the vectors to facilitate construction of vectors capable of expressing various polypeptide coding genes. The vectors described have convenient multi-linker regions flanked by a promoter and a polyadenylation site for direct expression of inserted polypeptide coding genes and are suitable for present purposes (Rogers et al., Meth. In Enzymol., 153:253-277 (1987), the entirety of which is herein incorporated by reference). In addition, Agrobacterium containing both armed and disarmed Ti genes can be used for the transformations. In those plant strains where Agrobacterium-mediated transformation is efficient, it is the method of choice because of the facile and defined nature of the gene transfer.

[0212] A transgenic plant formed using Agrobacterium transformation methods typically contains a single gene on one chromosome. Such transgenic plants can be referred to as being heterozygous for the added gene. More preferred is a transgenic plant that is homozygous for the added structural gene; i.e., a transgenic plant that contains two added genes, one gene at the same locus on each chromosome of a chromosome pair. A homozygous transgenic plant can be obtained by sexually mating (selfing) an independent segregant transgenic plant that contains a single added gene, germinating some of the seed produced and analyzing the resulting plants produced for the gene of interest.

[0213] It is also to be understood that two different transgenic plants can also be mated to produce offspring that contain two independently segregating added, exogenous genes. Selfing of appropriate progeny can produce plants that are homozygous for both added, exogenous genes that encode a polypeptide of interest. Back-crossing to a parental plant and out-crossing with a non-transgenic plant are also contemplated, as is vegetative propagation.

[0214] Transformation of plant protoplasts can be achieved using methods based on calcium phosphate precipitation, polyethylene glycol treatment, electroporation, and combinations of these treatments. See for example (Potrykus et al., Mol. Gen. Genet., 205:193-200 (1986); Lorz et al., Mol. Gen. Genet., 199:178, (1985); Fromm et al., Nature, 319:791, (1986); Uchimiya et al., Mol. Gen. Genet.: 204:204, (1986); Callis et al., Genes and Development, 1183, (1987); Marcotte et al., Nature, 335:454, (1988), all of which the entirety is herein incorporated by reference).

[0215] Application of these systems to different plant strains depends upon the ability to regenerate that particular plant strain from protoplasts. Illustrative methods for the regeneration of cereals from protoplasts are described (Fujimura et al., Plant Tissue Culture Letters, 2:74, (1985); Toriyama et al., Theor Appl. Genet. 205:34. (1986); Yamada et al., Plant Cell Rep., 4:85, (1986); Abdullah et al., Biotechnology, 4:1087, (1986), all of which the entirety is herein incorporated by reference).

[0216] To transform plant strains that cannot be successfully regenerated from protoplasts, other ways to introduce DNA into intact cells or tissues can be utilized. For example, regeneration of cereals from immature embryos or explants can be effected as described (Vasil, Biotechnology, 6:397, (1988), the entirety of which is herein incorporated by reference). In addition, “particle gun” or high-velocity microprojectile technology can be utilized (Vasil et al., Bio/Technology 10:667, (1992), the entirety of which is herein incorporated by reference).

[0217] Using the latter technology, DNA is carried through the cell wall and into the cytoplasm on the surface of small metal particles as described (Klein et al., Nature, 328:70, (1987); Klein et al., Proc. Natl. Acad. Sci. USA, 85:8502-8505, (1988); McCabe et al., Biotechnology, 6:923, (1988), all of which the entirety is herein incorporated by reference). The metal particles penetrate through several layers of cells and thus allow the transformation of cells within tissue explants.

[0218] Other methods of cell transformation can also be used and include but are not limited to introduction of DNA into plants by direct DNA transfer into pollen, Hess et al., Intern Rev. Cytol., 107:367, (1987); Luo et al., Plant Mol. Biol. Reporter, 6:165, (1988), all of which the entirety is herein incorporated by reference), by direct injection of DNA into reproductive organs of a plant (Pena et al., Nature, 325:274, (1987), the entirety of which is herein incorporated by reference), or by direct injection of DNA into the cells of immature embryos followed by the rehydration of desiccated embryos (Neuhaus et al., Theor. Appl. Genet., 75:30, (1987), the entirety of which is herein incorporated by reference).

[0219] The regeneration, development, and cultivation of plants from single plant protoplast transformants or from various transformed explants is well known in the art (Weissbach and Weissbach, In: Methods for Plant Molecular Biology, (Eds.), Academic Press, Inc. San Diego, Calif., (1988), the entirety of which is herein incorporated by reference). This regeneration and growth process typically includes the steps of selection of transformed cells, culturing those individualized cells through the usual stages of embryonic development through the rooted plantlet stage. Transgenic embryos and seeds are similarly regenerated. The resulting transgenic rooted shoots are thereafter planted in an appropriate plant growth medium such as soil.

[0220] The development or regeneration of plants containing the foreign, exogenous gene that encodes a protein of interest is well known in the art. Preferably, the regenerated plants are self-pollinated to provide homozygous transgenic plants, as discussed before. Otherwise, pollen obtained from the regenerated plants is crossed to seed-grown plants of agronomically important lines. Conversely, pollen from plants of these important lines is used to pollinate regenerated plants. A transgenic plant of the present invention containing a desired polypeptide is cultivated using methods well known to one skilled in the art.

[0221] There are a variety of methods for the regeneration of plants from plant tissue. The particular method of regeneration will depend on the starting plant tissue and the particular plant species to be regenerated.

[0222] Methods for transforming dicots, primarily by use of Agrobacterium tumefaciens, and obtaining transgenic plants have been published for cotton (U.S. Pat. No. 5,004,863, U.S. Pat. No. 5,159,135, U.S. Pat. No. 5,518,908, all of which the entirety is herein incorporated by reference); soybean (U.S. Pat. No. 5,569,834, U.S. Pat. No. 5,416,011, McCabe et al., Biotechnology 6:923, (1988), Christou et al., Plant Physiol., 87:671-674 (1988), all of which the entirety is herein incorporated by reference); Brassica (U.S. Pat. No. 5,463,174, the entirety of which is herein incorporated by reference); peanut (Cheng et al., Plant Cell Rep. 15: 653-657 (1996), McKently et al., Plant Cell Rep. 14:699-703 (1995), all of which the entirety is herein incorporated by reference); papaya (Yang et al., (1996), the entirety of which is herein incorporated by reference); pea (Grant et al., Plant Cell Rep. 15:254-258, (1995), the entirety of which is herein incorporated by reference).

[0223] Transformation of monocotyledons using electroporation, particle bombardment, and Agrobacterium have also been reported. Transformation and plant regeneration have been achieved in asparagus (Bytebier et al., Proc. Natl. Acad. Sci. USA 84:5345, (1987), the entirety of which is herein incorporated by reference); barley (Wan and Lemaux, Plant Physiol 104:37, (1994), the entirety of which is herein incorporated by reference); maize (Rhodes et al., Science 240: 204, (1988), Gordon-Kamm et al., Plant Cell, 2:603, (1990), Fromm et al., Bio/Technology 8:833, (1990), Koziel et al., Bio/Technology 11:194, (1993), Armstrong et al., Crop Science 35:550-557, (1995), all of which the entirety is herein incorporated by reference); oat (Somers et al., Bio/Technology, 10:1589, (1992), the entirety of which is herein incorporated by reference); orchardgrass (Horn et al., Plant Cell Rep. 7:469, (1988), the entirety of which is herein incorporated by reference); rice (Toriyama et al., Theor Appl. Genet. 205:34, (1986); Park et al., Plant Mol. Biol., 32: 1135-1148, (1996); Abedinia et al., Aust. J. Plant Physiol. 24:133-141, (1997); Zhang and Wu, Theor. Appl. Genet. 76:835, (1988); Zhang et al. Plant Cell Rep. 7:379, (1988); Battraw and Hall, Plant Sci. 86:191-202, (1992); Christou et al., Bio/Technology 9:957, (1991), all of which the entirety is herein incorporated by reference); sugarcane (Bower and Birch, Plant J. 2:409, (1992), the entirety of which is herein incorporated by reference); tall fescue (Wang et al., Bio/Technology 10:691, (1992), the entirety of which is herein incorporated by reference), and wheat (Vasil et al., Bio/Technology 10:667, (1992), the entirety of which is herein incorporated by reference; U.S. Pat. No. 5,631,152, the entirety of which is herein incorporated by reference.

[0224] Assays for gene expression based on the transient expression of cloned nucleic acid constructs have been developed by introducing the nucleic acid molecules into plant cells by polyethylene glycol treatment, electroporation, or particle bombardment (Marcotte, et al., Nature, 335: 454-457 (1988), the entirety of which is herein incorporated by reference; Marcotte, et al., Plant Cell, 1: 523-532 (1989), the entirety of which is herein incorporated by reference; McCarty, et al., Cell 66: 895-905 (1991), the entirety of which is herein incorporated by reference; Hattori, et al., Genes Dev. 6: 609-618 (1992), the entirety of which is herein incorporated by reference; Goff, et al., EMBO J. 9: 2517-2522 (1990), the entirety of which is herein incorporated by reference). Transient expression systems may be used to functionally dissect gene constructs (See generally, Mailga et al., Methods in Plant Molecular Biology, Cold Spring Harbor Press (1995)).

[0225] Any of the nucleic acid molecules of the present invention may be introduced into a plant cell in a permanent or transient manner in combination with other genetic elements such as vectors, promoters enhancers etc. Further any of the nucleic acid molecules of the present invention may be introduced into a plant cell in a manner that allows for over expression of the protein or fragment thereof encoded by the nucleic acid molecule.

[0226] Cosuppression is the reduction in expression levels, usually at the level of RNA, of a particular endogenous gene or gene family by the expression of a homologous sense construct that is capable of transcribing mRNA of the same strandedness as the transcript of the endogenous gene (Napoli et al., Plant Cell 2: 279-289 (1990), the entirety of which is herein incorporated by reference; van der Krol et al., Plant Cell 2: 291-299 (1990), the entirety of which is herein incorporated by reference). Cosuppression may result from stable transformation with a single copy nucleic acid molecule that is homologous to a nucleic acid sequence found with the cell (Prolls and Meyer, Plant J 2:465-475 (1992), the entirety of which is herein incorporated by reference) or with multiple copies of a nucleic acid molecule that is homologous to a nucleic acid sequence found with the cell (Mittlesten et al., Mol. Gen. Genet. 244: 325-330 (1994), the entirety of which is herein incorporated by reference). Genes, even though different, linked to homologous promoters may result in the cosuppression of the linked genes (Vaucheret, C. R. Acad. Sci. III 316: 1471-1483 (1993), the entirety of which is herein incorporated by reference).

[0227] This technique has, for example been applied to generate white flowers from red petunia and tomatoes that do not ripen on the vine. Up to 50% of petunia transformants that contained a sense copy of the chalcone synthase (CHS) gene produced white flowers or floral sectors; this was as a result of the post-transcriptional loss of mRNA encoding CHS (Flavell, Proc. Natl. Acad. Sci. (U.S.A.) 91:3490-3496 (1994)), the entirety of which is herein incorporated by reference). Cosuppression may require the coordinate transcription of the transgene and the endogenous gene, and can be reset by a developmental control mechanism (Jorgensen, Trends Biotechnol, 8:340344 (1990), the entirety of which is herein incorporated by reference; Meins and Kunz, In: Gene Inactivation and Homologous Recombination in Plants (Paszkowski, J., ed.), pp. 335-348. Kluwer Academic, Netherlands (1994), the entirety of which is herein incorporated by reference).

[0228] It is understood that one or more of the nucleic acids of the present invention including those comprising SEQ ID NO:1 through SEQ ID NO: 27278 or complement thereof or fragments of either or other nucleic acid molecules of the present invention may be introduced into a plant cell and transcribed using an appropriate promoter with such transcription resulting in the co-suppression of an endogenous protein.

[0229] Antisense approaches are a way of preventing or reducing gene function by targeting the genetic material (Mol et al., FEBS Lett. 268: 427-430 (1990), the entirety of which is herein incorporated by reference). The objective of the antisense approach is to use a sequence complementary to the target gene to block its expression and create a mutant cell line or organism in which the level of a single chosen protein is selectively reduced or abolished. Antisense techniques have several advantages over other ‘reverse genetic’ approaches. The site of inactivation and its developmental effect can be manipulated by the choice of promoter for antisense genes or by the timing of external application or microinjection. Antisense can manipulate its specificity by selecting either unique regions of the target gene or regions where it shares homology to other related genes (Hiatt et al., In Genetic Engineering, Setlow (ed.), Vol. 11, New York: Plenum 49-63 (1989), the entirety of which is herein incorporated by reference).

[0230] The principle of regulation by antisense RNA is that RNA that is complementary to the target mRNA is introduced into cells, resulting in specific RNA:RNA duplexes being formed by base pairing between the antisense substrate and the target mRNA (Green et al., Annu. Rev. Biochem. 55: 569-597 (1986), the entirety of which is herein incorporated by reference). Under one embodiment, the process involves the introduction and expression of an antisense gene sequence. Such a sequence is one in which part or all of the normal gene sequences are placed under a promoter in inverted orientation so that the ‘wrong’ or complementary strand is transcribed into a noncoding antisense RNA that hybridizes with the target mRNA and interferes with its expression (Takayama and Inouye, Crit. Rev. Biochem. Mol. Biol. 25: 155-184 (1990), the entirety of which is herein incorporated by reference). An antisense vector is constructed by standard procedures and introduced into cells by transformation, transfection, electroporation, microinjection, or by infection, etc. The type of transformation and choice of vector will determine whether expression is transient or stable. The promoter used for the antisense gene may influence the level, timing, tissue, specificity, or inducibility of the antisense inhibition.

[0231] It is understood that protein synthesis activity in a plant cell may be reduced or depressed by growing a transformed plant cell containing a nucleic acid molecule whose non-transcribed strand encodes a protein or fragment thereof.

[0232] Antibodies have been expressed in plants (Hiatt et al., Nature 342:76-78 (1989), the entirety of which is herein incorporated by reference; Conrad and Fielder, Plant Mol. Biol. 26: 1023-1030 (1994), the entirety of which is herein incorporated by reference). Cytoplamic expression of a scFv (single-chain Fv antibodies) has been reported to delay infection by artichoke mottled crinkle virus. Transgenic plants that express antibodies directed against endogenous proteins may exhibit a physiological effect (Philips et al., EMBO J. 16: 4489-4496 (1997), the entirety of which is herein incorporated by reference; Marion-Poll, Trends in Plant Science 2: 447-448 (1997), the entirety of which is herein incorporated by reference). For example, expressed anti-abscisic antibodies reportedly result in a general perturbation of seed development (Philips et al., EMBO J. 16: 4489-4496 (1997)).

[0233] Antibodies that are catalytic may also be expressed in plants (abzyrnes). The principle behind abzymes is that since antibodies may be raised against many molecules, this recognition ability can be directed toward generating antibodies that bind transition states to force a chemical reaction forward (Persidas, Nature Biotechnology 15:1313-1315 (1997), the entirety of which is herein incorporated by reference; Baca et al., Ann. Rev. Biophys. Biomol. Struct. 26:461-493 (1997), the entirety of which is herein incorporated by reference). The catalytic abilities of abzymes may be enhanced by site directed mutagensis. Examples of abzymes are, for example, set forth in U.S. Pat. No. 5,658,753; U.S. Pat. No. 5,632,990; U.S. Pat. No. 5,631,137; U.S. Pat. No. 5,602,015; U.S. Pat. No. 5,559,538; U.S. Pat. No. 5,576,174; U.S. Pat. No. 5,500,358; U.S. Pat. No. 5,318,897; U.S. Pat. No. 5,298,409; U.S. Pat. No. 5,258,289 and U.S. Pat. No. 5,194,585, all of which are herein incorporated in their entirety.

[0234] It is understood that any of the antibodies of the present invention may be expressed in plants and that such expression can result in a physiological effect. It is also understood that any of the expressed antibodies may be catalytic.

[0235] In addition to the above discussed procedures, practitioners are familiar with the standard resource materials which describe specific conditions and procedures for the construction, manipulation and isolation of macromolecules (e.g., DNA molecules, plasmids, etc.), generation of recombinant organisms and the screening and isolating of clones, (see for example, Sambrook et al., Molecular Cloning: A Laboratory Manual, Cold Spring Harbor Press (1989); Mailga et al., Methods in Plant Molecular Biology, Cold Spring Harbor Press (1995), the entirety of which is herein incorporated by reference; Birren et al., Genome Analysis: Analyzing DNA, 1, Cold Spring Harbor, N.Y., the entirety of which is herein incorporated by reference).

[0236] The nucleotide sequence provided in SEQ ID NO:1, through SEQ ID NO: 27278 or fragment thereof, or complement thereof, or a nucleotide sequence at least 90% identical, preferably 95%, identical even more preferably 99% or 100% identical to the sequence provided in SEQ ID NO:1 through SEQ ID NO: 27278 or fragment thereof, or complement thereof, can be “provided” in a variety of mediums to facilitate use fragment thereof. Such a medium can also provide a subset thereof in a form that allows a skilled artisan to examine the sequences.

[0237] In one application of this embodiment, a nucleotide sequence of the present invention can be recorded on computer readable media. As used herein, “computer readable media” refers to any medium that can be read and accessed directly by a computer. Such media include, but are not limited to: magnetic storage media, such as floppy discs, hard disc, storage medium, and magnetic tape: optical storage media such as CD-ROM; electrical storage media such as RAM and ROM; and hybrids of these categories such as magnetic/optical storage media. A skilled artisan can readily appreciate how any of the presently known computer readable mediums can be used to create a manufacture comprising computer readable medium having recorded thereon a nucleotide sequence of the present invention.

[0238] As used herein, “recorded” refers to a process for storing information on computer readable medium. A skilled artisan can readily adopt any of the presently known methods for recording information on computer readable medium to generate media comprising the nucleotide sequence information of the present invention. A variety of data storage structures are available to a skilled artisan for creating a computer readable medium having recorded thereon a nucleotide sequence of the present invention. The choice of the data storage structure will generally be based on the means chosen to access the stored information. In addition, a variety of data processor programs and formats can be used to store the nucleotide sequence information of the present invention on computer readable medium. The sequence information can be represented in a word processing text file, formatted in commercially-available software such as WordPerfect and Microsoft Word, or represented in the form of an ASCII file, stored in a database application, such as DB2, Sybase, Oracle, or the like. A skilled artisan can readily adapt any number of data processor structuring formats (e.g. text file or database) in order to obtain computer readable medium having recorded thereon the nucleotide sequence information of the present invention.

[0239] By providing one or more of nucleotide sequences of the present invention, a skilled artisan can routinely access the sequence information for a variety of purposes. Computer software is publicly available which allows a skilled artisan to access sequence information provided in a computer readable medium. The examples which follow demonstrate how software which implements the BLAST (Altschul et al., J. Mol. Biol. 215:403-410 (1990)) and BLAZE (Brutlag et al., Comp. Chem. 17:203-207 (1993), the entirety of which is herein incorporated by reference) search algorithms on a Sybase system can be used to identify open reading frames (ORFs) within the genome that contain homology to ORFs or proteins from other organisms. Such ORFs are protein-encoding fragments within the sequences of the present invention and are useful in producing commercially important proteins such as enzymes used in amino acid biosynthesis, metabolism, transcription, translation, RNA processing, nucleic acid and a protein degradation, protein modification, and DNA replication, restriction, modification, recombination, and repair.

[0240] The present invention further provides systems, particularly computer-based systems, which contain the sequence information described herein. Such systems are designed to identify commercially important fragments of the nucleic acid molecule of the present invention. As used herein, “a computer-based system” refers to the hardware means, software means, and data storage means used to analyze the nucleotide sequence information of the present invention. The minimum hardware means of the computer-based systems of the present invention comprises a central processing unit (CPU), input means, output means, and data storage means. A skilled artisan can readily appreciate that any one of the currently available computer-based system are suitable for use in the present invention.

[0241] As indicated above, the computer-based systems of the present invention comprise a data storage means having stored therein a nucleotide sequence of the present invention and the necessary hardware means and software means for supporting and implementing a search means. As used herein, “data storage means” refers to memory that can store nucleotide sequence information of the present invention, or a memory access means which can access manufactures having recorded thereon the nucleotide sequence information of the present invention. As used herein, “search means” refers to one or more programs which are implemented on the computer-based system to compare a target sequence or target structural motif with the sequence information stored within the data storage means. Search means are used to identify fragments or regions of the sequence of the present invention that match a particular target sequence or target motif. A variety of known algorithms are disclosed publicly and a variety of commercially available software for conducting search means are available and can be used in the computer-based systems of the present invention. Examples of such software include, but are not limited to, MacPattern (EMBL), BLASTIN and BLASTIX (NCBIA). One of the available algorithms or implementing software packages for conducting homology searches can be adapted for use in the present computer-based systems.

[0242] The most preferred sequence length of a target sequence is from about 10 to 100 amino acids or from about 30 to 300 nucleotide residues. However, it is well recognized that during searches for commercially important fragments of the nucleic acid molecules of the present invention, such as sequence fragments involved in gene expression and protein processing, may be of shorter length.

[0243] As used herein, “a target structural motif,” or “target motif,” refers to any rationally selected sequence or combination of sequences in which the sequences or sequence(s) are chosen based on a three-dimensional configuration which is formed upon the folding of the target motif. There are a variety of target motifs known in the art. Protein target motifs include, but are not limited to, enzymatic active sites and signal sequences. Nucleic acid target motifs include, but are not limited to, promoter sequences, cis elements, hairpin structures and inducible expression elements (protein binding sequences).

[0244] Thus, the present invention further provides an input means for receiving a target sequence, a data storage means for storing the target sequences of the present invention sequence identified using a search means as described above, and an output means for outputting the identified homologous sequences. A variety of structural formats for the input and output means can be used to input and output information in the computer-based systems of the present invention. A preferred format for an output means ranks fragments of the sequence of the present invention by varying degrees of homology to the target sequence or target motif. Such presentation provides a skilled artisan with a ranking of sequences which contain various amounts of the target sequence or target motif and identifies the degree of homology contained in the identified fragment.

[0245] A variety of comparing means can be used to compare a target sequence or target motif with the data storage means to identify sequence fragments sequence of the present invention. For example, implementing software which implement the BLAST and BLAZE algorithms (Altschul et al., J. Mol. Biol. 215:403-410 (1990)) can be used to identify open frames within the nucleic acid molecules of the present invention. A skilled artisan can readily recognize that any one of the publicly available homology search programs can be used as the search means for the computer-based systems of the present invention. Having now generally described the invention, the same will be more readily understood through reference to the following examples which are provided by way of illustration, and are not intended to be limiting of the present invention, unless specified.

### EXAMPLE 1

[0246] The SOYMON018 cDNA library is generated from soybean cultivar Asgrow 3244 (Asgrow Seed Company, Des Moines, Iowa U.S.A.) leaf tissue harvested 45 and 55 days post-flowering. Leaves from field grown plants are harvested 45 and 55 days after flowering from the fourth node. Approximately 27 g and 33 g of seeds are harvested from the respective seed pods and immediately frozen in dry ice. The harvested tissue is then stored at −80° C. until RNA preparation. SEQ ID NO: 1 through SEQ ID NO:21357 are from SOYMON018 the cDNA library is constructed as described in Example 2.

[0247] The SOYMON028 cDNA library is generated from soybean cultivar Asgrow 3244 (Asgrow Seed Company, Des Moines, Iowa U.S.A.) drought-stressed root tissue. Seeds are planted in moist Metromix 350 medium at a depth of approximately 2 cm in trays. The trays are placed in an environmental chamber set to a 12 h day/12 h night cycle, 26° C. daytime temperature, 21° C. night temperature and 70% relative humidity. Daytime light levels are measured at 300μ Einsteins/m². Soil is checked and watered daily to maintain even moisture conditions. At the R3 stage of development, water is withheld from half of the plant collection (drought stressed population). After 3 days, half of the plants from the drought stressed condition and half of the plants from the control population are harvested. After another 3 days (6 days post drought induction) the remaining plants are harvested. A total of 27 g and 40 g of root tissue is harvested from plants at two time points and immediately frozen in dry ice. The harvested tissue is then stored at −80° C. until RNA preparation. Total RNA is prepared from the combination of equal amounts of drought stressed root tissue from both time points and the cDNA library is constructed as described in Example 2. SEQ ID NO:21358 through SEQ ID NO: 27278 are from SOYMON028.

### EXAMPLE 2

[0248] The stored RNA is purified using Trizol reagent from Life Technologies (Gibco BRL, Life Technologies, Gaithersburg, Md. U.S.A.), essentially as recommended by the manufacturer. Poly A+ RNA (mRNA) is purified using magnetic oligo dT beads essentially as recommended by the manufacturer (Dynabeads, Dynal Corporation, Lake Success, New York U.S.A.).

[0249] Construction of plant cDNA libraries is well-known in the art and a number of cloning strategies exist. A number of cDNA library construction kits are commercially available. The Superscript™ Plasmid System for cDNA synthesis and Plasmid Cloning (Gibco BRL, Life Technologies, Gaithersburg, Md. U.S.A.) is used, following the conditions suggested by the manufacturer.

[0250] Normalized libraries are made using essentially the Soares procedure (Soares et al., Proc. Natl. Acad. Sci. (U.S.A.) 91:9228-9232 (1994)). This approach is designed to reduce the initial 10,000-fold variation in individual cDNA frequencies to achieve abundances within one order of magnitude while maintaining the overall sequence complexity of the library. In the normalization process, the prevalence of high-abundance cDNA clones decreases dramatically, clones with mid-level abundance are relatively unaffected and clones for rare transcripts are effectively increased in abundance.

[0251] Normalized libraries are prepared from single-stranded and double-stranded DNA. Single-stranded and double-stranded DNA representing approximately 1×10⁶ colony forming units are isolated using standard protocols. RNA, complementary to the single-stranded DNA, is synthesized using the double stranded DNA as a template. Biotinylated dATP is incorporated into the RNA during the synthesis reaction. The single-stranded DNA is mixed with the biotinylated RNA in a 1:10 molar ratio) and allowed to hybridize. DNA-RNA hybrids are captured on Dynabeads M280 streptavidin (Dynabeads, Dynal Corporation, Lake Success, New York U.S.A.). The dynabeads with captured hybrids are collected with a magnet. The non-hybridized single-stranded molecules remaining after hybrid capture are converted to double stranded form and represent the primary normalized library.

### EXAMPLE 3

[0252] The cDNA libraries are plated on LB agar containing the appropriate antibiotics for selection and incubated at 37° for a sufficient time to allow the growth of individual colonies. Single colonies are individually placed in each well of a 96-well microtiter plates containing LB liquid including the selective antibiotics. The plates are incubated overnight at approximately 37° C. with gentle shaking to promote growth of the cultures. The plasmid DNA is isolated from each clone using Qiaprep plasmid isolation kits, using the conditions recommended by the manufacturer (Qiagen Inc., Santa Clara, Calif. U.S.A.).

[0253] The template plasmid DNA clones are used for subsequent sequencing. For sequencing the cDNA libraries of SOYMON018, and SOYMON028, a commercially available sequencing kit, such as the ABI PRISM dRhodamine Terminator Cycle Sequencing Ready Reaction Kit with AmpliTaq® DNA Polymerase, FS, is used under the conditions recommended by the manufacturer (PE Applied Biosysteins, Foster City, Calif.). The ESTs of the present invention are generated by sequencing initiated from the 5′ end of each cDNA clone.

[0254] A number of sequencing techniques are known in the art, including fluorescence-based sequencing methodologies. These methods have the detection, automation and instrumentation capability necessary for the analysis of large volumes of sequence data. Currently, the 377 DNA Sequencer (Perkin-Elmer Corp., Applied Biosystems Div., Foster City, Calif.) allows the most rapid electrophoresis and data collection. With these types of automated systems, fluorescent dye-labeled sequence reaction products are detected and data entered directly into the computer, producing a chromatogram that is subsequently viewed, stored, and analyzed using the corresponding software programs. These methods are known to those of skill in the art and have been described and reviewed (Birren et al., Genome Analysis: Analyzing DNA, 1, Cold Spring Harbor, N.Y., the entirety of which is herein incorporated by reference).

The application's sequence listing, which the Patent Office published only in electronic form, follows.

SEQUENCE LISTING (27278 sequences)

SEQ ID NO: 1 - DNA, 160 bp, Glycine max
  unsure at all n locations
  Clone ID: 700870643H1
tcgcatgcacgcgtacgtaagctcggaattnattccggaccggtacctgacaggcgtaccagctttccctatagtgagtcgtattagagcttggcgtaatcatggtcatagctgtttcctgtgtgaaattgttatccgctcacaattccacacaacatac

SEQ ID NO: 2 - DNA, 218 bp, Glycine max
  Clone ID: 700870724H1
gtcgtatgtacgcgtacgtaagctcggaattccgagcttgggatcctctagagcggccgccgactagtgagctcgtcgacccgggaattaattccggaccggtacctgcaggcgtaccagctttccctatagtgagtcgtattagagcttggcgtaatcatggtcatagctgtttcctgtgtgaaattgttatccgctcacaattccacacaacatac

SEQ ID NO: 3 - DNA, 213 bp, Glycine max
  unsure at all n locations
  Clone ID: 700871093H1
acgtcgcangcacgcgtacgtaagctcggaattccgagcttggatcctctagagcggccgccgactagtgagctcgtcgacncgggaattaattccggaccggtacctgcaggcgtaccagctttccctatagtgagtcgtattagagcttggcgtaatcatggtcatagctgtttcctgtgtgaaattgttatccgctcacaattccacaca

SEQ ID NO: 4 - DNA, 372 bp, Glycine max
  unsure at all n locations
  Clone ID: 700871383H1
aaaanagnataagtgcgtnaatggataaaggtnctgagganatttgcgagacgttgtctgtgcntntgnntntgtgnncnactgtntgcgatnctgtgcgagntgctagttagtgtggngtgncgttcaaggnngngttcanatnancccgcagagggatttnnttagntacttgatagngtaaagatatngnagntgctcaantcagnnaatnncggaggttaggtnatgtggngatangtnacagtananagtcaaagtnnntgatgttnngtgtnntganttgtttnntggnnatttntgngcatcgcttgnantgtgtcanaangaggcnaagatctgtattcttanntcttgataatgncnggaaag

SEQ ID NO: 5 - DNA, 447 bp, Glycine max
  unsure at all n locations
  Clone ID: 700871391H1
wnaaaaaaanttanntagctngcaaggncgaaacnnnnnggacnagcancngctggnaacatgnccggacgtntggggngtagtagtcnggtaggtncgaaccnggatngaagnnaactgantgtgtaaaagagnntgtgngatcnanganganngngtangtngnttngggaggctttgcacntatngacagtgnngnncgnatnggncnagaatctncagtgacngntttgncnnggagngngcgnnantagtngtcagatnantnncaggannntttgagngngagtgtctgntcagtcnnatnancganngtngannncnnnggacnanaaggggtnangtgnnatggnncnntgacgngcgnggtgaacganagaggcgtgnnctngtggtnngcttgnanntggtcaantnggagntnagnnccncggnnggnnangtngg

SEQ ID NO: 6 - DNA, 211 bp, Glycine max
  unsure at all n locations
  Clone ID: 700871496H1
ncgattgagggncggccttganaancagtggntggntaanaggngtgnncctgntancnagatnggnatcagngatnagannaagcagtttgncatgggaatngngantagncaagnnngnggagtttnatcanggangggnncatncnctggctnagganggagnncgagtggnnntntannaaatngaggncgnngtgnggnggcnatn

SEQ ID NO: 7 - DNA, 128 bp, Glycine max
  unsure at all n locations
  Clone ID: 700871659H1
gnggnngcntgcncgcgtncgtgagctcgganttcggctcgagcnnttttngnnacangttgacagcnattttcgtncncangnnannnanaannggncggccgccgnctctggtgcnncctcgtcng

SEQ ID NO: 8 - DNA, 69 bp, Glycine max
  unsure at all n locations
  Clone ID: 700871795H1
acgtcgcangcacgcgtacgtaagctcggaaattcggctcgagnnaaaaaaaaaaaaaaaaaaaaaaat

SEQ ID NO: 9 - DNA, 224 bp, Glycine max
  unsure at all n locations
  Clone ID: 700871872H1
gtcgcangcncgcntacgtnnagctcggaattcggctcgagcggctcgaggttctagatcgcgagcggccgccgactagtgagctcgtcgacccgggaattaattccggaccggtacctgcaggcgtacaagctncccctatagtgagtcgtattagagcttggcgtaatcatggtcatagctgtttcctgtgtgaaattgttatccgctcacaattccacacn

SEQ ID NO: 10 - DNA, 254 bp, Glycine max
  unsure at all n locations
  Clone ID: 700872241H1
gngncgangcacgcgtacgtnaggncgganttnggctngaggatcgctctctcactcttccnganancatgngngannaacnggacggngannnnncgcangcggaaggcggcggncnnnggnnggnnnncnggngcnnnnnnncnnncggcangngcccacggcgggnncggcnncncgcnncnnggggngggcgngcagccgggnntacggtcnnnnncnngggngnactgagaagncanngnagcngngan

SEQ ID NO: 11 - DNA, 253 bp, Glycine max
  unsure at all n locations
  Clone ID: 700872272H1
acgnacgcgcacncnnacncnngnncgcnngctcgacncnnnccnttannccncccancntccnncnaaccccccgntctcctgannacnncnacncacnccannanaccgacccccccnncncnccncncnntgcntncctattcccttccnccngcacnccncncgcntgnagccnattantnnacnacntccanccncaaccgtnncggnnccannnacaacccgncancncccctccggtngttnctnt

SEQ ID NO: 12 - DNA, 87 bp, Glycine max
  unsure at all n locations
  Clone ID: 700872611H1
tnacangcacgcgtacgtnagctcggaattcggctcgaggcagaaatttcgaaataagagttgtaactcttttttcccttaataaaa

SEQ ID NO: 13 - DNA, 277 bp, Glycine max
  unsure at all n locations
  Clone ID: 700872622H1
annanactcacncntacgtaatcncggaattcnnntcnagcttccacacaacanacnacacnaaaacanncannanancanacacacnanannnnnncncncnacaaactnccccnacccnnncaccnncnaccnnnnncnnncanaanncnacatanaanancnnntcnacnancnacaccannnacnaannacacannnancnnnnannanacnnnnnnacnnnncnncnnannncaannncnncannnnnccnnnacatannccncaancctcn

SEQ ID NO: 14 - DNA, 88 bp, Glycine max
  unsure at all n locations
  Clone ID: 700872668H1
aagtcgcatgcacgcgtacgtaaagctcggaattcggctcgagctagttctagatcgcgagcngcccccttttttttttttttnangg

SEQ ID NO: 15 - DNA, 213 bp, Glycine max
  unsure at all n locations
  Clone ID: 700872714H1
cangcacagcgtacgtaagctcggaattcggctcgagctagttctagatcgcgagcggccgccgactagtgagctcgtcgacccgggaattnattccggaccggtacctgcaggcgtaccagctttccctatagtgagtcgnattagagcttggcgtaatcntggtcatagctgtttcctgtgtgaaattgttatccgctcacaattccacac

SEQ ID NO: 16 - DNA, 137 bp, Glycine max
  unsure at all n locations
  Clone ID: 700873071H1
nacgtcgcangcacgcgtacgtaagctcggaattaattccggaccggtacctgcaggcgtaccagctttccctatagtgagtcgtnattagagcttggcgtaatcatggtcatagctgtttcctgtgtgaaattgtt

SEQ ID NO: 17 - DNA, 227 bp, Glycine max
  unsure at all n locations
  Clone ID: 700873147H1
gangtcttngagtcgnatgcacgcgtacgtaagctcggaattccgagcttggatcctctagagcggccgccgactagtgagctcgtcgacaccgggaattaattccggaccggtacctgcaggcgtaccagctttccctatagtgagtcgtattagagcttggcgtaatcatggtcatagctgtttcctgtgtgaaattgttatccgctcacaattccacacaacat

SEQ ID NO: 18 - DNA, 316 bp, Glycine max
  unsure at all n locations
  Clone ID: 700873344H1
nacnaaannaanaanacncnnnnaaccnancccnnaccaatccncaaancnanacancaccacccaaacnnaccnnnncnncnacananannnnncnaannaacaacncncanaanaacacaacaanaacaaancnaanncaaanaancanncaaaanaannannncnaanncacacnaanacnccaccaaacnaannaaaccaacaacnccnncnnnnnaacncanacnncnnanncacaanaacacnaaaancaanncnaacananaannnacccancancancacnnncaacaanancnnannnanccnacac

SEQ ID NO: 19 - DNA, 287 bp, Glycine max
  unsure at all n locations
  Clone ID: 700873535H1
nngtgnntgancngaggttttangnncgnnggnncggctcggggntgagntacncnatgttgnnggnagcaangcataagtgtcggaccttaaanncatgtctgnntaannttgtcgtntgacattttggnantgtagccnntgaanttntattcntctatggntgcctcatnttangctatncantcaatccttgngaancctatgatccgnatttccaacgggngctagggagaancattttggtatncctnnntgtnacatgggaaggggtgtggcctnagagt

SEQ ID NO: 20 - DNA, 273 bp, Glycine max
  unsure at all n locations
  Clone ID: 700873591H1
ncgntnttttttcgtncatgaacgcngnantcggntcgangnttcnngcagnttctnggntcttctcnacanagactccanntntctggngctccatnccatntatccttnctnnatcattacatcganctccaggtcntgtcttgcatgcatgnngtncttcnnnatgnacggctcccangngcctactctgggtcaaatccacgaanagcaaggtcgtngnccatncnntgtcnnggtcatcgagnatcnngtccgccgcnagagtattgt

SEQ ID NO: 21 - DNA, 64 bp, Glycine max
  unsure at all n locations
  Clone ID: 700873828H1
antnncangcncgcgtacgtaagctcggaattcggctcgaganaaanaaaaaaaaaaaaaaaaa

SEQ ID NO: 22 - DNA, 208 bp, Glycine max
  unsure at all n locations
  Clone ID: 700873923H1
atacgcangcacgcgtacgtaagctcggaattcggctcgagtctagatcgcgagcggccgccgactagtgagctcgtcgacccgggaattaattccggaccggtacctgcaggcgtaccagctttccctattagtgagtcgtattagagcttggcgtaatcatggtcatagctgtttcctgtgtgaaattgttatccgctcacaattc

SEQ ID NO: 23 - DNA, 293 bp, Glycine max
  unsure at all n locations
  Clone ID: 700874010H1
cncgtcntcnctcntnnnntcctccccncnctccnncnctcccttntccgtctcctctntntcngncntcttncgnntttctntccncctcnccnncnnnnnnctcccnccntncttncnccttccccnngntnngnctccntnnccgncgccttnccncnnncggntccccgccncnccncnccccccgcntnctncngcncgtncncccccctcncntnnntctncntctcnnctcngngcnncnccntctgcccntcngncncggtnnccnccnctgctttcnncctcnc

SEQ ID NO: 24 - DNA, 267 bp, Glycine max
  unsure at all n locations
  Clone ID: 700874184H1
gtcgcatgcacgcgtacgtaagctcggaattccgagcttgnatcctctagagcggccgccgactagtgagctcgtcgacacgggaattaattccggaccggtacctnccaggcgtaccagctttccctatagtgagtcgtattagagcttggcgtaatcatggtcatagctgtttcctgtgtgaaattgttatccgctcacaattccacacaacanaatnttntnaaaaaaaaaaannnnaancnannnnnnannnanannnnnnan

SEQ ID NO: 25 - DNA, 213 bp, Glycine max
  unsure at all n locations
  Clone ID: 700874204H1
cgcgtacgtnagctcggaattcgggctcgagacacaaggntncactagagcggtcgcngactagtgngctcgtcgacccgggaattaattccngaccggtaccngcaggcgtaccagctttccctanagtgagtcgtattagagcttggngtaatcanggtcatngctgttncctgtgtgaaattgttatccgctcacaattccacanaacat

SEQ ID NO: 26 - DNA, 162 bp, Glycine max
  unsure at all n locations
  Clone ID: 700874568H1
aacgtcgcatgcacgcgtacgtaagcttcgggccgcactcagtgagntcgtccgacccgggaattaattccggacccggtgacctggcagggcgtaacccaggctttccctnatcagtgagtcgtattagaggcttgggcgtnaatgcatggtcatnaggct

SEQ ID NO: 27 - DNA, 298 bp, Glycine max
  unsure at all n locations
  Clone ID: 700874620H1
gncgnangcacgcgtacgtaagctcggaattccgagcttggatcctctagagcggccgccgactagtgagctcgtcgaaccgggaattaattccggaccggtacctgcaggcgtaccagctttccctatagtgagtcgtattagagcttggcgtaatcatggtcatagctgtttctgtgtgaaattgttatccgctcacaattccacanaacataanagttnaaaaananngnngngannangnngangnntnannnnnnnnnaagngnnnnnnnnnannncnngggaaanngnagnn

SEQ ID NO: 28 - DNA, 75 bp, Glycine max
  unsure at all n locations
  Clone ID: 700875062H1
gcgtcgcangcacgcgtacgtnagcncggaattcgggctngagccaccttcacaattagaanannananaaannn

SEQ ID NO: 29 - DNA, 97 bp, Glycine max
  unsure at all n locations
  Clone ID: 700875404H1
acgtcgcancnaacgcgtacgtaagcncggnaantcggcncgagccnaaangtngcatcnnggaannacnnaaaanaaaaaaaaaaaaaaaaaaaag

SEQ ID NO: 30 - DNA, 56 bp, Glycine max
  unsure at all n locations
  Clone ID: 700875427H1
cangcncgcgtacgtnagcncggaattcggctcgagnaaacagtaaaanaaaaaan

SEQ ID NO: 31 - DNA, 188 bp, Glycine max
  unsure at all n locations
  Clone ID: 700875471H1
acgtcgcangcacgcgtacgtaagctcgggccgactagtganctcgtcgacccgggaattaattccggaccggtacctgcaggcgtaccagctttccctatagtgagtcgtattagagcttggcgtaatcatggtcatagctgtttcctgtgtgaaatngttatccgctcacaattccacacaacata

SEQ ID NO: 32 - DNA, 78 bp, Glycine max
  unsure at all n locations
  Clone ID: 700875485H1
ncgtcgcatgcacgcgtacgtnaagctcggnattnngctcgagntcgagccgaataagnaaanaaaaaaaaaaaaaan

SEQ ID NO: 33 - DNA, 158 bp, Glycine max
  unsure at all n locations
  Clone ID: 700875492H1
gtcgcangcncgcgtacgtnagcncggaattccggaccggnacctgcaggcgnaccagcnttcccnanagtgagtcgnattagagcttggcgtaatcatggtcatagcngtttccngtgtgaaatngtnanccgcncacaannccananaacanacgn

SEQ ID NO: 34 - DNA, 175 bp, Glycine max
  Clone ID: 700875525H1
atgcacgcgtacgtaagctcgggccgactagtgagctcgtcgacccgggaattaattccggaccggtacctgcaggcgtaccagctttccctatagtgagtcgtattagagcttggcgtaatcatggtcatagctgtttcctgtgtgaaattgttatccgctcacaattccacac

SEQ ID NO: 35 - DNA, 293 bp, Glycine max
  unsure at all n locations
  Clone ID: 700875536H1
cangcacgcgtacgtaagctcggaatnggccaacgcgccggggagaggcggtttgcgtattgggcgctcttccgcttcctcgctccactgcactcgntgcgctcggtcgttcggctgcggcgagcggtatcagctcactcaaaggcggtaatacggttatccacagaatcagggntggncgcaggaaagaacatgtgagcaaaaggccagcaaaaggccaggaaccgtaaaaaggccgcgttgctggcgtttttccataggctccacaanacataccnnnnnanatnnggagc

SEQ ID NO: 36 - DNA, 296 bp, Glycine max
  unsure at all n locations
  Clone ID: 700875568H1
ngcangcacgcgtacgtaagctcggaatnggccaacgcgcggggagaggcggtttgcgtattgggcgctcttccgcttcctcgctccactgactcgntgcgctcggtcgttcggctgcggcgagcggtatcagctcactcaaaggcggtaatacggttatccacagaatcagggnntggncgcaggaaagaacatgtgagcaaaaggccagcaaaaggccaggaaccgtaaaaaggccgcgttgctggcgtttttccataggctccacaatacatacgcnnnaanacnnntgnngn

SEQ ID NO: 37 - DNA, 292 bp, Glycine max
  unsure at all n locations
  Clone ID: 700875654H1
agtcgcatgcacgcgtacgtaagctcgggccgactagtganntcgtcgacccgggaattaattccggaccggtacntgcaggcgtaccagctttccntatagtgagtcgtattagagcttggcgtaatcatggtcatagctgtttcctgtgtgaaattgttatccgctcacaattccacacaacatacgannnnnnangntnggtngnnatgttgaagtttttcgggttttcaggatgngntttgttatntntgnnnnggtagnagaaganntgtcnannnnnnnnnnnnnn

SEQ ID NO: 38 - DNA, 82 bp, Glycine max
  unsure at all n locations
  Clone ID: 700876213H1
ggcanngcacncgtacgtnagctcggaattcggctcgagncaattctcagatttgtnacctgctctcaaaananaaaaaaaa

SEQ ID NO: 39 - DNA, 283 bp, Glycine max
  unsure at all n locations
  Clone ID: 700876247H1
gcacgcgtacgtaagctcggaattcggctcgaggactagttctagatcgcgagcggccgccgactagtgagctcgtcgacccgggaattaattccggaccggtacctgcaggcgtaccagctttccctatagtgagtcgtattagagcttggcgtaatcatggcatagctgtttcctgtgtgaaattgttatccgctcacaattccacacaacatagantggnnaaaaannannncttcnngnncnngtgcggnnatgnnngnnnnncngnnnnnnnngnngg

SEQ ID NO: 40 - DNA, 218 bp, Glycine max
  unsure at all n locations
  Clone ID: 700876483H1
gtcgcangcacgcgtacgtaagctcggaattcggctcgaggttctagatcgcgagcggccgccgactagtgagctcgtcgacccgggaattaattccggaccggtacctgcaggcgtaccagctttccctatagtgagtcgtttagagcttggcgtaatcatggtcatagctgtttcctgtgtgaaattgttatccgctcacaattccacacaacatn

SEQ ID NO: 41 - DNA, 135 bp, Glycine max
  unsure at all n locations
  Clone ID: 700876508H1
gacgtcgcangcaccnagtacgtaagctcggaattcggctcgagtctccatcgaggtgaaatctggataaactattcaaaaatttttgccaaagaaaacaaaaaaaaaaaaaaaangggnggccgccgantnntg

SEQ ID NO: 42 - DNA, 126 bp, Glycine max
  unsure at all n locations
  Clone ID: 700876526H1
agtcgcgggacgcgtacgtaagctcgggccgactagtgantcgtcgacccgggaattaattccggaccggtacctgcaggcgtaccagctttccctatagtgagtcgtattagagcttggcgtaat

SEQ ID NO: 43 - DNA, 164 bp, Glycine max
  unsure at all n locations
  Clone ID: 700876579H1
aagttgangaagagtacgtaagctnggaattaggntcnaggcaaagtgattgattccagttcnaanggacnnngganaaanangntttgatcgnnaggaaggttnnnntntcacccnnaacnagnaaaanaaagaaatnnatcnagtnagntanaattnntnta

SEQ ID NO: 44 - DNA, 178 bp, Glycine max
  unsure at all n locations
  Clone ID: 700876582H1
gtccccaacccaaacaagncgcacgcacgcgtacgtaagctcggcccagtcgcgtaccgncttcatgggagaaaataatactgttgatgggtgtctggtcagagacatcaagaaataacgccggaacattagtgcaggcagcttccacacaacatacgaangcacnnntacgnnnnag

SEQ ID NO: 45 - DNA, 208 bp, Glycine max
  unsure at all n locations
  Clone ID: 700876649H1
ncgtcgcaagncngngggacgtcngangcacgcgtacgtaagcncgggccgactagtganctcgtcgacccgggaattaattccggaccggtacctgcaggcgtaccagctttccctatagtgngtcgtattagagcttggctaatcatggtcatagctgtttcctgtgtgnaattgttatccgctcacaattccacacaacatacga

SEQ ID NO: 46 - DNA, 66 bp, Glycine max
  unsure at all n locations
  Clone ID: 700876678H1
nacgtcgcangcacgcgtacgtaagctcggaattcggctcgagaaaaaaaaaaaaaaaaaannnan

SEQ ID NO: 47 - DNA, 296 bp, Glycine max
  unsure at all n locations
  Clone ID: 700876990H1
ggttgcgngcncgagtacgcncccncggnnngccggcnggcgancnngtctgnantgcncggcngnggtggngtcttangnncaccannnnatncnanntcncggnnnagcaagcngcaccaannnnannncntnngnaanagcnnttgnnaaagtcnggcnnantganannnannancgangntcgctncacggatnaccnnnggccacaccnncgnngnncanncnaagngnnaccatggncacannnncancctacnncnatnnngnnancgannnngnngnggggtagcncc

SEQ ID NO: 48 - DNA, 217 bp, Glycine max
  unsure at all n locations
  Clone ID: 700877177H1
acgtcgcangcacgcgtacgtaagctcgggccgactagtganctcgtcgacccgggaattaattccggaccggtacctggcaggcgtaccagctttccctatagtgagtcgtattagagcttggcgtaatcatggtcatagctgtttcctgtgtgaaattgttatccgctcacaattccacacaacatacggnnngcnngntnngnngnnnngnnnn

SEQ ID NO: 49 - DNA, 235 bp, Glycine max
  unsure at all n locations
  Clone ID: 700763706H1
cgcatgcacgcgtacgtaagctcggaattccgagcttgggatcctctagagcggccgccgactagtgagctcgtcgacccgggaattaattccggaccggtacctgcaggcgtaccagctttccctatagtgagtcgtattagagcttggcgtaatcatggtcatagctgtttcctgtgtgaaattgttatccgctcacaattccacacaacatacgancnnacnnnnnnggnnn

SEQ ID NO: 50 - DNA, 297 bp, Glycine max
  unsure at all n locations
  Clone ID: 701001311H1
gcaagccccactcaaccaccacacctctcctcgttcacgctacccctttctgctcttcttctaacttttcaagttttaaaagtataaagatggcagagacattcctatttacctcagagtcggtgaacgagggacaccctgacaagctctgcgaccaaatctccgatgctgtcctcgacgcttgcctcgagcaggacccagacagcaaagttgcctgcgaaacatgnaccaaaaccaacttggtcatggtcttcggagaaatcacgaccaaggccaagttgactacgagaagatagt

SEQ ID NO: 51 - DNA, 259 bp, Glycine max
  unsure at all n locations
  Clone ID: 701002239H1
tgcccttggctgagacctgatggcaagacccaagtcactgttgagtactacaatgacaagggtgccatggttccaatccgcgtccacactgtgctcatctccacacagcatgatgagnctgtcacaaatgntgagattgcagctgatcttaaagaacacgtgattaagcctgtgattcctgagaagtaccttgatgagagaccatttccatttgaacccttccnggcaggttgtcattggagggcggcatggggatgng

SEQ ID NO: 52 - DNA, 283 bp, Glycine max
  Clone ID: 701000359H1
cgtgacacatgccgcgaaattggattcatctctgatgatgttggtcttgatgctgacaaatgcaaggtgttggtcaacattgagcagcagagccctgatatcgcccagggtgtgcacggtcacttcaccaagcgcccagaggaggttggtgctggtgaccagggtcacatgtttggctatgccactgatgaaacccctgagtacatgcccctcagccatgtcttgcaaccaaactcggtgctcgctcaccgaggttaggaaaaatggtactgtgcttggctga

SEQ ID NO: 53 - DNA, 292 bp, Glycine max
  unsure at all n locations
  Clone ID: 701001558H1
tngagggcaaagagaatggcacgtaaggnaggancatcggtgatatttgtggttgatgcaagtggaagcatggcattgaacaggatgcagaatgcaaaaggtgcagcacttaagcttctggctgaaagttatacaagcagggatcaggtctctaaattccattccgtggagacgcagctgaagttcttctgccaccttctagatcaattgcaancgnaaggaaacgtcttgagaggctccatgtggtggagggtccccacttgctcaggtctacaacggctgttagagttgg

SEQ ID NO: 54 - DNA, 288 bp, Glycine max
  unsure at all n locations
  Clone ID: 701000103H1
gcgccaagaggttggtggtcatgcagctgttttgggttttgtgggagcaccttgggacaatagcaacatatatagtggaagggggtacaacacgcacatatacaaccattaagagcatgtgccacactgccccacatgtattgaggactttgctttctcatttgacgcaggcaatagctgattacgttattttccaagtggagtctggggctcattgcatacaaatatttgattcatgncngtggacaataccacctgaaatgtgggaacgctggtcaaagccttata

SEQ ID NO: 55 - DNA, 278 bp, Glycine max
  unsure at all n locations
  Clone ID: 701000261H1
ggccaggcaagccccactcaaccaccacacctctcctcgttcacgctacncctttctgctcttcttctacntttcaagttttaaaagtataaagatggcagagacattncctatttacctcanagtcggtgaacgagggacaccctgacaagctctgcgaccaaatctccgatgctgtcctcgacgcttgcctcgagcaggactcagacagcaaagttgcctgcgaaacatggcaccaanaccaattggtcatggtcttcggagaatcacgnccaagg

SEQ ID NO: 56 - DNA, 262 bp, Glycine max
  unsure at all n locations
  Clone ID: 700998660H1
cttctgtttctggnttcattngggtgtttggacacaattgctnaattatactttctgttgattgtgttgacgcnggactgaatgaactaatggagtctanaggtgggaaanagaagtcnnnnnnnnnnnnnnnnnaatcattgttctacgaagctcccctcggatacagcatnngaagacgttagaccaaacggtggaatcaagaaattcagatctgctgcttactccaacgtatatnttcttctgatgcagtgattctgta

SEQ ID NO: 57 - DNA, 264 bp, Glycine max
  unsure at all n locations
  Clone ID: 700996774H1
ctgcaattggttttgaaggtttcgagaagnngctggaaatatcctttttccagccgggactttttgctgaccctgagggaatgggtttaagagctcttgcaaagtcccagttggatgagatacttacaccggctgcttgcaccatangtttcatctctcagaaatgatcatgtcgactcctatgttctgtctgagtncagtctctttgtttatgcctacaagatcatcatcaaaacctgtggtatacaaagctactgttgcant

SEQ ID NO: 58 - DNA, 225 bp, Glycine max
  unsure at all n locations
  Clone ID: 700996204H1
ttcaatttctagggttttgctatacgctttgcctccgttccccctttctcacaaaaacaacgccttttctcttctccttcgtatctattctttgcntttngtttttggttgattgaacggcattcacagcgtaattggtgctgcattttnatcgatttatctaancaggactgantgacctaatggagtctaaaggtgggaaanagaagtctagtagtagtagta

SEQ ID NO: 59 - DNA, 277 bp, Glycine max
  unsure at all n locations
  Clone ID: 701001147H1
ganattgtcatgcactctgctacaaaatttattgctggacatagtgacattatggctggtgtgcttgctgtgaagggtgaaaagttgggaaaggaattgtatttcttgcaaaatgcagagggttcaggcttagcaccatttgactgttggctttgtttgcgaggaatcaagacaatggccctgcgaattgaaaaacaacaggataatgcacagaagattgctgagttccttgcctcccatcctcgagtgaagaaagtgaattatgctggcttgcctg

SEQ ID NO: 60 - DNA, 278 bp, Glycine max
  unsure at all n locations
  Clone ID: 700999820H1
cattcctaggtaccatttgcaccactctttcttcttcaatcaatggcagcaacctcaacatccctcttctcctacaaatctccattctctcaactcacaacctttctcttcctcactctccttnagccngtccattccaccctctctnncanaacantctaaaccctcccgtggcgttgtagccatggctggctctggcaagtnctttgttggtggcaattggaagtgtaatgggaccaaagactccatcagaaagttgtctctggattgaacaggca

SEQ ID NO: 61 - DNA, 278 bp, Glycine max
  unsure at all n locations
  Clone ID: 701001407H1
ctgaacaagggtttctctttctctttctctgtctgcctcttcactttctctcgtttcaatcgaaaaaatcatgggcagaaaattcttccgtcggtggcaactggaaatgcaatgggaccactgaggaggtgaagaagattgttatactttaaatgaagctaaagtccctggagaagatgttgtagaagttgttgtgagccctccttttgtgttccttcctttgtaaaaagttngctgcgccctgatttccatgtctcggcccaaaattgttgggttcg

SEQ ID NO: 62 - DNA, 271 bp, Glycine max
  unsure at all n locations
  Clone ID: 700997892H1
cttattggaganaatgatgagtttatagggaaganagctgcctatgctttgagccaaggtcttggggtgattgcatgcattggagacttgttagaagaaagggaggctggaaaaactactgatgtttgtnttcagcaattgaaggcttatgcagacgcagttgctagttgggacaacattgttattgcatatgaacctgtatgggccattggaacgggcaaagtcgccactccccaacaagctcaggaagtacatgtagctgttcgggatt

SEQ ID NO: 63 - DNA, 267 bp, Glycine max
  unsure at all n locations
  Clone ID: 700999935H1
cctctaanctacctctttttcttctctctcaacaacttcancttcttnntcctcgatcatgtctnacttcaagggcaagtaccatgntgagcttatcgncaatgctgcgtacattggcatcctgggaaaggtattcntgcnggcgatgagtnaacagggacaatggnagcgtttggcnaccatcagtgtagagaacattgatccaacaggagagtctaagggagtgcttntnatnccccngggnncctnaanaacncagggggaacc

SEQ ID NO: 64 - DNA, 265 bp, Glycine max
  Clone ID: 701002443H1
ggcggggataagattaaagattcaacaatggcctctgcttctgctactcttctcaagtcatctcctgttcttgacaagtgcgagtgggtcaaaggccagacccttcgccaacctctcgtgagatgtaacccttcctcagcatcagctctcaccatcaaagctgcttcctatgctgacgagctcgtcaaaaccgccaaaacagtggcctcaccggggcgtggtattttggcgatggatgagtcaaatgcaacctgcgggaagcgtt

SEQ ID NO: 65 - DNA, 266 bp, Glycine max
  Clone ID: 701001412H1
cttggcggggataagattaaagattcaacaatggcctctgcttctgctactcttctcaagtcatctcctgttcttgacaagtgcgagtgggtcaaaggccagacccttcgccaacctctcgtgagatgtaaccttcctcagcatcagctctcaccatcaaagctgcttcctatgctgacgagctcgtcaaaaccgccaaaacagtggcctcaccggggcgtggtattttggcgatggatgagtcaaatgcaacctgcgggaagcgt

SEQ ID NO: 66 - DNA, 261 bp, Glycine max
  unsure at all n locations
  Clone ID: 700998730H1
gcggggatnagattaaagattcaacaatggcctctgcttctgctactcttctcaagttcatctcctgttcttgacaagtgcgagtnggtcaaaggccagacccttcgccaacctctcgtgagatgtaacccttcctcagcatcagctctcaccatcaaagctgcttcctatgctgacgagctcgtcaaaaccgccaaaacagtggcctcaccggggcgtggtattttggcgatggatgagtcaaatgcaacctgcgggaag

SEQ ID NO: 67 - DNA, 260 bp, Glycine max
  Clone ID: 701000639H1
aaggttgcttggcggggataagattaaagattcaacaatggcctctgcttctgctactcttctcaagtcatctcctgttcttgacaagtgcgagtgggtcaaaggccagacccttcgccaacctctcgtgagatgtaacccttcctcagcatcagctctcaccatcaaagctgcttcctatgctgacgagctcgtcaaaaccgccaaaacagtggcctcaccggggcgtggtattttggcgatggatgagtcaaatgcaa

SEQ ID NO: 68 - DNA, 253 bp, Glycine max
  Clone ID: 701000684H1
aaggttgcttggcggggataagattaaagattcaacaatggcctctgcttctgctactcttctcaagtcatctcctgttcttgacaagtgcgagtgggtcaaaggccagacccttcgccaacctctcgtgagatgtaacccttcctcagcatcagctctcaccatcaaagctgcttcctatgctgacgagctcgtcaaaaccgccaaaacagtggcctcaccggggcgtggtattttggcgatggatgagtca

SEQ ID NO: 69 - DNA, 264 bp, Glycine max
  Clone ID: 700998766H1
cgcagatgagcttatcaagaatgccaagtacatagccacacctgggaagggcatcttggcagcagatgagagcactggcaccattgggaagcgcctatcgagcattaacgttgagaacattgaggccaaccgccaagctcttcgcgagcttctcttcaccgctccagatgccctccaatacctctctggtgtcatcctctttgaggaaactctttaccagaaaacctccgatgggaagccttttgttgaggtccttcaagagaa

SEQ ID NO: 70 - DNA, 268 bp, Glycine max
  unsure at all n locations
  Clone ID: 700999871H1
ttcccgccatatatccaataagctttaaccatntctgcctttgttggaaagtacgcagatgagcttatcaagaatgccaagtacatagccacacctgggaagggcatcttggcagcagatgagagcactggcaccattgggaagcgcctatcgagcattaacgttgagaacattgaggccaaccgccaagctcttcgcgagcttctcttcaccgctccagatgccctccaatacctctctngtgtcatcctctttgaggaaactcttt

SEQ ID NO: 71 - DNA, 253 bp, Glycine max
  unsure at all n locations
  Clone ID: 701000485H1
gtttcccgccatatatccaataagctttaaccatgtctgcctttgttggaaagtacgcagatgagcttatcaagaatgccaagtacatagccacacctgggangggcatcttggcagcagatgagagcactggcaccattgggaagcgcctatcgagcattaacgttgagaacattgaggccaaccgccaagctcttcgcgagcttctcttcaccgctccagatgccctccaatacctctctggtgtcatcct

SEQ ID NO: 72 - DNA, 285 bp, Glycine max
  unsure at all n locations
  Clone ID: 701001388H1
tctgtttcccgccatatatccaataagctttaaccatgtctgcctttgttggaaagtacgcagatgagttatcaagaatgccaagtacatagccacacctgggaagggcatcttggcagcagatgagagcactggcaccattgggaagcgcctatcgagcattaacgttgagaacattgaggccaaccgccaagctcttcgcgagcttctcttcaccgctccagatgccctccaatacctctctggtgtcatcctctttgaggnaatctttaccagaaaacctcc

SEQ ID NO: 73 - DNA, 160 bp, Glycine max
  unsure at all n locations
  Clone ID: 701001924H1
ctgtttcccgccatatatccaataagctttaaccatgtctgcctttgttgganagtacgcagatgagcttatcaagaatgccaagtacatagccacacctgggaagggcatcttggcagcagatgagagcactggcaccattgggaagcgcctatccgac

SEQ ID NO: 74 - DNA, 289 bp, Glycine max
  unsure at all n locations
  Clone ID: 701001358H1
cttggtcagtacatctctggtgccattctctttgaggaaacactctaccaatccacaactgatggcaggangattgttgacgtgctgcttgagcaaaacattgttcctggtattaaagtcgacaagggtttggtgccccttgcaggttccaacgacgagtcatggtgccaaggtttggatggtctagcctctcgctcagctgcatactacgagcaaggtgcccgtttcgccaaatggcgtactgttgtgagcatccccaacggtccctctgctctggcagttaaggaag

SEQ ID NO: 75 - DNA, 294 bp, Glycine max
  unsure at all n locations
  Clone ID: 701001507H1
cgacaagggtttggtgccccttgcaggttccaacgacgagtcatggtgccaaggtttggatggtctagccttctcgcncagctgcatactacgagcaaggtgcccgtttcgccaaatggcgtactgttgtgagcatccccaacggtccctctgctcggcagttaaggaagcagcctggggtctngctcnctatgctgcaattgctcaggacaatgggttggtcccaattgtggagccagagatcttgcttgatggggagcatggtatgatagaacttttgaagtagcccaaaag

SEQ ID NO: 76 - DNA, 272 bp, Glycine max
  unsure at all n locations
  Clone ID: 701001605H1
gaatacatctctggtgccattctctttgaggaaactctctaccaatccactgtcgatggaaggaagatcgtcgacgtacttgttgaccaaaacattgttcccggtatcaaggtcgacaagggtttggtgcccctagctggttcgaacgatgagtcatggtgccaaggtcttgatggtcttgcgtctcgctcagctgcatactaccagcaaggtgcccgtttcgccaaatggcgtactgttgtgagcatccccaacggtccctctgcnctggc

SEQ ID NO: 77 - DNA, 269 bp, Glycine max
  unsure at all n locations
  Clone ID: 701000566H1
gaacaacagggtttggtaccccttgctggttccaacgacgagtcatggtgccaaggtcttgatggtcttgcctctcgntgcggctgcatactaccagcaaggtgcccgtttcgccaaatggcgtactgttgtgagcatccccaacggtccctctgctctggcagttaaggaagctgcctggggtctgcctcgctatgcagcaattgctcaggacaatggattggtcccaattgtggaaccagagatcttgcttgatggggagcatggta

SEQ ID NO: 78 - DNA, 265 bp, Glycine max
  Clone ID: 701001607H1
ccgtttcgccaaatggcgtactgttgtgagcatccccaacggtccctctgctctggcagttaaggaagctgcctggggtctggctcgctatgcagcaattgctcaggacaatggattggtcccaattgtggaaccagagatcttgcttgatggggagcatggtattgacagaacttttgaagtagcaaaaaaggtctgggcagaggttttcttctaccttgctgagaacaatgtcctttttgagggtatcttcttaagcctagca

SEQ ID NO: 79 - DNA, 269 bp, Glycine max
  Clone ID: 700999646H1
ttttgtctggtggacagtctgaggttgaagctaccctcaatttgaatgccatgaaccaatctccaaacccgtggcacgtgtcattctcgtatgccagagccctccaaaacactgccttgaagacatggggaggccgcccagagaacgtgaaggcagcacaagatgcactcgcattccgtgccaagtccaactcactcgctcagcttgggaagtacactggtgagggtgaatccgaggaagccaagaaggagttgttcgtcaaaagctat

SEQ ID NO: 80 - DNA, 275 bp, Glycine max
  unsure at all n locations
  Clone ID: 701001215H1
atctctggtgccattctctttgangaaacacttctaccaatccacaactgatggcaggaagattgttgacgtgctgcttgagcaaaacattgttcctggtattaaagtcgacaagggtttggtgccccttgcaggttccaacgacgagtcatggtgccaaggtttggatggtctagcctctcgctcagctgcatacncgagcaaggtgcccgtttcgccaaatggcgtactgttgtgagcatccccaacggtccctctgctctggcagttaaggg

SEQ ID NO: 81 - DNA, 273 bp, Glycine max
  Clone ID: 701001461H1
gctggttcctatgctgatgagctcgttaagaccgcgaaaacagtggcttcaccagggaggggtattttggccatggatgagtccaatgctacctgtgggaagcgtttggcttcaattgggctagagaacactgaagctaaccgccaggcataccgtaccctccttgtgacagttccaggacttggtcagtacatctctggtgccattctctttgaggaaactctctaccaatccacaactgatggcaggaagattgtcgacgtgctcctcgag

SEQ ID NO: 82 - DNA, 250 bp, Glycine max
  unsure at all n locations
  Clone ID: 700998471H1
cttgcaggttccaacgacgagtcatggtgccaaggtttggatggtctagcctctcgctcagctgcatactacgagcaaggtgcccgtttcgccaaatggcgtactgttgtgagcatccccaacggtcctctgctctggcagttaaggaagcagcctggggtctggctcgctatgctgcaattgctcaggacaatgggttggtcccaattgtggagccnnnnatcttgcttgatggggagcatggtattga

SEQ ID NO: 83 - DNA, 270 bp, Glycine max
  unsure at all n locations
  Clone ID: 700997808H1
ttaccaggccttggtcagtacatctctggtgccattctctttgaggaaacactctannaatccacaactgatggcaggnagattgttgacgngctgcttgagcanaacattgttcctggtatnanagtcgacaagggtttngtgccccttgcaggttccaacgacgagtcatggtgccaaggtttggatggtctagcctctcgctcagctgnatactacgagcaaggtgcccgtntcgccaaatggcgtactgntgtgagcatccccaac

SEQ ID NO: 84 - DNA, 292 bp, Glycine max
  unsure at all n locations
  Clone ID: 701001542H1
tttaggacaatggattggtcccaattgtgganccanagatcttgcttgatggggagcatggtattgacagaacttttgaagtagcaaaaaaggtctgggcagaggttttcttctaccttgctgagaacaatgtcctttttgagggtattcttttaagcctagcatggttacacctggagctgagtccaaggacaaggccagtcctcagacagttgctgattacaccctcaagctcctcacaggagaattccccctgctgtccctggaattatggtaatgccaaatgcatcac

SEQ ID NO: 85 - DNA, 269 bp, Glycine max
  unsure at all n locations
  Clone ID: 701000076H1
gacaaggccagtcctcagacagttgctgattacaccctcaagctccttcacaggagaattccccctgctgtccctggaattatgtttttgtctggtggacagtctgaggttgaagctaccctcaatttgaatgccatgaaccaatctccaaacccgtggcacgtgtncattctcgtatgccagagtcctccaaaacactgccttgaagacatgggaggccgcccagagaacgtgaaggcagcacaagatgcactcgcattccgtgccaa

SEQ ID NO: 86 - DNA, 263 bp, Glycine max
  unsure at all n locations
  Clone ID: 701002241H1
gncagtcctcagacagttgctgattacaccctcaagctccttcacaggagaattccccctgctgtccctggaattatgtttttgtctggtggacagtctgaggttgaagctaccctcaatttgaatgccatgaaccaatctccaaacccgtggcacgtgtcattctcgtatgccagagccctccaaaacactggcttgaagacatggggaggccgccccagagaagtgaaggcagcacaagatgcactcgcattcgtgccang

SEQ ID NO: 87 - DNA, 262 bp, Glycine max
  unsure at all n locations
  Clone ID: 700998402H1
ccccaccaccccatcaggcctcaccatcagagctggttcctatgctgatgagctcgttaagaccgcgaaaacantggcttcaccagggaggggnattttggccatggatgagtccaatgctacctgtgggaagcgttggcttcaattgggctagagnncactgcagctaaccgccaggcataccgtaccctccttgtgacagttccaggacttggtcagtacatctctggtgccattctctttgaggaaactctctaccaat

SEQ ID NO: 88 - DNA, 239 bp, Glycine max
  unsure at all n locations
  Clone ID: 700997290H1
cagctcgttaagaccgcgaaaacagtggcttcaccagggaggggtattttggccatggatgagtccaatgctacctgtgggaagcgtttggcttcaattgggctagagaacactgaagctaaccgccaggcataccgtaccctcctcgtgacagttccaggccttggtcagtacatcnctggtgccattctctttgaggaaacactctaccaatccacaactgatggcaggaagattgt

SEQ ID NO: 89 - DNA, 244 bp, Glycine max
  unsure at all n locations
  Clone ID: 700998392H1
cttggcaccatgactcatcgttggaaccaaggtcttgatggtcttgcctctcgctcggctgcatactaccagcnaggtgcccgtttcgccaaatggcgtactgttgtgagcatccccaacggtccctctgctctggcagttaaggnagcngcctggggtctggctcgctatgccgcaattgctcnagacatggattggtcccnattgtggagccnganatcttgcttgatggggagcatggtat

SEQ ID NO: 90 - DNA, 217 bp, Glycine max
  unsure at all n locations
  Clone ID: 700997058H1
gtacttgatggtcttgcctctcgctncggctgcatactaccancaaggtgcccgtttcgccaaatggcgtactgttgtgagcatccccaacggtccctctgctctggcagttaaggaagcagcctggggtctggctcgctatgccgcaattgctcaggacaatggattggtcccaattgtggagccngagatcttgcttgntggggagcatggtatt

SEQ ID NO: 91 - DNA, 247 bp, Glycine max
  unsure at all n locations
  Clone ID: 700997444H1
gtgacagtnacntggtcttggngaatacatctctggtgccattctctttgaggaaactctctaccaatccactgtcgatggaaggnccgatcntcgacgtacttgttgaccaaaacattgttcccggtatcaaggtcganaagggtttggtgcccctagctggttcgaacgatgagtcatggtgcnaaggtcttgatggtcttgcgtctcgcncagctgcatantacnagnaaggtgcccgtttcgc

SEQ ID NO: 92 - DNA, 274 bp, Glycine max
  unsure at all n locations
  Clone ID: 701000985H1
gcatactacgagcaaggtgaccgtttcgccaaatgggcgtactgttgtnancatccccaacggtccctctgctctgagcagttaangaagcagcctggggtctggctcgctatgctgcaattgctcaggacaatgggttngtcccaattgtggagccaganattctgcntgatggggagcatggtantgatagaattttgaagtagcccaaaaggtctgggcagaggttttncttctaccntgctnagaacaatgtccttttgagggtatctcc

SEQ ID NO: 93 - DNA, 272 bp, Glycine max
  unsure at all n locations
  Clone ID: 700997879H1
gcctctgcatcagcatctctgctcaagtcttcacttgttcttgacaagtctgantgggtgaagggacaaanccttcgccaaccttctgcatcagttgtnagatgcaaccccaccaccccatcaggcctcaccatcagagctggttcctatgctgatgagctcgttaagaccgcgaaaacagtggcttcaccagggaggggtattttggccatggatgantccaatgctacctgtgggaagcgtttggcttcaattgggctagagaacactga

SEQ ID NO: 94 - DNA, 270 bp, Glycine max
  unsure at all n locations
  Clone ID: 700998261H1
caccaggnnggggtattttggccatggangagtccaatgctacctgtgggaagcgtttggnttcaattgggctagagaacactgaagctnaccgccncggcataccgtaccctcctcgtgacagttccagggccttggtagtannatntctggtgccattctctttgaggaaacactctaccaatccacaactgatgnccaggncngattgttnnacgtgctgcttgagcaaaacattgttcctggtattaaagtcgacaagggtttggt

SEQ ID NO: 95 - DNA, 298 bp, Glycine max
  unsure at all n locations
  Clone ID: 700999428H1
gcaaggtgcncgtttcgccaaatgggcgtactgnatgtgagcatnccccaacggtccctctgctctgggcagttaaggaagcagcctggggtctgggctcgctatgctgcaattgctcaggacaatgggttggtcccaattgtggagccagagatcttgcttgatggggagcatggtattgatagaactttttgaagtagcccaaaaggtctggggcagaggttttcttctaccttggctgagaacaatgtcctttttgagggtattctccttaagcctagcatggttacacctggag

SEQ ID NO: 96 - DNA, 235 bp, Glycine max
  unsure at all n locations
  Clone ID: 701000115H1
gccagtcctcagacagttgctgattacaccctcaagctccttcacaggagaattccccctgctgtccctggaattatgtttttgtctggtggacagtctgaggttgaagctaccctcaatttgaatgccatgaaccaatctccaaacccgtggcacgtgtcattctcgtatgccagagccctccaaaatggccttnaaaacattgggaggcgcccagagacgtgaggcagccnaa

SEQ ID NO: 97 - DNA, 257 bp, Glycine max
  unsure at all n locations
  Clone ID: 701001985H1
gaaactctctaccaatccactgtcgatggaaggaagatcgtcgacgtacttgttgaccaaaacattgttcccggtatcaaggtcgacaagggtttggtgcccctagctggttcgaacgatgagtcatggtgccaaggtcttgatggtcttgcgtctcgctcagctggcatactaccagcaaggtgccgnacccccntaatggcgtangttgtganatccccaagggtccctctggtctggnatnaaggaagnngctg

SEQ ID NO: 98 - DNA, 277 bp, Glycine max
  unsure at all n locations
  Clone ID: 700998173H1
ctgccttgaagacatggggaggccgcccagagaatgtgaaggcggcncaagatgcacttcttttccgtgccaagtcccaactcgctcgcccagcttgggaagtacaccggtganggtgaatctgaggaagccaagaaggagttgttcgncaaaggctactcctactaanatgtttgtagtgaatatgatncatgttaggcgcagcaacaccagcagttgcagtaggtgttgacggnngatgaagtggaanacgactaatttgnctaanatgtaatgc

SEQ ID NO: 99 - DNA, 283 bp, Glycine max
  unsure at all n locations
  Clone ID: 701000913H1
gaaanacagtggcttcaccanggaggggtattttggccatggatgagttccaatgctacctgtgggaagcgtttggcttnaattgggctagagancactgaagctaaccgncaggcatancgtaccctactcntgacagttccangccttggtcagtanatctctggtgccattctcttgaggaaacanttctaccaatccacaactgatgtgacaggaagattgttgacgtgctgcntgngcaaaacattgttccnggtatcaaatcnacaagggttggtgc

SEQ ID NO: 100 - DNA, 165 bp, Glycine max
  unsure at all n locations
  Clone ID: 701001946H1
ggnagaattccccctgctgtccctggaattatgtttttgtctggtggacagtctgaggttgaagctaccctgcaatttgaatgccatgaaccaatctccaaacccgtggcacgtgtcattctcgtatgccagagccctccaaaacactgccttgaagacatgggg

SEQ ID NO: 101 - DNA, 268 bp, Glycine max
  unsure at all n locations
  Clone ID: 700999959H1
ggggangccgcccagagaatgtgaaggcggcacaagatgcacttcttttccgtgccaagtccaactcgctcgcccagcttgggaagtacaccggtgagggtgaatctgaggaagccaagaaggagttgttcgtcaaaggctactcctactaagatgtntgtagngaatatgatacatgttaggcagctaccaacaccagcagttgtagtaggtgttgacggangatgaantggaagaagactaatttgtcnaaaatgtaatgttttnt

SEQ ID NO: 102 - DNA, 259 bp, Glycine max
  unsure at all n locations
  Clone ID: 700998944H1
cntggggaggccgcccagagaacgtgaaggcagcacaagatgcactcgcattccgtgccaagtccaactcactcgctcagcttgggaagtacactggtgagggtgaatccgaggaagccaagaaggagttgttcgtcaaaagctactcctactaagatgtttgcagtgaatatgatacttgttaggcagcaacaccagcagttacagtaggtgttgacggacgatgaagtggaagactaatttgtctaaaatgtaatgt

SEQ ID NO: 103 - DNA, 283 bp, Glycine max
  unsure at all n locations
  Clone ID: 700999634H1
ctcaagtcttcacttgtncttgacaagtctgagtgggtgaagggacaaacacttcgccaaccttctgctgcatcagttgtnagatgcaaccccaccaccccatcaggcntcacaatcagagcnggttcctatgctgatgagctcgttaagaacgcgaaancagtggcntcaccagggaggggtattttggccatggatgagtccaatgctanctgtgggaagcgtttggntncaattgggctagagngcactgaagcnaaccgccnggcgtaccgtancctct

SEQ ID NO: 104 - DNA, 239 bp, Glycine max
  unsure at all n locations
  Clone ID: 700997642H1
aaggcgacaaacacttcgccaaccttctgctgcatcagttgtgagatgcaaccccaccaccccatncaggcctcacaatcagagctggttcctatgctgatgagctcgttaagaccgcgaaaacagtggcttcaccagggaggggtattttggccatggatgagtccaatgctacctgtgggaagcgtttggcttcaattggggctagagaacatgaagctaaccgccaggcgtaccgt

SEQ ID NO: 105 - DNA, 269 bp, Glycine max
  unsure at all n locations
  Clone ID: 701002165H1
catggggaggccgcccagagaacgtgaaggcagcacaagatgcactcgcattccgtgccaagtccaactncactcgctcagcttgggaagtacactggtgagggtgaatccgaggaagccaagaaggagttgttcgtcaaaagctactcctactaagatgtttgcagtgaatatgatacttgttaggcagcaacaccagcagttacagtaggtgttgacggacgatgaagtggaagactatttgtctaanngtatgtttttatagtctg

SEQ ID NO: 106 - DNA, 284 bp, Glycine max
  Clone ID: 700996104H1
aaggttgctgtaggagataagattgcagtagtgctaagtgctaacacctgcagtgaacaatggcctctgcatcagcatctctgctcaagtcttcacttgttcttgacaagtctgagtgggtgaagggacaaacccttcgccaaccttctgcatcagttgtgagatgcaaccccaccaccccatcaggcctcaccatcagagctggttcctatgctgatgagctcgttaagaccgcgaaaacagtggttcaccagggaggggtattttggccatggatgagtcca

SEQ ID NO: 107 - DNA, 268 bp, Glycine max
  Clone ID: 701000609H1
catacaaaggttgctgtaggagataagattgcagtagtgctaagtgctaacacctgcagtgaacaatggcctctgcatcagcatctctgctcaagtcttcacttgttcttgacaagtctgagtgggtgaagggacaaacccttcgccaaccttctgcatcagttgtgagatgcaaccccaccaccccatcaggcctcaccatcagagctggttcctatgctgatgagctcgttaagaccgcgaaaacagtggcttcaccagggagggg

SEQ ID NO: 108 - DNA, 143 bp, Glycine max
  Clone ID: 700999940H1
ggctagagaacactgaagctaaccgccaggcgtaccgtaccctccttgtgacagttccaggacttggtcagtacatctctggtgccattctctttgaggaaactctctaccaatccacaactgatggcaggaagattgttgac

SEQ ID NO: 109 - DNA, 264 bp, Glycine max
  unsure at all n locations
  Clone ID: 700998652H1
caaaggttgctgtaggagataagattgcagtagtgctaagtgctaacacctgcagtgaacaatggccttctgcatcagcatctctgctcaagtcttcacttgttcttgacaagtctgagtgggtgaagggacaaacccttcgccaaccttctgcatcagttgtgagatgcaaccccaccaccccatcaggcctcnncatcagagctggttcctatgctgatgagctcgttaagaccgcgaaaacagtggcttcaccanggaggg

SEQ ID NO: 110 - DNA, 270 bp, Glycine max
  unsure at all n locations
  Clone ID: 701000555H1
acaaaggnngctgtaggagataagattgcagtagtgctangtgctaacacctgcagtgaacaatggcctctgcatcagcatctgctgctcaagtcttcacttgttcttgacaagtctgagtgggtgaagggacaaacccttcgccaaccttctgcatcagttgtgagatgcaaccccaccaccccatcaggcctcaccatcagagctggttcctatgctgatgagctcgttaagaccgcgaaaacagtggcttcaccanggaggggtatt

SEQ ID NO: 111 - DNA, 255 bp, Glycine max
  Clone ID: 701000781H1
acaaaggttgctgtaggagataagattgcagtagtgctaagtgctaacacctgcagtgaacaatggcctctgcatcagcatctctgctcaagtcttcacttgttcttgacaagtctgagtgggtgaagggacaaacccttcgccaaccttctgcatcagttgtgagatgcaaccccaccaccccatcaggcctcaccatcagagctggttcctatgctgatgagctcgttaagaccgcgaaaacgtggcttcacc

SEQ ID NO: 112 - DNA, 145 bp, Glycine max
  unsure at all n locations
  Clone ID: 700999968H1
ggnacaaggccagtcctcagacagttgctgattacaccctcaagntccttcacaggagaattccccctgctgtccctggaattatgtntttgncnggtggacantctganngttgaaactacccccaaatttgaatggcnaggaa

SEQ ID NO: 113 - DNA, 273 bp, Glycine max
  Clone ID: 700997995H1
gcaactacaaaggttgctgtaggagataagatattgaagtagtgctaagtgcctaacacctgcagtgaacaatggcctctgcatcagcatctcttctcaagtcttcacttgttcttgacaagtctgagtgggtgaagggacaaacacttcgccaaccttctgctgcatcagttgtgagatgcaaccccaccaccccatcaggcctcacaatcagagctggttcctatggctgatgagctcgttaagaccgcgaaaacagtggcttcaccaggg

SEQ ID NO: 114 - DNA, 288 bp, Glycine max
  unsure at all n locations
  Clone ID: 700996423H1
tacaactacaaaggttgctgtaggagataagatattgaagtagtgctaagtgcctaacacctgcagtgaacaatggcctctgcatcagcatctcttctcaagtcttcacttgttcttgacaagtctgagtgggtgaagggacaaacacttcgccaancttctgctgcatcagttgtgagatgcaaccccaccaccccatcagggccttcaccatcagagctggttccctatgctgatgagcnncgttaagaccgcgaaaacagtggcttcaccagggaggggtatttc

SEQ ID NO: 115 - DNA, 276 bp, Glycine max
  Clone ID: 700997713H1
caactacaaaggttgctgtaggagataagatattgaagtagtgctaagtgcctaacacctgcagtgaacaatggcctctgcatcagcatctcttctcaagtcttcacttgttcttgacaagtctgagtgggtgaagggacaaacacttcgccaaccttctgctgcatcagttgtgagatgcaaccccaccaccccatcaggcctcaccatcagagctggttcctatgctgatgagctcgttaagaccgcgaaaacagtggcttcaccagggagggg

SEQ ID NO: 116 - DNA, 254 bp, Glycine max
  unsure at all n locations
  Clone ID: 700998312H1
acaactacaaaggttgctgtaggagataagatattgaagtagtgctaagtgcctaacacctgcagtgaacaatggcctctgcatcagcatctcttctcaagtcttcacttgttcttgacaagtctgagtgggtgaagggacaaacacttcgccaaccttctgncgcatcagttgtgagatgcaancccaacaacccattcaggcctcaaaatcngagntggntcctatgcngatgagntcggcaagaccgcgaa

SEQ ID NO: 117 - DNA, 277 bp, Glycine max
  Clone ID: 701001239H1
caactacaaaggttgctgtaggagataagatattgaagtagtgctaagtgcctaacacctgcagtgaacaatggcctctgcatcagcatctcttctcaagtcttcacttgttcttgacaagtctgagtgggtgaagggacaaacacttcgccaaccttctgctgcatcagttgtgagatgcaaccccaccaccccatggcctcacaatcagagctggttcctatgctgatgagctcgttaagaccgcgaaaacagtggcttcaccagggaggggttt

SEQ ID NO: 118 - DNA, 274 bp, Glycine max
  unsure at all n locations
  Clone ID: 700997891H1
caactacaaaggttgctgtaggagataagatattgaagtngtgctaagtgcctaacacctgcagtgaacaatggcctctgcatcagcatctcttctcaagtcttcacttgttcttgacaagtctgagtgggtgaagggacaaacacttcgccaaccttctgctgcatcagttgtgagatgcaaccccaccaccccatcaggcctcaccatcagagctggttcctatgctgatgagctcgttaagaccgcgaaaacagtggcttcaccagggagg

SEQ ID NO: 119 - DNA, 277 bp, Glycine max
  Clone ID: 700999482H1
caactacaaaggttgctgtaggagataagatattgaagtagtgctaagtgcctaacacctgcagtgaacaatggcctctgcatcagcatctcttctcaagtcttcacttgttcttgacaagtctgagtgggtgaagggacaaacacttcgccaaccttctgctgcatcagttgtgagatgcaaccccaccaccccatcaggcctcacaatcagagctggttcctatgctgatgagctcgttaagaccgcgaaaacagtggcttcaccagggaggggt

SEQ ID NO: 120 - DNA, 256 bp, Glycine max
  unsure at all n locations
  Clone ID: 701000685H1
tacaaaggttgctgtaggagataagattgcagtagtgctaagtgctaacacctgcagtgaacaatggctctgcatcagcancctctgctcaagtcttcacttgttcttgacaagtctgagtgggtgaagggacaaacccttcgccaaccttctgcatcagttgtgagatgngncccaccaccccatcaggcctcaccatcagagctggttcctatgctgatgagctcgttaagaccgcgaaaacagtggcttcacc

SEQ ID NO: 121 - DNA, 264 bp, Glycine max
  Clone ID: 701002072H1
caactacaaaggttgctgtaggagataagatattgaagtagtgctaagtgcctaacacctgcagtgaacaatggcctctgcatcagcatctcttctcaagtcttcacttgttcttgacaagtctgagtgggtgaagggacaaacacttcgccaaccttctgctgcatcagttgtgagatgcaaccccaccaccccatcaggcctcaccatcagagctggttcctatgctgatgagctcgttaagaccgcgaaaacagtggcttc

SEQ ID NO: 122 - DNA, 265 bp, Glycine max
  unsure at all n locations
  Clone ID: 701002287H1
caaaggttgctgtaggagataagattgcagtagtgcncagtgctaacacctgcagtgaacaatggcctctgcatcagcatctctgctcaagtcttcacttgttcttgacaagtctgagtgggtgaagggacaaacccttcgccaaccttctgcatcagttgtgagatgcaacccccaccaccccatcagggcctcaccatcngagctggttctatgctgatgagcncgttaaagaccgcggaaacnntgggtttcacnagggggg

SEQ ID NO: 123 - DNA, 130 bp, Glycine max
  Clone ID: 700998877H1
gtgctaagtgctaacacctgcagtgaacaatggcctctgcatcagcatctctgctcaagtcttcacttgttcttgacaagtctgagtgggtgaagggacaaacccttcgccaaccttctgcatcagttgt

SEQ ID NO: 124 - DNA, 170 bp, Glycine max
  unsure at all n locations
  Clone ID: 701001909H1
caactacaaaggttgctgtaggagataagatattgaagtantgctaagtgcctaacacctgcagtgaacaatggcctctgcatcagcatctcttctcaagtcttcacttgttcttgacaagtctgagtgggtgaagggacaaacacttcgccaaccttctgctgcatcag

SEQ ID NO: 125 - DNA, 273 bp, Glycine max
  unsure at all n locations
  Clone ID: 701001445H1
caactacaaaggttgctgtaggagataagatattgaagtagtgctaagtgcctaacacctgcagtgaacaatggcctctgcatcagcatctcttctcaagtcttcacttgttcttgacaagtctgagtgggtgaagggaaaacacttcgccaaccttctgctgcatcagttgtgagatgcaaccccaccaccccatcaggcctcacaatcagagctgcctcctatgcngatgagctcgttaagaccgcgaaaacagtggcttcaccagggagg

SEQ ID NO: 126 - DNA, 153 bp, Glycine max
  Clone ID: 700996869H1
acaaaggttgctgtaggagataagattgcagtagtgctaagtgctaacacctgcagtgaacaatggcctctgcatcagcatctctgctcaagtcttcacttgttcttgacaagtctgagtgggtgaagggacaaacccttcgccaaccttctg

SEQ ID NO: 127 - DNA, 240 bp, Glycine max
  unsure at all n locations
  Clone ID: 700997013H1
ggnactgtcccagctgcggtgccaggggttgtgtttctgtctggtgggcaaagtgaagaagaagctaccctcaacctgaatgcaatgaacaagttggaggtgttgaagccatggactctctcattctcattcgggcgagcactgcaacaaagcacactcaagacatggggtggaaagaaggagaatgccgccaaagctcaagaggcatttctggcaagatgcaaggccaattctgatgct

SEQ ID NO: 128 - DNA, 291 bp, Glycine max
  unsure at all n locations
  Clone ID: 700996632H1
gagcaggcaaaatttatgctttcaatgaagggacttatccagttgtgggatgacaagcttaagaaatatattgatgatctcaaggncccangtcctagcggnaagccttattctgcaaggtacattggtagcttggtaggagacttccacaggnccactgctatatggtgncattnatgggtaccccanggnccaagccaaagtaacnatgggcaattcaagctncantaggangggccnccatnancttccntattngccccggctgggggaaaaggtcccntgcccccc

SEQ ID NO: 129 - DNA, 258 bp, Glycine max
  unsure at all n locations
  Clone ID: 700998027H1
gtgaacgtgtgccaacccggaagcaaccttcttgcagctggttactgcatgtattctagctccaataatctttgttctcacccttgggaatggagtgtttgtgtttacattggacccgatgtatggcgaattcgttttgactcaggaaaacctncaaatacctagagcaggcaaaatttatnctttcaatgaagggaatnatcattgtggganccncacntaaggaaantntntggacaancnangncccncgcnccc

SEQ ID NO: 130 - DNA, 274 bp, Glycine max
  unsure at all n locations
  Clone ID: 701000504H1
actttttgcaacaaccatggttgcaatgggcagcagcaacagcatccacccagttgattttctcaaagccttgttcccccttcacgtctatgccccttccaactatgtgtctttnacactaaacaagtgctatcaagtggcaggagaaggcatgtggggggttctggagttaggtgcatggctgtgggggaagcagcaaccatgggacaaagaagagaagtggatatgagcttcaaacactcactagctggttgctgaagcaggagcaagctgg

SEQ ID NO: 131 - DNA, 255 bp, Glycine max
  unsure at all n locations
  Clone ID: 701001295H1
acacaatccatgtaancaccactagcaccataccacactgccaaaatcancaaaccaaaaaggtaaactttttgcaacaaccatggttgcaatggcagcagcaacagcatccacccagttgattttctcaaagccttgttccccttcacgtctatgccccttccaactatgngnctgnactaaacaagtgntatcaagtggcaggagaaggnatgtggggggttctggagtnaggtgcatggctgtgggggaagc

SEQ ID NO: 132 - DNA, 266 bp, Glycine max
  unsure at all n locations
  Clone ID: 701000526H1
gtcctctggcaatgctagtgtgctcacaacagtgttgaaattgattgatancctatgacctgtacgggcaagtggcatacccaaaacatcacaatcaatctgatgttccagagatatacagattcgctgcaaaaacaaagggtgttttcataaatccggctttagtggaaccctttggcnttactttaattgaggcagctgcccatggacttccaatggtggccactaaaaatgggggacctgtggacattcatcgggccctgaac

SEQ ID NO: 133 - DNA, 266 bp, Glycine max
  unsure at all n locations
  Clone ID: 701000719H1
atactattgggattgatttgaaaaaattaaatgagatttaccgttacaagacagaggagtactcatatgatgcagttaataagttcaacatatacccagaccagatttctccttggttagtggaatggatgccaaacaaaggaggctatttaattggcaanctacaaccagctcacatggatttccgatttttttcactgggaaacttgtnncctgtcgtaaacagcttggccacagaggagcaatcacatgccatattggatctt

SEQ ID NO: 134 - DNA, 252 bp, Glycine max
  unsure at all n locations
  Clone ID: 700998007H1
gatatattagagatcaataacacatccctgaaaatgaggaagattgttgtggaactctgtgatattgttgctaatcggggagcccgcctttctgctgctggtatttttggcatcctcaagaaaataggaagagacacagtaaaggacgggaagaaatcagtagtagcactggatggaggattgtttgaacactatactaattcagagttccttggagagtacaaaaaggtttttgggnaacncccccnacca

SEQ ID NO: 135 - DNA, 238 bp, Glycine max
  unsure at all n locations
  Clone ID: 700997037H1
caattatcaaaaggnttanctgagaacaattacaagacagattgangcncttgtggannttncagtgatagagatatngtcaagacatgcntctgatgagatctaccttgggaagaggganagtgatcattngactgatgaccaanaggcaatncaagcctntgnaaagtntggaaccaagctgaaggaaattgaggcnaaaatcattcgaggaacanagattcangnnttagaaacg

SEQ ID NO: 136 - DNA, 209 bp, Glycine max
  unsure at all n locations
  Clone ID: 700999254H1
tatggtgancttaccagtnatcatcaaaaggcttatttgagaacaattacaggaaagactgatgccttgtgggactaacagtgataganatattgtcaaggcntgntcgntgagtcaacttggccgaggcctccaatnggctgtgncaagcatcaacttanagtgnanacgagnatgngcnanccagggaanntcanctggacgatgnc

SEQ ID NO: 137 - DNA, 271 bp, Glycine max
  unsure at all n locations
  Clone ID: 701001618H1
tccatatggaggcttcccaccgagtcgtccggctataagccggcgattcatgccaganaaaggaactccagaatacgatgaacttgtggcgaatcctgataaggcttatctgaaaacagttacttcacagtttctggctgttcttggcatttcacttgtagagatcttgtccaaacattctagtgatgaggtctacttgggcagagagacactccagattgggacatctgatgctgagcccattgcaagcntttganagtttggcaaaaaa

SEQ ID NO: 138 - DNA, 285 bp, Glycine max
  Clone ID: 701000304H1
ctctatgggaaatgtccgctgtcatttacaaggactgggttttcactgatcaagcattacctaatgatcttgtaaagagaggagttgctgttaaggacccatctgctccccatggagttcgtcttttgattgaggactatccttatgcttctgatgggctagagatatgggatgccatcaagtcctgggtgcaagaatatgtctcattctactacaagtcagatgaggaactccaaaaagaccctgaactccaagcttggtggaaagaattgtagaggtgggtca

SEQ ID NO: 139 - DNA, 261 bp, Glycine max
  unsure at all n locations
  Clone ID: 701000723H1
gagatgaagcatttggtcacttgaagtcatcagattttctcgtttatggaatcaaatcagtggctcaagacgtcttgcccgtgttgactgatgcgtttgatggcaatcttttgagcctgagtttgataactttgctgaagtgcgcaaactctatgaaggtggagttacatacctacaaactttcttagcaagatccgcccctataccagtggtcaaggaaatttttccgaactgatggcgaacngttcctcaagtatccac

SEQ ID NO: 140 - DNA, 143 bp, Glycine max
  unsure at all n locations
  Clone ID: 700996870H1
gcaacaaacaggcatcttagtgtgctccaccctattcataagcttctcttgcctcactaccgtgacacaatgaatatcaatgcacttgcacgacantcgctcatcaacgcagatggcgttatcgagcgatcatttttncccgg

SEQ ID NO: 141 - DNA, 294 bp, Glycine max
  unsure at all n locations
  Clone ID: 700996417H1
gagcttgttagactcantgnnatcttgaatccccaaaacaaaccagggagnataactgtgattacnangatgggagctgnaaatatgagggtgaagcttccacatcttcatcagggcagtgcgcagagcagggcaaattgtcacctgggtcagtgatctatgcatggaaacaccattaaggctccatgnggtcttaaaacttcgccccttcgattcatcagggctgaagtgagagcattctttgnngtgcacgagcaagaaggaagccacccaggangggttcatctagagatg

SEQ ID NO: 142 - DNA, 239 bp, Glycine max
  Clone ID: 700997285H1
cccacgcctttggggggcctcaaaatctcgcatcccgatgcataaaaatggaagctttatgggaaattttaatgtggggaacggaaattccggcgtgtttaaggtttctgcatcggtcgccgccgcagagaagccgtcaacgtcgccggagatcgtgttggaacccatcaaagacttctcgggtaccatcacattgccagggtccaagtctctgtccaatcgaattttgcttcttgctg

SEQ ID NO: 143 - DNA, 254 bp, Glycine max
  unsure at all n locations
  Clone ID: 700999528H1
atacaccaaaacccaacatgaaaacccttaacaaagcctcacttattttattccctctcttgttcctttccctattcaagcattcccatgctgcaggaatcgctatctactggggccaaaacggtggagaaggcaccttagcagaagttgcaacactagaaataccatatgtgacatagcttcttgtcatttggacggcaactcacaatcactgcngtcatgtgcccacacatggtgcntggtgnaggaanaat

SEQ ID NO: 144 - DNA, 272 bp, Glycine max
  unsure at all n locations
  Clone ID: 700997763H1
ctgcacacacattcagtcataacgtaaaatatgaaattagacactatcttcgcctttatcgtagtttatattctgctggtaacctcatcagagttccctagtgttgctgcagatgatgttagcagcatcatcagtgcttcccaatttgagcaattgctgaaacacagaaacgatcaaatttgtgaggggaagaacggattctacagctacaatgcttttgtcactgctgccagaacctttgatgggtttggcactacgggtgatgntaacac

SEQ ID NO: 145 - DNA, 268 bp, Glycine max
  unsure at all n locations
  Clone ID: 701000583H1
gcacacacattcagtcataacgtanaatatgaaattagacactatcttcgcctttatcgtagtntatattctgctggtaacctcatcagagttccctagtgttgctgcagatgatgttagcagcatcatcagtgcttcccaatttgagcaattgctgaaacacagaaacgatcaaatttgtgaggggaagaacggattctacagctacaatgcttttgtcactgctgccagaacctttgatgggtttggcactacgggtgangttaac

SEQ ID NO: 146 - DNA, 277 bp, Glycine max
  Clone ID: 700996928H1
ggggtgaagaaaaagcaaaaacactgaatacaccaaaaatggccaaaagcaaaaactgtcatgctttgcctcttctccttgccctgatcctcttcttcactcttcttggaacctctcacgcaggtggcatagccatctactgggggcaaaatgtaacgagggcaccctctcagaagcatgtgcaacaggcaaatacacccacataaacatagcctttctcaacaaattcggcaatggccaaaccccagaaatgaacctggctggtcactgcaacccc

SEQ ID NO: 147 - DNA, 254 bp, Glycine max
  Clone ID: 700998977H1
ttaggctatcaccaatgccgttggagttatttatctgatcagagagttctggaggttgcaaaaacattccggaaaaagagcataccttgtgatgtggtgtggatggatatcgattatatggatggttttcgttgtttcacctttgacaaggagcgttttcgagatcccatgtctttagtgaaagtctccattatagtggttttaaagctatttggatgcttgatcctggaatcaagcaggaagagggttatttt

SEQ ID NO: 148 - DNA, 200 bp, Glycine max
  unsure at all n locations
  Clone ID: 700997581H1
aatcctntnataacatttatagnttcattcttaatcgttgggaaaaatgttcatcgagaattttaaggtagagagtcctaatgtgaagtacaccgagactgagattcagtccgtgtacaactacgaaaccaccgaattgttcacgagaacaggaatggcacctatcagtggattgtcaaacccaaatccgtcaatancaa

SEQ ID NO: 149 - DNA, 81 bp, Glycine max
  unsure at all n locations
  Clone ID: 701001842H1
gcattccttgcagttaatactgagaaatgcattcnaagataccgagagtatggatttaaacacaaaagcacttaatacaag

SEQ ID NO: 150 - DNA, 143 bp, Glycine max
  Clone ID: 700996857H1
gaagaacaagtagttgagaactaagaaggagaagcaaatggcttcctcaatgatctcttccccagctgttaccactgtcaaccgtgccggtgccggcatggttgctccattcactggcctcaagtccatggctggcttcccca

SEQ ID NO: 151 - DNA, 229 bp, Glycine max
  unsure at all n locations
  Clone ID: 701002564H1
gaacaagtagttgagaactaagaaggagaagcaaatggcttcctcaatgatctcttccccagctgttaccactgtcaaccgtgccggtgccggcatggttgctccattcactggcctcaagtccatggctggnttccccnaccnaannncccnaacagcaancccccccntntccnnacnnggggcacncnaacacncnggggggnccncccncgcacaaannnttnnc

SEQ ID NO: 152 - DNA, 238 bp, Glycine max
  unsure at all n locations
  Clone ID: 700997090H1
cattggtgtctgcactggaatttttcgcaccgattcaattcctgaacaggacgttgtcaagattgtngacaccttccctggcnaatccattganttccttcgngcactgagggccagagtatatgatgacgaatgaggaagtggatttctggtgttggtgttgacggcattgggaaagaagcttgtgaaactcaaaaagatggacctccaaacctttgagcagcccaagatggactct

SEQ ID NO: 153 - DNA, 250 bp, Glycine max
  unsure at all n locations
  Clone ID: 700997177H1
cgcctccgtctccactgtcggagctgtcaacagagctcttttgaacctgaatgngtctggacctggggtttcagctcccagttaatccttctttgggagcagcttgaagaaggttattggctcaagggtccccaacacaaagatttcctctggaagcttcaagattgttgctgtagaagagaagaaagagattgaagagnnnnngcagaccgncaaggacagttggaagggtcttgcctatgatatctct

SEQ ID NO: 154 - DNA, 257 bp, Glycine max
  unsure at all n locations
  Clone ID: 700998406H1
ccaattganattttaaaaatgactgggnataaacttaaganttcaattattgaaattgaataagtaaacnatttaattggattngtcgaatggtatcaaaaaaatggagtactaactcccatttcttatttatattgaattaaccgatcaacttgctttgtcatcgaacatttctttttgatttcaaaaattttccggaaaanattntgaatctatttttatatgcgaatcaatcctactacttctggccctgaggt

SEQ ID NO: 155 - DNA, 221 bp, Glycine max
  unsure at all n locations
  Clone ID: 700998533H1
gttggatcttgctacatcactacttgcaaaagccaaggaaaagggggtgtctctcttgttaccaagtgatgtggtgattgcagacaaatttgctcctgangctaatagcaaggtngtgccacnatcaaccnacccgcanggctgncntggncccatnnncnccaanntncttaaacnattccaggaaccnttggnacnnancccccacncctcnntggnnt

SEQ ID NO: 156 - DNA, 265 bp, Glycine max
  unsure at all n locations
  Clone ID: 700999851H1
gtgaggttctacanggacgaagannccgaatgatcctgaatttgcaaagaagttggcttctctagctgatctctatgtgaatgatgcatttggcactgcccacagagctcatgcttctacagaaggagttgccnaatacttgaagccctctgttgcaggattcctaatgcagaaggagcttgattatctagttggggctgtgtcaaaccccaagagaccatttgctgctattgtcggtggatcgaagtgtcttccagattggagt

SEQ ID NO: 157 - DNA, 271 bp, Glycine max
  unsure at all n locations
  Clone ID: 700999829H1
tgctggttgccacactacaccgatatttccaccaaacccgtttgccntgttgtttgcnaataaatggcaactaagaggagcgtgggaacgttnaangagggtgatttgaaggggaagagggtattcgtgagggtcgatctaanncntgcctttggatgacaaccttaacatcaccgatgacactagagtccgtgctgctgttcccaccatcaagtacttgactggttatggtgctaaagtgatcctttctagccatttgggacgtccaaaa

SEQ ID NO: 158 - DNA, 285 bp, Glycine max
  unsure at all n locations
  Clone ID: 701000877H1
gcgtgggggagctgagcgcggcggacctgaaggggaagaangtcttcgtcagggccgacctcaacgtcccgctcgacgacaancagaacatcaccgacgacaccagaattcgcgccgccattcccaccatcaaacacctaatccaaaacggcgccaaagttattctctccagccacttggggaggccgaagggtgtcactcccaaatacagcttggcacctcttgtgccccggctttctgagctcattggtatccaggttgtcaaggctgaagacagtattggtc

SEQ ID NO: 159 - DNA, 252 bp, Glycine max
  unsure at all n locations
  Clone ID: 700998332H1
ttacaaggcacaaggtctttcagtgggttcatcccttgtagaagaagataagttggatcttgctacatcactacttgcaaaagccaaggaaaagggggtgtctctcttgttaccaagtgatgtggtgattgcagacaaatttgctcctgatgctaatagcaaggtcgtgccagcatctgccatccctgatggctggatgggatggatgctngtccagatccgntaaatcantcagtgaagcttgggtacnac

SEQ ID NO: 160 - DNA, 278 bp, Glycine max
  unsure at all n locations
  Clone ID: 701000168H1
gttggatcttgctacatcactacttgcaaaagccaaggaaaagggngtgtctctcttgttaccaagtgatgtggtgattgcagacaaatttgctcctgatgctaatagcaaggtcgtgccagcatctgccatccctgatggctggatgggcttggatattggtccagattctgttaaatcattcagtgnagcattggatactacccaaaccatcatatggaatggaccaatgggagtgtttgagtttgacaagtttgctgttggtacagaggctattg

SEQ ID NO: 161 - DNA, 274 bp, Glycine max
  unsure at all n locations
  Clone ID: 700996544H1
gnttgcngctggtanagaggntanngcnaagaagctggctgatctcagtggaaanggggtgacnacaattatcggaggangagattctgttgcagctgtggagaaagtaggagtngctagtgtncatganccacatatctactggtggtggtgccagtntggagtnattnnaaggcnaagancntccangantccttggtctnnatgaagccgtcccagttgccgtgtaagacnattttcagcttggnnaaatttttccatcctcagattnncg

SEQ ID NO: 162 - DNA, 276 bp, Glycine max
  unsure at all n locations
  Clone ID: 701000288H1
cggaaccttcgatgctgatgtcaagcctgttggcagcaatgtcatctccgtggatggaaaggaaatcnaagntgtttctgaccgcaaccctgccaaccttccttggaaggantttgggatagactggtgatngaaggnaccgngggtgtttgtagacagaaaaagtgcangganaacncantcaaggcagganntnaagaangtgctcatcactgcnctgggtaagggcgatatcccagcctacgngttggngtccatgngtatnaactacncccc

SEQ ID NO: 163 - DNA, 265 bp, Glycine max
  unsure at all n locations
  Clone ID: 700999844H1
ggaacttcntgaggtgctggcacggtcgcaaagactcccctcttgatgtcattgccatcaacgacaccggcggcgtgaaacaagcctctcaccttctcaaatacgattccatcntcggaaccttcnatgctgatgtcaagcctgttggcagcaatgncatctccgtggatggaaaggaaatcaaagttgtttctgaccgcaaccctgccaaccttccttggnaggacttggggatagacntggtgattgaaggaaccgggtgttt

SEQ ID NO: 164 - DNA, 291 bp, Glycine max
  unsure at all n locations
  Clone ID: 700999412H1
tccagacctatgcagttggaagcagtggaggatacaagaagggtgtgacagaagcaaaactgaaggttgccataaacgggtttggaaggattggaaggaacttcttgaggtgctggcacggtcgcaaagactcccctcttgatgtcattgccatcaacgacaccggcggcgtgaaacaagcctctcacttctcaaatacgattccatcctcggaaccttcgatgctgatgtcaagcctgttggcagcatgtcatctccgtggatggaaaggaattcaaagttntttctgnc

SEQ ID NO: 165 - DNA, 252 bp, Glycine max
  Clone ID: 700997359H1
caaggctctactctactgcttcaccttctgctctagaaaattcagtggtgatacatggcttcggctactctctctgtagccaaaccagcccttcaggcaaatgggaaaggcttctctgaattctctggcctccgcagctcatcaggcttccttcccttttctagaaaatcttcagaggatttccattctgtcattgccttccagacctatgcagttggaagcagtggaggatacaagaagggtgtgacagat

SEQ ID NO: 166 - DNA, 261 bp, Glycine max
  unsure at all n locations
  Clone ID: 700998979H1
ctagtttcttacaagcctctactatactgcttcaccttctgctctagaaaattcagtgctgaaacatggcttcggctactctctctgtagccaaaccagcccttcaggcaaatgggaaaggcttctctgaattctctggcctccgaagctcatcaggcttccttcccttttctagaaaatcttcagaggatttccattctgtcattgccttccagacctatgcagttggnagcagtggaggatacaanaagggtgtgacag

SEQ ID NO: 167 - DNA, 267 bp, Glycine max
  Clone ID: 701001681H1
ctctactctactgcttcaccttctgctctagaaaattcagtggtgatacatggcttcggctactctctctgtagccaaaccagcccttcaggcaaatgggaaaggcttctctgaattctctggcctccgcagctcatcaggcttccttccctttctagaaaatcttcagaggatttccattctgtcattgccttccagacctatgcagttggaagcagtggaggatacaagaagggtgtgacagaagcaaaactgaaggttgccata

SEQ ID NO: 168 - DNA, 257 bp, Glycine max
  unsure at all n locations
  Clone ID: 701001628H1
ctatactgcttcaccttctgctctagaaaattcagtgctgaaacatgggcttcggctactctctctgtagccaaaccagcccttcaggcaaatgggaaaggcttctctgaattctctggcctccgaagctcatcaggcttccttcccttttctagaaaatcttcagaggatntccattctgtcattgccttccagacctatgcagttggaagcagtggaggatacaagaagggtgtgacagaagcaaaactgaaggt

SEQ ID NO: 169 - DNA, 274 bp, Glycine max
  unsure at all n locations
  Clone ID: 701002335H1
ctagtttcttacaagcctctactatactgcttcaccttctgctctagaaaattcagtgctgaaacatgggcttcggctactctctctgtagccaaaccagcccttcaggcaaatgggaaaggcttctctgaattctctggcctccgaagctcatcaggcttccttcccttttctagaaaatcttcagaggatttccattctgtcattgccttccagacctatgcngttggaagcagtggaggatacaagaagggtgtgacagaagcaaaactga

SEQ ID NO: 170 - DNA, 264 bp, Glycine max
  unsure at all n locations
  Clone ID: 701000601H1
tactgcttcaccttctgctctagaaaattcagtgctgaaacatggcttcggctactctctctgtagccaaaccagcccttcaggcaaatgggaaaggcttctctgaattctctggcctccgaagctcatcaggcttccttcccttttctagaaaatcttcagaggatttccattcngtcattgccttccagacctatgcagttggaagcagtgggaggatacaagaagggtgtgacagaagcaaaactgaaggttgccataaac

SEQ ID NO: 171 - DNA, 281 bp, Glycine max
  unsure at all n locations
  Clone ID: 700996131H1
gtttcttacaagcctctactatactgcttcaccttctgctctagaaaattcagtgctgaaacatggcttcggctactctctctgtagccaaaccagcccttcaggcaaatgggaaaggcttctctgaattctctggcctccgaagctcatcaggcttccttcccttttctagaaaatcttcagaggatttccattctgtcattgccttccagacctatgcagttgncaagcagtggaggatacaagaagggtgtgacagaagcaaaactgaaggttgccat

SEQ ID NO: 172 - DNA, 278 bp, Glycine max
  unsure at all n locations
  Clone ID: 701001467H1
ctgcttcaccttctgctctagaaaattcagtgctgaaacatngcttcggctactctctctgtagccaaaccagcccttcaggcaaatgggaaaggcttctctgaattctctggcctccgaagctcatcaggcttccttccttttctagaaaatcttcagaggatttccattctgtcattgccttccagacctatgcagttggcaagcagtggaggatacaagaagggtgtgacagaagcaaaactgaaggttgccataaacgggtttggaaggattgg

SEQ ID NO: 173 - DNA, 288 bp, Glycine max
  unsure at all n locations
  Clone ID: 701000893H1
gtttcttacaagcctctactatactgctttcaccttctgctctagaanattcagtgctgaaacatggcntcggctactctctctgtagccaaaccagccttcaggcaaatgggaaaggcttctctgaattctctgggcctccgaagctcatcaggcttcccttcccttttctagaaaatcttcagaggatttccattctgtcattgccttccagacctatgcagttgncaagcagtggaggatacaagaagggtgtgacagaagcaaaatgaaggttgccataaacgg

SEQ ID NO: 174 - DNA, 264 bp, Glycine max
  unsure at all n locations
  Clone ID: 700996585H1
ctagtntcttacaagcctctactatactgcttcnccttctgctctagaaaattcagtgctgnaacatggnttcggctactctctctgtagccaaaccagcccttcaggcaaatgggaaaggcttctctgaattctctggcctccgaagctcatcaggcttccttccctttctaganaatcttcagaggatttccttctgtccatgccttcccaganntctgnnnaccnaancagtggaggntacaanannggtgtgacagaanc

SEQ ID NO: 175 - DNA, 268 bp, Glycine max
  unsure at all n locations
  Clone ID: 701000661H1
cttttctagaaaatcttcagaggatttccattctgtcattgccttccagacctatgcagttnagcagcagtggaggatacaagaagggtgtgacagaagcaaaactgaaggttnccataaacggatttggaaggattggaaggaattcttgaggtgctggcacggtcgaaaagacncccctctngatgtcatngccatnaacgacagcggggaganaaacaagnctnntcacnnncnnangnacgattncganccncnnncntnggtg

SEQ ID NO: 176 - DNA, 273 bp, Glycine max
  unsure at all n locations
  Clone ID: 700999082H1
caaggntctactctactgcttcaccttctgctctagaaaattcagtggtgatacatggcttcggntactnctctctgtagccaaaccagcccttcaggcaaatgggaaaggcttcctgaattctctggcctccgcagctcatcaggcttccttcccttttctagaaaatcttcagaggatttccattctgtcattgccttccagacctatgcagttgncnaccagtggaggatacaagaagggtgtgacgaagcaaaatggaagttgccataa

SEQ ID NO: 177 - DNA, 283 bp, Glycine max
  unsure at all n locations
  Clone ID: 700996106H1
caatggtttcggacgcattggtagaaacttccttcgctgctggcacggccgaaaagactcaccccttgangtcgttgttgtcaacgacagtggtggtgtcaagaatgcttcgcacctgcttaaatatgattccatgctgggaacttttaaagcagatgtgaaaatactggacaatgaaaccatcactgttgatggtaagcccatcaaggttgtttcaagcagggaccctcttaagcttccttgggctgaacttggaattgacattgttattgagggaaccgga

SEQ ID NO: 178 - DNA, 272 bp, Glycine max
  Clone ID: 700998228H1
cgagtacaagccagagcttgatattatttccaacgctagctgcacaaccaactgccttgctccactcgccaaggttatcaatgacaggtttggcattgttgagggtttgatgaccactgttcattccatcactgctacccagaagatgttgatgggccatcagccaaggactggagaggtggaagagctgcttcatttaacatcattcctagcagcactggagctgccaaggctgttgggaaagtcttcctgctttgaatggaaaattgact

SEQ ID NO: 179 - DNA, 301 bp, Glycine max
  Clone ID: 701001031H1
atggccacccacgcggctcttgcttctacaaggatcccttcaaacacaaggttcccatccaaggcctctcactctttcccaacccaatgcgccttaaagagacttgaggtgacagaattctctgggcttagatccacttcatgtgtcacatatgctaacagtgctagagaatcttccttttttgatcttgtagcttcccaactcactcccaagaccaatggatcaactcctgtgaggggagagacagtggccaagttgaaggtggcaatcaatggtttcggacgcattggtagaaattcct

SEQ ID NO: 180 - DNA, 280 bp, Glycine max
  unsure at all n locations
  Clone ID: 700996472H1
gttattatcactgctcctgcaaagggtgctgatattccaacttatgttgttggtgtaaatgaaggggactacactcatcagatctctaacattataagcaacgcttcctgcaccacaaactgtcttgctccctttgtgaagatcctggatgaagagtttggaattgtgaagggaaccatgacaaccacacattcctacacaggagaccagaggcttttgggatgctttcacaccgtgacttgagaagagccagggctgcagcactgaacattgtcccanc

SEQ ID NO: 181 - DNA, 267 bp, Glycine max
  unsure at all n locations
  Clone ID: 701002213H1
cttttaaagcagatgtgaaaatactggacaatgaaaccatcactgntgatggtaagcccatcaaggttgtttcaagcagggaccctcttaagctnccttgggctgaacttggaattgacattgttattgagggaaccggagtgtttnnggatggccctggggctggtnaacacatccaagcaggtgccaagaaagttattatcactgctcctgcaaagggtgctgatattcccaacttatgttgttggtgtaaatgcaggggatncc

SEQ ID NO: 182 - DNA, 286 bp, Glycine max
  unsure at all n locations
  Clone ID: 700999509H1
ccatggccacccacgcggctcttgcttctacaaggatcccttcaaacacaaggttcccatccaaggcctctcactctttcccaacccaatgcgccttaaagagacttgaggtgacagaattctctgggcttagatccacttcatgtgtcacatatgctaacagtgctagagaatcttcctttnttgatcttgtagcttcccaactcactcccaagaccaatggatcaactcctgtgaggggagagacagtggccaagttgaaggtggcaatcaatggtttcggacg

SEQ ID NO: 183 - DNA, 290 bp, Glycine max
  Clone ID: 701001058H1
ccatggccacccacgcggctctagcttctacaaggatccccactaacaccaagttcccatccaaggcttcacactctttcccaacccaatgcgcctcaaagagacttgaggtgacagaattctctgggctaagatccacttcatgtgtgacatatgctaacgatgctagagaatcttccttttttgatcttgtagcttcccaactcactcccaagaccaatggatcatcaactcctgtgaggggagagacagtggccaagttgaaggtggcaatcaatggtttcggacgc

SEQ ID NO: 184 - DNA, 251 bp, Glycine max
  unsure at all n locations
  Clone ID: 701002119H1
tttaaagcagatgtgaaaatactggacaatgaaaccatgcactgttgatggtaagaccatcaaggttgtttcaagcagggaccctcttaagcttccttgggctgaacttggaattgacattgttattgagggaaccggagtgtttgtgncatggccctggggctggtaaacacatccaancaggtgccaagaaagttattatcactgctcctgcaaagggtgctgatattccaattatgttgttggtgtaa

SEQ ID NO: 185 - DNA, 261 bp, Glycine max
  Clone ID: 701002126H1
catggccacccacgcggctcttgcttctacaaggatcccttcaaacacaaggttcccatccaaggcctctcactctttcccaacccaatgcgccttaaagagacttgaggtgacagaattctctgggcttagatccacttcatgtgtcacatatgctaacagtgctagagaatcttccttttttgatcttgtagcttcccaactcactcccaagaccaatggatcaactcctgtgaggggagagacagtggccaagttgaa

SEQ ID NO: 186 - DNA, 279 bp, Glycine max
  Clone ID: 701001137H1
cagccatggccacccacgcggctctagcttctacaaggatccccactaacaccaagttccccatccaaggcttcacactctttcccaacccaatgcgcctcaaagagacttgaggtgacagaattctctgggctaagatccacttcatgtgtgacatatgctaacgatgctagagaatcttccttttttgatcttgtagcttcccaactcactcccaagaccaatggatcatcaactcctgtgaggggagagacagtggccaagttgaaggtggcaatc

SEQ ID NO: 187 - DNA, 272 bp, Glycine max
  unsure at all n locations
  Clone ID: 700998563H1
cagggaccctcttaagcttccttgggctgaacttggaattgacattgttattgagggaaccggagtgtttgtggatggccctggggctggtaaacacatccaagcaggtgccaagaaagttattatcactgctcctgcaaagggtgctgatattccaacttatgttgttggtgtaaatgaaggggactacactcatcagatctctaancttattnagcnacgcttcctgcacccacaaanggtcttgccccccttgggaaccccccggaaaa

SEQ ID NO: 188 - DNA, 289 bp, Glycine max
  Clone ID: 701001383H1
aaagttgttgtaaagccttgttgctgccatggccacccacgcggctcttgcttctacaaggatcccttcaaaacacaaggttcccatccaaggcctctcactctttcccaacccaatgcgccttaaagagacttgaggtgacagaattctctgggcttagatccacttcatgtgtcacatatgctaacagtgctagagaatcttccttttttgatcttgtagcttcccaactcactcccaagcagaccaatggatcaactcctgtgaggggagagacagtggccaagtt

SEQ ID NO: 189 - DNA, 270 bp, Glycine max
  unsure at all n locations
  Clone ID: 700998663H1
gttgttgtaaagccttgttgctgccatggccacccacgcggctcttgcttctacaaggatcccttcaannaaaggttcccatccaagggcctctcactctttcccaacccaatgcgccttaaagagacttgaggtgacagaattctctgggcttagatccacttcatgtgtcacatatgctaacagtgctagagaatcttccttttttgatcttgtagcttcccaactcactcccaagaccaatggatcaactcctgtgaggggagagaa

SEQ ID NO: 190 - DNA, 261 bp, Glycine max
  unsure at all n locations
  Clone ID: 700997577H1
cgagttgttgtaaagctagccttgttgcagccatggccacccacgcggctctagcttctacaaggatccccactaacaccaagttcccatccaaggcttcacactctttcccaacccaatgcgcctcaaagagacttgaggtgacagaattctctgggctaagatccacttcatgtgtgacatatgctaacgatgctagagaatcttccttttttgatcttgtagcttcccaactcacncccaagaccaatggatcatcaa

SEQ ID NO: 191 - DNA, 254 bp, Glycine max
  unsure at all n locations
  Clone ID: 700998789H1
tcttaactcaacttctgctacccactctcttcttccaagtccaaccacgcttttctctacagtcatgggcaaggtcaagatcggaatcaacggatttggaagaattggccgtttggttgccagagtcgctctgcaaagagacgatgtggagctcgttgccgttaacgaccctttcattaccaccgattacatgacatanctgtttaaatacgacagtgttcacggacactggaagcatcacgatgtcaccgtta

SEQ ID NO: 192 - DNA, 283 bp, Glycine max
  Clone ID: 700999463H1
gacagagcgagttgttgtaaagctagccttgttgcagccatggccacccacgcggctctagcttctacaaggatccccactaacaccaagttcccatccaaggcttcacactctttcccaacccaatgcgctcaaagagacttgaggtgacagaattctctgggctaagatccacttcatgtgtgacatatgctaacgatgctagagaatcttccttttttgatctggtagcttcccaactcactcccaagaccatggatcatcaactctgtgaggggagaga

SEQ ID NO: 193 - DNA, 268 bp, Glycine max
  unsure at all n locations
  Clone ID: 700997526H1
aattctctgggctaagatccacttcatgtgtgacatatgctaacgatgctagagaatcttccttttttgatcttntagcttcccaactgcactcccaagaccaatggatcatcaactcctgtgaggggagagacagtggccaagttgaaggtggcaatcaatggtttcggacgcattggtagaaacttccttcgctgctggcacggccgaaaagactcaccccttgaggtcgttgttgtcaacgacagtggtggtgtcaaatgcttcg

SEQ ID NO: 194 - DNA, 275 bp, Glycine max
  unsure at all n locations
  Clone ID: 700999632H1
cagccatggccanccacgcgggctctagcttctacaaggatccccactanacaccaagttcccatccaaggcttgcacactctttcccaacccaatgcgcctcaaagagacttgaggtgacagaattctctgggctaagatccacttcatgtgtgacatatgctaacgatgctagagaatcttccttttntgatcntgtagcttcccaactcactcccaagaccaatggatcatcaactcctgtnaggggagngacagtggccaagttgaangtg

SEQ ID NO: 195 - DNA, 129 bp, Glycine max
  Clone ID: 700996816H1
gagtgtttgtggatggccctggggctggtaaacacatccaagcaggtgccaagaaagttattatcactgctcctgcaaagggtgctgatattccaacttatgttgttggtgtaaatgaaggggactaca

SEQ ID NO: 196 - DNA, 279 bp, Glycine max
  unsure at all n locations
  Clone ID: 700997818H1
agnagctcaaganaaatctgcaaagaataaaacaagaggaggaaatgcaacttacttgttgatataaacttcagacagagcgagtngttgtaaagccagccttgttgcagccatggccanccacgcggctctagcttctacaaggatccccactaacaccaagttcccatccaaggcttcacactctttcccaacccaatgcgcctcaaagagacttgaggtgacaganttctctgggctaagatccacttcatgtgtganatatgctaacgatgctag

SEQ ID NO: 197 - DNA, 267 bp, Glycine max
  unsure at all n locations
  Clone ID: 700999674H1
caaatactgttctgacagggtataaaggacagtggcattggatctcaagggattaccaacancctaaacatgatgaccaaggtcaaaacgactgtnatcaacttacccagcccttcctatactatgggctagtagtgtaatagttatacacatacatgcatggaggaaaatcaatttatatcatgttccataaatcatagtgaacgttcaaaacgtatgagttcaacattgccttctcttttgcagcagggtatcatagagatgaat

SEQ ID NO: 198 - DNA, 264 bp, Glycine max
  unsure at all n locations
  Clone ID: 700996991H1
ggagtcgccatacacctgagggtgctaaacttgaagctgagtggtntgccaagtttgtggaatatgagaagcaatacagtgaggaagctgcagagctgaaggctattattactggcgaattaccagctggttgggagaaacacttccgacatacacaccagaaagccctgctgatgctacaagaaatctgtctcagcaaaatctaaatgcccttgttaaggttcttcctggtctacttggtggtagtgcagatcttgcctcttc

SEQ ID NO: 199 - DNA, 298 bp, Glycine max
  unsure at all n locations
  Clone ID: 701001535H1
ttggatttggttctccaaacaagggctaattcctacagtgttcatgggagtgcattaggtgctaaaagaagtngatgctacaaggaagaatcttggatggccatacgagcctttccatgtgccagaagatgtcaagaagcattggagtcgccatacactgagggtgctaaacttgaagctgagtggaatgccaagtttgtggaatatgagaagcaatacagtgaggaagctgcagagctgaaggctattatactggcgattaccagctggttgggagaaagcattccgacatacacac

SEQ ID NO: 200 - DNA, 273 bp, Glycine max
  unsure at all n locations
  Clone ID: 701002017H1
gttagatttggtgttagtgaacatggaatgggagcaatctgtaatggtattgctcttcatagccccggattcattccatactgtgcaactttctttgtcttcactgactacatgagagctgccataaggatttctgcactgtgtgaagctggagttatncnagtgatgactcatgattcgattggacttggagaggatggaccaactcatcagccaatagagcacttggcaagcttcagggcaatgccaaacatttgatgcttcgtccagctg

SEQ ID NO: 201 - DNA, 260 bp, Glycine max
  unsure at all n locations
  Clone ID: 700996310H1
ctgagaatnttgatcaacgttttgaggcacttgggtggcatgtaanttgggtgaagaatggaaatactggatatgatgaaattcgtgcagccattaaggaagcaaaggctgtcaaagacaaacccactatgatcaaggtaaccactaccattggatttggttctccaaacaaggctaactcccacagtgttcatggaagtgcattaggtactaaagaagtggatgctacaaggaagaatcttggatggccatacgagcct

SEQ ID NO: 202 - DNA, 271 bp, Glycine max
  unsure at all n locations
  Clone ID: 700999039H1
aaaggaaaggccataggcattgatcgatttggagcaagtgctccagctggaaaaatatacaaggagtttggtatcaccaaggaagctgttattgctgctgccaaagaactttcgtaatatatttgttgagtntcttttatctcatctagaacttgtggttttcacttgtggctttgggttactgttacatgacttgttttttgagatatcactttagccacaatanggaagatagattgttcttgcatatgattgtcagaggaaccactta

SEQ ID NO: 203 - DNA, 258 bp, Glycine max
  unsure at all n locations
  Clone ID: 700998419H1
tctgcactgtgtgaagctggagttatttatgtgatgactcatgattcgattggacttggagaggatggaccaactcatcagccaatagagcatttggcaagcttcagggcaatgccaaacactttgatgcttgtccagctgatggnaatgaaactgctggatcatacaaagttgctgtggttaacaggaagagaccctcaattcttgcactttctaggcaaaagttgacccaacttccagganttctattgagggagt

SEQ ID NO: 204 - DNA, 294 bp, Glycine max
  unsure at all n locations
  Clone ID: 701001530H1
tggaaacaggcatagcatgctacactcgcgggcctttcctgcctagtgtttcttccaagcatctnccacccttccatctctccatcttttcgcctgaggagtctgaaatcgagctctttatttggagaatctctaagagtggcatccaaatcaaactaaaggtttcaaagacaaagaatacttcactcgtgaccagatgtgaaattggtgacagtctggaagaattcctcacaaaagcaacaccagataaggggttgatcaggttgttggtgtccagggagangcataagaaca

SEQ ID NO: 205 - DNA, 266 bp, Glycine max
  Clone ID: 701001180H1
agaggttgatggtggtttagggccttcaaccatagacgtggccgcatcagcaggggcaaattgcattgttgctggaagttctgtttttggtgcacctgagccagctcaagtaatatcctactgaggagttctgttgagaaagcccagcaaacctcgatacagtaaaacaatgtcgttttaagttgcagtatacttcacaactttacataaacaatatgctaatgttaacatttcataagttgaataaaagatcaagtgcttgaaaa

SEQ ID NO: 206 - DNA, 292 bp, Glycine max
  Clone ID: 701001010H1
attggtgacagtctcgaagaattcctcacaaaagcaacaccagataaggggttgatcaggttgttggtgtccatgggagaagcattgagaacaatttccttcaaagtgaagacggcttcatgtggtggaacacaatgtgttaatacttttggggatgagcagcttgcagtggatttgctagctaatcagcttctttttgaggccttaaattactctcatttctgcaagtatgcttgctctgaagaaaatcctgagctcttggacatgggaggtccagttgaaggtggattta

SEQ ID NO: 207 - DNA, 270 bp, Glycine max
  Clone ID: 700997516H1
tgatcaggttgttggtgtccatgggagaagcattgagaacaatttccttcaaagtgaagacggcttcatgtggtggaacacaatgtgttaatacttttggggatgagcagcttgcagtggatttgctagctaatcagcttctttttgaggcctaaattactctcatttctgcaagtatgcttgctctgaagaaaatcctgagctcttggacatgggaggtccagttgaaggtggatttagtgttgcatttgatccccttgatggctccag

SEQ ID NO: 208 - DNA, 280 bp, Glycine max
  unsure at all n locations
  Clone ID: 700999494H1
ttggcttgaggagtctgaaatcgagctctttatttggagaatctctaagagtggcatccaaatcaacactaaaggtttcaaanacaaagaatacttcactcgtgaccagatgtgaaattggtgacagtctggaagaattcctcacaaaagcaacaccagataaggggttgatcaggttgttggtgtccatgggagaagcattaagaacaatttccttcaaagtgaagacggcttcttgtggtggaacacaatgtgttaatacttttggggacgagcagct

SEQ ID NO: 209 - DNA, 247 bp, Glycine max
  unsure at all n locations
  Clone ID: 700996203H1
gaacacaatgtgttaatacttttggggatgagcagcttgcagtggatttgctagctaatcagcttctttttgaggccttaaattactctcatttctgcaagtatgcttgctctgaagaaaatcctgagctcttggacatgggaggtccagttgaaggtggatttagtgttgcatttgatccccttgatggctccagcattgtggacacaaatttcncagtaggcaccatctttggtgtgtggcctgg

SEQ ID NO: 210 - DNA, 266 bp, Glycine max
  unsure at all n locations
  Clone ID: 701001629H1
ggaaacaggcatagcatgctacactcgcgggcctttcctgcctagtgtttcttccaagcactctccaccctccatctctccatcntttggcttgaggagtctgaaatcgagctctttatttggagaatctctaagagtggcatccaaatcaacactaaaggtttcaaagacaaagaatacttcactcgtgaccagatgtgaaattggtgacagtctggaagaattcctcacaaaagcaacaccagataaggggttgatcaggttgt

SEQ ID NO: 211 - DNA, 300 bp, Glycine max
  unsure at all n locations
  Clone ID: 701001319H1
anacancataacatcctcaagnctttgancatcggtttgcagccatggaaacaggcatagnatgctnacantcngcgggcctttctggcctagtgtgtcttccaagcactctccaccctccatcnntccatcntttggcttgaggagtctgaaatcgagctntttatttggagaatctctaagagtggcatccaaatcancactanaggntncnaagacnnagantanttcactcgtgaccngangtnnaattggtgacagtctggnagaatcctcanaaacagcaacaccagataaggg

SEQ ID NO: 212 - DNA, 254 bp, Glycine max
  unsure at all n locations
  Clone ID: 701002558H1
tcctggatccccctgagctcattaaaccccccaaaatcttagtcattgaaggcttgcacccaatgtatgattctccgggtcagagatctcttggactttagcatctacctagacattagcaatgaggtcaaattcgcttggaaaattcagagagacatggcagagcgtggacacagtcttgaaagcatcaagggctagcattgaagcaaggaagctgattttgaagcntatattgatccacaaaagcaatnngc

SEQ ID NO: 213 - DNA, 273 bp, Glycine max
  unsure at all n locations
  Clone ID: 700997513H1
ctctttagagagatagagagaggaagaaagaatggcagcttgcactgtctactcaacacaatctctgagcacaaattgctccatctcaaccccatcaaagacgcaactcagttttttccaccaaaagcaggtagttttctggaggaacagcaagaagggcagctgcagcagcagaagaagctatgtgataacatntgcagcaggtgactcacagacagtggtgattggcctggctgcagactcagggtgtgggaagagcaccttcatgaggag

SEQ ID NO: 214 - DNA, 278 bp, Glycine max
  unsure at all n locations
  Clone ID: 701000176H1
agagagagaganagaaattaagaaaaaatgggcagcctgcactgtctactcaacacaatctctgagcacaaattgctccatctccaaccccatcaaagacacagctgagtttcttccaccaaaagcaggtagttttctggaggaacagcnnnnnnnnnnnnnnnnnnnnnnnnnnnnnntatgtgataacatgtgcagcaggtgactcacagacagtggtgattggtcttgctgcagactcagggtgtgggaagagcaccttcatgaggaggctgaca

SEQ ID NO: 215 - DNA, 282 bp, Glycine max
  unsure at all n locations
  Clone ID: 700996108H1
ctttagagagatagagagaggaagaaagaatggcagcttgcactgtctactcaacacaatctctgagcaaaaattgctccatctcaaccccatcaaagacgcaactcagttttttccaccaaaagcaggtanccntctggaggaacagcaagaagggcagctgcagcagcagaagaagctatgtgataacatgtgcagcaggtgactcacagacagtggtgattggctgggctgcagactcagggtgtgggaagagcaccttcatgaggaggctgaccagtg

SEQ ID NO: 216 - DNA, 286 bp, Glycine max
  unsure at all n locations
  Clone ID: 700995911H1
cgagagagananaaagaaattaagaaaaaatggcagcctgcactgtctactcaacacaatcttctgagcacaaattgctccatctcaaccccatcaaagacacagctgagtttcttccaccaaaagcaggtagttttctggaggaacagcnnnnnnnnnnnnnnnnnnnnnnnnnnnnnntatgtgataacatgtgcagcaggtgactcacagacagtggtgattggtcttgtgcagactcagggtgtgggangagcacttcatgaggaggctgacangtgtgttt

SEQ ID NO: 217 - DNA, 257 bp, Glycine max
  Clone ID: 701002519H1
ctttagagagatagagagaggaagaaagaatggcagcttgcactgtctactcaacacaatctctgagcacaaattgctccatctcaaccccatcaaagacgcaactcagttttttccaccaaaagcaggtagttttctggaggaacagcaagaagggcagctgcagcagcagaagaagctatgtgataacatgtgcagcaggtgactcacagacagtggtgattggcctggctgcagactcagggtgtgggaagagc

SEQ ID NO: 218 - DNA, 268 bp, Glycine max
  unsure at all n locations
  Clone ID: 701002203H1
gtcagctgagtacgaaggagagcataagcctganaagttggaggaacttgggaatatgctgacgggtcttgatgctggggattcaattgttattgccaagtcattttctcacatgctcaatttggccaacttggcagaagangttcaaattgcgtatcgaaganggatcagttactgaagaagggtgattttnctgatgagactctgcccattactgagtcagacattgaagagaccttcaagaagcttgtggctccactgaagaagc

SEQ ID NO: 219 - DNA, 260 bp, Glycine max
  unsure at all n locations
  Clone ID: 700999272H1
ctgaacttggagagccatgggtactaccatgcgttcggaaaactgagctgttgatggcgcagaatgattcgcttaatcacgagtacctccccgtgttggggttcgaaccatttngtaaagctgctgtcactcttttgctcggtgacgtcgagacttccacacnactagccgacgcnagggctttnggagtgcaaacactgngtggtatggagcatangngttacagntgaatnccgagaaaattcncatanannanattt

SEQ ID NO: 220 - DNA, 227 bp, Glycine max
  unsure at all n locations
  Clone ID: 700997259H1
aaagaatctgggtctttatggggaacgngttggcgccttaagccttgtctgnccgtcagctgatgttgcaagcagggttgagagccagctgaagctagtgattaggcccatgtactcaagtcctcccattcatggtgcatccattgtggctgccattctcaaggaccggaatttgttcaatgactggactattgagttgaaggcaatggctgatcgcatcatcagtt

SEQ ID NO: 221 - DNA, 244 bp, Glycine max
  unsure at all n locations
  Clone ID: 701000832H1
ctacaacacacttttttaagtgattcgttcgcagaaacatggcttcttcgnttctatccgcagcttcgcacgctgtctcanctcttgttctctgtccancacgcacaagggagagcccatgcttggaggcaacactttgagatttcacaaaggacccaattcctctctagttcaaggtctagaggtcggatctctatggctgttgcagttaatgtatctcggtttgaaggcatacctatggcnc

SEQ ID NO: 222 - DNA, 169 bp, Glycine max
  unsure at all n locations
  Clone ID: 701001911H1
cttgggagttggggcatacagaacagaagaactacagccatatgtncttaatgttgttaagaaggcagagaatcttatgctggagagaggggataacaaagagtatctcccaattgagggtttggcagcatttaataaggcaactgcagagttgttactcggagcagac

SEQ ID NO: 223 - DNA, 269 bp, Glycine max
  unsure at all n locations
  Clone ID: 700996510H1
cccggattgttgttttttggttttnnacttctggccgtgctanagttgcaagctttgaaggctttnctattttaatctgggcatgngtgntgttgaattnatgngttctgaaatgtgagtatgctgttannggagaggttgtcacacttgcccagaatttgcaaaaggntttncaggcnaatccnggttctcacccattngatgaaatactttacngnaacattggaaatcctcagtcnctggggcagcagncataagttttttccgag

SEQ ID NO: 224 - DNA, 301 bp, Glycine max
  unsure at all n locations
  Clone ID: 701001504H1
ggatgcaatacagcgagcatggcagattgtggatcagattcctgggagagcnactggtgcctanaggcatagtccaggngtcaagggcttgcntgatacaatagctgctggaattgaagagcgtgatggttttcctgccaatcctgatgacattttcatgactgatggtgcaagccctgctgtccataatatgatgcaattactcattagatcagaaaatgatggtattctgtgtcccattccacagtaccctctgtactcagcctcaatgccctccatggtggctgcctggtacctatta

SEQ ID NO: 225 - DNA, 293 bp, Glycine max
  Clone ID: 701001051H1
gactcccgtggccttccaggagtgaggaaggaagttgctgagttcatactcaggcgtgatggttatccaactgatccagagctcatatatctcactgatggtgcaagcaaaggagtgatgcagatattaaatactatcatcaggggtcaagacgatgggattttggttccagtcccacaatacccactctactcagcaacaattgctctgcttggtggtacccttgttccatactaccttgaagagacagcaaattggggtcttgatgttaatgaacttcgtcaatcagttga

SEQ ID NO: 226 - DNA, 268 bp, Glycine max
  unsure at all n locations
  Clone ID: 701002246H1
gggtgatgcagatattaaatactatcatcagaggtcaagacgatgggattttggttccagtcccacaatacccactctactcagcaacaattgctctgcttggtggtacccttgttccatactaccttgaagagcacagcaaattggggtcttgatgttaatgaacttcgtcaatcagttgagcaggctcgctttaaaggaataactgttaaancaatggtgatcataaatncctgggaaaccctactggtcaatgccttagtgaagc

SEQ ID NO: 227 - DNA, 277 bp, Glycine max
  unsure at all n locations
  Clone ID: 701002201H1
gttgagcaggctcgctttaaaggaataactgttaaagcaatggtgatcataaatcctggaaaccctactggtcaatgccttagtgaagctaatctaagagaggttttgcaattctgttatcaagaaaatttagccttgcntggagatgaggttaccagacaatatatatccaggatgaacggacccttcattagttcctagaaaggttttgatggacttggggccacctataagccaaggagtccagcttatttcttttcactccgtgtcaaaaggt

SEQ ID NO: 228 - DNA, 244 bp, Glycine max
  unsure at all n locations
  Clone ID: 700997253H1
cgtcaggntgtngctttgtgccaagctccattcctacttgatgatcctaatgttggactgctattccctgctgatgcaattgcaagagctaaacactatctttcattgacctcgggcggtttaggcgcttatagtgactcccgcggccttccaggagtgaggnaggaagtngctgagttcatactcaggcgtgatggttanccaactgatccagaactcatatatctcactgatggtgccagca

SEQ ID NO: 229 - DNA, 274 bp, Glycine max
  unsure at all n locations
  Clone ID: 700997304H1
aatcaagcgaaggtggtctcgattgcaagtnatccacgatacactctacgcttcacaaaaccttcaaacccaattccacagaattcttctgnncncaccatgccaccaaagcctttagactatgggtcaataaatgaaaacgtgaagaagagtcaatatgctgtcagaggtgaattataccttcgagcttctgaacttcagaaagagggcaaaaagnttatctttactaatgttggcaacccgcatgcnattgggacagnanccattgggttcc

SEQ ID NO: 230 - DNA, 265 bp, Glycine max
  unsure at all n locations
  Clone ID: 701000739H1
ttggactgctattccctgctgatgcaattgcaagagctaaacactatctttcattgacctcgggcggtttaggcgcttatagtgactcccgcggccttccaggagtgaggaaggaagtggctgngttcatactcaggcgtgatggttatccaactgatccagaactccatatatcctccactgatggtgccnagcaaagggggtgatgcnagatattaaatactatccatcagaggtccaagacgatgggattttggttccagtc

SEQ ID NO: 231 - DNA, 239 bp, Glycine max
  unsure at all n locations
  Clone ID: 700996252H1
cccgaacactcttcttcaatcaagcgaaggtggtctcgattgcnagtnatccacgatacactctacgcttcacaaaaccttcaaacccaattccacagaattcttctgcntcaccatgccaccaaagcctttagactatgggtcaataaatgaaaacgtgaanaagagtcaatatgctgtcagaggtgaattataccttcgagcttctgaacttcagaaagagggcaaaaagattatct

SEQ ID NO: 232 - DNA, 264 bp, Glycine max
  Clone ID: 701000510H1
atgaagggtcgttcatcctgatatatattcgtctggtaaacctcatctccaagcaaggctaaattttcttttcactctgtgtcaaaaggttattatggtgaatgtggacagcgaggtggatattttgaaatgaccaacattcctccagagacagttgatgagatctacaaggttgcatcaatatcacttagtccaaatgttccagcacaaatatttatgggagttatgctcaatccacctcaacctggagatatttcttatgac

SEQ ID NO: 233 - DNA, 166 bp, Glycine max
  Clone ID: 700999910H1
gaaatgaccaacattcctccagagacagttgatgagatctacaaggttgcatctctatcacttagtccaaatgttccagcacaaatatttatgggagttatgctcaatccacctcaacctggagatatttcttatgacaaatttgttagggagagcaccggaatac

SEQ ID NO: 234 - DNA, 156 bp, Glycine max
  unsure at all n locations
  Clone ID: 701001711H1
ttcttatgacaaatttgttaggggagagcaccggaatacttgacatcactgagtcgaagagcaaggctaatgactgatggattcaacagttgcagaaatgtggtttgtaattttactgaaggtgccatgtnttccttcccctcaaatacgtttgcc

SEQ ID NO: 235 - DNA, 268 bp, Glycine max
  unsure at all n locations
  Clone ID: 701000647H1
cacttggaggagtgcgcccttcagcttgtntgcctattaccattgatgtgggtacaaacaatgagaagctgctgaatgatgaattatacattgggctaaagcaaagacgagcaactgggcaggantatgctgaacttatgcacgantttatgacagcagtcaagcaaacttatggggaaaaagttctaattcagtttgaagactttgcaaaccacaatgccttttgatctgcttgaganatatagatctacacatctggtctttaatg

SEQ ID NO: 236 - DNA, 124 bp, Glycine max
  unsure at all n locations
  Clone ID: 700998862H1
caaagacgngcaactgggcangnatatgctgaacttatgcacgantttatgacagcagtcaagcaaacttatgggganaaggtcctaattcagtttgangactttgccaaaccacaatgctttt

SEQ ID NO: 237 - DNA, 238 bp, Glycine max
  unsure at all n locations
  Clone ID: 700996224H1
tgaaaactaaggaataatttaccattgccaacagtactagttgcaattgtttctctcttcttccttcaatccagacaaaagagctgganaattttggtactccggacttcactatatacaatgctggacagttcccctgtaatcgttatactcactacatgacatcctccactagtatagatcttaatcttgctaggagggaaatggtcatcctcggcacacaatacgccggggaaat

SEQ ID NO: 238 - DNA, 265 bp, Glycine max
  unsure at all n locations
  Clone ID: 701002440H1
gccactgctgttttcagcaccatatctntcctgcttggaggtgtcacatcgcttatttctggattccttggaatganaattgcaacnnatgccaatgcaagaaccaccctggaggcaagaaagggtgttggaaaggctttcattacggcttttagatctggtgcagttntgggttctccccntngtgaaagggtctngtggtttncnanancgccnancnncttgaaanatatttacgntggtgaggagtgggntggtcnagccc

SEQ ID NO: 239 - DNA, 271 bp, Glycine max
  unsure at all n locations
  Clone ID: 701002118H1
cnctggttatggtcttggtgggtcttctatggctttgttnggaaganttggtggaggtatctatactaaggctgctgatgttggtgctgatcttgtcggaaaggttgaaagaaacatccccgaagatgatccaaganatccagctgtgattnctgataatgttggtgataatgttggggatatcnctggnatgggacctgatcttttgggtcnaaatgncngagtcancctgtnnctcccccttgtngtcnccnccanccttnttgggggg

SEQ ID NO: 240 - DNA, 287 bp, Glycine max
  unsure at all n locations
  Clone ID: 701001376H1
gggagcagtgattctcccagatctcggcaccgagattttgattcccgtctgcgccatcattggaatagcgttcggcctcttccagtgggtctcgtctctaaggtcaagctctccgctgccagagacgcttcctccaacgccggcggcnccaaaaatggctacaacgattacctcatcgaagaagaggaaggcctcaacgaccacaacgtcgtcctcaaatgcgccgaaatccaaaacgccatttccgaaggagcaacctctttccttttcactgagtataagtacgt

SEQ ID NO: 241 - DNA, 254 bp, Glycine max
  unsure at all n locations
  Clone ID: 700998437H1
gaagattttggcactgaaggacgtggcgggtactttgaccattatggtatcataaganacattatgcagaatcatttacttcaaatactagcactctttgcgatggaaacccctgttagtttggatgcagggatattagaaatgaaaaggtcaaggttcttcgttcgatgagacccctacgacttgaggatgtggttatagctgccctcttcatagataatgcaagatgggatggggtaccttttctgatgaag

SEQ ID NO: 242 - DNA, 268 bp, Glycine max
  unsure at all n locations
  Clone ID: 700996470H1
gtggcagctcaagtccctgacagtggtccttgcgtgacttatattggtaaaggtggctctggtaattttgtgaaaatgatccacaatggcatcgaatatggtgacatgcagctgattgcagaggcctatgatgtgctgaagtcagttggaaagttgtcaaatgaggaactacaaagtgtctcctcagaatggaacaagggagaattctgagtttccgattganatcatgcagatatattggattcangagataagggaganggatacc

SEQ ID NO: 243 - DNA, 281 bp, Glycine max
  unsure at all n locations
  Clone ID: 700999796H1
cttcttccttgtgttcatcgaccctccaatcccaaatcaatggattctgccttcacaaaacctctctttcccatcctcgttccctcactttctccaggaagaaaatttcaaccacagtgaaggctacatctcgtgttgacaagttttcaaaaagcgatatcattgtttctccatccattctttctgcaaactttgcaaaattgggagagcaggtgaaagcagtggagttggctggttntgatggattcacgttgatgtaatggatgggcgtttgttccaaa

SEQ ID NO: 244 - DNA, 273 bp, Glycine max
  unsure at all n locations
  Clone ID: 701000905H1
gattgctgagtcaaacttgaattgaaggtgaagaaggagatggcagnaacttcttccttgtgttnatcgancctncaatcccaaatcaatggattctgcnttcacaaaacctctntttcccatcctcgttccctnactttctcnaggaagaaaatttcaaccacagtgaaggctacatctcgtgttnacaagttttcaaaaagcgatatcattgtttctccatccattctttntgcaaactttgcaaaattgggagagcaggtgaaagcagtg

SEQ ID NO: 245 - DNA, 279 bp, Glycine max
  unsure at all n locations
  Clone ID: 700999108H1
tgagtntgttaaaaagcaggattggaagaatcctttgagtgtgggcaaatgagtatgtacggtagggatccgtggggaggcncgctgganattcacgccaccgacccgccacggacnacgagcgcagccggaatctccaggagctggaccgaggcgctttagacgagacccaacanagctggctcttgggcgccggagaacagaaaaagaacaagaaaacctacgtagaccttggctgcatcatcgtcagccgcaagctcttcatctggaccctcggca

SEQ ID NO: 246 - DNA, 200 bp, Glycine max
  Clone ID: 700996357H1
gagagagagtagcatctgagtcttgtgtttagcgtaggggattgaaaatgagtatgtacggtagggatccgtggggagggccgttggagatccacgccacagactccgccaccgacgacgagcgcaccggaatctccaggagctggaccgaggcgctttagacgagacacaacagagctggctcttgggcgccggagaac

SEQ ID NO: 247 - DNA, 246 bp, Glycine max
  unsure at all n locations
  Clone ID: 701002631H1
tnnatcctctaatttatgttacaaattcagcgtgacggcagggtcctttgtccatacgctgcttctaactggttatgcgtttatccacgaggactccgacaactgctgctttacatcaagaagcaatacaacagccccgtaatttacattactgaaagtggttatgatgagctcaacgatccaacacnctcacttgaagaaagcatgatagatacttacagagttgattacttttatcgttatctt

SEQ ID NO: 248 - DNA, 223 bp, Glycine max
  unsure at all n locations
  Clone ID: 700996290H1
ctnagatttggcataatacattgatttgtttcttaaaaacaacactgcaatgtctgccatatttctgcttgttggaatgctatcgtccattacagttgcacaatccataggagtttgctatggagtgattgntgctaatctaccatcaaggcaagangttgtggacttatataaaacaaatggcattggtagaatgctatatactacccagatgaagaagcac

SEQ ID NO: 249 - DNA, 263 bp, Glycine max
  unsure at all n locations
  Clone ID: 701002053H1
gnaagtgctttngtctggcatcatcaagatgcagaccctgattttngctcatgccaagccaaagaattgttaaatcatctggaaagtgtccttgctaatgaacctgcagttnttatcaggggccagcatattgttgaantcaagccacagggattaaacaagggattggtggctganaaggttctttccactatggttaatgatggcaatccaccagattttgtgatgtgtgtgggagatgacattctgatgaagacatgttt

SEQ ID NO: 250 - DNA, 271 bp, Glycine max
  unsure at all n locations
  Clone ID: 700997565H1
tcgattcgcatttgcgtacacccctgnaccccttgatttctctcagttccgttctgcatcatagantatggccagccacgatcttcgattcttcgagttgaacacaggcgctaagataccttccgttggtttgggaacgtggctcgctgaacctggcgttgttgctcgcgccttggccactgcaataaacgtnggatancggatatagattgnncgcaaatttanggnaatgaaaaggagattggtnccccctnaaagaanttattgncng

SEQ ID NO: 251 - DNA, 270 bp, Glycine max
  Clone ID: 701002420H1
cctttccctctctactcttctttcactttccatttccatttccattttttctggttcactttctcgatggcctccgagaaccccaccgccgacgacgccgtcaacggcttcaatcggccggaaatgttctcggaaaacctcgccggcaccgtcgacgcctacgaccgccacgtgttcctctgctacaagagtcacctgttcctggcccccgcgcatcgaggcctccgacgccgatcccttccccaagcgcgtcgccgccaccttcaaagc

SEQ ID NO: 252 - DNA, 270 bp, Glycine max
  unsure at all n locations
  Clone ID: 700999083H1
gcaatctctcttgaatatgtgggagagattgctggtaatcctgtaattgctcctcatcttcacaagttccatggtataataaatggaatcgacccagatatatgggacccatatatgataaattcattcccgtatcatactcttcagaaaatgttgttgaaggaaaaagagcttcgaaggaaaccttgcaacaaaggcttagtttaaaaaaagctgatcttccttagtgggaattatactcgattgactcatcaganaggatccatctca

SEQ ID NO: 253 - DNA, 274 bp, Glycine max
  unsure at all n locations
  Clone ID: 701001414H1
cttttgaacccggtggatgagctacttaacagaaccccaattaaaaccaatgcagtgcaagctatgaggaagggacttcaaggcaagantgccaggcctaaaggcatgatcacatgtggcatgactttcataattataggancgaggtggctccatggtgcaaaactggtgggttgggagatgttcttggaggtctaccaccggcattggcaggttttgggcatcgagtaatgactattgtgccgcgctatgaccagtacaaagatgcatggga

SEQ ID NO: 254 - DNA, 270 bp, Glycine max
  unsure at all n locations
  Clone ID: 700998522H1
cttgcagaagccattccccaatttatcaagcagaatgttcagttngtagccctaggaacaggaaaaaaacaaatggaaaagcagcttgaggaacttgaaatatcataccctgataaggccagaggagtggnnaaattcaatgttcccctagcccacatgataatagctggagctgattttatattggttcctagcagatttgagccttgtggtctcattcagttacaagctatgcgctatggatctgtaccattgttgcctcaacaggtg

SEQ ID NO: 255 - DNA, 186 bp, Glycine max
  unsure at all n locations
  Clone ID: 700998354H1
tatatgcatgtctctcacagctgacgtttctactgaatccaagttgagagacctagatatggaaagaaggaacccaaggacagtgttggcagttatactaggtggaggagctggaaaccgtctctttccctctcactaagcgacgagccnaacctggtgttcctattggangtggntacangnncc

SEQ ID NO: 256 - DNA, 243 bp, Glycine max
  Clone ID: 700997278H1
catggattggttaaagtagatgacagaggccgcatcattcaattttcagaaaaacctaagggtgatgatctgaaagcaatgcaagcagatacctctcttcttgggttgtcatcccaagatgcattagagtcaccatatattgcatctatgggggtttatgtattcaagacagatgttttactcaatcttctgaaatggagatatcctacctcaaatgacttcggatctgaaatcatccctgca

SEQ ID NO: 257 - DNA, 263 bp, Glycine max
  Clone ID: 701000760H1
ctttttttcaatttccaaatcacgaaactcaagaagatggagaaagcgatcaacagacagaagattttgcttcatcatctcaacccttcatcatccacccaccccaacgaatcatcctccctccatgcttcagcatgtgtggcgggggatagcgctgcttatcaaaggacatcgacattcggggacgatgttgtgatcgtggctgcttatcggactgctccattgcaaagctaaacgaggtggtttcaaagacactcttcctg

SEQ ID NO: 258 - DNA, 258 bp, Glycine max
  unsure at all n locations
  Clone ID: 701000430H1
ggataaggnnctcgngaaatttgggaacgacatcgctattgcctttagtggtgctgaagatgttgctttacttgagtatgtacatttgacgggtcgaccctacagagtgtttagttcttgacactgggagactgaacccagaaacctacaaattttttgacgctgttgagnagcattatggaattcatattgagtacatgttccctgatgcggttgaggttcaggcattagtaagaactanggggctcttctcatttt

SEQ ID NO: 259 - DNA, 276 bp, Glycine max
  unsure at all n locations
  Clone ID: 700997830H1
tcnagancagctaaganaataaaatatagtngcntgcnggccggtcgtnagtnccagactagctggtcagtnggggtaaganagtgttctgtnagtgntctcanagtctcagtgcgaccttgcttggtcaacaatttggagagtntgctttnacacggaaacgaagantttcgagaanaaatattaaaccgggaagngaaaaggggaaannnagtaaatnangtgcgcatatggcagganaaggaatccgattncggtaagactcgatgtgantcg

SEQ ID NO: 260 - DNA, 255 bp, Glycine max
  unsure at all n locations
  Clone ID: 701002450H1
gagagaatcgctaccatcatcaccacgagagccaactccatttgacagtgattcttcaagtcgatcctcaccatatgaagatttcatgaatagaaatgtgtcatctaaaggattctacttttccgtgagcatgacgcagntacatctagttcttaaatacttctgaaggtagggctcggttgaaagtatagacattcttgaacagaggggcgttggatggaaagagaacttggggtagcattgcnggtgtgtgat

SEQ ID NO: 261 - DNA, 246 bp, Glycine max
  unsure at all n locations
  Clone ID: 700997296H1
cgaagatgaaggagattgcggaggcgtatctaggttccaccataaagaatgcggcngtcactgtgcctgcttacttcaacgactcacaacgtcaagccaccaaggacgctgntgtcatttctgggctcaacgtgatgcgaattatcaacgagcctaccgcggctgccattgcttatgggctcgacaaaaaggccactagctctggggagaagaatgttctcatttttgatctcggtggtgggactt

SEQ ID NO: 262 - DNA, 289 bp, Glycine max
  unsure at all n locations
  Clone ID: 700999433H1
gcagcgcattatagcacaccacacaaaaaagcaaancagagagaacaactgttactcacacacgccatgggtaaatgaatggtttttgagcaacagcagttaaaagagaaaagggattcagcgaagatgacatcggttggtgtggcaccaacttcgggtttganagaagccagtgggcatggagcagcagctgcggatagattgccagaggagatgaccgatatgaaaatcagggtgattagagaaatggaanccacantttgttgatgggcaacggncgggagacagc

SEQ ID NO: 263 - DNA, 269 bp, Glycine max
  unsure at all n locations
  Clone ID: 700997992H1
ggnactcaattcctgcttggattaagttttctgtacaggctcctggtgaaattccatacagcggaatatactatgatcccccagaagaggaaaaatatgtcttcaaacatccacagncaaagagaccaaaatcacttagaatataanggncacacatcggaatgagcagtccggagccaaaaatcaatacatatgtcaattttagagatgatgtactgcctcgcattaaaagggcttggctataatgctgtccagattaggctatccaa

SEQ ID NO: 264 - DNA, 253 bp, Glycine max
  unsure at all n locations
  Clone ID: 701002543H1
cnaagtagatcatctgtgagaattctggaggccaagcacgacctttactctgcagtaatcggagagaaggtgtgcatgaagattggaaatggttcatggtgcccaactgggagggaatggacactatcaacttctggtcacaattatgctgtgtggcacaagtagtgttctgttggaatgtcatgacccttctccnctggaancacagagaagagaaaggattnccgtgccttaaagcttcggagtcttaanc

SEQ ID NO: 265 - DNA, 271 bp, Glycine max
  unsure at all n locations
  Clone ID: 700996317H1
gnaatccaagttgggatgggaccagcaggtgagttgcgttacccttcgtacccagagcaaaatgggacatggaaattcccaggaattggtgctttccaatgctatgacaaggtatatatatttatgtntttnttttccttctccttgttgtagtcctttatatataattgtcttaggatttgtttggataaataaatttcttcatgaacaaagaggagaaaacaaggtaaaatgtgttctaaacctctaatacttanttatgctatggtgc

SEQ ID NO: 266 - DNA, 249 bp, Glycine max
  Clone ID: 700997194H1
cctttgccggtgctcaagggacgatccccagttcaatgttatgctgatttcatgcgtgctttcagagacactttcaagcacctccttggtgataccattgtggaaatccaagttgggatgggaccagcaggtgagttgcgttacccttcgtacccagagcaaaatgggacatggaaattcccagggcctggtgctttccaatgctatgacaagtatatgttgagtagcttaaaagctgctgctgaagct

SEQ ID NO: 267 - DNA, 285 bp, Glycine max
  unsure at all n locations
  Clone ID: 700999649H1
cccaaatgggttgtggaggagattgataatgaccacgatcttgcatatactgatcaatggggaagaagaaactatgaatatatatcacttggatgtgatactttgccggtgctcaagggacgatccccagttcantgttatgctgatttcatgcgtgctttcagagacactttcaagcacctccttggtgataccattgtggaaatccaagttgggatgggaccagcaggttgagttgcgttacccttcgtacccagagcnaaatgggacatggaattcccaggg

SEQ ID NO: 268 - DNA, 167 bp, Glycine max
  unsure at all n locations
  Clone ID: 700996818H1
gctggaacacggtgagaggatccttgtatctgccaaaggaatatttganacaactggggtgaaactatcagggaaagttgcaggaatccactggcattacagagcaagatctcacgcagctgaactaaccgctggctactaacaaacacacgaaattaacgatggat

SEQ ID NO: 269 - DNA, 269 bp, Glycine max
  unsure at all n locations
  Clone ID: 701002034H1
caaatagttgactctttgatttggctcggaatacgcgacatgattaatgatcttaggaagaaaaagttgaagctacgaccagtcacatatttaagtggctcacaaggctctgaaactgatgttccacacaacataaaaannnaaaaaaannancaattcatacnatgcaanaancanacactttgttgtgttctgcangngntgagtctccggtgttnggtgannttaccacgagttcactggattcggtcaattgtttnatttgaatg

SEQ ID NO: 270 - DNA, 219 bp, Glycine max
  unsure at all n locations
  Clone ID: 700997492H1
atttcatctgtcaatgccatgtcagcactttgtgaggctaccggggcanatgttcaacaggtgtcctattctgttggaacagactcaaggattggacccaagttcctcaacgccagtnttggttttggtggatcctgcttccagaaggatatcttnaaccttgtntacatctgcgagtgcaatggccttccagaggtggctgagtactggaaacaagtt

SEQ ID NO: 271 - DNA, 289 bp, Glycine max
  unsure at all n locations
  Clone ID: 701000108H1
tctgtctattgcacaatggatgcagatgcagctcctttgcacatagcaatgtatccatggtttgctatggggcacctcaccccatttctccaccttgccaacaagttagccaaaaggggacacaaaatctccttcttcatacccagaagaacacaagccaagttagaagacctcaatcttcacccaaacctcatcacctttgtccccatcaatgttcctcacgttgatggtctncccttatgatgcagaaaccacttcagatgttccctcctctttgttcccactcatt

SEQ ID NO: 272 - DNA, 247 bp, Glycine max
  unsure at all n locations
  Clone ID: 700997377H1
tatgtctgnagaacaantcttggagtttgcntgnggtttngccantagcaagaaaccctttttgtggatcattagngnctgaccttgtcattggtggatccgtnattntgtcgtctgagtttgtcagtgaaacaagagacagaagcctaatagcaagtnggtgtccacaggaacaagtgctaaaccatccttcaattggtgtattcttgactcattgttgntggaactcaactactganagtgtttt

SEQ ID NO: 273 - DNA, 241 bp, Glycine max
  unsure at all n locations
  Clone ID: 700996236H1
caaagggactcgntgttcttctcncangtnatttagaaaagcccacatggtgnagatttgntgcattggtgctggatatntggggggtcctactatngcagtcattgcacttaagtgcccatccattgaagttgctgttgttgatatctctaaatcccgcattgcagcctggaccagtgaccagcttcctatctatgaacctggccttgatggtgttgtgaagcaatgccgtggcaagaac

SEQ ID NO: 274 - DNA, 277 bp, Glycine max
  Clone ID: 700995992H1
ctctagatttggacaaagacgttgaaggtgatttcaccaatgtggatctgttgaatgcagcttatgatcggtgtggtgaagtctgtgctgagtatgccaagacattttacttaggcacacaattgatgactgcagagcgccgaaaagctatttgggcaatttatgtgtggtgcagaagaactgatgagctagtggatggcccaaatgcttcgcacatcacccccggggccttggacaggtgggagcaacgactgagtgatgtttttgaaggtcgacc

SEQ ID NO: 275 - DNA, 245 bp, Glycine max
  unsure at all n locations
  Clone ID: 700997442H1
ctctagatttggacaaagacgttgaaggtgatttcaccaatgtggatctgttgaatgcagcttatgatcggtgtggtgaagtctgtgctgagtatgccaagacattttacttaggcacacaattgatgactgcagagcgccgaaaagctanttgggcaatttatgtgtggtgcagaagnnctgatgagctagtggatggcccaaatgcttcgcacatcacccccggggccttggacaggtgggag

SEQ ID NO: 276 - DNA, 276 bp, Glycine max
  unsure at all n locations
  Clone ID: 701001484H1
ggagaatatcttgggaaatcagacgcgcgccgtccgagcatcattgtcgttggtgccggtgctggaggcgttgcgacagcagcacggctcgccgcggcaggatgcaaggtcacagttgttgagaagaacgacttttctgggggcgatgcagtttgatacatcgccagaattatagattcgatcaaggcccgagtttacttctgcttcccggcttgttccacgagacgttccacgncctaggcacaaccctcgaagatgaaggagtccacattgtca

SEQ ID NO: 277 - DNA, 286 bp, Glycine max
  unsure at all n locations
  Clone ID: 701001387H1
caccaagctgcatgaaggnnacgtttctgccgcaaganacgttagcatctggcttggcacttcttatctcncaactnctcattggagctgttctaggagatggttactggggtcgatactggacanttgctgttttctctgtggtttatttcattgggatgtgtaccctgacactttctgcatctttaccagcattgaagcctgctgaatgcttgggttctgtatgcccttcagctactcctgcacaatatgctgtgttctactttggtctatacgtgattgcact

SEQ ID NO: 278 - DNA, 272 bp, Glycine max
  unsure at all n locations
  Clone ID: 700999226H1
gtaacttcatcagttcctttcttctctcaacagtgtcaaatatcaccaagaaaaanggtcacaaggggtggattttgaacaatctgaatgagtctcatcttgactactactatgcattttttgcaatattaaacttcctcaacctcatcttcttcgcgtatgttactaggtactatgtatatagggttgaagtttcagattccatagacaagcttgcaaaagancggaagggaanagaccgtgtccaacgttgtgaatccaaaagactagtt

SEQ ID NO: 279 - DNA, 260 bp, Glycine max
  unsure at all n locations
  Clone ID: 701002193H1
gtttcttgacaaggcatgtgtgaaaacagattcgaacactagtccatggacgctatgcactgttactcaagtagaggagaccaaacaaatgataagaatgattccgatcttggttgctacatttgtgcctagtncaatgatggctcagataaataccctttttgtgaancagggtactactnttganagncnctgggaagtttcaaatttcccccagcaagtttggctgcatttgttactgtgtccttgcttgtttgcat

SEQ ID NO: 280 - DNA, 271 bp, Glycine max
  unsure at all n locations
  Clone ID: 700998901H1
cntatcttacaacaaagcttcaccaaggcacagtatcctctgcaaacaatgtcaccaattggnttggcaccatttggatgacacccatattaggcgcctacgtngctgacgctttccttggccgctattggacttttgtcatagcctccaccatttatctctcgggtatgtctctgcttacactggcagtgtcccttctagcctgaagccacctgaatgctttgtaaaggatgtgacaaaatgtgccaaagcctccacactacagctagcc

SEQ ID NO: 281 - DNA, 276 bp, Glycine max
  unsure at all n locations
  Clone ID: 701001213H1
cttcaatatttgagcttgtatggggttagtactgcttatgtaantaccacagcaacctgtttgagagcaatactgaaatcaaattgttatcacaaggaagggcatcaggctccttgtaaatatggggatgcagtatatatgatgctgtttggactagttcagatcataatgtcattcataccagatctccacaacatgcatgggtttcaattgttgcggccataatgtcctttacatactcatctattggacttggacttggcatcacaacagtaa

SEQ ID NO: 282 - DNA, 268 bp, Glycine max
  unsure at all n locations
  Clone ID: 701002415H1
atcagatttacagtcagccgatctatggagctgttgacagatggtgttcaaaaagataccccaacagtggatttgtgaataatttctaccaattgaaactgcctcggttgccagcttttcagctaaacatgttcaggatatgttttagaacaacctatgtggtttccacgactggactcgctatcctatttcctacttcaatcaagttataggagtgttaggagcctaggcttttggccattggctatatattcnccctgtagagatg

SEQ ID NO: 283 - DNA, 238 bp, Glycine max
  unsure at all n locations
  Clone ID: 700999457H1
ccacccttagtctggaggccggcccggcccaagcnagcccactccgaaaaatgtttgccgtggcgtccatcgccgccggcatacagttcgggtgggtctcagtctctcttctaaccccctacgttcagtttagagtccccagcggggctccttcattgcntgcggccattcgngtgtgtaagccatgtggtatacnngacatgtactccgttgngagcgccttatcngggggctagcg

SEQ ID NO: 284 - DNA, 263 bp, Glycine max
  unsure at all n locations
  Clone ID: 700999892H1
cgaagaggctgtgggcgattgtgaactttattctggcaattgggttcggaatgacggtggtgatcaccaaggtggcggagcaccagcgcaagatgaatcccgcngccgtgggtcacccctccgaaggggtggtggttgggtccatggttttctttggggttctcggagttcctcttgcgattactttcagtgttccatttgctctagcatcaatatactgcagcgcttcangagcaggccaaggtttatctttggagtcctca

SEQ ID NO: 285 - DNA, 274 bp, Glycine max
  Clone ID: 700996712H1
gagggatattacttggatacatatcaaactatggattttcgaagctgacactgaaggtgggatggcgaatgatgcttggagtgggtgcaattccttcggtagtcctaacggtgggagtgttagcgatgcctgagtccccaaggtggctagtgatgaggggtcgtttgggagaggcaagaaaagtgcttaacaaaacctcagacagcagggaagaggcccaactaaggctagccgaaatcaaacaagccgcaggatccccgagagttgcaacgac

SEQ ID NO: 286 - DNA, 268 bp, Glycine max
  unsure at all n locations
  Clone ID: 700999295H1
caagaattgctaacggttttntctcgtttttcatggccgtgggcaacgtgctaggttacgcagnagggtcctacaaaggtctccacaagatgtttcccttcacggagaccaaggcctncnacgtgttctgcgcaaatctcaangctgcntctttttctcaatcctcntgctgctgtttttagcaacggttgctctgctctacgtaaaggacaagcnagtggaagcacgggccttggatgacgccacgcaaccctcgtgcttctttcag

SEQ ID NO: 287 - DNA, 275 bp, Glycine max
  unsure at all n locations
  Clone ID: 701000048H1
aagaggtcaagcatccattcaggaatcttctcaagcgcaggaaccgaccccaacttgtcatttccgttgccctacagatattccagcaattcacaggcancaacgcaatcatgttttatgccccggtgctgttcaacacgttaggattcangaacgatgcatccctgtattctgctgtgataactggggctgtgaacgtgctctccactgttgtatcgactatcagtggacanggnggnnccccnnattttgnnnanagaagnggncnattnccc

SEQ ID NO: 288 - DNA, 262 bp, Glycine max
  Clone ID: 700998834H1
gtggtatgtaataataagtgtattattgtcacagatattggtgtgatgagtggagcagccttgtacataaaaagggacctgaaagtgtcggatgtgcaaatcgagatcctgctcggaatcatcaacctctactctctgataggctcatgcctcgccggcagaacctccgactggataggtcggcgttacacgattgttttcgccggcgccatcttctttgtcggagcacttctcatgggtttctcccccaactattcctttc

SEQ ID NO: 289 - DNA, 155 bp, Glycine max
  unsure at all n locations
  Clone ID: 700996901H1
gttaatgttctaaganattcaaagtatgcgaaggctgcacaagagttgctggaagagttttgcagtgtagggaggggtcagtttaagaagagcaagttcaataggcagaattcaaaccctaattcaaatgccggtggtggtgcttcgccttcatc

SEQ ID NO: 290 - DNA, 186 bp, Glycine max
  unsure at all n locations
  Clone ID: 700997270H1
catgtccatctgataaccctttcctgattctctttcgtggttgtngctattctgagtgatgggtatgccctgccgctgttcccacacctcccacatcactgaaatcatcatcaccagcttcttccgccacaagtcttagatcaacaatttccgtcaattattccaaaaccaccttaagagcctttt

SEQ ID NO: 291 - DNA, 267 bp, Glycine max
  unsure at all n locations
  Clone ID: 701000541H1
cgcaaatgcaccttctcttgttctctctctcccaaactcaatccctgtgagtgctttctttctgtaactaacttgttccctcgttaaccctaatcatcaactcaagcagtgaatgaatctgtggacggacgagaactcctcggtgatggaggccttcatgtcgtcctccgatctctcctcaatctggccctcgccggcnccgccgcaatccacggcggtcttcantcaggacaccctccagcatcgcctgcaggccttgatcgaagg

SEQ ID NO: 292 - DNA, 280 bp, Glycine max
  unsure at all n locations
  Clone ID: 700999491H1
tcagcntctcgagtgggagcagctcgagaacaaaatcagacgctggatacgcgccgccaaggtctgcgtcagaacgctcttcgccagcgagaagaagctctgcgagcaaatcttcgacggtgtcggaacttccatcgacgacgcctgcnctcatggagacggtgaaaggtcccgcgattcagctcttcaacttcgcggaagcaattagcataagccgtagtcgcggagaagngttcaagattctcgatttgcatgacgcgttgaaggatttgatgccgga

SEQ ID NO: 293 - DNA, 279 bp, Glycine max
  unsure at all n locations
  Clone ID: 701000501H1
cttcttcanttcccttcacattgcagaagagatggctcttgtgaanccaatttccantgtcactcccaaatttggcagcagccccagaatgggatcacactccaaattcagcaccataataagaatgtctgccactgccaccccaccaccaccaccctccacctccacaaagccagctgcaagcaacaagaagggcaacatcaaggagaccctcttgactccaaggttctacaccactgactttgntgagatggagaccctcttcaacactgagatcaa

SEQ ID NO: 294 - DNA, 267 bp, Glycine max
  unsure at all n locations
  Clone ID: 700997938H1
gagaanattgggtactggagatacataaccatatacagacatctcaaggccaacccngagtttcaatgttatcccatttttaagtactttgagaactggtgccaggatgagaacagacatggagntttcttctctgccctgntgnnggcacagccacnaatttctaaatgactggaangcaaagttgtggtctcgattcttctgtcntatncggtttatgtcnacaatgtntctcatgattgccaacgtacagctttctacgaaggc

SEQ ID NO: 295 - DNA, 286 bp, Glycine max
  unsure at all n locations
  Clone ID: 700999030H1
aggatttcncatgctagctcagncgcgagaagcaacaatttcgcagcttaagcttccnagaactnggctccntatctgctgctgcnttntgccgattcttggtcaaaatggggatcanctaatgttaatnggattggccagttggtgctggtgaagttggtaagctaagaaggtcatcatcatttgagcttnncgaacaatggtgaggagcctgattnatnttgggtgcagtcacttgttaaggantcaccagctgaagttaanataaatggcaaccatgtctcat

SEQ ID NO: 296 - DNA, 280 bp, Glycine max
  Clone ID: 700999496H1
caagaatgaagagaaaaacccaccactgacacctctaggaactgatgatagtaataactacaattcttctgcaaaccacagcaatatcactgttagggtttgttctgattgccacaccactaagacccctctctggagaagtggaccaaaaggtccaaagacactttgcaatgcttgtggaattcgacaaaggaaggcaaggcgtgccattgccgtggctgcaacggcaaacggaatgaatccggtggaggctgagaaatctcaagtaaagaaaggaaac

SEQ ID NO: 297 - DNA, 287 bp, Glycine max
  unsure at all n locations
  Clone ID: 700995972H1
ccgaaaccctaaccccctttcgacgaacgaagggcaatcagttgctcgctccttngatccattcttgaaattctcgttatcgctncttcgaactcaagctctctcgctcacgatttctgcttctgcaccaatttctgcggtttctcaagatttagaggttctaagtggttcatttctttgaagcatgccggggttaacgtgcaacgcttgcaacaccgaattcaaagatgatacagagcaaaagctccattacaaatccgagtggcatcgatacaatctcaagcgca

SEQ ID NO: 298 - DNA, 270 bp, Glycine max
  unsure at all n locations
  Clone ID: 700997523H1
cacatttagaggtagaggcctttctatacggggcgagggtcctttaaggaatgtgaggagccgttctgcacttgatttggaatccaacctggctagggcccatttatcaaatactcatccacacaactcanactctngtggtctaccagttgaccattcttctagcgtggtcgatctgtcaactcaaacttctggcactttgacacgggattggagcccaatgagttcatgtcctcctcatggaagggtgtcatcatcagatgcaaatgc

SEQ ID NO: 299 - DNA, 266 bp, Glycine max
  unsure at all n locations
  Clone ID: 701002346H1
ggtttttctttttctcttctcactgcatcgcttcaggttcttctgaaaagatgtctcgcgtgtatgttggtaacttggattcacgagtcactgagagagatctcgaagacgaattccgcgttttcggagttattcggantgtttgggttgcacgtagaccacctggtcatgcttttattgactttgatgaccgcagagacgcacaggatgctatccgtgaatggatggcaagaatggttggagggttgagctttctcacaactcta

SEQ ID NO: 300 - DNA, 265 bp, Glycine max
  unsure at all n locations
  Clone ID: 700998853H1
gattcacaagcgcagacacttcaaatggctctggaagctcttcaatcacccagaactgccactccatcgtttagtccctttgaagaaaccaacctcagttacttggagacaccgtggaccaaaggaaagcgttctaagcgtanccggcatggagcagcaactgcaacactcttcatgcaccgaggaagagtacctcgctctctgtctcatcatgctcgctcacggcggcgcggcggtgtccccgccgccaagcctgctgtctccg

SEQ ID NO: 301 - DNA, 257 bp, Glycine max
  unsure at all n locations
  Clone ID: 700998422H1
caccgaatatattactatgatcttcgcaaccttaaaatgccactttgtactnnagttggacataacaagactgtgagctacatcaagtttgtagacactgtgaaccttgtctctgcttccacagataacacttgncagctttgggatttgtctacatgtgcatctcgagttatagactcaccgattcaatcattcactggtcacgcgaatgttaagaactttgtggggttatcagtatctgatggttacattgccac

SEQ ID NO: 302 - DNA, 257 bp, Glycine max
  Clone ID: 701000406H1
gttgcaggctcaggtggacaaattacttgaggccagacttaaagagaggtcttttatcagaatacgaagaaaaaatggtcattgatcttcatgctcaacttggcaatagatggtctaagattgcttctcatctccctggaagaactgataatgagataaaaaatcattggaacacacacataaagaaaaagctcaagaaaatgggcattgatcctgccacacataaaccacttcctaatgcaaatgaacaaaaccat

SEQ ID NO: 303 - DNA, 251 bp, Glycine max
  Clone ID: 701000444H1
atggctcaagaacctgtgtatgtgaatgccaaacagtaccaaggaattctgaggcgaagacaggctcgtgctaaagcagagcttgaaaggaagctcataaaatctagaaagccatatcttcatgaatctaggcatcagcatgctatgagaagggcaaggggtactggaggacgatttgcaaagaaaactgacggtgagggctcaaaccactcaggcaaggaaaaggataatggtactgattctgtcctatc

SEQ ID NO: 304 - DNA, 263 bp, Glycine max
  Clone ID: 701000607H1
ggactcttctcagcttttggacctcaaatttcgggacggataatgcttccaattaacttgacatccgatgacggaccaacttacgtaaatgcgaagagtaccatggaatcatcagacgtcggctatcacgtgcaaaagccgtacttgagaacaaaatgattaaacgtcgcaagccatatatgcatgaatcacgccatctacatgcattgcggcgaccaagacgatgtggtggtcgcttcttgaacacaaaaggctctactaat

SEQ ID NO: 305 - DNA, 275 bp, Glycine max
  unsure at all n locations
  Clone ID: 701001157H1
ggaatgcgtatccgagttcatcagtttcatcaccanccgaggcctctgataagtgtcagagggaaaagagaaagactattaacggtgatgatttgctctgggccatggccactcttggttttgaggattatatcgatcctcttaaaatttacctcactagntacagagagatggagggtgatncgaagggtttagccaagggcggagactcatcttctaagaaagatgttcagccaagtcctaatgctcaggtagaatgcacccacgaatgtgcg

SEQ ID NO: 306 - DNA, 274 bp, Glycine max
  unsure at all n locations
  Clone ID: 701001268H1
caagcggaacaagtagtgctcctgatctttccctgaggaagctttatattggaagcttatcaccagaagtcacaagtgaaattctccttaactattttgcnaggcatggtgaaatagaggaaggttcagttgcatatgacagggntacnaatgaatcacgtggntttgggnttcncncntacaaggacngcggagttgaaagaagggcataggttncgtagaaaagatgctcgggggagggatatanntgntaaatatggnggttnccaccaag

SEQ ID NO: 307 - DNA, 263 bp, Glycine max
  unsure at all n locations
  Clone ID: 701001671H1
accanctcccatttatattcccttctctcaccaattactttccaggttccattcccccnacacacaacacaacancnncaacatatccttattgttctcaaaccatgggtagatccccttgttgcgagaaagaacacaccaacaaaggagcttggaccaaagaagaagacgaacgcctcatcaactacatcaagctccatggtgaaggctgttggagatccctccccaaagctgctgggcttgctgagatgtggcaaaagttg

SEQ ID NO: 308 - DNA, 254 bp, Glycine max
  unsure at all n locations
  Clone ID: 701001986H1
cacaacacgggttgcctcactttactctgccgcagatgtttatgttataaactctcaggggctgggagaaacatttggacgtgtgactatagaagcaatggcgtttggtcttccggttcttgggacggacgctggaggaacacaggagattgttgagcacaatgttacaggtctcttcatcctgttggacatccggggaatcttgttcttgcanagatcccnggtttttactcaaaaaccngtgggaaaggaac

SEQ ID NO: 309 - DNA, 274 bp, Glycine max
  Clone ID: 701002116H1
cttcttttgctttcgcgttcgttttctctttctcggtcttgctttgctcagaattgctagttacgtgggagaattaagcaccaagaagatgggaaggggtagggttcagctgaagcggatcgagaacaaaacaagccagcaagtgacgtttttcaagcgtagatcgggacttctcaagaaagccagcgaaatctctgtgctatgtgatgctcaagttgcttgattatattttctaccaaaggcaaactttttgagtattcctctgaacgcagca

SEQ ID NO: 310 - DNA, 300 bp, Glycine max
  Clone ID: 701001033H1
ctttgaagcttagaaaagcggttaggtagctaggtttcagtttcagatctggtagagagcttcatcatgaagccattaccggcggagcaaaccggtgaatcagcgccgacggagttgcagagatccattccgacgccttttctgaccaagacgtaccagctcgtcgatgatccctccgcggatgacctaatttcctggaacgaagatggcaccagcttcatcgtttggcgacccgcggaattcgctagggatttgcttcctaagtacttcaaacacaacaactattccagtttcgtccgt

SEQ ID NO: 311 - DNA, 298 bp, Glycine max
  unsure at all n locations
  Clone ID: 701001568H1
ctcaatgaagggagttacagtgaaagttgaagaaacaatggcgtatgctaatgctgcttcaactagcncaacaaacatcttcaaacctctccccgcaacccatggaagggttgcacgaggtgggtccccctcngtttctcaccaaanccttcgacgggtggaagacccatccaccaacgacatcgtttcgtggagcagatcccgcaacagtttcgtcgtttgggactctcacaagttctctaccaccatcctgcctcgctattcanncacaacaattcttccagcttcgtacgacaac

SEQ ID NO: 312 - DNA, 231 bp, Glycine max
  unsure at all n locations
  Clone ID: 700996245H1
tccttcttcttccttatcgcgaaatccgttacttcaaaacctaattgcgtgantntggtttctgatttgtgttgaagcgaagatgaggattatgattaaggncggngtttggaaaaacaccgaagatgaaatcctgaaagcggctgttatgaaatatggtaagaaccagtgggctcgaatctcttcgctccttgttcgcaaatctgccaagcaatgcaaagctcgctggta

SEQ ID NO: 313 - DNA, 266 bp, Glycine max
  Clone ID: 701002037H1
gcttcagacaaccatgtcactgcagtcatcgcttactgatccacagtctcgttttgagatagggtttagtctgcccacgatatgtgcaaaatatccttatacggatcaattttatggactcttctcagcttatgcacctcaaatttcgggacgtataatgctgccacttaatatgacatctgatgatgaaccaatttacgtaaatgctaagcagtaccatggaatcattagacgtcggcagtcccgtgccaaagctgtacttgatc

SEQ ID NO: 314 - DNA, 271 bp, Glycine max
  unsure at all n locations
  Clone ID: 701002433H1
gcttcagacaaccatgtcactgcagtcatcgcttactgatccacagtctcgttttgagatagggtttagtctgcccacgatatgtgcaaaatatccttatacggatcaattttatggactcttctcagcttatgcacctcaaatttcgggacgtataatgctgccacttaatatgacatctgatgatgaaccaattacgtaaatgctaagcagtaccatggaatcattagacgtcggcagtcccgtgccaaagctgtacttgatcacaant

SEQ ID NO: 315 - DNA, 245 bp, Glycine max
  unsure at all n locations
  Clone ID: 701002632H1
ttctccgacgacttccggcgacgaacaggtactatcctcgaactcatctccgattgctgggaatnatnataatacagtgcaccgtaccacaagttgcaccactgcgcccgagctgctagacgagaatgaaaggcttaggaaagagaacatgcaactgagtaacgagttgagtcaattgaagggtttgtgtaataacatactcgctttgatgaccattatgcttctggttttagcgccagcagtta

SEQ ID NO: 316 - DNA, 276 bp, Glycine max
  Clone ID: 701001146H1
ctctcacacactcactctccttctctctcctattgcggctagggcttgggtttttcactttcagcctctccattccttcaaccttcttcttctctttgatctctgatggagacgttccgtgtttagtagcaagggttagttgaggccttgtgtttggaaacgtacggtgtcgttttggagttgggaaaacaaataattctgagagatggcaaccacgaacccttttgatttgttgggtgacgacgctgaggacccttctcagctcatcgccgccga

SEQ ID NO: 317 - DNA, 256 bp, Glycine max
  unsure at all n locations
  Clone ID: 700996059H1
tgaagctcgaaaccgattagattagaggcttcaaacaagaggccccaaaacccnaaccctattctggttggcttgcgattatggcgtctgagagcgcttctcgatcgagttcagcggccgattcgtacattgggagcttgataancttgacctctaagagtgagatcagatacgaaggtattctctacaacatcaacaccgaagagtccagtattggcctcagaaacgtgcgatcttttggaacagaaggaaggaa

SEQ ID NO: 318 - DNA, 257 bp, Glycine max
  Clone ID: 700996065H1
cttttctcttaatggaatgatggaacacaacatcatcgtcaacaacaacgtgatcgcaccgtttgtcataaaaacctacaatatggtgaacgatcccaccaccgataaactcatcacgtggggcccagccaacaacagcttcatcgtcctcgatcccctcgacttctcccactccctcctccctactttcttcaagcacaacaacttctccagcttcgttcgccaatcaacacctatggtttcagaaaggtggatcc

SEQ ID NO: 319 - DNA, 225 bp, Glycine max
  unsure at all n locations
  Clone ID: 700996241H1
cttttctcttaatggnatgatggaacacaacatcatcgtcaacaacaacgtgatcgcaccgtttgtcataaaaacctacaatatggtgaacgatcccaccaccgataaactcatcacgtggggcccagccaacaacagcttcatcgtcctcgatcccctcgacttctcccactccctcctccctactttcttcaagcacaacaacttctccagcttcgttcgcca

SEQ ID NO: 320 - DNA, 240 bp, Glycine max
  Clone ID: 700997432H1
cttttctcttaatggaatgatggaacacaacatcatcgtcaacaacaacgtgatcgcaccgtttgtcataaaaacctacaatatggtgaacgatcccaccaccgataaactcatcacgtggggcccagccaacaacagcttcatcgtcctcgatcccctcgacttctcccactccctcctccctactttcttcaagcacaacaacttctccagcttcgttcgccaactcaacacctatgg

SEQ ID NO: 321 - DNA, 276 bp, Glycine max
  Clone ID: 701001463H1
caactcgatcaactcaacacaaaccaaaactcaagctaaaattctcactctctctctcatctcgagatcatagtatcatattcaatatcatttcataccaaacacatggctttggaagctctcaactcaccaacaacaacgctccatcttttccctttgacgacccaactattccatgggcgaaacgaaaacgttcaaagcgttctcgcgaccatccttctgaagaagagtacctcgccctctgcctcatcatgctcgctcgcggcggcaccacca

SEQ ID NO: 322 - DNA, 275 bp, Glycine max
  Clone ID: 700999187H1
gcaacgccatcctctatgagcctggtgaacatccggaccatgtggttgtcattaagtatgtaccttacgttggggacagcaagagggccatggatgagtatcttctgagatattcatgggcggaaagaacacaattgtgttgcacaacacttgtgaggattcactgttagctgctcctattatcttggacttggtccttcttgctgagcttagcactcgaatcgagtttaaagctgaaaatgagggaaagttccactcattccacccagttgcga

SEQ ID NO: 323 - DNA, 273 bp, Glycine max
  unsure at all n locations
  Clone ID: 700998566H1
cgacagagccgtatgttattgcaaccaacagacaacttcagtgagatgcaccccataaacaaattgctacaccctacatttccgttacacaatggagattaacgctcttgcacgggaagcacttattaatgctgatggcacaattgagagctcatttgcaccaggaaagtatgccttagagactagctccgctgcttatgctctcgaatggcggtttgacaagcaggcataccagcagatctaattagaaggggantnctgtngaaccccttt

SEQ ID NO: 324 - DNA, 297 bp, Glycine max
  unsure at all n locations
  Clone ID: 701001013H1
gttaacgagaccaagcnanccatgacttgatctcatcatccaacttggtctcgttaactagatcaacagcagtgtgaagaagggaggaggagatcaagtcatggctagcttttgctgcccaaaaaattgttgaagttaacgcattggctaaagcattgtctggccacaaggatgaggccttcttctctngtaatgctgctnctctggcttcaaggaagtcttctccaagagtgaccaacgaggctgttcagaaggctgctgctgcattgaagggttcagatcatcgccgtgcaacaa

SEQ ID NO: 325 - DNA, 258 bp, Glycine max
  unsure at all n locations
  Clone ID: 701000754H1
aagccaccgatcatctatggtgatgtgagccgcccaaagccaatgaccgtcttctggtcatctctggctcagagctttaccaagcgcccaatgaagggaatgcttaccggtcctgttaccattctcaactggtctttgttagaaaatgaccaacctagatctgagacaactaccagattgctttgtctatccaaggacgantnggaagaccttgaaaaggctggcatcactgttatccaaattgatgaagctgctttg

SEQ ID NO: 326 - DNA, 280 bp, Glycine max
  unsure at all n locations
  Clone ID: 701000193H1
tatnaacttgctcnntcagancgcgaagaagaagncacagagaancnagtctcctantnctcacccgnaagnnaaaaatgggcatnctcncatcgttggataacccccgtatgggtnccaagagagagctcaagttcgntctncagtctttctgggatggcaagagcagcgncngaggatttgcagaaggtgtcttctgatctcaggncatccatctggaagcagatggctgntgntgggatcagtacatcccnagcaacacttctctcactatgaccag

SEQ ID NO: 327 - DNA, 256 bp, Glycine max
  Clone ID: 700996341H1
gaagccaccgatcatctatggtgatgtgagccgcccaaagccaatgaccgtcttctggtcatctctggctcagagctttaccaagcgcccaatgaagggaatgcttaccggtcctgttaccattctcaactggtcctttgttagaaatgaccaacctagatctgagaccacctaccagattgctttgtctatcaaggacgaagtggaagaccttgaaaaggctggcatcactgttatccaaattgatgaagctgct

SEQ ID NO: 328 - DNA, 247 bp, Glycine max
  unsure at all n locations
  Clone ID: 700997448H1
ctanaactnnacnccctcagaagcgaagaagaagccacagagaactagtctcctactctcacccgcaaganaaaaatggcatctcacatcgttggatacccccgtatgggtcccaagagagagctcaagttcgtctcgagtcttnctgggatggcaagagcagcgccgaggatttgcagaaggtgtcttctgatctcagggcatccatctggaagcagatggctgangctgggntcaagtacatccc

SEQ ID NO: 329 - DNA, 246 bp, Glycine max
  Clone ID: 700870790H1
gtcgacgacggtggtgacgctacccttctcatccacgaaggcgtcaaggccgaggagctctatgagaagaccggcgaactccccgaccccaactccaccgacaacgccgagtttcagatcgtgcttaccatcatcagagatgggttgaagaccgatcccaccaggtaccgcaagatgaaggagcgtctcgttggggtttctgaggaaaccaccactggagttaagaggctctatcagatgcaggcg

SEQ ID NO: 330 - DNA, 259 bp, Glycine max
  Clone ID: 700874718H1
gcaggcgaatgggactcttctcttccctgctattaatgtcaatgactctgtcaccaagagcaagtttgacaacttgtatgggtgccgtcactctctccctgatggtctcatgagggctaccgatgttatgattgctggaaaggtggctgttgtggctggatatggtgatgttggcaagggttgtgctgctgcaatgaagcaggctggtgctcgtgtcatcgtgaccgagattgatcccatctgtgcccttcaggctctc

SEQ ID NO: 331 - DNA, 221 bp, Glycine max
  Clone ID: 700871673H1
ggtgcaagcaagtcgtttgagcagacctgctttctggatgttaagggatactgtcgtgaagagaggagccacgaagggcttggaatgggtggttctgttgtctaccaaaaattcgggaagactagtgactgtggttcacctagatcaactctaaagtgctggaatgaggaagatgaggaagagtagtttccttaagtgtctttattattctgtccttgtga

SEQ ID NO: 332 - DNA, 241 bp, Glycine max
  Clone ID: 700875156H1
gtactacaaagctactgcttgcaatcccacccatattgaaatttgctgaaatgctttccctcaatgttagatctgtgaattacaccaggggaagtttcatctttcccggtgctcagccctatccccatcgcaacttttctgaggaagttgctattcttgatggctactttggcaagcttagtgcaggaagcaatgcttatattttgggtggccaagacaaatcacagaactggcatgtcta

SEQ ID NO: 333 - DNA, 266 bp, Glycine max
  Clone ID: 700877188H1
tcaagtttgagggctgttaccgtggccatgctgatccttttcttgttaaggcaggtagtggagttgccaccttaggacttcctgattctcccggtgtccccaaagctgccacttttgaaacccttacagccccctacaatgacaccgaggccattgagaaactcttcgaggccaacaaaggagaaattgccgcagttttcctcgaacctgttgttggaaacgctggtttcattgttcctaagcctgattttcatagtttcttgcgc

SEQ ID NO: 334 - DNA, 253 bp, Glycine max
  Clone ID: 700873742H1
cagaagcctctttgggaatcaaatccgaagcatgatgcattgtgcgagcattgtctcggctccgtcctacgcgttcccttttctctctggctccgcttccactactccaactgccctctcgctcactacgcgcagttggaagccacctccgagcatggcaaaaggcccagtcagagccaccgtttctatagagatagagaccccggaggccaatcgtcccgaaacgtttctcagaggagtggacgaggcccag

SEQ ID NO: 335 - DNA, 245 bp, Glycine max
  Clone ID: 700873962H1
aattattagggaaatagctaggatgctggcaaatgattacaagaagcgtgtgatgattgttgacacctccaatgaaattgggggtgatggcgatataccacatgctggaataggcaatgctcgacgtatgcaagtccctaactctgatatgcaacataaggtattgatagaagcagttgaaaaccacatgccacaagtgattgtaattgatgaaattggtacaaaacttgaagcaatggctgcga

SEQ ID NO: 336 - DNA, 335 bp, Glycine max
  Clone ID: 700763883H1
ggtgtgtctctcaaggactccaccttgttcggtctttcattttcagaacctatcaaagctaacttcagctcttctgcattgaggtgtcagagggaattcgaacaaaagctctgtgctgtgagggccgaaacagtggctacagcctctccagcagttaccaagtctacaccagaagggaagaaaacattgaggaagggcagtgttgtgataactggggcttcatctggactaggcctggccactgctaaggctttggctgagacgggaaaatggcatgtaataatggcctgcagggattacctcaaagctgcaagagctgcaaaatccgctggcat

SEQ ID NO: 337 - DNA, 239 bp, Glycine max
  Clone ID: 700873873H1
caaaaaaatggctttggaaactctcaactcaccaacaacaaccgccccatctttccccttcgacgacccaactattccatgggccaaaagaaaacgttcaaagcgttgttcacgcgaccacccttcggaggaagagtacctcgctctctgcctcatcatgctcgctcgcggcggcaccacccgccgcgtcagcactccaccgccgcaaccgactccagatccttccaccaagctcagtt

SEQ ID NO: 338 - DNA, 257 bp, Glycine max
  Clone ID: 700877254H1
aaaagcagcattcgtctggatggactattcaacattatctcatatgatttggtgccaaagctacagaatatgcttatgacacatgactttaaggttgtgattgctgatgagtcgcattttctgaaaatgccaggcaaagaggacaactgcttctcttcctgtcataaagaaagctcaatatgcattattgcttagtggaacacctgctttatcacgaccaattgaattattcaagcaggtaactttctttttctgtc

SEQ ID NO: 339 - DNA, 246 bp, Glycine max
  Clone ID: 700876296H1
cggcttgcagcctaggcaggtggcgatttggtttcagaaccgccgcgcgcgctggaagaccaagcagatggaaaaggactatgattccctgcaggctagttacaatgatctcaaggctaactatgcaaccttctcagggaaaaggataaactcaaagctgaggtggcaaggctcactgagaaggtgcttggaagagagaaaaatgagagtcacttggaacaggctgaaaccaacggattgcaggag

SEQ ID NO: 340 - DNA, 258 bp, Glycine max
  Clone ID: 700870516H1
agcattagcaaaagcaagaagaactagtctaagcagaaatggcctcttcagtgatggcatctgtggccctcaaacctgcccctttcactgttgagaagtcctcagttagaggccttccctccctctcaaggaactcctctcattcagagttgtggccagtggtggcaagaagatcaagactgacaagccttatggaattaatggtggcatggctttgagggaaggagttgatgcatctggcaggaaaggaaagggaaa

SEQ ID NO: 341 - DNA, 262 bp, Glycine max
  Clone ID: 700870518H1
agcctattccaggactctacgcgagcggagaagtcgccggtggtgttcacggagcaaaccgattaggaggatcctcccttctcggatgcgtcgtctacggtcgtgttgccggtgacgaggctgcctcttaccttctcaagcgctctcttccggtcagatcgcaggagagcgtttgggtcaggtcgccaaccatctcgagactaagattcggattgacccctctaccaacaaggctgtcattgagttcagctgggatggtcag

SEQ ID NO: 342 - DNA, 259 bp, Glycine max
  Clone ID: 700870520H1
cagagcaagacatacttggaagtgaagggaactggaactgctaatcagtgcccaaccattgaaggtggagtggactcatttgccttcaaggcagggaaatacaaggcccagaagttgtgcctggaaccaacttccttcaggtgaaggcagagggtgtggccaagaatgccccgctcgaatttcagaacaccaagctcatgactcgtctgacctacaccctggacgagatcgagggtcccttcgaggtttcatccgatgg

SEQ ID NO: 343 - DNA, 253 bp, Glycine max
  Clone ID: 700870526H1
ctcggcaaaaacggctgcctcgtggagggcgtcctccacctccccggcaacccccccgtcaagctcgattcccaagatctcctccagattggggacaaggagttctactttctcctgcccgttcgcagcatccttttgggcccgtcggcccgaggcattaccctaaccacgccgcacccgggcccgtcgtgccgcactataataattaccatttgggccccggcccggtgaagaaggcgccgcgacgggagta

SEQ ID NO: 344 - DNA, 250 bp, Glycine max
  Clone ID: 700870527H1
ttcaggaatgactaggtacggcatgtaggtagggtagggaaggttagttcctcatgaagagagttcatgacattgtgctttgtcccaagcttttaggattaagtactgagtagggaaggttagctcctcatgagagagttcatgacattgtgctttgccccaagcttttaggattaagtactgagttagattattatcggttgttgtccattaagttggtgagaatcaacttatctcacatcattgtgta

SEQ ID NO: 345 - DNA, 258 bp, Glycine max
  Clone ID: 700870535H1
gcttttgctaaatgcagttcgcgggatagatgttgaaagacccccggtttggctcatgaggcaagcagggaggtacatgaagagttaccaaaccatctgtgagaaatatccttcattccgtgaaagatctgaaaatgtgatctcgtggtggaaatttctctgcaaccgtggcatgttttcaagcctgatggagtgattttattctcagacattcttaccccactttctggaatgaatataccctttgatattgtgaag

SEQ ID NO: 346 - DNA, 171 bp, Glycine max
  Clone ID: 700870559H1
gttttggatcacccaaaggtttcaaatgctgcttcttgaagtcaaatcagttcaccacttatgtatgtagattgccagaattctgattcttgtttataggcttgcagtgaaagtatctctcgttagtcattgtaaagttatcaattatcaataattaaagtttaagcattc

SEQ ID NO: 347 - DNA, 243 bp, Glycine max
  Clone ID: 700870562H1
gggcctggctatggtgcatctacaggttccacttatgatgcacaaaggggtgctacttatgacactcagaggttgactggttccaatgcatttagaggatctgcttatgattccaagagaggttcgggtatgatatgcagagagcacctgcttatgatgcacctagagctgctggctatgatgcacagtcaagaggggttgctggtcctcatggacatgctcggccaatgaacaatatgcctt

SEQ ID NO: 348 - DNA, 245 bp, Glycine max
  Clone ID: 700870563H1
ggaaaaccatatggttaccataacatgatcttcagttggatagacactttaaatgaaaactatccaccccccttggatgctaatgtggttgcttgcgttatgacaatttggagtcaacttcaacctgatatgcagcaaatatgtggaatgaagccttgaacaaacgacttggaactaaaggacttgacctttcagaagttttagtagaagttgaaaagcgtggatcatcttttgatgaactactg

SEQ ID NO: 349 - DNA, 249 bp, Glycine max
  Clone ID: 700870564H1
gcagctgctaacaacttgaaacgccttgctgaagaatttggtcctgagtgggctatgcagcacataattcctcaggttttggagatgaacaacaacccacactatttgtatcggatgactattcttcgtgctatctctctgcttgctcctgtgatgggccctgaaatcacttgttcaaacttgttaccagttgttgttgctgcatcaaaagacagagtgcccaacataaagttcaatgtggcaaaggta

SEQ ID NO: 350 - DNA, 243 bp, Glycine max
  Clone ID: 700870585H1
ggtggatgagcaagggcttcagttcagtccccgcaaggtcaccatttcaaccagcgggcttgttccacagcttaaacgtttcctccatgaatcaaactgtgcattagctgttagtttgaatgcactactgatgaggtaagaaactggatcatgcctataaatcgaaagtacaagctggagttgcttcttcagacacttcgagaggagctttgcttcaaaaagaactacaaagttctatttgag

SEQ ID NO: 351 - DNA, 241 bp, Glycine max
  Clone ID: 700870602H1
aacaccccccacgaagcaccaattatggctctgaatctttgtatctcacctaagtttaaatgggttccttccttagatagtgcttcctattctttgagaccttcacttgggtcttgttttggtaacataaacattgctagtgtgagtctaagtactactagaagtttgagtttgaggaggagtgggagtgttagtgtaagatctagtttagaaactgcggggcccacagtcacagtgggat

SEQ ID NO: 352 - DNA, 240 bp, Glycine max
  Clone ID: 700870607H1
cagctttgccttctcttgtgctcgacaaggactgggaccccattttcttggcctacggggctggcctcaagaaagccgatgctattatagtaaattcattccaggagctggaatcccgtgcggtgagctccttctcctcccacgccatttatccggttggacccatgctaaacccaaaccccaagtcccatttccaggatgataacgacagggacatcctcgactggctagacagtcagc

SEQ ID NO: 353 - DNA, 240 bp, Glycine max
  Clone ID: 700870647H1
cagagatgtatggaagtttagctggtcgtaaatggggatttgacagtagaaacgatggttgggatgtatagtaggggagtttttgttatagggtaggtcgttgccaacttttgtatttttcatctttgcgggtataaagtttagtcttctttgtccatacttgtaccccactgtgaatcttatttttagggggtttccaatagaatgaatgtctgcaagcaacatgtaaattggttccat

SEQ ID NO: 354 - DNA, 233 bp, Glycine max
  Clone ID: 700870650H1
ctagtttcaccagagtatcttaagattcctgactacaagagtacaaccagatcaccaagctcctttttcaagagagtgcccaagtcaagtgctataaaagttattgattttggcagcactacatatgaacgagaagatcagacttacattgtgtcaactcgtcattatagggcacctgaagttatccttggacttgggtggagctatccatgtgatatatggagtgtgggctg

SEQ ID NO: 355 - DNA, 233 bp, Glycine max
  Clone ID: 700870668H1
cacacacacacacagcttgggaagaaaatcgagaattttccgagaaaatccgaagaaggcgggccatggtttccccggaaaacagcaattggctgttcgattacccgctgatcgacgacgttattcccgtcggcgacgcctccttttccgtctccgcctccgccttctcctggcccccacctcccgccaatgtcagtgttgaaattgatgcttcgcttggggattctgatggc

SEQ ID NO: 356 - DNA, 239 bp, Glycine max
  Clone ID: 700870679H1
gaaatctggtgcttttaaatgtgtcaaataacaagttacagtctcttccagagtctgttgggagttgcttctctttggaagaattacaagctaatgataatcttattgaagatcttccctcttctgtgtgcaatctctctcacttgaagtcactttgcttggataacaataatgtgaagcagatacccctgaatttattgaaagactgcaaagctcttcagaacatatcactgcatgct

SEQ ID NO: 357 - DNA, 230 bp, Glycine max
  Clone ID: 700870683H1
tcaggatttagatttggtattttccattcacactaataatgaggatggtactcctctaggaagttctctgccacctccttttcctggcccttgcacactgcgctttgctttggcacattatgcagatctcttgaatcccccacgcaagctgtgcttctctttcaggcttctttagtggctctggctgcacatacttcggaacccagtgaagcagatagattaacattcct

SEQ ID NO: 358 - DNA, 255 bp, Glycine max
  Clone ID: 700870722H1
ccatccttggctggcaaggatggggaagagagagccatggaggaggctgctgccatttttaaaactctcttccccatcctacggctggcaaggccgtgaagctgggcccatcagcccccgaagtcgggagggtcagcatgaggaagaccgtcaccaagcaggcctcctccggaagcccatggtacggcccagaccgcgtcaagtacttgggcccattctctggcgagcccccgtcctacctcactggcgagttcc

SEQ ID NO: 359 - DNA, 256 bp, Glycine max
  Clone ID: 700870725H1
aggacacagcacttccttcacctgaatggtcctcagatcacattgctctcttagctgagtttcgctgctgcaagaataaatctaggcgttgacagttaaggtcactttcagtgatacataaagaaaaagtctgaaagaagcatttggttggtaagttttttgtaaaaatggtagatcatgcctgtctttttcaggtatctccatgtggagtcattgcaatgatctgctatgtatcatgtcacctttatctcagaga

SEQ ID NO: 360 - DNA, 258 bp, Glycine max
  Clone ID: 700870729H1
ctcttccagaagcagctgccgaagatgcctcgggagtatatcacccgcttggtgctcgacaagaaccacatcagcatggcaatcgtcaagaaggggtggcgcgtggtgggcgggatttgttatcggccgttcgagtcgaggggctttgcggagattgtcttttgcgctgtcgatagctcggagcagatcaagggatacggttcgcatctgatgaactcgctgaaagaccacgtcaggaaggctcatcccacgataaat

SEQ ID NO: 361 - DNA, 252 bp, Glycine max
  Clone ID: 700870742H1
cttaggacttcaccacaatggcttggtcctctaattgaagtgattagattctctaccaagtcaattgagagggatattaactcagtcaatgacaaccctttgattgatgtgtcaaggaacaaggcacttcatggtggtaacttccaaggaactcctattggagtctccatggataatacacgtttggctcttgcttcaattggtaaactcatgtttgctcaattctctgagcttgtcaatgattattacaac

SEQ ID NO: 362 - DNA, 249 bp, Glycine max
  Clone ID: 700870753H1
caaaactttgtccaccccatcatttgtcttctcaattctcatcactaacacacaagtgtgcgttgtagatttctcagtttgcaacatatggcttccatcatcatgtcatttgctccagcaactggtagagtctttgcagccacagcagcaaagggtgctggtggaagcaaagagaagggtcttcttgattggataattggaggattgcagaaggaagaccagctggtagagactgatcctatcctcaag

SEQ ID NO: 363 - DNA, 243 bp, Glycine max
  unsure at all n locations
  Clone ID: 700870756H1
cggttnctcgcctagctagctccagaaaattaggatctgcttcagatctagtgtttccctgtcccaaatcacgagtccattgagtttgattntgtggatgaaaagcatagatagggcttttgcaaaactctccaatgtttcttgaaattatatgaccatgcgtcgantnggatgctgcactccttctccgtcgtgttcctctactggttctacgttttctcatgaactccctcttaaatccgt

SEQ ID NO: 364 - DNA, 252 bp, Glycine max
  Clone ID: 700870761H1
agcgttcaatatctgatgttagattcatggttatattatcattgtatcaactatattgtgcccttctttttttatttgatttggcaaacacggctacttttctccaaataagatggatcatttgtattgccggctttgtgcacaattatctacttgtaagaagtccaatttcgggcaacaacgtttgtaatgcagaaataggtcattagcattgtaaatctccaggcgataaatggaatatcaaatggaaga

SEQ ID NO: 365 - DNA, 252 bp, Glycine max
  Clone ID: 700870763H1
gaaaagcacatggatcatggcggcaacggaatctaacagaatcaactaatgtacatgaggtgcatgatggactggaccatgatttaaactctgaaccaacagagcatcatcatgatcagaaggctgaagtaagctttgtgaaaggacaaacaaagcattttaatgactctggtgatattgatggttcatacaattctaacagcaataatgcagctgctttgggctcagctcctgttattaaagattattcag

SEQ ID NO: 366 - DNA, 250 bp, Glycine max
  Clone ID: 700870778H1
gcctgcgaccccagttacaccaccaccagcagaacccaaaccacagccagtctctactccttcaccaaaggtgagcaccaagttttctgatgtgttggcgttcagtgggccagcacctgagaggatcaatggaaggttggccatgattgggtttgtgggtgcaatggcagtggaagtagccaaagggcaaggtgtgtttgaacaaatatccaatggtggtatcccatggttcttgggaacaagtgtggtc

SEQ ID NO: 367 - DNA, 245 bp, Glycine max
  Clone ID: 700870785H1
aaaagagaaaattgaacttacactgaaaatgagaggacagagggcaggacaccacttcagttttgcttgtttggacaatgatattattgagtaggtaccctgattggcaagcacgcgcaagggaggaagtctcacaagtttttggcaaccaaaaaccgacttttgatggactgaatcaattaaagattgttactatgattttgtatgaggttcttagattataccctccaggagttggtgttcct

SEQ ID NO: 368 - DNA, 260 bp, Glycine max
  Clone ID: 700870805H1
gtgcggtaggctcttccgagacccgaagcagccatggggatcgatctcaaggccggaggtaagagcaaaaagaccaaaagaacagcacccaagtccaatgatatctatctcaagctcttggtcaagctttatcgcttccttgttcggagaactggcagcaacttcaatgctgttatacttaagagattgttcatgagcaaggttaacaaacccccattgtctttgtcaaggttgattaagtatacgaaggggaaggtttg

SEQ ID NO: 369 - DNA, 198 bp, Glycine max
  Clone ID: 700870807H1
gttgatccagctaagttaaatccatcaatcgtacatgccaaaagtttggagcaacttctttggttgaagaccaaaatcacattgtaatttgccaatagatgtgaaaaattcttttaaagtttaatgctaagatgatgtacaagtccttttgagtactttcaagttgtttttggctatctaattagattggttgatcct

SEQ ID NO: 370 - DNA, 262 bp, Glycine max
  Clone ID: 700870808H1
taaagattcaacaatggcctctgcttctgctactcttctcaagtcatctcctgttcttgacaagtgcgagtgggtcaaaggccagacccttcgccaacctctcgtgagatgtaacccttcctcagcatcagctctcaccatcaaagctgcttcctatgctgacgagctcgtcaaaaccgccaaaacagtggcctcaccggggcgtggtattttggcgatggatgagtcaaatgcaacctgcgggaagcgtttggcatctatt

SEQ ID NO: 371 - DNA, 262 bp, Glycine max
  Clone ID: 700870810H1
gtttagttatctactcttttctgcatgtttgttctctcaacgactcctccgcgaaagagtattattcaatattttggttgggttgaatcccggggttgaagcgttgcagacatcacggctattctaagagtgtctcgctccctcattcatgtccgatctgtacgacggaggacgggtagttgcgtaactgccgttaacccttcgccgcacggtgggcgtggtgctttgccttctgaaggtggtagcccttcagacttgctct

SEQ ID NO: 372 - DNA, 267 bp, Glycine max
  Clone ID: 700870814H1
cgcggcttcaaccttgtagttattctctttcttcttttttagctatccctctcttgaaaaatctagatctcgttcttccttgatctacgttacgcttttagtgaccggatctgtatggatctgaaccagatctacacgccgatggtggttttggcctggtctttcatagatctgatgcatggaggctcagatctactgtacagaggtgtgcgattcatgttcgtctctcttttggaatctgtttcgtagaaagtcgtttggtcttcc

SEQ ID NO: 373 - DNA, 258 bp, Glycine max
  Clone ID: 700870817H1
gtgtggtgcaacgcagtcctttttctatttgtatgtttgtatgagactgagaaagatagagagatagtgtgtgcagaagatgtggctattcggcagaaaaggggcttctgggttttcatcatcatccactgcagagcaagtcactgaaggaattgatggaactggtttcactgccattgtcacaggggcatccagtggtattggcactgagactacgcgtgttcttgctttgcgtggtgtccatgtgattatgggtgt

SEQ ID NO: 374 - DNA, 258 bp, Glycine max
  Clone ID: 700870823H1
ctaaccccttgttcctttcactggttcttagaactactaggaccttgccaccaccatggctgccaaaaaggcatgtgagacattctcaaagtcattgattgaggaagtgaatagatggggttgcttgaagcagacaggggtgagtctcaggtacatgatggaattcgggtccaaacccactaacaagaatttgctgatctctgcccagtttcttcacaaggaacttgccatcagaattgccagaagggccgttgaact

SEQ ID NO: 375 - DNA, 259 bp, Glycine max
  Clone ID: 700870825H1
tttgcaactatcaaccatcttcacttccaggcttattatttggctctgcccttcccaattgagaaggcccccactaagagaattgcaagtgtaaatggtggggtgaagatatctgaactgttgaagtatccggttagaggctttgtctttgagggcggcgaaatgctggaagatctatcaaacgttgtttcagatgcatgtatatgtcttcagaacaacaacatacctttcaatgttcttatctctgactgtggaaagc

SEQ ID NO: 376 - DNA, 259 bp, Glycine max
  Clone ID: 700870826H1
ctagcctctcgctcagctgcatactacgagcaaggtgcccgtttcgccaaatggcgtactgttgtgagcatccccaacggtccctctgctctggcagttaaggaagcagcctggggtctggctcgctatgctgcaattgctcaggacaatgggttggtcccaattgtggagccagagatcttgcttgatggggagcatggtattgatagaacttttgaagtagcccaaaaggtctgggcagaggttttcttctaccttg

SEQ ID NO: 377 - DNA, 240 bp, Glycine max
  Clone ID: 700870827H1
ctgatccagcagcgggttccgtgttttcccctacgcacaaatcagctgttctcaatcagtttcaacagctccaaagtatgttatcacctataaatactaacttgctatctcctaagaatgttgagcatcctcttttacaggcttcctttggtgtatctccttcgggtaggatgtcaccaagaagtgttgaaccaatctctccaatgagctctcgcatatcggcatttgctcagcgcgaaa

SEQ ID NO: 378 - DNA, 262 bp, Glycine max
  Clone ID: 700870828H1
tcacagtgccgatgctcaacgcacggacttgatgaccatcacccgcttcgtgctgaaccaacaatccaaccaccctgagtctcgtggcgatttctcaatcttgctcagtcacattgttctcggttgcaagttcctctgctctgctgttaacaaggcgggtcttgctaagcttattggacttgcaggagagacaaatgttcagggcgaagagcaaaagaaactggatgtcctttccaatgatgtctttatcaaggctttggtc

SEQ ID NO: 379 - DNA, 266 bp, Glycine max
  Clone ID: 700870829H1
cctcgggcgtgctctcaacccttttaccctcaaaacgccccagtccaaccactcctacatccaaaatgagcgccggtttcgacccagcaaaactagccaagcttcaagctaacaatgcaaagctcgccggtgcccctcgaaagaaggtcgtccgaaaacctggtgccgctcagggagatgaccgtaaactacaaacggcgctgaagaagctgaacgtccagccgatcaccggcgtggaggaggttaacatgttcaaggaggatgga

SEQ ID NO: 380 - DNA, 254 bp, Glycine max
  Clone ID: 700870837H1
gtgtgaaggagcatgctgtgattgagtcaaagcctgaccattttttggatgatctccggttaaataatccttggcctgaactcaagagatttgcagatgacattgacttgaatgtgcaagatcctgtagctcataaacacataccatatgttgtcattcttgtcaagatggctgatgagtgggccaaaagccatggaggaaggctcccatcaaccagagaagaaaaaaaggagttcaaggagcttcttaaggct

SEQ ID NO: 381 - DNA, 255 bp, Glycine max
  Clone ID: 700870839H1
ggccttccttaccgtgatgagaccgatgataaagttacaattgaaagtgcggaagcaactctcaagtataatgtggcaattaagtgcgcaactattactccagatgaagctcgtgtgaaggagtttggtctgaagtcaatgtggaagagtccaaatgggacaattaggaacattttgaatggaactgtcttcagagaaccaattctttgcaaaaacattccccgccttgttcctggttggacaaaggcaatatgc

SEQ ID NO: 382 - DNA, 255 bp, Glycine max
  Clone ID: 700870842H1
gtgcatcactggtttgttggttaatagaatttgttttcccttttataatctgttgactttgtttcaagcaacatggttgatagtcttccttctttcaggatctgctccactcaccgctgttcagttgctttgggtcaacttgatcatggacactcttggtgcattagccctggctactgaacctcctaacgatggacttttgaaaagacccccagttgcaaggggagcaaactttatcaccaaacctatgtggag

SEQ ID NO: 383 - DNA, 253 bp, Glycine max
  Clone ID: 700870855H1
atttaaatttccttcctgctgtgttgcaaaaataaaatatctaggagactacaagctaaaagtataattaaatgttaactgtttgatcaaattagtttgtttatatagttttgaaaagtattacagtgggttgagcagagcagatatttctacattgtgagatttttatagtatatgatggaattgtatgaatagaggctggtgtatgtcctgccatgttttcttctttcaggcagagatacttggagttgat

SEQ ID NO: 384 - DNA, 255 bp, Glycine max
  Clone ID: 700870857H1
aaacattgttcctggtattaaagtcgacaagggtttggtgccccttgcaggttccaacgacgagtcatggtgccaaggtttggatggtctagcctctcgctcagctgcatactacgagcaaggtgcccgtttcgccaaatggcgtactgttgtgagcatccccaacggtccctctgctctggcagttaaggaagcagcctggggtctggctcgctatgctgcaattgctcaggacaatgggttggtcccaattgt

SEQ ID NO: 385 - DNA, 253 bp, Glycine max
  Clone ID: 700870865H1
tggcagtacacaaatctgtcatatcttgctgctcgatcgttacgatgatggcgctcaattcattgtcaccactttcaattaattctcttcacgtatcttcaagctcaacttcaaagatttcgcattctcattccaagtcctttcccgtcgttgtgtgccaaattaactcaaacagagatcatcgtcaagaatccacaaaatggggaaaagtggtttcggccacgttggcggctgctgttattgccttcagctc

SEQ ID NO: 386 - DNA, 251 bp, Glycine max
  Clone ID: 700870868H1
gactaccgcatcaaggaagcgtcacagctgcttaagtacctatgggacaactacgtggagctcagcgaatgcactcacgtataccttatgggcacgaacaccggccatggcgcgatcatcaatctcctcaagaacaatcaagagacgttcttgaagaagtataacgatcgcgaagaagagaacaagctgttgaaggtcatctcgttcgttgaggacgtcccgcttatgtcgtgtaagtcgctcgtcaacgg

SEQ ID NO: 387 - DNA, 251 bp, Glycine max
  Clone ID: 700870871H1
gcgagaccgagtttgttgaaggctttacaaaatggatgaactcaaattccagccaagctgctaactcaaaatcttcgtctcacgaaattcgtcgaacctgggaagatgttgaaaaggtaatagaagagaatcaaaccaaaggaacatctgcatggttgacggctataggatatgtggtgttgggagttactatactggctcttcttgcagaacccttaatagcaagtgtccaaaaattctctgaagaagca

SEQ ID NO: 388 - DNA, 248 bp, Glycine max
  Clone ID: 700870883H1
gtccgagaatggaaacagacctaaacagagggtaacaaaacaagcaaacaccatggtgattaagtctgtgttgttcagcttcattttccccccgccaccttctctggtggtttgggggttgactgtgacaagcttcctgatactggctaatgctttcttgtcagaaattagagggaagcatttgaactattcaaagttttggaatgctaatccctctgcagaaaagcaggtcaagttgtctagcaaag

SEQ ID NO: 389 - DNA, 248 bp, Glycine max
  Clone ID: 700870886H1
gttgtgaaagcagagaagtgagatacactaagttatcctcataaatacactctaattaggtggcaagataagtgtctaaccttagtaacattgccacatattgtgttcattttggaattgtgccactaaaattctattcaattcatctatggctgcctcttcttatgctatgcaatcaatcctggcaaaccctttgatccgcatttccagcgggtctagggtgaaccaatttggcgttcctgctttgc

SEQ ID NO: 390 - DNA, 253 bp, Glycine max
  Clone ID: 700870892H1
gatcatcttatccgaagcatggttcgaccccacaagtatacaatacgacgtcgttgctcgtcaggaagtggaacgaggaaaaaaaaaatatcacttctagctcacacagaaagagaagagagtgtgtttatttgatttgtgatttgttggcccaagaaggcaaaacaatggttctttctgtatcccttatgcaactcgggtgtgtctctcttcttcacaataatccctcatcatcacctgtgacccttttgcc

SEQ ID NO: 391 - DNA, 71 bp, Glycine max
  unsure at all n locations
  Clone ID: 700870896H1
gtttttggtttcgtttccagcaaaacnctctcttccttccttctgattgattcccagcntcngcnattntg

SEQ ID NO: 392 - DNA, 239 bp, Glycine max
  Clone ID: 700870907H1
ggtctagttaccacttatgtcaactagcacatccacttctaaaagcatctggatatgggagcatagtgtttatatcctccattgcaggtctgaaagctttgccttacagttctgtgtatgcatcctctaaaggagctatgaatcaattcactaagaacatagcattggaatgggcaaaggataatattcgcgcaaatgctgtggcaccggggatgttaagactgtacttctggattcta

SEQ ID NO: 393 - DNA, 240 bp, Glycine max
  Clone ID: 700870911H1
aacaccccccacgaagcaccaattatggctctgaatctttgtatctcacctaagtttaaatgggttccttccttagatagtgcttcctattctttgagaccttcacttgggtcttgttttggtaacataaacattgctagtgtgagtctaagtactactagaagtttgagtttgaggaggagtgggagtgttagtgtaagatctagtttagaaatgcggggcccacagtcacagtgggat

SEQ ID NO: 394 - DNA, 93 bp, Glycine max
  Clone ID: 700870919H1
gttgattacagtattttatggtattagctgctggacataccttcgaaggtacattatattggctcagtaataaaattggtttagttcccgttt

SEQ ID NO: 395 - DNA, 240 bp, Glycine max
  Clone ID: 700870962H1
cttgggaggagttcaaaagacacagactaggcgctgcccaaaattgctctgccactcttaacggcaaccacaagctcactgatgctgttcttcctcccacgaaagactggaggaaagaaggaatagtgagtgatgttaaagatcaaggcagctgcggatcatgctggacattcagcacaactggggctttagaagcagcctatgcacaagcattgggaagagtatctctctttctgagca

SEQ ID NO: 396 - DNA, 238 bp, Glycine max
  Clone ID: 700870978H1
tctcatcacccaaagcagcttctttattcccaccgctcttctctacgctttctcaccaaatttaaaaccccctccggagcgaattctcggcggctggttccgaaagccacggcggctcccggggccaagaagacagaaaagccgcacgagagagtccagcgagtccacagcgtggaggagttcgagtcggcgctcgaatccgccaaagacagcttgtggtggtggaatacgctgccag

SEQ ID NO: 397 - DNA, 231 bp, Glycine max
  Clone ID: 700870990H1
gtttctgtctctgtgtttgcggctgaggattccgaacgagcgaccttcttcgtttctcgcaaagtttaagtcatcatgggtaaggaaaagactcacatcaacattgtcgtcattggacatgtcgactctgggaagtcaactaccactggtcatttgatctacaagcttggaggtattgacaagcgtgtgattgagaggttcgagaggaggctgctgagatgaacaagaggt

SEQ ID NO: 398 - DNA, 254 bp, Glycine max
  Clone ID: 700871003H1
ctttaattgaagctcatgtggatgttaagaccactgataattatacattgaggatgttctgcattggctttactaagaggcgtagtaaccaggtgaagaggacctgttatgcacaatcgagccaaatcagacagattcgcaggaagatgagagagataatggtcaaccaagcaacagcatgtgatttgaaagaattggtgcgcaagttcatccccgaaatgattggaaaggagattgagaaggcaacatctagc

SEQ ID NO: 399 - DNA, 255 bp, Glycine max
  Clone ID: 700871005H1
gccatttcgagaggggacgaacgagacagcaacatatcatctccgaccaaatcccgttcattcaggcagtgttcatttctctgcccctcacttacttattcactcccaactccaaaaccatcatcgtcaatatggcacaagcacacgctctattttctcctttcaatcctcgccttcttccttcttcctcccccattctccgacgccgtttcttttcccttccaatttctccgttaactcaccggaccgtgattg

SEQ ID NO: 400 - DNA, 256 bp, Glycine max
  Clone ID: 700871008H1
ggaaacggagtcactattgcctaagccaacttatggtggcataaagaggtacttgagaaggaggcgctaccaacgcctcgacggcgatggcggtgccaccgctaccaccggtggaaagaaaacaaagatgattaggtcaagaagaagaagcccacgtaggcaatggaggatcaaggcaattccaaaattgacatggatggttaggtcacccttgaagatgatggcaaagctaaaaaatgcttacacaaacttcatg

SEQ ID NO: 401 - DNA, 256 bp, Glycine max
  Clone ID: 700871009H1
ttataatgctcgttgtctggaagaactgaagctatctctagagagttctggggcttgtaaggttgcattcaatccaattacattgaatactatgaagaagatactttttagaatatgccaaatggagcattgtgatgtgactgctgagtatgttgatctaattgcaaaaactagtggaggtgacatccggcatgcaattacttctttacagtttttctgcttgaaaccatctacctgctatcgtggagcattaaaa

SEQ ID NO: 402 - DNA, 252 bp, Glycine max
  Clone ID: 700871018H1
gaacaccccttcatggtacactgctggagagttggagtacttcacagacactaccacactcttcgtagttgagctctttttcattggttgggccgagggtagaaggtgggctgatatcatcaagccaggctgtgtcaacactgaccctatctttcccaacaacaagctcacaggaactgatgttgggtacccaggtgggctttggtttgatccacttggctggggaagtggttctcctgagaagatcaagga

SEQ ID NO: 403 - DNA, 252 bp, Glycine max
  Clone ID: 700871020H1
gaagttgtcagtatcttattgtcctctatccttggtatccctgatggtttcaactctattcaactcctttgggtcaacctcgtaactgatggtttcccagccactgctctctctttcaaccctcctgacccacaaatcatgaagaagcctcccaggaaacatgatgagcctattattacttcatgggtgttcgtccgttatcttataattggaacatacgttggtctcgccaccgtcggaatattcacatac

SEQ ID NO: 404 - DNA, 262 bp, Glycine max
  Clone ID: 700871031H1
ctttagatttatccaattatctttctatagaataatacaattttctggattgagattatgtacggtctcctgaaaattttagatgaactttataaaacatatatttgccttgtctaggaaggatagaggagaggttgatcttgtttttggttgattcagtggtaaattctctccaaggtgcacgtgcatctcagcaactgaatcattcatctcagttgataaaagaaaaacttcactgtaacaaagatgtacaaaaggtcta

SEQ ID NO: 405 - DNA, 251 bp, Glycine max
  Clone ID: 700871034H1
caacaaaaaccctttttgtgattaactttgacccaatccgtactagagttcgtgatatagaaaaacactttgaaccttatgggaatgttcttcatgttcgaattcggcggaactttgcatttgtgcagtttgagacacaagaagatgctaccaaagctatagagtgtacaaatatgagtaagatcctggacagggtggtgtctgtggagtatgctctgagggatgatggtgagaggggggacaattatgac

SEQ ID NO: 406 - DNA, 249 bp, Glycine max
  Clone ID: 700871035H1
cagtgctatgataagtatatgcttgcttctctgaatgcctctgcaagaaatattggaaagcgtgaatggggaaatggtggtccatttggtagtgaaagtttgatgcaaaatcctgagcatactgattttttcagaaatgacggtggctcttgggacacaccatatggtaaattttttcttgaatggtactcagatatgctgctgctgcatggggagaggatttgtagggaagctgaaactatatttagg

SEQ ID NO: 407 - DNA, 254 bp, Glycine max
  Clone ID: 700871045H1
gttgcagatggccaggtaacaacaagtgctgcgtctgaggatggagaactcagtccacaagaagcgaggacaatcaaagcaatagctgatgcaagttcatatcccctttctattattctggttggagttggtgatggaccttgggaagacatgaagaagtttgatgacaagataccagctcgcgactttgacaattttcagtttgttaacttcactgacataatggctaagaaatcaagcccctcagaaaaaga

SEQ ID NO: 408 - DNA, 259 bp, Glycine max
  Clone ID: 700871047H1
cttcatcacttcattcaacatttctccccttagcttgtttcaccaatggctgctgcggttagtgctgcagtctcttttccatccaccaagtctacctctcttccaagcaggacctccctcattgccccagagagagttgtgttcaaaaaggcttcattgcaaaacagagatgtttctagcagtggacgggtagtttccatcagagctcaagtcaccactgaggcaccagccaaggttgaaaaagagtccaagaaacagg

SEQ ID NO: 409 - DNA, 249 bp, Glycine max
  Clone ID: 700871050H1
ttttgctggtgatgtcttgtcagtttgctactgtaatctgacaatatgcctttcaatcatagctacatccttcggccaatctcagttgcaacctttgtttcctttcatggaggctttgcctgatgaaatgcatgttgctgttccctttcttcttagttttatcatgggtgatccagtgaagatggcatcagtcagtattgaaaataagcttcctcctgccaaaaaaattgaacaattgtcatacaacct

SEQ ID NO: 410 - DNA, 255 bp, Glycine max
  Clone ID: 700871062H1
acagccttgaacttgaactatcgtgtcttcttggctttctctgttcaggatcaacatggatattgtatcacgagctttgctatttccgttggctatacttgtgctcatattaagcacaccttgctcaggtgcttttgggaatcgtggaactaatgtgaaatcagctatttttctgtcccccaagtttgaacttggaccaggatcggtagccaataaatatgattatgacgctgattttccaagaggtcatatagc

SEQ ID NO: 411 - DNA, 247 bp, Glycine max
  Clone ID: 700871066H1
aaatagattaattttgagatagccaaatgaaaatgggcatcgtccaaagactgtgttctagttggagtaacgttttcagattgggcaacaggaacagttacagttcttttaataaatctgttgatcccacaaacccatcatgttccagttcttccttcctcacgcatggaatccacgtgtttcaatgccccgatgcggttggaattgtagccaatctatcggattgcattgcttctcggggtggcaa

SEQ ID NO: 412 - DNA, 247 bp, Glycine max
  Clone ID: 700871075H1
ggacgatcctcctatacgacaccgcttcttcttcctagggtttctctgaatcaattcccatggccatcagaggcgtcgatttcaagtggtacgatgggtttttcttgtccatgctcgccaccagtgtagttatagtggcaattaattggaagcggtatcattcttgtacgtatccgttgcatatatggattgtggtcgactacactactgtgtttgttttccggctcttgatgtttgttgataacgg

SEQ ID NO: 413 - DNA, 255 bp, Glycine max
  Clone ID: 700871079H1
gaaatttggctgatgacaccatcaattttgaggcttttccccacaagctggtgcagtttggagagattcaggaaaaagttgtattgaaattttcacaagaggaatttcttacagcttggtcaactcaggtgcgtcctgcaacaactctgttggctgatgggtgtccatatttgtatgctatggtgcatgatagttcagtgtctacaataccaggtgattttgtcattggtgttaagttgacaaccataaacaata

SEQ ID NO: 414 - DNA, 246 bp, Glycine max
  Clone ID: 700871087H1
ctgaagagtgcgggggtggagggggtaatgatggacgtgtggtggggtttggtggagagagagaagcctggggagtataattggggagggtacgttgaactcatggagatggcgaagaagcatggcctgaaggtgcaggccgttatgtcatttcaccaatgtggcggtaacgtcggagactcttgcactattcctttacccaaatgggttgtggaggagattgataatgaccccgatcttgcatat

SEQ ID NO: 415 - DNA, 247 bp, Glycine max
  Clone ID: 700871088H1
gaaaatcaatttggatttcaatgcctctggctcaccgttgaattgaattttgatggctcaacaaccgtcaccatcgtcatcgcctccacggcggaaaactcctccgccaccgcagtacgtggaggtgaattgcagaagctccggcaagacacggcggtttgcggctggcaccgacgcggggtttgcggtggcgctgatcaatcggaagctgaagggaacgctggtggctgcgtcgcacatagaagca

SEQ ID NO: 416 - DNA, 246 bp, Glycine max
  Clone ID: 700871090H1
gggaaaaggaaaatgaagaggggttggctaaggaaactggattctattgcttgttttgttcataatcatgggtttgatgaaactaaatgcaaagactgtgattcagtggataggagtgggatacaaagagttcgagttcattcgtataggaagcggtttaaggagctttcctccctttacaccgaacaggagtttaaagcacataaaggtgttattttgacaatgaagttcagtcttgatggaaaa

SEQ ID NO: 417 - DNA, 252 bp, Glycine max
  Clone ID: 700871094H1
caaggttgagagtcctaacgtgaagtacacagagactgagattcagtccgtgtacaactatgaaaccactgaacttgttcacgagaacaataatggcacttatcagtgggttgtcaagcccaaaactgtcaaatatgaatttaaaaccaacacccatgtccctaaactaggggtaatgcttgtggggtgggggggaaacaatggctcaaccctcactggtggtgttattgctaaccgagagggtatttcatg

SEQ ID NO: 418 - DNA, 257 bp, Glycine max
  Clone ID: 700871104H1
ggaagaggttcttccctttcatgtggtgtcctttgaaggccacttaaccctaattcgacgacttctcatccattagatgttgcattgcgtatatgttgcatctaagctacagtgtcagtgattcatatatttcttcatttgcttttaacagcaaaaggaatttaaagaagaaaagacttttaagacatttctaattttcatgtgctataatacatgagtcaaatggtttcaagtagtggtcattatagccattttgt

SEQ ID NO: 419 - DNA, 256 bp, Glycine max
  Clone ID: 700871106H1
gtgtgaaaagtccatgataaagaagcgatacatgcacctgacggaggagtttctgaaagagaacccgaacatgtgcgagtacatggcgccatcgctggacgtgagacaagacgtagtggtgatggaggtgccgaagctgggaaaacaagccgcaacgaaagcgattaaggagtggggtcaaccaaagtcaaagatcacacaccttgtgttctgcaccacttcaggcgtggacatgcccggagcagattaccagctc

SEQ ID NO: 420 - DNA, 255 bp, Glycine max
  Clone ID: 700871108H1
cccatttcgtttttcttcccaaatggccctttcttgctccaaagttttaagcttttatctctcgcccgttgtgggtggtggtgatgttccgaaaaagctcactttttcttcttttttgggtctttctaagggtgttggtggaagcaggagctcgagggtgtgtgctgcttcaaatgcacccgcaccactcgctggggtcatatttgaaccatttcaagagctcaagaaggattatcttgctgttccgattgcaca

SEQ ID NO: 421 - DNA, 254 bp, Glycine max
  Clone ID: 700871110H1
ggcctctttgggaggagatatctttggctatgaagagcattggttatgatcgaagtgcaaagaggtgtaaagagaaatgggagaacataaacaagtacttcaagaggataaaggagaagaacaagaggaaacctcaggattccaagacgtgtccttattatcaccaccttgaggctttgtacagtaagaagcctaagaaggtggtggatcatgggaacgagttgaagcctgaggagctgttaatgcatatcatg

SEQ ID NO: 422 - DNA, 259 bp, Glycine max
  Clone ID: 700871118H1
ggaggtgaaaacaggctctcacagagtgtggatactgagggttccagtgatggaagtgatggcaacacttcaggggctaatcaatcaagaaggaaaagaagccgtgagggaacaccaaccactgatggagaagggaaaactgagatacaaggcagtccaatttccaaagagactgcagcttctaataagatgttgggagttgtccctgccagtgttgcaggaacaatagttggacatgtagtttcttcaggtatgacca

SEQ ID NO: 423 - DNA, 256 bp, Glycine max
  Clone ID: 700871119H1
gcagatttcaatgttgcagcagctcaacaaggaataatttacattgatgaagttgacaaaataactaagaaggccgagagcttaaatatcagtcgggatgtttctggtgagggtgttcagcaggcattattgaaaatgctggaaggaactatagtaaatgttcctgagaaaggagctaggaagaatccacggggggataacattcagatcgacacaaaaaatattctttttatatgtggtggagcatttattgatc

SEQ ID NO: 424 - DNA, 254 bp, Glycine max
  Clone ID: 700871124H1
ttgtgaaagcagagaagtgagatacactaagttatcctcataaatacactctaattaggtggcaagataagtgtctaaccttagtaacattgccacatattgtgttcattttggaattgtgccactaaaattctattcaattcatctatggctgcctcttcttatgctatgcaatcaatcctggcaaaccctttgatccgcatttccagcgggtctagggtgaaccaatttggcgttcctgctttgcacatgag

SEQ ID NO: 425 - DNA, 254 bp, Glycine max
  Clone ID: 700871125H1
caagattgttgctgtagaagagaagaaagagattgaagagacccagcagaccgacaaggacagatggaagggtcttgcctatgatatctcagacgaccaacaggacatcacaagaggaaagggtttggttgactcccttttccaagctccacaggatgctggaactcactatgctgtcatgagctcctacgagtaccttagcactggacttcgccagtacttggacaacaacatggatggattttacattgctc

SEQ ID NO: 426 - DNA, 255 bp, Glycine max
  Clone ID: 700871131H1
gttctgaacttcaatatttggcgaatccggtgacaagccacgtgcaaagcgcggagaacacaaccaagatgtgaactctctggggctgatttcatcaaggaagactcatgaggctattgagatcctcaagctcatgtcctccactttcctggtcgccctttgccaagccattgacttgaggcatttggaggagaatttgaagaacacggtcaagaacgttgtgagtcaagttgctaagaggactctcaccacagg

SEQ ID NO: 427 - DNA, 251 bp, Glycine max
  Clone ID: 700871146H1
gtgtttttcatttcatcgtgcattcaatggccaccacagcagctctatccggaaccatggtgagcacctccttcatgaggaggcaacctatgaccaccacaagcctaaagacattccccaacgttggtgaagctctttttggtctgaaaagtggacgaggtggtcgtgtcacttgcatggcctcgtacaaggtgaagctcataaccccagaaggagaagtggagtttgaatgcccagatgatgttttcatt

SEQ ID NO: 428 - DNA, 249 bp, Glycine max
  Clone ID: 700871153H1
catgaaggcaattgatcttattcgtaaatggatggaggatgctggtttgagaacttgggtggaccaaatgggaaatgtacatggtcgagttgatggtgcaaatgaaaatgctgaagctttattgattggatctcacatggacactgttgttgatgctgggatgtttgatggatcactaggaattgtctctgcaatatctgccgtgaaggctatgcatgtcaatggaaagctgcaaaagctaaagcgccc

SEQ ID NO: 429 - DNA, 252 bp, Glycine max
  Clone ID: 700871163H1
aatatttttctcactgtctctccagagaacttgatagagagatggcagctgcaacatctggtgctgtgttaaatgggttgggatcttccttcttgagtggaggaaacaggagccaaacccttctggcctctgctattggaggcaaagttggtgctgctgttactgttaatcccagaagactcattgtggtagctgctgctgcaccaaagaagtcatggctccctggtgttagaggtggtggcaatctcgtcg

SEQ ID NO: 430 - DNA, 264 bp, Glycine max
  Clone ID: 700871166H1
gagaaattgagtttctgagataaccacttttctctttgattcatcaatggcaaccgcgaggaccgtgaaggatgtttcgcctcacgatttcgtgaaggcttacgcctcccatctcaagcgttccggcaagatggagcttcctgagtggactgatattgtaaaaacagcaaaatttaaggaattggctccatatgatcctgactggtattatgttagggctgcctcaatggcaagaaagatttatttgagaggcggtcttggtgt

SEQ ID NO: 431 - DNA, 261 bp, Glycine max
  Clone ID: 700871167H1
gatatcagcactcttcagaaccgaaaattccagctagaggtcttccttgatgagaatgttcaagaagtggatagtcttaattctagaattcgggaacttgaaggtcaattatccaaagaggatgaggagtgcaaaagaattacttcaagagtaaggaaatttgtaagagtgcacaatcatatgtcagagttacaagatgaactgaagagatcacaagtccgacttcaaaggtttggagatcagcttttctcagacatttct

SEQ ID NO: 432 - DNA, 256 bp, Glycine max
  Clone ID: 700871169H1
gacaatttatatgggtttttgaggatgccaagaacaagaatgttgagcatatattgatactttctggcgatcatctttaccgtatggactatatggactttgtacagagacatgttgacacaaatgccgatatcacagtttcatgtgtacccatggatgacagtcgggcatcagactatggactgatgaaaattgataaaacaggacggattatacagtttgcagaaaaacctaagggatcagatctaaaggcaat

SEQ ID NO: 433 - DNA, 247 bp, Glycine max
  Clone ID: 700871187H1
gttgacggcattgggaagaagcttgtgaactcaaaagatggacctccaacctttgagcagcccaagatgactctggagaagctcttgacgtatggtaacatgcttgtccaagaacaagagaatgtcaagagagtccaattggctgacaagtacttgaacgaggctgcacttggaaatgctaacgaggatgctattaacaggggaactttcttccaatcttgaattggaggcaaagcaaacttggcaa

SEQ ID NO: 434 - DNA, 234 bp, Glycine max
  Clone ID: 700871316H1
tgtgattttctcaagagaaactttaagcagatgtctaatgttttgtgggtggctcctgaggataaggcgagtttatggtcacaacttcattatgtttcgtgtaataatctggaaatgcaagaagcttatcttgtcaatctcgtaaatgtgttacgataattgtatttgcacagtccagaggaagctcgccaattgagaaggaaagctctctctcgtattgaatggctgcaaaaa

SEQ ID NO: 435 - DNA, 230 bp, Glycine max
  Clone ID: 700871337H1
ggtgaacttaagaaactggtggaggagggcaaagtgaggtatatagggttatctgaagccagctcagatacaataaggagagcgcacgcagttcatcccatcacagctgtgcaaatagagtggtctatatggactcgtgacattgaggaccagatagttactatctgcagggaacttggtattggaattgtatcatatagtcctcttggtcgtggtttctttggcggcaa

SEQ ID NO: 436 - DNA, 224 bp, Glycine max
  Clone ID: 700871384H1
gtgaagtcttttttcaatttgggagtgccatttgcttcattcttttgcccatcactgcatcccttgagaagggggagaagaatctgaatcaaactaaggtttgggaacttgtggacgactaatctatacttcgggaagttttgctaatacaagttgacatacaaacagtttctggggaatcagacgagaaaggatggccatggctttaatgtattcaaacatca

SEQ ID NO: 437 - DNA, 251 bp, Glycine max
  Clone ID: 700871413H1
cgttatcacttccaagctagccaactgcatacacaatgagaggagaatactgtatcgccggagcttccgtcttctcgttcatctcggtcgtgttgatggtctttgccatcatcggacaagtcaacccgacttcgcttcctaaatccatctatatggtcaagctcgatgtcgccgcctacggtgccggtctgcaaaacgccatgaaatccgcacctaacggtctctacatgaccaacggttccgctcccctg

SEQ ID NO: 438 - DNA, 249 bp, Glycine max
  Clone ID: 700871436H1
gcacgagcgcaacttcgtccccggattcgagtacctgtcgaggttccaatctcgctccctcgacgccaacgccagagaagaatccgttgcatggattctcaaggtacacgcgtattatggctttcagcctttgacggcgtacctcgccgtcaactatatggatcggtttttggattctagccagttgccggtgagctctcatttctcggcagctttttaaggatgtgttatttccgaaagttgaaaaac

SEQ ID NO: 439 - DNA, 250 bp, Glycine max
  Clone ID: 700871440H1
attcgcggttgttgaattctgagcagccaccgtgaaccggtctcacctcgttgactcattctccgtccacttgcgaaagagaagagatctgaaaccctaacctaaccctaacagaggtaatggattcagtgcctcgaagaagcagaggaggaggcgttttcgaaagcctctacaaggtcctcatgcgccgcaactccgtctacgtcaccttcatcatcgccggcgccttcctcggagagcgggctgtgga

SEQ ID NO: 440 - DNA, 249 bp, Glycine max
  Clone ID: 700871447H1
ggaaaacgtttcttattcaaaggaaaggaaaacacctaacaagcttggttggtaagttatctacaatctgcatcatggaaggtgttattctgagaagggtcattccttcggataacagttgcctcttcaatgctgttggctatgttatggatcatgacaaaaagaaagctgctgagttgagacaggttatagcagcaacagtagcaagtgatccacagaaatattgtgaagcatttcttgggaagccaa

SEQ ID NO: 441 - DNA, 228 bp, Glycine max
  Clone ID: 700871504H1
agcagggcaaccttaaagtctccgactttggactcagcgcggtgaaggaccagataggggtggacgggttgcttcacacgctgtgtgggacccctgcttacgtggcacccgagattctcgcgaagaagggttacgatggggcgaaggttgatgtttggtcatgtgggattatcctctttgttcttgtcgctgggtatcttccgtttaatgatcctaatttgatggtta

SEQ ID NO: 442 - DNA, 228 bp, Glycine max
  Clone ID: 700871505H1
cataaactttaaagtttatgcacatgggttctctactggaacaattgttggaattgttgctggggcatgtgtgattgtcatattgatgctctttgctctttggaagatgggtttcctttgtcagaaagatcaaacagaccaagaacttctaggtctgaaaacaggttatttcagtttaagacaaattaaagctgctactaataactttgacccagcaaataagatagg

SEQ ID NO: 443 - DNA, 228 bp, Glycine max
  Clone ID: 700871506H1
gaaagaacaagaaagtaggcagggaaagggatctctacaagaactcttcacatgcttgtgagacccttctgtccctgatggttgacaagaagcaacgtcgtaaaacagcaattctctcactgaagaaatccgggcctgagcttccggagctcctgacacaattttctgctggcattgccggtaccggccttgcagtcctgctatctgtgatgtgtaacctagcttgtg

SEQ ID NO: 444 - DNA, 230 bp, Glycine max
  Clone ID: 700871509H1
gttgaagccattgaggtgggttaccgtcattttgacactgctgcagtgtatggaacagaggaagccataggcctagccgtggccaaagccatagacaaaggccttataaagagtagagatgaagttttcatcacttcaaagccttggaacacagatgcacaccgtgaccttattgtcccagctcttaagaccacattaaagaagctggggacggagtatgtggatcttta

SEQ ID NO: 445 - DNA, 226 bp, Glycine max
  Clone ID: 700871521H1
agaggtttcaagaagtcaatgatcttgtttttgaagccattggctgtggtgaattggaggatgtcaatgttcaaagtgtcaaaaaagaagttgatgcagtcagcacaagcgaacaccctactgtggtggtggtggctggttcacaagaatgtgtggttctacagtaacaaggctcttgtattttgaacaaattcagaaaatctgcagtgttttaagaataattgct

SEQ ID NO: 446 - DNA, 227 bp, Glycine max
  Clone ID: 700871525H1
atttccatgaggtgagtgaatcgaaattgtgcttgaaacacaggaaagccacatccttgaggtgcactttcagaatttgattagtagagtgctttgctggaatgccatctggataccagtagcatttatgttgaagaagggtgccaatgtttgcggccagagctaaatgttgttcaaatgcaatttatattctgaaatgcatattgaaatgtatggttaaagatctt

SEQ ID NO: 447 - DNA, 229 bp, Glycine max
  Clone ID: 700871533H1
gaagaacaagtagttgagaactaagaaggagaagcaaatggcttcctcaatgatctcttccccagctgttaccactgtcaaccgtgccggtgccggcatggttgctccattcactggcctcaagtccatggctggcttccccaccagaaagaccaacaatgacattacctccattgctagcaacggtggaagagtgcaatgcatgcaggtgtgggcaccagttggcaag

SEQ ID NO: 448 - DNA, 223 bp, Glycine max
  Clone ID: 700871557H1
ctcaaatcctatctcgtatcaaaggaacaaaacaaccacccaactaaccctaattcaacttttccgatctgatcacttcgagtaaaaattccaaatgagtcgggcacaggatgcaaaccaatcattcttcccttttggaaatccttttaggatgatatcacctaaaagccctaaaatttcttcacagctgttgttaattctacatgcttttgaagcaactttg

SEQ ID NO: 449 - DNA, 221 bp, Glycine max
  Clone ID: 700871581H1
gtttggataagcttataatggaagcaatcactagcttgaaggagaatggtggttctaataagacagctattgcagcttttatagaggaccaatattgggcactgccaggcttaaaaagtatgttgtctgcaaaattaaagtttttgacagcaagtggaaaactgatcaaggtaaatcgcaagtatagaattgcacctatagcagcatattctgacagaaga

SEQ ID NO: 450 - DNA, 218 bp, Glycine max
  Clone ID: 700871585H1
caagtgggctgatgcagttgagaaaagccagaagagagctggccatgcttctgtttacacggttgcgcagtacaatgccccttttgaatatgacaatagggtcaatgagatatggttcttgtttgatattgaaaatgaactgcaaaccgtgtgacaaaataagctttcaacatgaatgcaatatgcatagtgcagactgaggtgtaaggacatcttga

SEQ ID NO: 451 - DNA, 237 bp, Glycine max
  unsure at all n locations
  Clone ID: 700871613H1
gtttttatttctctcttctctctgcatcgcttcaggttcttctacaaaagatgtctcgcgtgtatgttggtaactnggattcacgagtcaccgagagagatctcgaagacgaattccgtgttntcggagttattcggagtgtttgggttgcacgtagaccacctggttatgcttttattgactttgatgaccgcagagatgcacaggatgctatccgtgaattggatggcaagaatg

SEQ ID NO: 452 - DNA, 235 bp, Glycine max
  Clone ID: 700871630H1
ggaatacacaaacccaatacaatactacgatggacctgagaaatgtagctgatgattctgcagtagaatcttcaagtggtaccaggagagaaagggatggaggtttagttccagtatggtctccaccagcttccagttactcagaacaatttgtaggagatgaaaatggtataacaagcagttcatcttacttgcaaaggcatcctcaatctcaccaaatgctgaattggaagca

SEQ ID NO: 453 - DNA, 219 bp, Glycine max
  Clone ID: 700871712H1
tatatacacggtcaaggaatttactgccatcaatgctgttgcatagtctttggaatgggttcgtcttcttagatttgatgaaatagcttcttgaacgttgtggttctctagtaagcagagagtccaatgtgtaggtagaatttcaggcactagcatgcgggtttgtgctttggatcagcaattttcagaagtaaatgcatatgcatatagaacagtacc

SEQ ID NO: 454 - DNA, 220 bp, Glycine max
  Clone ID: 700871723H1
ctccttgtgacagttccaggacttggtcagtacatctctggtgccattctctttgaggaaactctctaccaatccacaactgatggcaggaagattgtcgacgtgctcctcgagcaaaacattgttcccggtattaaagtcgacaagggtttggtaccccttgctggttccaacgacgagtcatggtgccaaggtcttgatggtcttgcctctcgctcgg

SEQ ID NO: 455 - DNA, 218 bp, Glycine max
  Clone ID: 700871739H1
tttgaccccaagccaattaagggtgattggaatggtgctggtgctcacacaaactacagcaccaagtccatgagagaagatggtggctatgaagtgatcaaagcagcaattgacaagttggggaagaagcacaaggagcacattgctgcttatggagaaggcaacgaacgtcgtttgacaggacgccacgaaaccgctgacatcaacaccttcttatg

SEQ ID NO: 456 - DNA, 216 bp, Glycine max
  Clone ID: 700871780H1
gcagattttcgtcaagactttgacaggaaagaccatcaccttggaggtggaaagttctgatacaattgataatgtgaaagccaagattcaggataaggagggtattcccccagaccagcagaggcttatctttgccgggaagcagcttgaagatggaagaacccttgctgattataacatccagaaggaatctactttgcacttggtgttgcgact

SEQ ID NO: 457 - DNA, 213 bp, Glycine max
  Clone ID: 700871787H1
gaagaaaaaaaaaaactcaaacaccttcaagaacttgtatctttctttgttagtatttgttactacaattttacattcttttcatctctacatatttcattagtcatggcacctcaagcagtttccttcaagtccttcgccgttgctcttattgtggcgcttttcttctccgcctccgctctggacttagtttcggggcagtcgccggtgccg

SEQ ID NO: 458 - DNA, 249 bp, Glycine max
  Clone ID: 700871837H1
cacagccatgccactcaagacctccatgattcaattgctgctggtaactatcctgagtggaaactgtttgttcagacaatagatcctgagcacgaagacaaatttgactttgaccctcttgatgttactaagacttggcctgaggacattatacccttgcagcctgttggtcgcttggtcctgaataagaacatagataatttctttgctgagaatgaacaacttgcattttgccctgccattgtggtt

SEQ ID NO: 459 - DNA, 248 bp, Glycine max
  Clone ID: 700871838H1
gcggctgttggggcttaccttcatgtcctcttgaacattgggggttttcttactacagtggcatgcgtgggaagcagtgtttggttactctcgacacctccttttgaagagaggaaaagagtgactttgttgatggccgcatcactgtttcagggtgcctctattggacccttgatagatttggctattcaaatcgatccaagccttatctttagtgcatttgtgggaacatccttggcctttgcatg

SEQ ID NO: 460 - DNA, 126 bp, Glycine max
  Clone ID: 700871862H1
gctaaatattcttccttggtttcattttttttcctttctctttctgcaactgcaacttgaataggcaggctattttaaccagcatggccaggctcacgctgagaccagacaattcctgcttctttc

SEQ ID NO: 461 - DNA, 57 bp, Glycine max
  unsure at all n locations
  Clone ID: 700871874H1
ctatgatataaagtataacatacagccctgtgatttccctncaactaaannnnaana

SEQ ID NO: 462 - DNA, 242 bp, Glycine max
  Clone ID: 700871889H1
gctgaggttggaaccaatgtacaaattgttggtgatgatctcttggttaccaaccccaagagggttcagaaggcaattgatacaaaagcatgcaatgctcttctccttaaggtcaaccaaattggttctgtgactgagagtattgaagctgtcaggatgtccaaaaaagctggatggggtgtcatggcgagtcacagaagtggagagactgaggataccttcattgctgacctttctgttgg

SEQ ID NO: 463 - DNA, 235 bp, Glycine max
  Clone ID: 700871933H1
agagagagaacttcaactgagggtgagagtgacacaaatctagggagcactactctaaaagttctattagattcttcaaaacatgaccatgcatcgcgagtcttgggcttttgtcttcggcgttatgggcaacatcatctcctttggagtgttccttgctccattgccaaccttttaccaaatctacaagaagaaatccactgaagggttccagtcacttccttatgttgttgca

SEQ ID NO: 464 - DNA, 230 bp, Glycine max
  Clone ID: 700871945H1
ggacgctactggaccatgtggaagctgcctatgtttggttgcactgatgcttctcaggtgttgaaggagcttcaagaggctaagactgcataccccaacggcttcatccgtatcatcggattcgacaacgttcgccaagtgcagtgcatcagcttcatcgcctacaagcccccaggcttctaagtgtgaaaaatttgcaaagcatttgtagccgccaccccactttgttt

SEQ ID NO: 465 - DNA, 241 bp, Glycine max
  unsure at all n locations
  Clone ID: 700871948H1
anaagatggcttcctcaagtggaacatctnccagggtcatcttctggcttcagaactctggttctgaggaggatttgcaggcggtgatggatcagagaaagaggaagagaatgatatcaaaccgcgaatctgcacggcgatctcgcatgaggaagcagaagcacttggacgatcttgtttcccaagtggctcagctcagaaaagagaaccaacaaatattcnnncaagcgtcaacatcacc

SEQ ID NO: 466 - DNA, 225 bp, Glycine max
  Clone ID: 700871968H1
actggagttgctatattttaccccttctaccactctttctacgtgtactataaagagttggctatagcagccacagttctaggaacagtgattatggcagctacgttgggaacactctgttattgggtgattactcaccaccttgaggcctcaagattgcgaagtcttaggacaacaatgagcagtaggcagtcaatgtctatgtcaatgatgtcaggatcggag

SEQ ID NO: 467 - DNA, 224 bp, Glycine max
  Clone ID: 700871982H1
gaaaatcctcacccattttcttcgtagccaaacactctgaaattctcagttatgtcgtggcaagcgtatgtggatgatcacctactgtgtgaaatcgaaggtaaccacctcactcacgccgctatcatcggccaagacggaagcgtttgggctcagagcaccaacttccctcagttcaaacctgaggaaataactgccatcaataatgactttaatgagcctgg

SEQ ID NO: 468 - DNA, 222 bp, Glycine max
  unsure at all n locations
  Clone ID: 700871987H1
cgagtacttccaccagcctgnagaagangcgcaggctctccntggagcaagtgaagtttcttgagaagagctttgatgaggagaacaagctcgagcccgagaggaagatttggctagccaaggaactcggcttgcagcctaggcaggtggcgatntggtttcagaaccgccgcgcgcgctggaagaccaagcagatggaaaaggactatgattccctgcagg

SEQ ID NO: 469 - DNA, 263 bp, Glycine max
  Clone ID: 700872004H1
agtggactctgcaagagaacagaaatgccttttccagaattttgtttcggccacgtattcttattgatgtgagcaagatagacttgacaactactgtcctaggcttcaaaatatccatgccaatcatgattgccccaacagcctttcagaaaatggctcatcctgagggagaatatgcaacagcaagagctgcatctgctgctggaacaatcatgactttgtcctcatgggctacttccagtgttgaagaggtggcttcaaca

SEQ ID NO: 470 - DNA, 259 bp, Glycine max
  Clone ID: 700872036H1
ccggcctttctggaccagtttgtccattttgccgtggatccattcttcaattactggttgctaagattaacaaaatcagtgatacagaagtggaatctagccctatgaagccaaggagatcacggaaatcaaatttcagtgaagggagcagcagcttcaagagcttgtcggccatgggctcatttggaaggattgccggccgcaattcagggaaaattacagatgaaaagcaatgataaagtggtggtgattattttga

SEQ ID NO: 471 - DNA, 259 bp, Glycine max
  Clone ID: 700872041H1
gcttcaacaggacctggcattcgctttttccagctatatgtgtacaaggacaggaatgtggttgctcagcttgtgagaagagctgaaagggctggattcaaagccattgcccttactgttgataccccaatactaggacgcagagaagctgatatcaagaacagattcacattgccgccatttttgacattgaagaactttgaaggattggaccttggaaagatggacaaagctgatgactctggacttgcttcatatg

SEQ ID NO: 472 - DNA, 262 bp, Glycine max
  Clone ID: 700872065H1
gtggaacactaccattggtcaaggtagaggaaatatctcagactattgacacgctgaattttaccgtccaaaactctgttcagttcgctggtcctttggccaccacctcaattagtactaatgccaaattcgatgttcgaagtccaaaacgtgtgcagataaaatttgaggaaggcataattggcactccacagcttacggactcactagagataccagaaaatgtggaacttctgggtcaaaagattgaccttacaccttt

SEQ ID NO: 473 - DNA, 256 bp, Glycine max
  Clone ID: 700872073H1
ggaaagtccaagaccgaatctaagagagccgatcccaaacttgctgtgaataagaagggagccgccaccaaggctaggaaacccgccggcaaggggaaggcagcgaaagaccctaacaagccaaagaggcctccaagtgctttcttcgttttcatggaggagttcaggaaggtattcaacaaagaacatcctgaaaacaaagcagtgtctgctgtgggcaaagctgctggagcaaaatggaagaccatgtctgatg

SEQ ID NO: 474 - DNA, 257 bp, Glycine max
  unsure at all n locations
  Clone ID: 700872082H1
cttgccaacaggaaagantattcatgccctggaccctcaatctattcctacaactgcagcgatnccagagtgccaaaatagtggtagataggttgattgagaggcagaaagctgagaatgggggaaaatatcctgagacaattgcacttgtattgtggggaactgataatattaaaacatatggtgaatccctggctcaagntcttgtggatgattggtgtggaaccagtggctgatacctttggcagggtaaaccg

SEQ ID NO: 475 - DNA, 253 bp, Glycine max
  Clone ID: 700872084H1
ggaaattgcgtggggagcttgacaagcttctgaacagaaaaattgaagaaccaggatttgatgtttcgtctgaaggaaagggagtggttgctgctgctgttgaattgctgcacagttaagtcatgagataatttctttttttccagggctaacatcatgttggtctgagtcctggcattcattagatattataattagcataattttggtagcagtttttattgattgctagcaatagtatttttctggaatg

SEQ ID NO: 476 - DNA, 245 bp, Glycine max
  Clone ID: 700872101H1
ggggaagcgtgttcattgcgccatggaaatcccgcccttttcccgtttctctctctcatctcactgcttttcccttttcattactttttgatcgagttttatgtttgtcggaagagttcaatcaaatgagtttaaccatgatgatctggggatttcctttctgaggttggtcacgagccctgatgcatccagtgcatctattttcggatggctgataactggatcatttggactaatggctgtga

SEQ ID NO: 477 - DNA, 236 bp, Glycine max
  Clone ID: 700872140H1
caagtctctgactatgccaaaggatcatctcaattgaaatctccttcttcagagaaaccaaagagcaaaccaaaatcaaaaggagctccaatcgttgtttcctatttccctgtcaaccattatccgtcacgcttgagttgatatatatattaatttgcatctgcatcgttacgtgatcagtgatatgtttgcatgtgcttcttggcggtggtggccttttacccttttcagggtgc

SEQ ID NO: 478 - DNA, 226 bp, Glycine max
  Clone ID: 700872201H1
aagtatctcaatcaatcagttttagagggtcgttacatcactgttgagcggtcacgaagaaaacgtgcaagaactccaaccccagggcactatcttggactgaaaaacacaagggagtatggctatcgtggtgaccgaggtggtgaccggggaaggtatcgcgatggtcctgaccgtgacaattactcacgtcgtaggtctccgaggcgttcaccatacagaggtg

SEQ ID NO: 479 - DNA, 222 bp, Glycine max
  Clone ID: 700872203H1
ccctgcaggtggaatctcaatggccacgcttagcttcggcatcgccacgacatgtctgagtgctgccgctgattatcgtagaagaagcaactggaaatggagcagacccagaattgtgtgtgttggatgggacccggaaggcgtgcttggtccaccccaaactgggcacctcgccaggttcgagtttaagaggcgcctcgagagagacgcagatgcccgcga

SEQ ID NO: 480 - DNA, 55 bp, Glycine max
  unsure at all n locations
  Clone ID: 700872214H1
ggtcactcaaagatgnnacacaaagccctccacacancatangangggaaantat

SEQ ID NO: 481 - DNA, 220 bp, Glycine max
  Clone ID: 700872220H1
atgactacaactctgaggatgcttcaggcttttttgtttcattactttttggtcttggccctttacttggaggaattattttggttgtatttgctcttgctttgcgtcttcagcatgctctcctcatgggcaccgcatgcggtattgcctttgttctcggtgcctggcgaccggtgcagcttattttgtcttcaaaattgggacttttccctgttttgtt

SEQ ID NO: 482 - DNA, 218 bp, Glycine max
  Clone ID: 700872240H1
caagtctctgactatgccaaaggatcatctcaattgaaatctccttcttcagagaaaccaaagagcaaaccaaaatcaaaaggagctccaatcgttgtttcctatttccctgtcaaccattatccgtcacgcttgtagttgatatatatattaatttgcatctgcatcgttacgtgatcagtgatatgtttgcatgtgcttcttggcggtggtggcct

SEQ ID NO: 483 - DNA, 214 bp, Glycine max
  Clone ID: 700872255H1
attttatcacgggattaataattagctcatagtttttttggaagagttgtgaaaatgggacttgtggagctttttggggtggcatctatgcccgtgatcaaagtactactaatcactgctgttggcttgcttcttgcactggacaacgtaaatttgttgggaaaagatgcaaggatacaagtgaatcatcttgtgcattatgtgttcaatcctg

SEQ ID NO: 484 - DNA, 241 bp, Glycine max
  Clone ID: 700872310H1
cagagagattccgaggcggagactgcagttgctcaggtggaggagccgaccgaagttgagaggcttactcagatgctcaggaatgccgagtaccagcaagctactattgagtggctgcagtctgacaatcaggctgagctcttcgacaatctcttcagattcttgaacccgctctacctgcagcaggttacgtctctggttgcgctctcggtttcagctgccatcacgtcgagcttcgaga

SEQ ID NO: 485 - DNA, 177 bp, Glycine max
  Clone ID: 700872325H1
gtcccttcattggggcttcctcagctgctttgattttcaggtctatgtttatgccaccaatcaagcagaagaaagcttgaattagttaagcttttacattttgatttactagttgagtaataaataaaccattgcccttagtttcttcttcttccaatgtcactagttttaagttgg

SEQ ID NO: 486 - DNA, 239 bp, Glycine max
  Clone ID: 700872328H1
tttcaagaggagttgaagccactgtggttcgaaagatctgccaatcaattgcatttttgtcccctgcaatctgcatgactctttcctcgctggatctagggctaccgccttgggagattgtggggattctcacaagtggtttagccctctcaagctttgccttatcaggactctattgtacccatcaagacatgtcgccagaatatgcaagtatacttctgggtataactaatactgtt

SEQ ID NO: 487 - DNA, 205 bp, Glycine max
  unsure at all n locations
  Clone ID: 700872337H1
ctggaacgaagatggcaccagcttcatcgtttggcgacccgcggaattcgctagggatttgcttcctaagtacttcaaacacaacaactatngccagtttcgtccgtcagnttaacacctatggtttccggaaggttgtccctgaccgttgggaattcgccaacgactgtttccggcgaggcgagagagctacttccacacaaca

SEQ ID NO: 488 - DNA, 236 bp, Glycine max
  Clone ID: 700872352H1
gtgggaagcagcactcaaacatggcctaagaccagtgtcaagtttcacacagtaaaattaagaaaattgaaatcagcttcagtcaaagtatttttcctcaagttgttaatttcttctttgttttgatgtattgcatgcacatcatagtggccatctaagtgcgattatattctttcaagtttgtgtattacatttctaatgtttcctcttatatgttcatatgatcacattgacag

SEQ ID NO: 489 - DNA, 96 bp, Glycine max
  Clone ID: 700872368H1
cgaagttgtaatttcggtactggtgagagcaaaacacacacagtcagtattcaatattgcgtcttgaatatccacaaacagctgcacgctatcttc

SEQ ID NO: 490 - DNA, 235 bp, Glycine max
  Clone ID: 700872377H1
cgttctttctctcgcaatcttcactacattcaccgagcatttgcattcacattgaatatggctgagactacacaatctaatgctgagttgttggagtggcctaagaaagataagcgccgcttcctgcatgttgtgtatcgtgttggtgatcttgatcgcaccattaagttttatactgaatgttttgggatgaagcttttgaggaaaagagatattccagaggagaaatatgcca

SEQ ID NO: 491 - DNA, 233 bp, Glycine max
  Clone ID: 700872384H1
gcggcgctgaacaccatgaagaaggagacgcaggctgaggtggagcagaagattgctgaggggaggaagaaagtcgaggctgagctgcaggaggctctgtctagcttggagaatcaaaaggaagaaaccatcaagtcccttgattcccagattgcagctcttagccaggagattgttaataaggttcttcccactgcttaatatgtctatgtaattttcatttcaatcccctc

SEQ ID NO: 492 - DNA, 261 bp, Glycine max
  unsure at all n locations
  Clone ID: 700872483H1
ggggaagcttccaggggacaccacatcccttttgtncagcttggtggcaatcacattctaaatggccttaccccactgaggaagacaaggctagattngtgcaggaaacagggttgcnttaaagcagataaataattggttcataaatcaaaggaaaaggaactggcatacaaataacccctcatcctctagcaactccaaaagcaagcgcaagagtagtgcaggagaagccagtaaccagagcttcatgtgaacggtcgc

SEQ ID NO: 493 - DNA, 255 bp, Glycine max
  Clone ID: 700872491H1
gagaaaatgcctagggaatttactattgttgatatcaatcatattcccgtatttttagtcctttccaatttactaattaaaccatcctcttacaaactatgatattataggatgagacacaaatcaaaccagctgaacaaggtgaaggtcctggaaacctggctgtggtggatgaatcaatggaagatgatgctggcaagaacaaggggaacagtgaagctggcaggcaaaatgaaaaattatatgccacagatg

SEQ ID NO: 494 - DNA, 243 bp, Glycine max
  Clone ID: 700872526H1
ttggtttccaattgcgtgcacccatgtcctcttttctctccttatcactctctgcgccctccctccacgattcttccttcctccatggaacaaagcctttcccttttctcgaagagtggcaccacgccgcttcaactcttcctctgccaagtgctccctcgaccacatccccaaacagttcagaaaggaaaatctcaaagatggattgatggaaaactacaagaatgcacctcaatctctata

SEQ ID NO: 495 - DNA, 240 bp, Glycine max
  Clone ID: 700872551H1
caattttcaggagctggcatcagatttagctcaaattacctttgattatccttttaggatacccccatactttgcccttataattagagctatggggttctggaagggatagctttagtaggaaattctgaatttgccattgttgacgaggcttatccttatattgcacagaggctcctcacagatgaatctcctcggctaagggatgctctgcgttacactatatatgggaaatctggg

SEQ ID NO: 496 - DNA, 239 bp, Glycine max
  Clone ID: 700872558H1
cttaagcgaaaagcaatagaattcaaagagagagtttcttgttctgtattttttgatttgatcatttcaatcttcaatttttttttatatatcaccaatccgcaaagtgcaaatttctaatctttcacgtattgggttcttctcttttccctcttcgtctccgatcgatccaattctcttcccatggctacgatcggacacaacaatctcaatgccaaattggttcttctcggggacat

SEQ ID NO: 497 - DNA, 248 bp, Glycine max
  unsure at all n locations
  Clone ID: 700872614H1
ggcttaattaacaatcnaatgtttaaggaagantttctatgacgattcgcanccccatgcgacgantccgtctcctccactccttctccgtcgncttccnntactggttctacgntttctcatgaactanctccctctcaatcccctaccctaattcctccaatttccccattttttttctaattaatcagatttgcaaaatcctaatttctctatcctaacnanaaccccagattcaaacanntcng

SEQ ID NO: 498 - DNA, 240 bp, Glycine max
  Clone ID: 700872621H1
cctgttctgggctgagatttattatcaggcacgtgctgtatcaactgatgggctgaaaccaagtttctatactattaatattgtggtttacgttgttcagattactttatggttaatattgtggtggaaacctatcagtggactgctcattttgtctaagatattctttgcaggggtctctttgtttgcagccattggctttcttctctatggtggaagactattcttaatgctacagcg

SEQ ID NO: 499 - DNA, 239 bp, Glycine max
  Clone ID: 700872636H1
tagagtgtcttgaatggctagaatctaaggaatctcgatccgttgtttatgtgaattttggcagcatcactgttatgtctgcagaacaactcttggagtttgcttggggtttggccaatagcaagaaaccctttttgtggatcattaggcctgaccttgtcattggtggatccgtgattttgtcgtctgagtttgtcagtgaaacaagagacagaagcctaatagcaagttggtgtcca

SEQ ID NO: 500 - DNA, 242 bp, Glycine max
  Clone ID: 700872662H1
cagattttgattcgattcgattcgattcagtcgaggttttaagcagcagcaagatgtctgggcgtggaaagggaggaaagggattgggaaaaggaggagcaaaacgacatcgtaaggtgctccgcgacaacattcagggaattacgaagccagcgattcgtcgtttggctcgcaggggtggcgtgaagcgtatcagcggtttgatctacgaggagactcgcggtgttctcaagatcttcttg

SEQ ID NO: 501 - DNA, 255 bp, Glycine max
  Clone ID: 700872724H1
gaagaacaagtattcctccggtggtggtggaccatcacatggaagtggtcatttgatggcgccctcgggctctgctgtggggggtttcaaccctggtgtgccggcccaggggttgaatccggtgcttggacaggcgttgactgcattgattaatcagggagctggattggggcttgggaatcttcttggagggcttggtggtgcccccgttaaccagggggggccgcctgctccatatgcgaatcaacctgctat

SEQ ID NO: 502 - DNA, 257 bp, Glycine max
  unsure at all n locations
  Clone ID: 700872727H1
gttacttcagatttctaagancatgacccttattctgactatgcatcattttgtactaganttaagagccaanntaccaaaaacccagaanatnggtatagaaagttacaagctgttttgaagacaataatgttacgccggaccaaaggtacacttcttgacggggaacctattatttccttgccgcctaagtatatagagctgaaaaaagttgatttttctatggaggaacgtgatttctattccaaactagaggc

SEQ ID NO: 503 - DNA, 251 bp, Glycine max
  unsure at all n locations
  Clone ID: 700872734H1
ctctttcttcctcgcctagctagctannagaaaattaggatctgcttcagatctagtgtttccctgtcccaaatcacgagtccattgagtttgattttgtggatgaaaagcatagatagggcttttgcaaaactctccaatgtttcttgaaattatatgaccatgcgtcgaattcgtatgctgcactccttctccgtcgtgttcctctactggttctacgttttctcatgaactccctcttaaatccgtga

SEQ ID NO: 504 - DNA, 243 bp, Glycine max
  Clone ID: 700872768H1
caaacttcataagtgtcaaaggtcctgagctactcacaatgtggtttggagaaagtgaggctaatgtgagggaaatttttgacaaggctcgcggttctgctccatgtgtcctattctttgatgaacttgactctattgcaactcagaggggtagtagtgtcggagatgctggtggtgctgctgacagggttttgaaccaactgcttacagaaatggatggaatgtcggcgaagaaaactgtgt

SEQ ID NO: 505 - DNA, 193 bp, Glycine max
  Clone ID: 700872789H1
caggaattactgataccttgcacgactcacccttgctgacatatccgggcaacctaattgaaagtaaccatgagtctacttcttcacttgcggacactacacttgacaaactaacacctgattccagagcgatagttgttgttccagctaccacagaaacattagctgtggttcctgtgagtcagaaaaccaa

SEQ ID NO: 506 - DNA, 248 bp, Glycine max
  unsure at all n locations
  Clone ID: 700872790H1
gctcttttctgctgagatttctttgtctccccggtattctgatccagcagccggttctgtgttttcccctactcacaaatcagctgttctcaatcagtttcaacagctccaaagtatgttatcacctataaatactaatttgctgtctcctaagaatgttgagcatcctctttttcaggcttcttttggtgtctctccttctggaaggntntcaccaagaagtgttgaaccaatctctccaatgagtg

SEQ ID NO: 507 - DNA, 251 bp, Glycine max
  unsure at all n locations
  Clone ID: 700872792H1
atttcttgcacccttattcctaaggactccgataaggttatgcttgcaaaacaaactggacttactcggagccaggtgtctaactggtttataaatgcccgagttcggctatggaagccaatggtagaagaaatgtacttggaagaggtaaaacaagaaccaaacaatagctctcaggataacaccacaaaaagatcanaagaatcaagcaaggagttatggtcagaagctaatgctactgcacaggaatc

SEQ ID NO: 508 - DNA, 234 bp, Glycine max
  Clone ID: 700872808H1
caaaaatggacatccaagtggttcagctgaagtcgtttatactagaagaagtgatgcatttgctgctcttaaacgatataataatgtacttttggatggaaagcccatgaagattgagattgttggttccaattcagaattgcctataagtgctcgggtgaatgtcactggggtgaatgggcgcaggaagaggactgttgtaatgacgcctagaggtggccaagctggaggtgg

SEQ ID NO: 509 - DNA, 228 bp, Glycine max
  Clone ID: 700872828H1
gttgatccagataagtgggagtttgctaatgagatgtttcttagagggcaaaggattcttctgaagaacattagaaggaggaaagcaaatcatcatcaatcccatcagcacgcgatgcagcaaggtgtagaagagccttttgttgaggtggggcagtttgaattagatggagaaattgatcggttaaggcgagacaggcaagttcttatggtggagttggtgaagctc

SEQ ID NO: 510 - DNA, 225 bp, Glycine max
  Clone ID: 700872857H1
tgtgcattattcaatggccaccacagcagctctatccggaaccatggtgagcacctccttcatgaggaagcaacctatgacgaccaagagcctaaagacattccccaacgctctttttggtctgaaaggtggacgaggtggtcgtgtaacttgcatggcctcgtacaaggtgaagctcataaccccagaaggagaagtggagtttgaatgcccagatgatgtttt

SEQ ID NO: 511 - DNA, 223 bp, Glycine max
  Clone ID: 700872896H1
atgaatatggacgaggaatcagagaaagtggcagtggagttggctgcacaaggagttattggaaagagagttgatgagatggaatccgatttcatgatggcccttgactacatgatccaacttgctgagaatgaccaggatgataagcgtaagtcactgttggaagttatcaaagagacagtattatcacatctaaccaaaaaatgtccaccccatgttcaag

SEQ ID NO: 512 - DNA, 250 bp, Glycine max
  Clone ID: 700872906H1
ctttcttggggggtgagtagaattatgcaaatatatgctactgcttgaaatgaagttagctactaattgttacagcacaatatttcttattcaattgttctgaattttactatgtgtgccaattctacttctttacataggattaaaagaatccaacatgaacgtgaaatgagcaaattatagaagtgtacttgaaactacatgaaacaccaaaacctttatctttaataatatgaatcattccaacaaa

SEQ ID NO: 513 - DNA, 249 bp, Glycine max
  Clone ID: 700872909H1
gcgaagtgtgaagacagacacagtgagaatgatgaagcgtcggttccttttggttctcttggttctctatgtcacagtggagttctacgtagaagcagatggtagtggtgggtttgtgagaacaagaggagtgcagcttatgctgaatgggagcccctactatgctaatggctttaatgcctattggctaatgtatcttgcctctgatccttctcagagaaacaaagtctcatcagtgtttcaacaggc

SEQ ID NO: 514 - DNA, 250 bp, Glycine max
  Clone ID: 700872919H1
ctttccccaaatcccaaaccctttttcgcttagatcccaatccaattgggttatggacatggcttccagtccccgcaccgtagaagagatcttcaaggattacagcgccagaagaacctctgttattcgcgctctcactcacgacgttgatgaattttacggcctctgtgatccagataaggataacctgtgcctctatggacatccaaatgaggcctgggaagtaactctgccagcggaggaagttccg

SEQ ID NO: 515 - DNA, 247 bp, Glycine max
  Clone ID: 700872921H1
agctgtttcatcgaaaacaagatggtatctgttgagaggataaagcaatttacaaatattccatcagaaccagcatggaatatcaaggatcgtatgcctccttcaaattggccaagtcaaggcaatgtagatatcaaagacttgcaggtcagatatcgtctaaacactcctctggttcttaaaggcattactttaagcattagtggaggtgaaaaggttggtgttgttggtcgaactgggagcggaa

SEQ ID NO: 516 - DNA, 248 bp, Glycine max
  Clone ID: 700872935H1
cttcaaaacactcataacacaaagcacaaagcaaagctcatccttgagttaaaaaatggcagcagcttcttccatggctctctcatccccatccttggctggcaaggccgtgaagctgggcccatcagccccagaagtgggaagggtgagcatgaggaagaccgtcaccaagcaggtctcctcaggaagcccatggtacggcccagaccgagtcaagtacttgggcccattctctggcgagcccccgt

SEQ ID NO: 517 - DNA, 244 bp, Glycine max
  Clone ID: 700872937H1
gagagagaacttcaactgagggtgagagtgacacaaatctagggagcactactctaaaagttctattagattcttcaaaacatgaccatgcatcgcgagtcttgggcttttgtcttcggcgttatgggcaacatcatctcctttggagtgttccttgctccattgccaaccttttaccaaatctacaagaagaaatccactgaagggttccagtcacttccttatgttgttgcactgttcagtg

SEQ ID NO: 518 - DNA, 241 bp, Glycine max
  Clone ID: 700872943H1
cggtctccaagatccagtcgagcggcagaatgtgccaaaggccagtccgcgtctttatctgcatccctcaccagcaattctccgatactcggctcttcgtccctttcatcaagtagagagcagcagtctcgtccgaggcgctcgctccatagagctccctctgcactcacgcaagccagcctgcccctccttccgatcacgaagcatgcacaccatactcgcgctcgcagctttcaatctt

SEQ ID NO: 519 - DNA, 249 bp, Glycine max
  Clone ID: 700872947H1
gggtgaaaagggattgaaggattgttgttcttttctattggggttatatctgtgctttatgggaagccctatctgtcttcttgttgttttatttcgattcgatgtggcacattctacctttcatttctgtggcgtctcattgattggtattatgaatctcgaatttgcagggttttagaaaggttgacccagatcgatgggaatttgcaaatgaaggatttttaagaggtgaaaaacaacttttaaaaa

SEQ ID NO: 520 - DNA, 244 bp, Glycine max
  Clone ID: 700872951H1
gaagaacgctcgctcgcactgtccagatcttaatcaagaggagtgagttttgtttttccagccatgacgccgctggtgagtctaagcctttctctcagatttacgcttaacagagttacagtcactcagtaatctactccttttctagatcctgcatgctgggaaaaccaacaaaaattcttacaagacactcattgcagccgagtatgctggcgtccaagttgattttgcccctaattttgag

SEQ ID NO: 521 - DNA, 240 bp, Glycine max
  Clone ID: 700872953H1
cggaggaggagttacgatcggacggtcctccttcgcccactgtgtcgcgatctgtgatcgggattttccggcggatgattccgactccagctccgactcctccatcggaaggaacagcacctcgtcggaagattcctccgaccgggaagacgccggcgaagttgaggttcagagctccttcaaaggccctttagataccatcaacgatctagaggaagatttacccgtcaagaaaggcat

SEQ ID NO: 522 - DNA, 239 bp, Glycine max
  Clone ID: 700872957H1
cggctaccccaccatattctacgacgccatttatagttcttctatggtctcaaacagaatccaaatccctctcttatccaaccacctcagcgacgcttccatcaaagacaagcccagcgtcacccccgatggacaatatttactatacgtgtccagccacgagaacccgggcgttccacgggccagttggaccgcggtttactccactcagctcgagtcaggcctcacccaaagactca

SEQ ID NO: 523 - DNA, 245 bp, Glycine max
  Clone ID: 700872962H1
gaaactcttaatattgtcaaggatggtcaggagtgctctccgcaattagaaagtttgttttatagattacagagtgaagctaatggacatgaaaatgttgtgaacaatggattttctagtgagtcaaatggccatggtgcaactggcaggtgtcagcgtgtgttccgtgatatcttagcctctgagaagttcagttcattatgtaaagtgctacttgaaaatttccgaggaatgaaacctgaaac

SEQ ID NO: 524 - DNA, 243 bp, Glycine max
  Clone ID: 700872966H1
gagcaaggctcaaagcatggcgccaccacctcctcttcctactctcctcctcaccacccttctctccctattctcctcttctacatcggccccacccacaaccacagcatgccgcgacacgtgcggctcaacgcaggtgaagtaccccttcggcaccggccacggttgcggctcccctctgttcagcccctacgtaacctgcggctccaacggcaccggcgaccaactgttcctgaaaagcca

SEQ ID NO: 525 - DNA, 238 bp, Glycine max
  Clone ID: 700872968H1
ctggttttggttctttaacggaaaacctgttggtttgatctccaagaaatctcctatctcatgtaaatcaacaggagcaaataatactgaagagaaagaaagtattacaacttatgatgatagggcacataccaaagatgagaaaaatgatcacactcttgttgttcatggcttggctgatgcttgtagattcgtttgtaatgatgcaaagtttctctcacgtggcataatgaggttg

SEQ ID NO: 526 - DNA, 232 bp, Glycine max
  Clone ID: 700872985H1
tgtttgtgatttagctctattttttatggttctgtttgtgattgaacagatgcagatcttcgtgaaaactttgaccggtaagaccatcacccttgaggtggagtcctccgacaccatcgataacgtgaaagctaagattcaagacaaggaagggatcccacctgaccagcagagacttatctttgcgggtaaacagcttgaggatggtcgaacccttgccgactacaacatc

SEQ ID NO: 527 - DNA, 271 bp, Glycine max
  Clone ID: 700873019H1
aaagaagggtgaccatgagagcgtttggagctgaattaatcctcactgatccagccaaaggaatgggaggaacagtaaagaaggcttatgaacttttggaaaacacaccaaatgctcacatgctgcaacaattttcaaaccctgccaatactcaggtgcattttgaaacaacaggtcctgagatatgggaggatacaaatggacaagttgacatatttgttatgggaataggtagtggaggcacagtctctggggttggacaatatcttaa

SEQ ID NO: 528 - DNA, 266 bp, Glycine max
  Clone ID: 700873027H1
gcaattgaagttgaagtcttgcccttctctcttcaactccaaacacaagacatcatcatccatggctgcctccgtctccactgtcggagctgtcaacagagctcttttgaacctgaatgggtctggacctggggtttcagctcccagttcatccttctttgggagcagcttgaagaaggttattggctcaagggtccccaacacaaagatttcctctggaagcttcaagattgttgctgtagaagagaagaaagagattgaagaga

SEQ ID NO: 529 - DNA, 266 bp, Glycine max
  Clone ID: 700873029H1
aatcaactaaaatacggactacagaaagatcacatgggtgaaacaggatcagcattattggacgattcttggatttctgctgatagctttttgcaccatctttgcaaggtatttcactgatgttaactcaatattcagtgaacaaatttgatgtgtgacctacctttcttaattttaagaagctagattggtgcctattttggtcagttatggattttaagatcttgaaattctgaaagtggaagtcagaagttcatttcttcgta

SEQ ID NO: 530 - DNA, 265 bp, Glycine max
  Clone ID: 700873047H1
aaaccattcaagcaatcacatcaccatggcacccaagatcgctatcgtctactactccacctacggccatgtgaagacactggcagaggccgaggccgagggcatcaaggctgctggcggccaggtcgacatctaccagattccggagactctctccgaggaggtcttgaccaagatgcatgcaccgcccaaggccgaccacccagtcctcaacgacccaaagaccctcgagcagtatgatgctttcctgtttggtatcccaacc

SEQ ID NO: 531 - DNA, 265 bp, Glycine max
  Clone ID: 700873051H1
gattgcagtagtgctaagtgctaacacctgcagtgaacaatggcctctgcatcagcatctctgctcaagtcttcacttgttcttgacaagtctgagtgggtgaagggacaaacccttcgccaaccttctgcatcagttgtgagatgcaaccccaccaccccatcaggcctcaccatcagagctggttcctatgctgatgagctcgttaagaccgcgaaaacagtggcttcaccagggaggggtattttggccatggatgagtcca

SEQ ID NO: 532 - DNA, 264 bp, Glycine max
  Clone ID: 700873052H1
ggacattgcaaaagtcttgctcctgtaagtatatctttgaggttccttgttatcaatttaaggttgggacctttaattttcataaaaccaatattgtggaacctgactatgctcttttttccctccagacttacgagaaagttgccacagcatttaaattggaggaagatgtagtaattgcaaatctggatgctgataaatatagggatctggctgaaaagtacgacgtgagtggatttcctaccttgaagttcttcccaaagg

SEQ ID NO: 533 - DNA, 263 bp, Glycine max
  Clone ID: 700873056H1
cccgagtccgcctctaaaattggttattgctctcgcaagcacaaggtgcctttattatctgtggaagcacttcaccaccttcacatcttcatttttgtcctcgctgtcgtacacgtctccttttccgtgctcaccgttgtctttggaggcgccagaatacgtcagtggaaacactgggaagattctattgcaaaacagaactacgagactgaccgagttctcaaaccaaaggtcactcaggttcaccagcatgattttatcag

SEQ ID NO: 534 - DNA, 261 bp, Glycine max
  Clone ID: 700873057H1
aagatatctaaaaaccacaaagtcatgagaggaattcacatgttatttattatattatatatgtgtcaatattatatattagaactgtttgatagttaccctaaatagagagattaatgcacagtgaactcactatacagatccaaaagatttgtattttgtttaataaacttagtaaagtacaacatgaccagcagttattagtaatttgggttaattattgtgctaatatgcatcttacattttatagggaaagataga

SEQ ID NO: 535 - DNA, 260 bp, Glycine max
  Clone ID: 700873059H1
tgttgaaactgtgagtctatgttatttgtggcggagcatgaactcctccaccaacacctcgaattctcagtcaatggctgcagcagccagtgatgggtctgggaagaaggtaagaaaaccttacaccataaccaagtccagggagagttggactgaggaagagcacgacaagtttctcgaagctcttcaattatttgacagggactggaagaaaattgaagattttgtaggttcaaaaacagttattcagattcgaagcc

SEQ ID NO: 536 - DNA, 262 bp, Glycine max
  Clone ID: 700873066H1
ttcgcttgcacttttgttttgcatctcctccttggagaagagctttgcctttcaagcaacaaaggaaagcaacaatcttcgtcaatatcattttgttcacctcaactctctatttccatcatcttcttgcagctcttctgccaaaggtcctaaaaggaaagcatcattagaagtggtgcacaaacatggcccatgctcccaactaaatcatagtggcaaagcagaggctacaatatcacacaatgatattatgaacctagac

SEQ ID NO: 537 - DNA, 262 bp, Glycine max
  Clone ID: 700873067H1
agcaggttaaggaattgaaatcgaggctgctgcaagaagagaacacaggaggaagcggtgtttcggtgaaggaagagataataacgaggcctgcagactcagaagacaaaacgatggaacaaagtaagagtgacccatcttctgaaacctcaaatattaatcctagttcggagtcggaggaggatcacttgaactacgagtgtttcaacaacaacgacgactgcgtcggaggaaccgccgcatcgctcttgcaagtggactt

SEQ ID NO: 538 - DNA, 255 bp, Glycine max
  Clone ID: 700873077H1
ggagggtgatttgaaggggaagagggtattcgtgagggtcgatctgaacgtgcctttggatgacaaccttaacatcaccgatgacactagagtccgtgctgctgttcccaccatcaagtacttgactggttatggtgctaaagtgatcctttctagccatttgggacgtccaaaaggtgtaacacctaaatacagtttgaagcctcttgtgccaaggctgtctcaacttcttggaattgaggttacgatggccaa

SEQ ID NO: 539 - DNA, 255 bp, Glycine max
  Clone ID: 700873089H1
gcacaccacacaaaaaagcaaaacagagagaacaactgttactcacacacgccatgggtaaatgaatggtttttgagcaacagcagttaaaagagaaaagggattcagcgaagatgacatcggttggtgtggcaccaacttcgggtttgagagaagccagtgggcatggagcagcagctgcggatagattgccagaggagatgaacgatatgaaaattagggatgatagagaaatggaagccacagttgttgatg

SEQ ID NO: 540 - DNA, 252 bp, Glycine max
  Clone ID: 700873092H1
ccaagggtaagtaaaatacactgcttgagaaggacacttactggaccatggtagattatgtgaatgtgagtcattgtttccaagtgacatctacacgaaggaagccattatgtcataagggctggggtatatatatgtatgtgagacgtgaggtaattgcagtccaaaactagatagggtggtagctattgttagtgttattatgtataggaactaggagagttgagttgtacattaaacttgtatctttgg

SEQ ID NO: 541 - DNA, 260 bp, Glycine max
  Clone ID: 700873107H1
gttgtgtgggtgtgaagctgggaaaatggggagagcctttgtgtatgtgattcttggaggaggcgtggctgctggctatgctgctcttgaattcgtcaagaaaggagtctctcatggtgaactgtgtattatttccgatgaaccagtggctccttatgaaaggcccgcattgagcaaaggatttttgcttccagaagctgctgcccggcttccatcctttcatacctgtgttggtgcaaatgaggaaggctaacttcaaa

SEQ ID NO: 542 - DNA, 261 bp, Glycine max
  Clone ID: 700873108H1
gcaaagcgtatatgctctcctgcggacaagagatatggccatttcacggtacaaggaatttggaatcccagtgaactggctaatggattcaggggttgtaggcaagatcaagctttcttctgtacaactggcaaagaagtatatgaaacgtgttgcatctgaacttgatgaactatctggtcctgataaagaaccagctagagagtttttggttctgcaaggtgtgcgtttcgctttccgtgtccacagtttgcaggaggc

SEQ ID NO: 543 - DNA, 257 bp, Glycine max
  Clone ID: 700873113H1
tataaatcatccttttatcaacatgcatgaggacttgaacgtggatctttcagcttatttcttcaactcaggatgtacacttgcaaccatatagaacacagtatgttccgatcctggactttattcaaagtgaaagatatggcattctatgtcaactgggcaaatggcaagtactgctgtcacttcatatgtaactgcaatttgtactccttgaagaggattcctagttgcctatgaccagaattgtagaatggagc

SEQ ID NO: 544 - DNA, 261 bp, Glycine max
  Clone ID: 700873117H1
tggttgattcggatctagagtcttcagtttctcctcgttgttcttcgctttcctgttttcaatttcgattctttcgttaatttaataagatgtttgggagggcaccgaagaagagcgataatacgaggtactacgaaatcctcggcgtctccaagaacgcttcgcaggatgatctgaagaaggcttacaagaaagccgccattaagaatcaccccgacaagggcggtgatcccgagaagtttaaagactggcgcaacttat

SEQ ID NO: 545 - DNA, 260 bp, Glycine max
  Clone ID: 700873119H1
catccgcagctgcttttattcgcaccgcaaacagtgagccatggccgtcggaaagaacaagcgcatctccaaggggaagaagggtggcaagaagaaggcagctgatccctttgccaagaaggattggtatgacattaaggctccttctgtttttcaagtgaaaaatgttggcaaaaccctcgtctctcgtactcagggtaccaagattgcttctgaaggactcaagcatagagtgtttgaggtctcttggctgatcttca

SEQ ID NO: 546 - DNA, 255 bp, Glycine max
  Clone ID: 700873138H1
gtggggagtgaatcccattacacagtgttgtttgctcttgaccccagtgtccaaaatgagaatgaactggaaggaagggaaactcagattcgcaaagcttttgatgcacaagatcagagtggaggtggtggtttcattagtgtggaagggttccatcaagtcctcagagaaacaaatatcaaatttccaccagagaagctggaacatctttgctctgcagggttcattgtatggagtgaatctggcaagtaattt

SEQ ID NO: 547 - DNA, 248 bp, Glycine max
  Clone ID: 700873157H1
gtggggccaatttggggtctccaggttaaaaggcaggtgcctgaagctccatattatcaaatcagccctgctggtcactgccctcatgatgaagttcctgagatcataaatttcttacttcgcgggtggatcagaaacctagagtctcagggttctgtgtcattaccattgcttgaagatctagacagtatgaagcactctattattgacagggaattagaatttcccagagaagttcaaaaaagtca

SEQ ID NO: 548 - DNA, 242 bp, Glycine max
  Clone ID: 700873175H1
tgaacttgttgcaccctttcttttctttggatgatttgttatacaacaagcttttgtttctgggttgattgctgctactttttctattttctctgttggtgattgtcccttcaaatgtcgcagacaagttgccttttacactggtcccacagttggaggacttctgaatgctacatgtgggaatgttactgagctcataatagcaatatttgcccttagcagtaacaaattgccgtggtcaa

SEQ ID NO: 549 - DNA, 243 bp, Glycine max
  Clone ID: 700873176H1
gctgaatgttgccatgagggcccttggatttgagatgacagaagagcaaattaataaaatgatagaagatgtggacaaggatggaagtggagcaattgattatgatgaatttgagtacatgatgacagccaaaataggagaaagggacactaaagaggagctcatgaaagctttcaatattattgatcatgataaaaatggaaagatatctgcattagacatcaagcgcattgcaaaagagct

SEQ ID NO: 550 - DNA, 243 bp, Glycine max
  Clone ID: 700873178H1
gaggtgcgaacagagagaggcagtgatgtcattattgttcttgttgggaacaaaactgatcttgtcgagaaaagacaagtctctatagaggaaggggaagcaaaagcacgtgagctcaatgtcatgttcattgaaactagtgctaaggctgggtttaatataaaggccctatttcgaaaaattgctgcagcactacctggaatggaaacactatcttctgcaaaacaagaagacatggttgat

SEQ ID NO: 551 - DNA, 243 bp, Glycine max
  Clone ID: 700873183H1
caagatctggaaatttgctatgtggaaaggttaaatgaagccattcttgttgagtcatcctgatactatgtacaattgttctcaagtttattgtagtcattcactggctcatacttcttatccttgtggtgatccttattttggtagttcaatagttgcttatggaacacaggctattactcaacaaatggtgccccagatgctgggattagcatccaccagaattgcataccagttgagctt

SEQ ID NO: 552 - DNA, 243 bp, Glycine max
  Clone ID: 700873184H1
gtcttcatccttcatcggcattgcgcttcacaaattctcagtctacgacttggtggatttcattaagttgtgataaacatgggaaaagactcaaagccaaaggagtccggaggcaagggaaaggggaaacaggctgcaagtggaagtgatgagaatgcttctaagggaaaaggaaaaggtgggaaaggtggagatgggcttggtacttgcacctatgtcaaagctaggctatcctatgtgaga

SEQ ID NO: 553 - DNA, 242 bp, Glycine max
  Clone ID: 700873187H1
aggaattataaaaggctctggttatctttgtgggtgtcagtcatgtaactatacaaaggttctgaatgcttacgagtttgagagacatgctggctgcaaaacaaaacatccaaacaatcacatttattttgagaatgggaagactatttatcaaatagtacaggaattgaggagtaccccagaaagtttgttgtttgatacaattcaaacagtttttggtgcaccaataatcagaaagcatt

SEQ ID NO: 554 - DNA, 240 bp, Glycine max
  Clone ID: 700873191H1
gattagttcactgagaagactcgtatttgtttccgagatgccctttaccgtcttgctagaaatacaaaacaacatgtagtagaggacctggatggagatcttaacatgcatcaggaaatgccagactcagtttacaatgataccatgaggtacatgatttagatatgctgcatgtatgttatgttcttttggcctttagtttctaaatgttatgttgaaacaataatctctttgtggatt

SEQ ID NO: 555 - DNA, 237 bp, Glycine max
  Clone ID: 700873194H1
ggaattgatgccggggtggagcccaaactgaatttcaagggttacatggttggaaatggtgtcacagatgaacaaattgatggcaatgctcttgttccatttgtacatgggatgggacttatcccagatgaactgtttgaggaggttaaccgtgagtgcaatgggaatttttatgatccaacaagtgctaattgttctagcaagctttcaaaagttgatgagtggttgatgagataa

SEQ ID NO: 556 - DNA, 270 bp, Glycine max
  Clone ID: 700873201H1
cgcctgcaacctactcgagatgccattcaagttttcctaacagaagctgcaaagttggatgcactggctttatctcacgcccttgagctgaagctccaatctccaatttggcaggttcgcatgaaagctgtttgtgtccttgaggccatccttagaaagaaggacgatgatcatttttcaccagtggattcttacttcaccgaaaataaagatgtggtgctgagatgttctgaatctccccaagcctctttaagggaaaggactgtgaag

SEQ ID NO: 557 - DNA, 264 bp, Glycine max
  Clone ID: 700873204H1
cggtcatcctatgcccttattgagaatttgagaaattggatggagaaagggtcaaggctcaaaatatggaagcagtctgatataactcgaaacattcattaacttagctctctgttggttttccagttttcatcatgtcatcatttatgtgtgatctgtccattcctagaaaatcggtcacacacacacacaacacttttagaaaatcatatattttaaagtaatatacagtgggtttttgtagcaaggttattttatgttaaa

SEQ ID NO: 558 - DNA, 258 bp, Glycine max
  Clone ID: 700873255H1
tagagagtgtagggggaagacgtgtgggagcgtgagaagagaaatgaacaagactgaaaagtggattgagggagacgagagtggcgcggagatgctgagtagagtgagcagcgtgcgacctttcctgtttcctccgccgctccacagggttcctcttcgcgtcggaaacgtcctcgagcttgtggggccctctccctccgccaaaacgcacattctcatccacgccgccatcacttccgttctccccaaacgccacgg

SEQ ID NO: 559 - DNA, 256 bp, Glycine max
  Clone ID: 700873256H1
gtttctgtaaccatggcatccaccactctatcccctacaaccccttctcagctatgctcaggaaagagtgggattttcagtccctcacaggcacttcttgtgaagccagtgaagaggcagatgatggggaagagcaagggaatgagaattgcatgccaagccaccagcattcctgctgatagagtccctgacatgggcaaaagacagctcatgaatctgcttcttcttggtgccatttcactcccctctgctggaa

SEQ ID NO: 560 - DNA, 255 bp, Glycine max
  Clone ID: 700873267H1
gtgtttagctagattgcactgttttaacttttcttattgatttttatccatctatctacgtttttggtctaatttttgttcaagcaaaaaacgggccaaggcccctaaacgaacaataaattaaattaaagcaaagtgaaaaatggcagatcatttgctgttaaggatgagatattctgcttgtttgagggggctctagacaatttgggcagcctgagacaacagtatggactggccaagtcagccaatgaagtg

SEQ ID NO: 561 - DNA, 254 bp, Glycine max
  Clone ID: 700873268H1
gatttatttatattctgcagcactcttgtgtgtcactagtgggagctatactattactaattgcagcatattcttttgttccacccaaattgtcacggaagaaacgagccataattggagttcttcatgtttctgctcaccttgctgcagcactgattcttatgttgcttcttgaaataggcattgaaatatgcatccagcataagttgctagcaacttcagggtatcacactttatatcagtggtatagatca

SEQ ID NO: 562 - DNA, 252 bp, Glycine max
  Clone ID: 700873272H1
ggccagagtatatgatgatgaagtgaggaagtggatttctggtgttggtgttgacagtgttgggaagaagcttgtgaactcaaaagatggacctccaacctttgagcagcccaagatgactctggagaagctcttgctgtatggtaacatgcttgtccaagaacaagagaatgtcaagagagtccaattggctgacaagtacttgaacgaggctgctcttggaaatgctaacgaggatgctattcagagggg

SEQ ID NO: 563 - DNA, 251 bp, Glycine max
  Clone ID: 700873274H1
gtcgtgtattcctatttcctagtttcattcagctcactgatttcaattacattgcataggcaattttgtaaatcagaggctaagagacttgtagtaatttgtaaagacgcctctgaattttggtccaccaccacacccttcttctcatctccaccacaccaggtgttgttgcgcttcagaaatggcttccggagctgtgccaactacgttttctaccctcaagacatgggattccagtttggggtttgcaa

SEQ ID NO: 564 - DNA, 250 bp, Glycine max
  Clone ID: 700873275H1
tactgcttcaccttctgctctagaaaattcagtgctgaaacatggcttcggctactctctctgtagccaaaccagcccttcaggcaaatgggaaaggcttctctgaattctctggcctccgaagctcatcaggcttccttcccttttctagaaaatcttcagaggatttccattctgtcattgccttccagacctatgcagttggaagcagtggaggatacaagaagggtgtgacagaagcaaaactgaa

SEQ ID NO: 565 - DNA, 251 bp, Glycine max
  Clone ID: 700873304H1
ctcgcaagcaaaaagaaagaatcccaggcgaggagaaagatggaggggaaggagcaggatgtgtcgttgggagcgaacaagttccccgagagacagccgattgggacggcggcgcagagccaagacgacggcaaggactaccaggagccggcgccggcgccgctggttgacccgacggagtttacgtcatggtcgttttacagagcagggatagcagagtttgtggccacttttctgtttctctacatcac

SEQ ID NO: 566 - DNA, 249 bp, Glycine max
  Clone ID: 700873307H1
gccgtggtggttctggctctgtccttttttcctttctctcgttaccagaaccagaagaaccatttgtggccaacatggatttggaccagtggatctccaaggtcaaagagggccagcatcttcttgaagacgagcttcaacttctctgcgaatatgtaaaagagatccttatcgaggagtccaatgtgcagcctgtcaatagtccagtgactgtttgtggtgatattcatggtcaattccatgatctaa

SEQ ID NO: 567 - DNA, 250 bp, Glycine max
  Clone ID: 700873313H1
cagaaagtgacactgagagaagaaggaaaaactaaccaacaccacagcccctaatttcctttttctcacaatggcggcttcagtcgacaaccgtcaatacggcacccacataaacgccgtcgttcgcgcttgcggcccagacttcaatacccctctcccgtcggatttcgatctggactcatccagcgacgacgaagaccaaaacgacgacgcttcgtatctcaaggagttgatacaaaaagcgaacgcg

SEQ ID NO: 568 - DNA, 247 bp, Glycine max
  Clone ID: 700873323H1
gggagatccaaaaagagagagtggaaaagatggcgcggttgatcacagtggtgtggtgcgcggtggcggtgctattatgcgccgcggccggtgcgtcgtgggtggaggaggcggcgaacccgatacgaatggtgtctggcgtggaggcggaggtggttcgggtgatcggggagtgccggcgtgcgttgaagtttgctaggttcgtgagcaggttcgggaagagttaccaaagcgaggaagagatgaa

SEQ ID NO: 569 - DNA, 249 bp, Glycine max
  Clone ID: 700873324H1
gaattgttgtaactttttgattcctaaattctctaaaattcgaaattctaatttcgttaggggaaagagattgtttgtgtgtgagtgagtatggctggaaaaggcgagggtcctgctatcggaatcgatttgggaacgacgtactcttgcgtcggcgtgtggcaacacgatcgtgttgaaatcatagccaacgatcagggtaacagaactaccccatcctacgtggctttcaccgacacagaacggttg

SEQ ID NO: 570 - DNA, 246 bp, Glycine max
  Clone ID: 700873326H1
acccacaccaataacaagcttggttggtacttatctacaatctgcatcatggaaggtgttattctgagaagggtcattccttcggataacagttgcctcttcaatgcagttggatatgttatggatcatgacaaaaagaaagctgctgagttgagacaggttatagcagcaacagtagcaagtgatccacagaaatattgtgaagcatttcttgggaagccaaacgctgagtattgtaactggatt

SEQ ID NO: 571 - DNA, 245 bp, Glycine max
  Clone ID: 700873336H1
gtttattctggacaaatttgatgggaactctgaactggttgcagagttggttaccgttaatgggtttaaagcagcttatgcgattaaggatggtgcagaaggaccgcgaggatggaagagtagtggtcttccttggatagaaccacggaaaacattgagttttgacaatctgacagatgctatatctgaagcaataggagataccactgatggcgtggcagttactcttggggttgctgcagctg

SEQ ID NO: 572 - DNA, 247 bp, Glycine max
  Clone ID: 700873340H1
gcttcaagttgttatgtctttccatcagtgtgggggaaatgttggagacaattgcagcattcctctaccaccatgggtgttggaagaaatcagcaagaaccctgagctggtttacacagacagatcagggaggaggaatcctgagtacatctccttgggctgtgattcggttcctgttctaaatggaagaactcctctccaagtgtactctgactacatgagaagctttcgtgacaaattcagagat

SEQ ID NO: 573 - DNA, 241 bp, Glycine max
  Clone ID: 700873358H1
attggaatggacttgtggaatgcatcttctggtggcgctgaagctgcaaaaatgagacataatcaatctggtgccccgggagttgcccttggtgatcaatgggtacaagatgaacgtgagctgaaaagacagaagaggaaacagtcaaaccgagagtcagccaggaggtcaagattacgcaagcaggctgagtgtgaagagttacaaaagagggtggatcgctgggaggtgagaatcaaac

SEQ ID NO: 574 - DNA, 240 bp, Glycine max
  Clone ID: 700873374H1
ttgcaattgaagttgaagtcttgcccttctctcttcaactccaaacacaagacatcatcatccatggctgcctccgtctccactgtcggagctgtcaacagagctcttttgaacctgaatgggtctggacctggggtttcagctcccagttcatccttctttgggagcagcttgaagaaggttattggctcaagggtccccaacacaaagatttcctctggaagcttcaagattgttgct

SEQ ID NO: 575 - DNA, 242 bp, Glycine max
  Clone ID: 700873378H1
aggatttctttgattaagattacatgggaggatttgaagattgggtttgtcagcgccgcaattccgcaaataccgttatccgttttgaattccgttatcgcggtatgtaagctgtccggggatttgtttcccgaacgtgaggcttcggcgatgcatgtttcggtgagtgtggggcttatgaattttgtagggtgttggttcggagccatgccttgttgccacggggctggtggtttggcggg

SEQ ID NO: 576 - DNA, 241 bp, Glycine max
  Clone ID: 700873383H1
gatccatttattggattcatttaccctgcgatataagcacacccatatttacaaccccatttcacagtaatggtggtttgatatattattttaacagcattctgttatgatcaagcacaaagttcctagaattcgaggtctagggcctccagagcaacaaaagggagaagggaaatagtttattttgccttcttctgagccttggaggaattgagaaattgagaaatgcactgcgtgattg

SEQ ID NO: 577 - DNA, 240 bp, Glycine max
  Clone ID: 700873385H1
cccaactcgtgcatttgaagaaagacaaaaaggggttggtttttggttttggttttggtttggttaactccctcttcctcttctactctcacccatggtctccgaatccgaactcatcggccgcctccgcgagtttctccggagctccgacctcaacaccaccacaaccgccaccgtccgccgccagttggaggccgatttcggaatcgatttatccgaccgaaaggcattcattaggga

SEQ ID NO: 578 - DNA, 240 bp, Glycine max
  Clone ID: 700873387H1
cccttgaggtggaaagctctgacaccatcgacaacgtcaaggccaagatccaggacaaggaaggaatccccccggaccagcaacgtctcattttcgccggaaagcaacttgaggacggccgtacccttgctgactacaacattcagaaggagagtactcttcacctcgtcctccgtctccgtggtggcatgcagatcttcgttaagacactcaccggcaagaccataaccctagaggttg

SEQ ID NO: 579 - DNA, 242 bp, Glycine max
  Clone ID: 700873394H1
gataaggcaatgaatctgatgcaggcggttcgctacgacgcctacgggggaggtcctgccggcctcaagcacgttgaagttgccgttcccagtccaaaggcaaatgaggttttaatcaaactggaagcagttagcattaaccctattgattggaagattcagaagggtcttctccgtcctttatttctccccagaacctttccccacataccttgcactgatgtggctggagaaatagttga

SEQ ID NO: 580 - DNA, 263 bp, Glycine max
  Clone ID: 700873440H1
attcattccccttatctttctctcttctctctccccgcccaaaccctaactccctaccctattccgctttctctcatccatcatgaaaggaggaaagtccaagaccgaatctaagagagccgatgccaaacttgctgtgaataagaagggcgccgccaccaagactaggaaacccgccggaaaggggaaggcagcgaaagatcctaacaagccaaagaggcctccaagtgctttcttcgttttcatggaggaattcaggaagg

SEQ ID NO: 581 - DNA, 257 bp, Glycine max
  Clone ID: 700873479H1
caggagttggagaatgtattaaaggtgaaattgcctcttcctacaaggatcctttatcgctttcacaatgggcaagaatttgcaaaggcagatccagaaactagtacatttggcagatctttgggtctaattggtggctactccttctatggtcatttggtgaatgtttatctattacctatatgtcagataatcctagaaactcagcaaactaggcgtcgcttgagctttttaagaagatcaaagtatgttcttgt

SEQ ID NO: 582 - DNA, 254 bp, Glycine max
  Clone ID: 700873486H1
gcatagtagagaagcaaggtgctgagtaccaagagatagctaaaatgggacttgggactctgccactgaccccttcttacagcggtttctcttcaaactcaggacttatacatgacaccaccaatcacagagggtcaatagaagcatgaaattcagagtttcagcaaaacaagagaagcaagaagagaagaaaaagcaatctttgttcagcagtgtgactgaagctcttgatttttctcaagtgagatccgctg

SEQ ID NO: 583 - DNA, 239 bp, Glycine max
  unsure at all n locations
  Clone ID: 700873508H1
attcccgctgnctcngnagnnananntggcctcattttagttggnggatggctggntacacnctgggtntnctggttanacggctatcgcagttaganaagctgtgaaaanagnattggtanatgntgagcctatgggaaagcctgntccattttcttctcttgaagtgtggacttggagntgntgttcncctnatatcatttgtatctgcatatnntaccctacagcactgggtacaa

SEQ ID NO: 584 - DNA, 230 bp, Glycine max
  Clone ID: 700873574H1
caagtggtgggcgaggaacgggctcaatcttggtgtcggcacaagcgagtggatgaagacgaagaccctgaacaattcttagataacctagcgttttttgtgtgttttgtttattggagcgatgcatggcgtctgggtttgttatcaacggacggacggatggacggacgggtttaggaacagctggaaacgagcattgatgtttttctcatttggcactttgaaacagc

SEQ ID NO: 585 - DNA, 247 bp, Glycine max
  Clone ID: 700873619H1
gcctgatgaagctgtttacgacaaggagcgacccggagttacatggccgaagcagttgaatgcttcacttgaggtcgttgatcctgagattgctgatattattgagcttgagaaagctaggcaatggaaggggctggaactgataccgtcagagaatttcacttctgtgtctgtgatgcaagcagttggatctgtgatgaccaacaaatacagtgaggggtaccctggtgcaagatattatggtgga

SEQ ID NO: 586 - DNA, 246 bp, Glycine max
  Clone ID: 700873662H1
cagtaggtagtgcagattctgagcaggagagcaactctggacctgatttggaacaagctattttaaagcaaatatcggatgaaaagctacaaatttatgatgaaatcttctctgaagcacatgctgaaggagaggatggatggcaatcagttcaaagaccaagatcagctggctcatatggccggagactgaagcagagacgggcagcacttggcaaagtttatagttatcacaagaatgtggaag

SEQ ID NO: 587 - DNA, 241 bp, Glycine max
  Clone ID: 700873673H1
ggcatacctttcatggaaacaagtgcaaaagatgctacaaatgtggaagatgctttcatggccatgtctgctgccatcaagaatagaatggctagtcagccttcagcaaacaatgcaaggcctccaacagtgcagatcagagggcaacctgttggacaaaaaagtggttgctgctcttcctaaccaggtggtgctgcttggtctacacttaccttttgcatgtaaggggcatatgctattt

SEQ ID NO: 588 - DNA, 242 bp, Glycine max
  Clone ID: 700873681H1
gtaaacaacgaccatgaaactaatgacagcaacaacaacgtttgatgtctctgccacttgcttccgtgcccctcctccttcgtgctcaatgaatccatgccacaccagtttttcagttataaactccctgaatcctcacaagggacgacggataagcgttgctgttccacccaagtttctaaacttccggagggaagcatctctgcaggggaatttggaggctattagagtcccaacttcgg

SEQ ID NO: 589 - DNA, 242 bp, Glycine max
  Clone ID: 700873693H1
ggacagtctgaggttgaagctaccctcaatttgaatgccatgaaccaatctccaaacccgtggcacgtgtcattctcgtatgccagagccctccaaaacactgccttgaagacatggggaggccgcccagagaacgtgaaggcagcacaagatgcactcgcattccgtgccaagtccaactcactcgctcagcttgggaagtacactggtgagggtgaatccgaggaagccaagaaggagtt

SEQ ID NO: 590 - DNA, 265 bp, Glycine max
  unsure at all n locations
  Clone ID: 700873703H1
ccagtccatgctggaaggactcgacgangaagggtgcgtggaagangcagggcannactctgagaagaaacgacgactaaacgtagatcaggtgaaggccttacanaagaacttcgaagtagagaacaaactggaacctgaccgaaaggtgaagctcgcgcaagaactcggcttgcaaccaagacaagttgcggtttggttccaaaaccgccgtgccagatggaaaacaaagcaattggaaagagattacggcgtcctcaaagcc

SEQ ID NO: 591 - DNA, 256 bp, Glycine max
  Clone ID: 700873774H1
ataagattgatgaggacaagggaaaaggttcttccttatcttccaagaagaatgtttcagaacgtttaaaagaagaggtaagagatgcaaaaataaaagttctagcaagcctaaaacaagaaactgatgaagagcgtttggagtggaaagagctatctgccttgcttaaatcagaatatccaaagtacactccattacttgcaacgattttggaaggtttagtttcttggagtaatatcaaagacaaaatccatct

SEQ ID NO: 592 - DNA, 252 bp, Glycine max
  Clone ID: 700873775H1
ggcccttgcccttggcgctgatctgattctgcactccttaacaaaatacatgggtggacatcatgatgcccttggtggttgcataagtggttcaactaaggtggtttcgcaaattcggactttgcaccatgttttgggtggtacacttaacccgaatgctgcatacctattcatcagaggcatgaaaacgctgcatctccgtgtacagcagcagaattcaacaggaatgaggatggccgaacttttagaggc

SEQ ID NO: 593 - DNA, 253 bp, Glycine max
  Clone ID: 700873776H1
gcacaattggcaaaggaagtagaataccttcttaggaagggatggattccttgcttggaattcgagttggagcacggtttcgtgtaccgtgagcacaacaggtcaccaggatactacgatggacgctactggaccatgtggaagctgcctatgtttggttgcactgatgcttctcaggtgttgaaggagcttcaagaggctaagactgcataccccaacggcttcatccgtatcatcggattcgacaacgttc

SEQ ID NO: 594 - DNA, 252 bp, Glycine max
  Clone ID: 700873781H1
atcctgttggcacccacttggattatcaagctttcataactcaagcattggaagggaataacaagctatagtacactcagaaaaaacgatgagtcccatgaccatgatcacgaccacgatgtttctttagacatgtcaaagttcgatacctgctaaggttgccttgatttctgtgaagattctcgtatatacgtgtttaccctccatattatattaacatttggacagtgattccctgtggctactagttag

SEQ ID NO: 595 - DNA, 252 bp, Glycine max
  Clone ID: 700873906H1
ccactttctacaagaagaaacctgaagatggatcaatcagtcatagagttcagagattggcaaagtatcgctttctaaggaaacaatccgatcttttgctgaatgctgatgatttggatgcaatgtgggtgtgcttaagagagaactgcgtcattgatgatgctactggtgcagaaaagatgaattatgaagacttttgccacattgcctctgtatgtacagaacaaataggtcctaaatgccggcggtttt

SEQ ID NO: 596 - DNA, 250 bp, Glycine max
  Clone ID: 700873909H1
gcgagtcaccagaagataaatctaaatgggaatgtgtaagaaagggactttgctgcatatgctgtgaaagcaatatcgattctttgttgtacagatgtggtcatttgtgtacatgttcaaaatgtgcgaatgagttgcttcaaagcagaaggaagtgcccaatgtgtcaagctcctgtggtggaggtgatacgtgcttattctatacaataatttgacattaatataaaggtcacacttttaacaaaata

SEQ ID NO: 597 - DNA, 127 bp, Glycine max
  Clone ID: 700873921H1
gcatgaaagccacgatagacagtcaagtaactgtttgtccttgtagttgtagttcttaaggatgaaagttttcacttgctgtatttctggcttcactttgtaataaatgttatgtttgtatattagt

SEQ ID NO: 598 - DNA, 246 bp, Glycine max
  Clone ID: 700873927H1
atacaaaaacaactttgcaatttcgtaggagatgctcaggagcagcacgctaacacagagtgttacagtcacctgtgttcgtcacagtcacagacaatggttccaatcaattcccgtaaattatagattctttgacgctgctcggaactctctatcatcacccaactccgcgatcttcaaatggaaaagaaaggccaattataaccgtcatagttctggaatggggaccttcaccactcgcgcgtt

SEQ ID NO: 599 - DNA, 252 bp, Glycine max
  Clone ID: 700873934H1
gccgtgaagctgggcccatcagccccagaagtgggaagggtgagcatgaggaagaccgtcaccaagcaggtctcctcaggaagcccatggtacggcccagaccgagtcaagtacttgggcccattctctggcgagcccccgtcctacctaaccggtgagttcccaggcgactacggctgggacactgctgggctttccgcagacccagaaaccttcgccaagaaccgtgaactcgaagtgatccactccagg

SEQ ID NO: 600 - DNA, 249 bp, Glycine max
  Clone ID: 700873949H1
gtcctataaaaaatattcacaaccaccatagttagaatattgtcctaattggggtagttaacacaagtccctaatcattcttataatgcccatggatttagactctacacttgcttcataattgggtggttgttgttgttgaaaagtattgtatgtgtggtgcacagggcagagattaatataaagccatggcatattttgttgggagggttgaaagaagacactacgaggataccatggctgaacaga

SEQ ID NO: 601 - DNA, 246 bp, Glycine max
  Clone ID: 700873954H1
atcatacaaagcattgaattcaaaaacttaagttcattccttgtgttttgctttcttcctcaaaaccaaacatgtcgaacacatgcggcaactgcgactgcgctgacaagactagctgcaccaagggaaacagctatggtgttattgtagagactgagaagagttacatcgagactgttgtcatggatgttccagcagctgagcatgatgggaagtgcaagtgtggcactaactgcacttgcacgg

SEQ ID NO: 602 - DNA, 247 bp, Glycine max
  Clone ID: 700873966H1
atcgtgaatgcgtataaaaggaaaataaagaaattagcgtcaaaatgttgggtgtgttcagcagctccatagtgtcgccgccggacgagctcgtggccgccggcagccgtactccgtcgccgaagatgacggcggcggcgctgcggaagcggttcgaggagaagaacccctccgccgtgtcggtggaggtcggagagcatgtccagctcgcttatacccaccacaacgagtcgccgtttcagcccag

SEQ ID NO: 603 - DNA, 241 bp, Glycine max
  Clone ID: 700873973H1
gatacacaggcatcagtttcagttcccccactctctcctcggcgataagcaacttggtgcccgcttttacttttttgcttgccatcattttcaggatggaaaaggtgattgtaagaaatacaacttgtcaagccaaggtattgggtaccatagtatcaataactggagcattcgtagtgaccttctacaaaggaccaccaatcatcattgttcatacaccttccttgtcacttcatcaacc

SEQ ID NO: 604 - DNA, 191 bp, Glycine max
  Clone ID: 700873975H1
ggaataaccctgcttactagccagcttgaaatggcgttggcttaagatgccaacatgaaacattttcatgtgcccttgacttgtgtgaactttgcaggttgtgggttcattcacttattatgtgcaccttgctgcggctctctgcaaatgtattgagctgtcatgtatgcagaaaataaattactttattt

SEQ ID NO: 605 - DNA, 244 bp, Glycine max
  Clone ID: 700873995H1
gaagggatgatctggaatctcttggttatgtgctcatgtatttcttaaaaggaagtcttccctggcaaggactgaaagctggcacccaaaaacaaaaatatgataaaatcagtgagacaaaggtgtcaactcccatagaggtgctctgcaaatcatatccgtctgagtttgtatcatacttccgctattgccgatcactgcagtttgaggacaagccagattattcgtatttaaagagactttt

SEQ ID NO: 606 - DNA, 264 bp, Glycine max
  Clone ID: 700874007H1
aaataaactcacccactaagcactacacaaatcacacagagttgcaagagaaagataaaagaagatggcgactcttgattccgacgtgcctatggttcccgccggcgagccctcgagcagcgccggtccttcttccaagaagcccaagcgcttcgagatcaagaagtggaacgccgtcgctctctgggcttgggacatcgttgtcgataactgtgctatctgccggaaccacatcatggatctctgcatcgagtgccaagccaa

SEQ ID NO: 607 - DNA, 264 bp, Glycine max
  Clone ID: 700874009H1
acataacataacatccttaaccctttgaacatcgttttgcagccatggaaacaggcatagcatgctacactcgcgggcctttcttgcctagtgtttcttccaagcactctccaccttccatttctccatcttttggcttgaggagtctgaaatcaagctctttatttggagaatcgctaagagtggcctccaaatcaacaataaaggtttcaaagacaaagaatacttcactcgtgaccagatgtgaaattggtgacagtctcg

SEQ ID NO: 608 - DNA, 258 bp, Glycine max
  Clone ID: 700874016H1
cgcggaagagttacagacaaatggcggaaattcatgaagggacaaataaagagggcgaggatgttttttgatgaggcagagagaggggttgcagagctcaactcagctagcaggtggcctgtgtgggcatcattgttgttgtataggcaaatattagattccattgaagccaatgattataataacttcacaaaaagggcatatgtaggaaaagtaaagaaactcttgtcactacctactgcctatggtttttcactt

SEQ ID NO: 609 - DNA, 257 bp, Glycine max
  Clone ID: 700874027H1
agcaaggtcaacaagcccccgctatccctctctagattgattcgttacaccaagggaaaggaggataagatagctgtggtagtcggggccgtgaccgatgacattagggtgtatgaagtccctgctctgaaggtaactgccctgaggttcactgaaactgccagagctagaattgagaaggctggtggcgaatgcctcacctttgatcaactggctcttagagctccactcggccagaatacggttcttcttagagg

SEQ ID NO: 610 - DNA, 256 bp, Glycine max
  Clone ID: 700874029H1
ctttctgtatccgtaacacttgcaacacacatggctacaatcaccaacactttcatattcaaaccccccatctctcatcacccaaagcagcttctttattcccaccgctcttctctacgctttctcaccaaatttaaaaccccctccggagcgaattctcggcggctggttccgaaagccacggcggctcccggggccaagaagacagaaaagccgcacgagagagtccagcgagtccacagcgtggaggagttcg

SEQ ID NO: 611 - DNA, 260 bp, Glycine max
  Clone ID: 700874036H1
ttaaaattaaccatagttaatataatggggtcggggattaaggtttcgttttctgtgttgtgtttgttagggttagtcattgtgggtgatcatgctgcgtatgctcaagactcaccaacagactttgttaatgcacacaacgctgcaagatcacaggttggtgttccaaatatagtttgggatgacacagttgcggcttttgcacagaactatgctaaccaacgcaaaggtgactgcaaacttgtccactctggtggtga

SEQ ID NO: 612 - DNA, 255 bp, Glycine max
  Clone ID: 700874073H1
aagacccgcagcaagaactatgaaagtactcataacaggaggtagtggattacttggaagagctttgatgaaagcatttgagggttgtgaaacccttgggcttgcattctctcgtgctgatccttcgaagaatcttgttaaatgtgacctgcgtgaccctgctgatcttagagctaaaattctagagtttaagcctgatgtaataatacatagtgccgcagagcgtagacctgattggtgtgtccaacacaggga

SEQ ID NO: 613 - DNA, 251 bp, Glycine max
  Clone ID: 700874080H1
ggaaatggaagcaagcccaagcccaagcccaagcccgaagcaagtagtggcaaggaagctatggaacatagtacgcatcgtgttcctgatgttgagaaagggcatatcaaagagcaaactcgccgctgacttcaacttgaacttgtcgttcaaacgtggcaagctggcagccacaaaggccatagccaacactatcctccaccgctcccaaaacgacgacgccgtttacccgcgcgactacgagttcagct

SEQ ID NO: 614 - DNA, 255 bp, Glycine max
  Clone ID: 700874081H1
gggtatttgggtatggttctttgatctcgaaagctgggtttcactatgacgaacgtattgttggtttcatcaaaggctatcgacgagtcttctaccaaggctctactgaccacagaggaacccctgagttccctggaagaacagtgaccctggagcctgctgaaggagaaatatgttggggagctgcttacaagatcgcaaagaaagaagatgcagaaacggcattagtgtacttggaagtaagggagaagcaat

SEQ ID NO: 615 - DNA, 102 bp, Glycine max
  Clone ID: 700874088H1
ttgcacactgctacattacataatctttgaccccggctgaggattttccttgtattactttgtaactaacaccagagatctaattatattttctttcgtggg

SEQ ID NO: 616 - DNA, 247 bp, Glycine max
  Clone ID: 700874101H1
tgcagaaggtgttccaaagaggctaaccttcgacgaaatccagagcaagacatacttggaagtgaagggaactggaactgctaatcagtgcccaaccattgaaggtggagtggactcatttgccttcaaggcagggaaatacaaggcccagaagttgtgcctggaaccaacttccttcacggtgaaggcagagggtgtggccaagaatgccccgctcgaatttcagaacaccaagctcatgactcgt

SEQ ID NO: 617 - DNA, 237 bp, Glycine max
  Clone ID: 700874107H1
cggcgacctttccaatgtaggcctacgcaacgtgctggctcgtccgtctgtgggctccgaaaggatccctgaccttctatactgcgtataccaaggcatgttcgcatgcatcacagtcgccttggcatctggagccgtcagcgagcgaggcagaatgctgccgtgcgttgtgttcatgttcatatggacgactgtcgtctacgatccactcgcgtgctggacttggaacccggcagg

SEQ ID NO: 618 - DNA, 237 bp, Glycine max
  Clone ID: 700874108H1
actgaagctaaccgccaggcataccgtaccctccttgtgacagttccaggacttggtcagtacatctctggtgccattctctttgaggaaactctctaccaatccacaactgatggcaggaagattgtcgacgtgctcctcgagcaaaacattgttcccggtattaaagtcgacaagggtttggtaccccttgctggttccaacgacgagtcatggtgccaaggtcttgatggtctt

SEQ ID NO: 619 - DNA, 239 bp, Glycine max
  Clone ID: 700874109H1
atcctcttctttctctctctaccattgccatggatccctacaagcaccggccatccagcgccttcaattctcccttctggactacaaattctggtgctcctatttggaacaacaactcctctttaaccgttggagctagaggtccaattctgctggaggattatcatcttgtggagaagcttgcaaattttgatagggaacgtatcccagaacgtgttgtccatgccaggggcgctagt

SEQ ID NO: 620 - DNA, 241 bp, Glycine max
  Clone ID: 700874118H1
aattcaactcagctattctctcttctctataagttcctctcctccattgtttttccctcccattcttccatttctgttttctcccatccctctcgcgcgctctctctcccatggaatcctccgctgccattcgatcttttcactatcccataggcactatgtcccatgtgcgagcctcccttgagaagcaggctgtagttcccattcataatgccggatggaactctaaaagtaggctttt

SEQ ID NO: 621 - DNA, 236 bp, Glycine max
  Clone ID: 700874122H1
gggacactactaggattgggaagaagggtctttacatttttagtttggcaaatagatattgcaactacctttgtataaatctatttctgaagaagcaattacaactttcaagggatgatagcattttgtggcataaggattaaggaggcataaaggaccaattgctttggaatattcactcatgacaaggcacaaggtcatgcgtgtatgccaacacatagtaatgatgtgtgttt

SEQ ID NO: 622 - DNA, 235 bp, Glycine max
  Clone ID: 700874127H1
tttaatcacgcgcacatcagcacaacacaacaattcactaagctaaaatcacttcatcatggcttcctcgtgtgcttcctctgccattgcagctgttgccatctccacaccaagttcccagaagaatggatcactcttgggaagcacaaaagcttcttttcttagtgggaggaaactgaaggtgaacaactttacagcaccagttggagcacgatccagcactacagtttgcgca

SEQ ID NO: 623 - DNA, 234 bp, Glycine max
  Clone ID: 700874141H1
ttctcacttcaactttgaacttcttttctctattattattatctttctctttttcttcatctcttatcttccttcacctttttattgaaagaaaaaaaaaatgagcaacataagcatggtagaggcaaagctgccaccaggattcaggtttcatccaagagatgaagagcttgtgtgtgattacttgatgaagaaggtgcaacacaatgattcccttctcttgatagatgttga

SEQ ID NO: 624 - DNA, 232 bp, Glycine max
  Clone ID: 700874154H1
gaaacaaaaaaatcacaaaccaagcttaattacccaagagagaaattaagaagctagtttgcttgtttttcggtgaactcagggagtcagatagataatactgatccctcgagatattgagattcatctaagagattaatatcatcctacccaaccacaagcttagattgaaacaagatggaagtggtggtacaaagtcctagtagtccaaccatggataatttcgattttg

SEQ ID NO: 625 - DNA, 231 bp, Glycine max
  Clone ID: 700874155H1
gaagagtgtcacacggtgttcggaaagtacgagatggggaggcttctcggcaaggggacgtttgccaaagtgttacgggaagcaaataagcacgggcgagaacgtggcaatcaaagtgatcaacaaagagcaagtgagaaaagaaggaatgatggaacagatcaaacgtgaaatctccgtgatgcgtttggtgcgacacccaaacgtggtggaaatcaaggaagtgatggc

SEQ ID NO: 626 - DNA, 227 bp, Glycine max
  Clone ID: 700874171H1
gtaacattgccacatattgtgttcattttggaattgtgccactaaaattctattcaattcatctatggctgcctcttcttatgctatgcaatcaatcctggcaaaccctttgatccgcatttccagcgggtctagggtgaaccaatttggcgttcctgctttgcacatgagaaggaatgttggcctgagagttaggtccatggctaaggaagaacaaccaagtgagc

SEQ ID NO: 627 - DNA, 224 bp, Glycine max
  Clone ID: 700874191H1
gcgggtctagggagaaccattttggtgttcctgcttatcacatgagaaggaatgttggcctgagagttaggtccatggctgaggaagagcaaccaagtcagcctgcgaccccagttacaccaccaccagcagaacccaaaccacagccagtctctactccttcaccaaaggtgagcaccaagttttctgatgtgttggcgttcagtgggccagcacctgagagg

SEQ ID NO: 628 - DNA, 226 bp, Glycine max
  Clone ID: 700874196H1
attgagtctgaattcagtgaggttggttcgcttgacgaggccatcaatttggtcaagagttgtgggggcattgaaagagcacaagagttagcaaaagagaaagctgatcttgcaattcaaagtctccaatgcctacctcagagtgtgtttcgtttagcccttgaggatatggtggcatataaccttcaacggattgcataagcttgtgcatgccgaggacactttg

SEQ ID NO: 629 - DNA, 265 bp, Glycine max
  Clone ID: 700874213H1
cgaaatcaactattgacagcgggaataacgtattaacatcaacaggcctcgctttgagaaatcagacggcggagagaatgggtttatcactcttacggtgggttctgccgctgactctgttgctcacctgcgccctaggtttccaatcggacgagcttctcctcgacgacgaagagttcggcatcgaaggaggacgaacctcctttgattccgattcgcatccaccttccaccgcctccacctcgaggaagaggctttccgactc

SEQ ID NO: 630 - DNA, 268 bp, Glycine max
  Clone ID: 700874216H1
cgcccatcacggatgagaggcgcatagagtgtggagaagttctactgggcaccaacaagggatgaccgcattggtgtctgcactggaatttttcgcaccgattcaattcctgaacaggacgttgtcaagattgttgacaccttccctggccaatccattgatttctttggtgcactgagggccagagtatatgatgacgaagtgaggaagtggatttctggtgttggtgttgacggcattgggaagaagcttgtgaactcaaaagatg

SEQ ID NO: 631 - DNA, 260 bp, Glycine max
  Clone ID: 700874227H1
gtcgaattttatcactggattaataattagcacatagttttttggaagagttgtgaaaatgggacttgtggagctttttggagtggcatctatgcccgtgatcaaagtactaataatcactgcagttggcttgcttcttgcactggataacgtaaatttgttgggaaaagatgcaaggatacaagtgaatcatcttgtgcattatgtgttcaatcctgcactggtgggtggcaatttggcggacacgattacttttgaga

SEQ ID NO: 632 - DNA, 263 bp, Glycine max
  unsure at all n locations
  Clone ID: 700874241H1
gacggtgtcatctcgatcctcctcatccagaaaccctttaggagcaaactcaattgacaatgctngaggaccatgcaaataatctctttgataattcttgtatgatctccggaagtcatgcatcaaccttggataggctatatgcttgggaaaggaaactctatgatgaagtgaaggctagtgagatagtcagaaaggaatatgacatgaagtgtaaattcttaaggcaactggaatcaaaaggagaaaagacctctacagtt

SEQ ID NO: 633 - DNA, 260 bp, Glycine max
  Clone ID: 700874260H1
gacgccgcgccaagcgacgaagagcgactccgacagacccagcttaactcgcaaggccccgagcccaaggcgcccatctggcagccccaagcacaggtcgccgacaagtggacgttgtctgtgccgccctccgagaagttccgcatccagtccaccgtcccggagatccgacctggaatcgtccgccggatacgcacgtcgcgtcccgagggcgagtcgttggcggacaagaacggcgaggtggatacgttgatcggggc

SEQ ID NO: 634 - DNA, 257 bp, Glycine max
  Clone ID: 700874272H1
ctcaaagcaaaaccaaagagtcgaaaaatgtcagacggaacattgcaggtactggacggaacgcacctgagaggcgtcgatctgtccttaggcgacgacggtccattcaccggagctaacatactcgacattgcccattcccgagcctcttcttccctcttcggtctctcattacccgattatctcaaagcctctgctctcacgcgcctccgcactccagacgccgatgctttccgctccgccgagtacaccgccga

SEQ ID NO: 635 - DNA, 149 bp, Glycine max
  Clone ID: 700874281H1
gtcgcttcttcgtaggtgcagctgcaatggtgaagggacgccaaggagaacgtgtcagactctacgtgaggggtacaatccttggatacaaaaggtccaagtcaaaccagtatccaaatacatccctgatccaaattgagggtgtgaat

SEQ ID NO: 636 - DNA, 265 bp, Glycine max
  Clone ID: 700874284H1
cgaggatcctaatgcagaggcaaatatctccaccaacctcaccacaatgtataggcagcttgtgtctaacgcaaagactccaacattgttcttcggaaatccttatcgtgctggggatcagcctaaccctggtggtggctccgtagagagcactccacatggtcctgttcatgcatggaccggtgatatcaaccaccctacaatggaggacatggggaatttatatgcagctgcaagagaccccattttctattgccaccattcc

SEQ ID NO: 637 - DNA, 253 bp, Glycine max
  Clone ID: 700874289H1
caaccttatcccgctccttgttggcaatgtgggattgattttcaccaaaggtgacctgaaggaggtcagtgaggaggttgccaagtacaaggttggagctcctgctcgtgttggtttggttgccccaattgatgttgttgttcctcctggcaacacagggctcgatccctcccagacctctttcttccaggtgctcaacattcctaccaagattaacaagggtactgttgaaatcattacccctgtggagctc

SEQ ID NO: 638 - DNA, 253 bp, Glycine max
  Clone ID: 700874290H1
gaatattctctcgtctgattacttcaaggagctctatcgattgaaaacgtatcacgaagttattgatgagatctacaatcaagttgatcacgtggagccatggatgacggggaattgtcgtggtccttcaactgcattctgtcttctgtacaagttttttactatgaagctcaccgtcaagcaaatgcatgggctgttaaaacacctcgattctccttacataagagcggttggatttctctatctgagatat

SEQ ID NO: 639 - DNA, 241 bp, Glycine max
  Clone ID: 700874304H1
gccatccctgatggctggatgggattggatattggtccagattctgttaaatcattcagtgaagcattggatactacccaaaccatcatatggaatggaccaatgggagtgtttgagtttgacaagtttgctgttggtacagaggctattgcaaagaagctggctgatctcagtggaaagggggtgaccacaattatcggaggaggagattctgttgcagctgtggagaaagtaggagttg

SEQ ID NO: 640 - DNA, 242 bp, Glycine max
  Clone ID: 700874315H1
cgcacgaatatcttgttgtttggagcgatccgagaaaaactctgtaaacatgttggtttaccaggacctccttacaggtgatgagcttctctctgactccttccgttacaaggaaattgagaatggaatgctgtgggaagttgaggggaagtgggttgttaaaggagcagttgatgtagacattggtgcaaacccttctgctgagggtggaggagaagatgagggagttgatgatgcagctg

SEQ ID NO: 641 - DNA, 246 bp, Glycine max
  Clone ID: 700874316H1
caaaggttgctgtaggagataagattgcagtagtgctaagtgctaacacctgcagtgaacaatggcctctgcatcagcatctctgctcaagtcttcacttgttcttgacaagtctgagtgggtgaagggacaaacccttcgccaaccttctgcatcagttgtgagatgcaaccccaccaccccatcaggcctcaccatcagagctggttcctatgctgatgagctcgttaagaccgcgaaaacagt

SEQ ID NO: 642 - DNA, 243 bp, Glycine max
  Clone ID: 700874333H1
gtcgcactcttgctgattataacatacaaaaggaatcaacacttcacttggtcttgaggctaaggggaggtaccatgattaaagtgaagactttaactgggaaagaaattgaaattgacattgaaccaactgatacaatcgaccggatcaaggaacgtgtagaagaaaaagagggaattccacctgtgcagcagagactcatatatgccggtaagcagcttgctgatgacaaaacagctaaag

SEQ ID NO: 643 - DNA, 241 bp, Glycine max
  Clone ID: 700874334H1
gcaaaatcttatcttagctaccccatcacaacaaccacgatactatttctcatactctattaggcaaaaacaccaccaaatgggagaggaaaaggagcagcctaagaatgacaccgagaaaaagcccgaggaggtagcccccaagaaagacgacggacccatccctgtcgtttacaaactcgacttgcattgcgagggatgcgtcaagaagatcaaacgcacctgtcgccacttcgaaggt

SEQ ID NO: 644 - DNA, 237 bp, Glycine max
  Clone ID: 700874336H1
gggagagatcgcacgggagttgcccggggtctctctctcgtgtggtgtgtggtgtttgctgtgctctccttttcgttatgccttttattattacctatctgtcgctccactccgtattacgactctggatcagagggatacatcagaggattcgctccaactcctatcgaataaggtattatctgtcaatttacattggaaagggttaggatattcaattttacataattaaagata

SEQ ID NO: 645 - DNA, 243 bp, Glycine max
  Clone ID: 700874348H1
atctagtcatcaggagcatagtcattatcatgctgagaaagctgcttctaataatgcactggaagatactccaaagaagtcttttgcatccattgtgaatgcactgaaagaaaatgctgctcccttccatgtgagggtttcccccgtgaaacttgttgaacaaccacgtgtttctagcatacctgcaccagaagcaccagctcctagcattgaaagtccaccagaaaagaataatgagaatgg

SEQ ID NO: 646 - DNA, 240 bp, Glycine max
  Clone ID: 700874349H1
acgagatgagcaagagcgtaacagcaacaaaggactcaggcgacaacaccgcgacccacttgaattttttcgagaaatttaaacgctttaaccctctcgagtcttccttgggagtactagccttcttcttcgtcgcttctctcttcattgccagcttcttctacttggattacaaaggcttccgctccaggggcactgccactgtccttcacttggatttctcatcaccatcttcttctg

SEQ ID NO: 647 - DNA, 238 bp, Glycine max
  unsure at all n locations
  Clone ID: 700874351H1
cgagtacttccacnagncnganaagnccanncaggctctccgtggagcaagtgaagtttcttgagaagaactttgatgaagagaacaagctcgagcccgagaggaagatttggctagccaaggaactcggcttgcagcctaggcaggtggcgatttngtttcagaaccgccgcgcgcgctggaagaccaagcagatggaaaaggactatgattccctgcaggctagttacaatgatct

SEQ ID NO: 648 - DNA, 235 bp, Glycine max
  Clone ID: 700874352H1
gattactggacagagaaaagaccagtctcctggtactaggtctgaaatccctattgtccaggttgatcctgtttttgagggactggatggtggaattggcagcctggtgaagtggaacccggttgcaaatgttaatggtctagacatatggaacttccttaggaccatgaatgttcctgtaaattcattgcattcccaaggatatgtttcgattggctgtgagccatgcacaagg

SEQ ID NO: 649 - DNA, 236 bp, Glycine max
  Clone ID: 700874357H1
cttgtctcaagctctgcggcagaaaaaggaggatacaaaacttatgtgatggaaataaagggaaatcgtgtttacagtaaattgaaatatgaatctggtgtccaccgagttcaacgggttcccctaacagaaactcagggccgggtacatacttctactgcaacagtggccatcatgccagaggctgatgaagttgaagtcgtaattgacccaaaagatattgaactgacaacggc

SEQ ID NO: 650 - DNA, 235 bp, Glycine max
  Clone ID: 700874360H1
gccatgtctacttcaaagagcgtcagagttctagtgaagatgacaatgaacttagaagagggccttggactcttgaagaggataatttgctctcccaatatatttctagtcatggagaagggcgatggaatttgctagctaaacgttcaggattaaagcgaactgggaaaagttgcagattaaggtggctaaattatctaaagccagatgtaaaacggggaaatttaaccccaca

SEQ ID NO: 651 - DNA, 236 bp, Glycine max
  Clone ID: 700874379H1
cagttgagcttttgatgcaaattttgtcacttgtggatgatcaaacggttatcatagcttctgaagtgtgtcgtgggtggagagaggcaatttgctttggccttactcggttatcactctcatggtgtagcaagaacatgaataacttggtcctatccctttctcctaaattcacaaaactgcagactttaatccttcgtcaagacaagcctcaactagaggacaatgctgttgaa

SEQ ID NO: 652 - DNA, 233 bp, Glycine max
  Clone ID: 700874384H1
ctctttcgtttcgtccttgccttcaccccaaagcctattttcccattttccccttttcatgataacaactctccatgtagggcaaacttcacttcaattgaactaacttgtctgtggctttttgtagattgattcaattcaatgggttcagtaatgctcagtggaactgaaaagctcactctcagaaccctaaccgggaacggcttaggtttcactggttcggatttgcacgg

SEQ ID NO: 653 - DNA, 235 bp, Glycine max
  Clone ID: 700874388H1
ctcactcctacaccggcgaccaaaggcttctcgacgcgagccaccgtgacctgaggcgcgccagggcggcagctctcaacattgtccccacttcaacaggagcagcaaaggcagtggcccttgtcctcccaaccctcaagggcaaactcaatggcattgcactccgtgtgccaacaccaaacgtctcagtggtggacctcgttgttcaggtctcaaagaagacctttgcagaaga

SEQ ID NO: 654 - DNA, 248 bp, Glycine max
  Clone ID: 700874408H1
atttaccgtgcgagagagttggattcatgcgctgggaactactaccaaatcatgagtgtgcctaattcctcctgtaatatccatgaaaaggaggagcaaggagacgatgagaagggcaagcttgtatcattaggacaaatgaatagtttaagtgtgaaagaggatagtagaacatcaaagaacattagttctgaaggtgaaagaagaacaccagaaatcatgggaagatgtgcatcctggtgggcaac

SEQ ID NO: 655 - DNA, 246 bp, Glycine max
  Clone ID: 700874422H1
ggacactggtgctgtggttcgtggctttctggggcagcaacaacttgagagtgcactcactggcatggacttggtaatcatacctgctggggtaccaaggaaacctgggatgacaagagatgatttatttaaaataaatgctggaattgtgaggaccctttgtgaaggaattgccaagagctgccccaatgcaattgtcaacttgattagtaatccagtgaattccacagttgctattgctgcaga

SEQ ID NO: 656 - DNA, 246 bp, Glycine max
  Clone ID: 700874423H1
ccttcttcacggttcctcttcctctcttcttctctgttagaaaccctagcaaacactgtatttcgctctcgtttttctgcctcgttccgtgatcactgactctgccatggctggtcctgtttcctcgctcggctacgtcaatacggaaaggaaattccttaagcatatccgtgacaacgttcacggcaacattttgctggagccgatattcttgagctttatggacacggaacaatttcaaagact

SEQ ID NO: 657 - DNA, 254 bp, Glycine max
  Clone ID: 700874434H1
caagaagtgaagagaatgcgggttgtttgttgttccaattcaggcgtgagtgctttccctagttgtcttagattccctccactgatcgcaatttcaacaacaccctcttcgatccgctttctaaattctccacccctccgttccactgcttcgtcgcaacacgttacaataatggcttcgaagaattctcaacaagacacgcgcttagcgagaatcgcctctgcaatccgagtcatccccgactttcctaagcc

SEQ ID NO: 658 - DNA, 248 bp, Glycine max
  Clone ID: 700874436H1
ctggatttccgctcacagttatttgtaatagcatttttaatgagatgctcattagatatagctatgaaaaattactgcgccaggctaaagctccaagtatgtttttacaatccttcaaaaattttgtttctttgtgtgtgtatggtgatgataacttaattagtgttcatgaatatgtcaagccttactttagtggttctaaattgaaaagctttctagctggtcataatatcaccattactgatggt

SEQ ID NO: 659 - DNA, 244 bp, Glycine max
  Clone ID: 700874439H1
tgtttgtgatttagctctattttttatggttctgtttgtgattgaacagatgcagatcttcgtgaaaactttgaccggtaagaccatcacccttgaggtggagtcctccgacaccatcgataacgtgaaagctaagattcaagacaaggaagggatcccacctgaccagcagagacttatctttgcgggtaaacagcttgaggatggtcgaacccttgccgactacaacatccaaaaggaatcc

SEQ ID NO: 660 - DNA, 243 bp, Glycine max
  Clone ID: 700874468H1
ctacgagattacccgatgggctcctctccctccggcgactacagcttcacggcgggtgcggcgcttggggtgttttcttcacgggattgtttgcgaagaaagtgtacgtggaggagatttacggtgttggaaggccgttcggggctttgatgggtggcggagggaggctgctggcggcgcaggtgattcagatattggtggtgtgcgggtgggttacggcgaccatggcgccgttgttctatg

SEQ ID NO: 661 - DNA, 240 bp, Glycine max
  Clone ID: 700874471H1
caatttgtttcccagagtagagcaagaatggagaaccggttaagaggaagtggtcacggaattgcagctgcaaggatggatgcaaaactaaatgcagcaggttggatgtcagaaaagatgggaggtctcagttaccttgaattcctccgaacacttgaagagagagttgatcaagattgggccgatatctcatcatctcttgaggagatccgcaaatctatattttccaagcaaggctgc

SEQ ID NO: 662 - DNA, 240 bp, Glycine max
  Clone ID: 700874474H1
gccgattcggcttggatcatagtccacggtcatgtctatgattgcacccgcttcctcaaagaccatcccggtggcacagacagcatcctcatcaacgccggcaccgactgcaccgaggagttcgaagccatccactccgacaaagccaagcaaatgcttgaagactaccgaatcggcgagctcaccaccacctgctacaactctgattcttcatcgtcaaacccctccgtgcatggcagc

SEQ ID NO: 663 - DNA, 241 bp, Glycine max
  Clone ID: 700874480H1
ctctttcgtttcgtccttgccttcaccccaaagcctattttcccattttccccttttcatgataacaactctccatgtagggcaaacttcacttcaattgaactaacttgtctgtggctttttgtagattgattcaattcaatgggttcagtaatgctcagtggaactgaaaagctcactctcagaaccctaaccgggaacggcttaggtttcactggttcggatttgcacggtaagaact

SEQ ID NO: 664 - DNA, 234 bp, Glycine max
  Clone ID: 700874492H1
caatcatcttttgtttgttcttcagtactttagtgtgtgatttaattccaagattttgagaatgtctagctgtgggtgtggaagtagctgcaactgtggcagcaactgcggttgcaacaagtactcttttgacttgagctatgttgagaagacaaccacagagactcttgttttgggtgttgggtctgtgaaggcccaattggagggtgctgaaatgggtgttgcagctgagaa

SEQ ID NO: 665 - DNA, 238 bp, Glycine max
  Clone ID: 700874495H1
aaaatcaaatcaggagagcatgcatatgaacatgatgatgaagaaggtgtgtgggtttgcaatagtgatggtggcagtgcagcttctggtggaggtgagtcccaaggcagaggctgtgacttgtacccctgtggagctgagtccttgtttgggggcaataacttcctctcaaccaccatcaacaatttgttgccagaaggtgagggaacaaaggcaatgcctctgtggttacctcaaa

SEQ ID NO: 666 - DNA, 262 bp, Glycine max
  Clone ID: 700874501H1
agaaaatgggtctgttggtggtgaaattgttagtagagatgatccattaatggataaaggacagaaaaatgtagaatgcaatgataaagcctctggatttagcaaacaatttgcctctggtgaagaaggagctaaaaacatgtatcaattgcaattagaggagaaaacagcctgaacagaactaacttagatgcgtcttcaggctgtgctcttactccatcgcaacctactgatgttgatgactctgtatccaagtctcagg

SEQ ID NO: 667 - DNA, 253 bp, Glycine max
  Clone ID: 700874534H1
gttgcagaaagaaaagaccatcaaagtttcacttcagccttatccggtttagggtttcggtttttgacccaacctttgacgtatcgaaaccttaagtttcggatcaggtctgagcaatctggttggtagaaccttggtcttagagagtcaagttttatgtctgaattagacgatcaaattcctactgccttcgatccttttgctgatgcaaatgctgatgactcgggtgctgggtcaaaggagtatgtgcata

SEQ ID NO: 668 - DNA, 253 bp, Glycine max
  Clone ID: 700874549H1
accaatttcagcacaacttgaaatcctagtacttttctatctattaactttttctttgttcacaaaaagcactcacaaaaatggcaaattctcgcattgctaggttcttcatggaggtggcaccaccacagttgttactgtgatgaggcacagaacatcaaagatgttggacactattactgaagatgagagggagattagcaccagtgattctgtcatgtcaccccctaaaaaaagcaaatcagcagtagca

SEQ ID NO: 669 - DNA, 251 bp, Glycine max
  Clone ID: 700874553H1
aaacaatagtgcatagcgtttttcattgtgcattattcaatggccaccacagcagctctatccggaaccatggtgagcacctccttcatgaggaagcaacctatgacgaccaagagcctaaagacattcccaacgctctttttggtctgaaaggtggacgaggtggtcgtgtaacttgcatggcctcgtacaaggtgaagctcataaccccagaaggagaagtggagtttgaatgcccagatgatgttttc

SEQ ID NO: 670 - DNA, 249 bp, Glycine max
  unsure at all n locations
  Clone ID: 700874556H1
acacactcaatgaagggagttanagtgaaagttgaaganacaatggcgtatgctaatgctgcttcaactagcccaacaacatcttcaaacctctccccgcaacccatggaagggttgcacgaggtgggtcccctccgtttctcaccanaaccttcnacgtggtggnagacccatccaccaacgacatcgtttcgtggngcagatcccgcaacagtttcgtcgtttgggactctcacaagttctctacca

SEQ ID NO: 671 - DNA, 249 bp, Glycine max
  Clone ID: 700874558H1
cctaccccaaaatctaccccaatcggatcggatccatggtccccttctccctccggtggctccacgccctaatccccatcaaattagggcaacgtcagcaaggcatggaccgattctacattcttctcgattcgtgcgcgggaagattaaggaaaaggagaaactgagcaacctcggcgtctcccttaatctgtggagaaaaagagaggtttttgtggtgaattgcatcatagggaaccatttaagtca

SEQ ID NO: 672 - DNA, 249 bp, Glycine max
  Clone ID: 700874559H1
gtttgttggaagagctcatctctgttttcttcgtcatcttccccaaccagagatgcgccccacaacagatacttactaaagctttcaactttccaacaccctttcagatgttagccaaggcccataacaaggggatggatctaagtccctggctaagatactggcaaaatggaaagaatataatgcccagattgattccagcagtgatgcagataagccaattcgcaaagttcctgccaaaggatcgaa

SEQ ID NO: 673 - DNA, 253 bp, Glycine max
  Clone ID: 700874571H1
caagaactctccaaggatcctccttcccacgagattctttggtgggaaaaatccaagaggtttgaaatttgaaggcagggaagatggattatttcaatgcaccaggaagaaaccatctctttgttccagggccgttaacattccggaccagatcatccgggccatgaacagaaacaatgaggactaccgttctccagcaattccagctatgacaaaaactttgcttgaggatgtcaagaagattttcaagacc

SEQ ID NO: 674 - DNA, 247 bp, Glycine max
  Clone ID: 700874574H1
gcaagacctacgacaagtcatccatggaaataatacacgagatggtgtgtatattactcttagaatgcgcctccgatgtgaaatttttcgtaaaggtaaagcaatgccagggaaagtatttgacatcccaatgaggttgttgttgatcggggttctaatccatacctttcaaagattgaatgctatgaacatgatcgacttataaccaaagtacaaggtgatggagtcattgtggccacccctacag

SEQ ID NO: 675 - DNA, 246 bp, Glycine max
  Clone ID: 700874596H1
gttaacaatcgctcctcagatatcaacaaaaggattcgcacagcacttgggagaggtaagaaaattgtttttcttactagagttgatccttttccagtagctttactggctgttctttttggcgtaagaatgaaattctgagttctaacgccactaaccctatgctgacgcgacttcttgagaactgtaagagtctcaaatatctggttgatgagtgtccttttgcatttgtgaactagtatgtaa

SEQ ID NO: 676 - DNA, 265 bp, Glycine max
  Clone ID: 700874604H1
gatacgacaaaacccatggatccgtggtgtggcaaagttccatcacgtacctgtatttgttatcaagtccaataccatggcacaaatggtcaaggcagtgcgcatgatccttgggctagaatcctttggccctacaccaagaagccattaaatgaatgcttggatattgaaattgaggacgatgaaccaaaacgaaaaccatctttggaagagattgatgccttggaggaggtccggcttgcaatagagtacattgtgattcctg

SEQ ID NO: 677 - DNA, 265 bp, Glycine max
  Clone ID: 700874608H1
ggagtgtggcatactggcttcaattgaagatgctgttgagccaaatataattgaaggaaagaaattccgtgaactatctgaaaaggaaagagaagatattgccaagaaaataactgtgatggggaggtcttctcctaatgacaagcttttgcttgtgcaagctctacgtaaaggaggggaagttgttgcggtcacaggagacggcaccaatgatgctcctgccctacatgaggctgatattggtctttctatgggcatccaagga

SEQ ID NO: 678 - DNA, 261 bp, Glycine max
  Clone ID: 700874621H1
agaaactagttgacgaggtgtccggttggctcaaaatttatgacgacggttcagtggaccggacatggtccggaccggaccaattcaagttcatggccgaaccggcccctccccatgaacaattcatagacggcgtgccattcgcgacgtcgccgttactcacggtggtggccagagtggccaccatgtccgactttatctgccagagataaagccggaagacagccaaaaactaccaattgtcctccatttccacggcgg

SEQ ID NO: 679 - DNA, 261 bp, Glycine max
  Clone ID: 700874624H1
ctcaagagaaactttaagcagatgtctaatgttttgtgggtggctcctgaggataaggcgagtttatggtcacaacttcattatgtttcgtgtaataatctggaaatgcaagaagcttatcttgtcaatctcgtaatgtgttacgagaattgtatttgcacagtccagaggaagctcgccaattgagaaggaaagctctctctcgtattgaatggctgcaaaaagctgatgtgcctaccatagcacagattgaagagttcc

SEQ ID NO: 680 - DNA, 262 bp, Glycine max
  Clone ID: 700874627H1
aacggatctgctgggtgggactagataaagtgaagcaagctgacaagactaagggaagattggatggtggaaatggaatcggcagctgaaaaccctaattacccggcggtggactacaagcgaccttccatcttgtcatttcctcggaggcccgccctcagagttacatccgagttcgatagtgaaagcgcagtcttcttccataagatttcctgcaagttgttggacagccttgccaagttcaagttttcgttcaaccaca

SEQ ID NO: 681 - DNA, 261 bp, Glycine max
  Clone ID: 700874641H1
ggtgaagagaaccaatttgccgcagaagaaatctcttccatggtgctcatcaagatgcgtgagattgctgaggcttacctaggctccacagtgaagaatgctgttgtcaccgtccctgcttacttcaatgattctcagcgtcaagctaccaaagacgctggtgtcattgctggtctaaatgtgatgcgaattatcaatgagcctactgcagctgccattgcatatggtcttgataagaaggccacgagtgttggtgagaag

SEQ ID NO: 682 - DNA, 214 bp, Glycine max
  unsure at all n locations
  Clone ID: 700874648H1
ctgaccttcacttacgtgagccttgggctaaaaggaaacgctccaaacgaccgcgttttgagacggaggaagagtacctcgctctttgcctcatcatgctcgcacaaagcggtaacnnnnnnnnnnnnnnnnnnnnnnnnnnnnnattaccgtcttcttcactgtcagacaaagaagcgtcgccgccggtgaaataacacacaggtgcaccgtt

SEQ ID NO: 683 - DNA, 256 bp, Glycine max
  Clone ID: 700874655H1
atcaaatttcatcagtgtgtgcgtttggcccgatttgagaatgatcggacgatttcatttatccctcctgatggatcatttgatttaatgacatataggctcagtacacaggttaagcctttagtttgggtgaagcacaagttgaaaaacattcaaaaagccggattgagattatggtaaaagctaggagccaatttaaggaacgcagtactgccacaaatgttgagattgagttgcctgttcctgctgatgcaac

SEQ ID NO: 684 - DNA, 258 bp, Glycine max
  Clone ID: 700874656H1
gttcacaaggcgcaatgcggatgctgtgtttgccttccagctccggaatcctgttcacaatggccatgctttgctaatgactgacacccgaaagcgccttcttgagatgggctataagaatcctgtcctcttgcttcatccacttggaggctacaccaaagctgatgatgtcccacttgattggcgaatgaagcaacatgagaaggtacttgaggatggtgttcttgatccagagacaactgtggtatccatattccc

SEQ ID NO: 685 - DNA, 257 bp, Glycine max
  Clone ID: 700874659H1
aaattattctcagtatgtaatttcaaaagcagcttggattgaagcacagtatgctgcatgggagaagcagcagaaagaaattgagcatacaagagacttgataagtagattaggtgctggagcaaattctggccgtgcttcttctgctgagaagaagctggagagacttcaggaagaggaactagtggagaagccatttgaacggaaacaaatgaaaatcaggttccctgagcgtggaaggagtggaagatctgttg

SEQ ID NO: 686 - DNA, 257 bp, Glycine max
  Clone ID: 700874660H1
cttgactctagtccgactttgtgaaatgacttgagaggtgtaggataagtgggagctggaaacagcgaaagtgaaataccactacttttaacgttattttacttattccgtgaatcggaagcggggcactgccctctttttggacccaaggtcggcttcggccggtcgatccgggcggaagacattgtcaggtggggagtttggctggggcggcacatctgttaaaagataacgcaggtgtcctaagatgagctcaa

SEQ ID NO: 687 - DNA, 254 bp, Glycine max
  Clone ID: 700874666H1
ctggcaagaagattcttctgaaacttgagaaaacaaaggaagataaagtggctgaaagcaagagaaacgaactgctgaactttttaaatgctagttttgattagcattgagaaggtatggatttgatagagggtacaacaaaatctgggaaggaccacatttacttacacaggtgcagaaattatttttccgttataagaaccgggcagcctaccatttccttggggaaggggagtgggatatcataatattgt

SEQ ID NO: 688 - DNA, 254 bp, Glycine max
  Clone ID: 700874670H1
gaatgaaacaacatgagaaggtacttgaggatggtgttcttgatccagagaccactgtggtatccatattcccttctcccatgcactatgctggacccacggaggtgcagtggcatgcaaaggctaggatcaatgcaggggctaacttctacatcgttggtcgtgaccccgcaggcatgagccatccagttgagaaaagagatctgtatgatgctgaccatgggaagaaagtattgagcatggcaccgggacta

SEQ ID NO: 689 - DNA, 255 bp, Glycine max
  Clone ID: 700874672H1
ctttaaaggaataactgttaaagcaatggtgatcataaatcctggaaaccctactggtcaatgccttagtgaagctaatctaagagaggttttgcaattctgctatcaagaaaatttagccttgcttggaatgaggtttaccagacgaatatatatcaggatgaacgacccttcatcagttctagaaaggttttgatggaattggggccacctataagcaaggaagttcagcttatttcttttcactctgtgtca

SEQ ID NO: 690 - DNA, 256 bp, Glycine max
  Clone ID: 700874673H1
atttaaacctggattttgatgcatctacaagttgtgcagatagtccagctatatcttgtgtgcaactagaagttgaagatcagcctaagtcacctggaatcaacatgaattctgagccatctgtagttgctgttcctgatcttgatgcatcaaaagaacaaccagtgggaaaagcccctgtgactactggtgttaatgacatattctgggaacgattcttgacagagaatcctggttcatttgaaatgcaggaagc

SEQ ID NO: 691 - DNA, 251 bp, Glycine max
  Clone ID: 700874684H1
aaaagcaatatatactggttctgagtttgttgatactgttaataccagtgatgatattggggtagttctggaatctacaagcttctatgctgagcaaggtggtcagatttttgatactggatcgcttgagggcttacatgcgtcatttcaagtgcgtaatgttcaagtttatggaggctttgttcttcacattggtaatgggactggtgtctctgttggtgacaaagtagtatgcaaggttgattatggaa

SEQ ID NO: 692 - DNA, 254 bp, Glycine max
  Clone ID: 700874688H1
gccattctcatcctcttctttctctctctaccattgccatggatccctacaagcaccggccatccagcgccttcaattctcccttctggactacaaattctggtgctcctatttggaacaacaactcctctttaaccgttggagctagaggtccaattctgctggaggattatcatcttgtggagaagcttgcaaattttgatagggaacgtatcccagaacgtgttgtccatgccaggggcgctagtgcaaag

SEQ ID NO: 693 - DNA, 261 bp, Glycine max
  Clone ID: 700874706H1
caaaacactcataacacaaagcacaaagcaaagctcatccttgagttaaaaaatggcagcagcttcttccatggctctctcatccccatccttggctggcaaggccgtgaagctgggcccatcagccccagaagtgggaagggtgagcatgaggaagaccgtcaccaagcaggtctcctcaggaagcccatggtacggcccagaccgagtcaagtacttgggcccattctctggcgagcccccgtcctacctaaccggtga

SEQ ID NO: 694 - DNA, 257 bp, Glycine max
  Clone ID: 700874709H1
aacacattgaaactaaactccaagttcctaccatagtgctaggaaagtgagtgagagaaagagatcacatagcagaatggcttctactcaatgtttcttgcaccaccatgctcttaccacccctgccagatccccatcacaacgcatcatggttagcaccaagcctaaccagcttgtttgcaaggcacagaagcaagaggatattgatgtcagcccaatctctcgccggttagctctaaccgtgctcattggtgctg

SEQ ID NO: 695 - DNA, 249 bp, Glycine max
  Clone ID: 700874728H1
catgcatctagactccccattaacccacaaaatgaccaaaatatccgtttttaaaactatttcttgttgcatttcgacattgtcactatagtctcgtctcactctataacttgcacgtaccttgattaattaagaaatatggttcccaaagtttatgctggtcaggaaatggcagtggttgagaatgagaattgcatgatgaatgggaagtggaagaaacgtgtgcatgtttttggtgagagggtgatg

SEQ ID NO: 696 - DNA, 259 bp, Glycine max
  Clone ID: 700874739H1
aaagaataggaatccatcgcaacaacaccaacaacatggcagcgcaacgagaggaggacattaaaatgatgttggccgctcaggttcacattggtacacgcaatgctgactccaagatggcggattatatctggcgccgtcgtaacgatggcatccacatcattaacgtgggcaagacgtgggaaaaactcatgctcgctgcccgtgtgatcgtggccgtggagaaccccgaggacgtgattgctatttcggctcgtcc

SEQ ID NO: 697 - DNA, 248 bp, Glycine max
  Clone ID: 700874744H1
ctcaccatcatactgaggaagatcacttgcaccatcatgctcacaaagatgttactgaacctcttcttggtgaatcaaaaggtggaactaagaagaagaagcaatggaacataaatgtgcagggggcttatctccatgttcttggggactctatccaaagtattggggtaatgattgggggagcagtcatatggtataaccctcgttggcaaatagttgatttaatctgcactctaatcttttcaata

SEQ ID NO: 698 - DNA, 256 bp, Glycine max
  Clone ID: 700874755H1
atttttgttgaaggatatgattagagaatccctgttgtatagaaaacttttgtgtggattggaactgaaacacctatgatctctaattcagaaaaaaataaaatcaaaacataggcgatgcctcagcacaaacgtgaaacagcatgaaatgaactgtgactaccatgtcatgtcagcagcactctcccgagagattattcatatgaccaaactgccctcgttcccctaatccgttttcgagagttacaaccaccat

SEQ ID NO: 699 - DNA, 248 bp, Glycine max
  Clone ID: 700874757H1
gccggggcgatgctgtttggattccttctttctaaatttcatcctgtaatctgcttaaaagttgcttctgggttaatgatggggcttctgcctgttacaattgttttcaattatttaaccaacaagctttccaccggtgttcttgaccgacctaaaccttcacaaacctgttgcagaacatttaatgaagattctgcattagatgccagcagtatagtgtttaaaggtctggaagccatcaagctcgg

SEQ ID NO: 700 - DNA, 247 bp, Glycine max
  Clone ID: 700874758H1
gtttcgaatagattatcctaagtctttgggaatagtgctgcaatggcttcaagtcaggaggaggtgacccttttgggagctactggaagcccatttgtgtgcagggttcatattgccctcaagttgaagggagttcaatacaaatatgtcgaagaaaatttgaggaacaagagtgaactgcttctcaaatccaacccagttcacaagaaggttccagtgtttattcacaatgagaagcccatagcag

SEQ ID NO: 701 - DNA, 248 bp, Glycine max
  Clone ID: 700874762H1
ttcattcaacatttctccccttagcttgtttcaccaatggctgctgcggttagtgctgcagtctcttttccatccaccaagtctacctctcttccaagcaggacctccctcattgccccagagagagttgtgttcaagaaggcttcattgcaaaacagagatgtttctagcagtggacgggtagtttccatcagagctcaagtcaccactgaggcaccagccaaggttgaaaaagagtccaagaaaca

SEQ ID NO: 702 - DNA, 245 bp, Glycine max
  Clone ID: 700874777H1
agcgaagtcatagttagaagttttaaacattcaacctcaatttgcagagttctaatattacattgcagagaaaatgtctttgattccaagtttctttggtggcagaaggagcaatgttttggatcctttctccctcgatgtgtgggacccttttaaggattttccttttcccacttctctttctgctgaaaattcagcgtttgtgagcacacgagtggattggaaggagacaccagaagcacacg

SEQ ID NO: 703 - DNA, 112 bp, Glycine max
  Clone ID: 700874782H1
atcgcctgacttttagttagcatattgtcgacgagttcaagaatattgaagtttgcaccatgtataaacattttaaaattttgcttataaagttcgtatcttggaattgccc

SEQ ID NO: 704 - DNA, 250 bp, Glycine max
  Clone ID: 700874786H1
caataatatcacgagttctgacaatgaacctagtgaggatgataaagatcacccacgtacttggtccacgaaatggagtaccagtggacctgtgatgacgaggagttcaccaatgcaagtttatacttacaagattcttgaagctgatctgctacaagtggccaaggtaatggggcttgaagatgtaatagatgtgactgatgacattggaactgctgaagcaattctagcatccagttctgagatacga

SEQ ID NO: 705 - DNA, 245 bp, Glycine max
  Clone ID: 700874789H1
aaataaagcacagaacagttgaagtgaatggcataaaaatgcatgttgcagagaaaggagagggtccagtggtgttgttcctccacggcttccctgagctctggtactcatggcgccatcagattctctctctcagctccctcggctaccgcgccgtcgctcccgatctccgtggctacggtgacaccgaagcaccaccttcaatcagcagctacaactgcttccacatagtgggtgatctcgtt

SEQ ID NO: 706 - DNA, 244 bp, Glycine max
  Clone ID: 700874794H1
tccatccttattgatgcctttgaggttggctacagacactttgatactgcttctctgtatgaaagtgaggagtctctaggcaaagctgtggcaaaggccttagagctaggcctcataaatagcagagaggaattattcatcacatcaaaactatggtccactgatgctcatcctgaccttgttgttccagctcttaagacctccctgcagaagttgggattggagtatgtagatctctatttga

SEQ ID NO: 707 - DNA, 256 bp, Glycine max
  Clone ID: 700874809H1
gtctgaaatcaagctctttatttggagaatcgctaagagtggcctccaaatcaacaataaaggtttcaaagacaaagaatacttcactcgtgaccagatgtgaaattggtgacagtctcgaagaattcctcaaaaagcaacaccagataaggggttgatcaggttgttggtgtccatgggagaagcattgagaacaatttccttcaaagtgaagacggcttcatgtggtggaacacaatgtgttaatacttttggg

SEQ ID NO: 708 - DNA, 256 bp, Glycine max
  Clone ID: 700874837H1
caagcgtgaatagtgaagatcaggatcttggtaggccaatgagaagaagcagcatggaaataaaaacatcctacactcattcattgggcctcacaagctgcactgagtcaaaggcaagcggttgggctagtgaaagtcttaaccaataccttgaaagaatatgctggaaaaggagtttaggaaacaagcatctttcccccttctgtgtgcacaagagggaactttacttcccatttgatgaagcgagtatgtatca

SEQ ID NO: 709 - DNA, 254 bp, Glycine max
  Clone ID: 700874857H1
gcataaccaacaaagagaggttgattctttaaaaggatattcaaaaggagagatattgaagtttaaaaagcaaatgcagcaaacatatgatgaccaattaaagcgaattactgagatggttgaatcaaagtgagggaggcaactatgaggcttgagcaacaattggcagaagagcaagctgcaagacttaaggcagaggagaatgcaatgttagctcaaatgagatcagatgatgaaatacgaaaactcagaga

SEQ ID NO: 710 - DNA, 252 bp, Glycine max
  unsure at all n locations
  Clone ID: 700874876H1
ctagcttcnttcgcaaccaacaaccctcttcccaacctctcgattcttctctcttncctctctgctccttcaatttttgtttcaggttcgagatccatggtgagttttgaagcagaaggagggaagggggtaacggctccttcttccgcgcgtttgacatggacgacaatggggacgagtgcatggatgagtactttcataaacccgagaagaagcgtcgtctctccatgaaccaggttcagtttcccccga

SEQ ID NO: 711 - DNA, 82 bp, Glycine max
  Clone ID: 700874880H1
tgcgtgtaacattcttagaattctcaatgtcttaggtgcaaagagaagatgccaagtttgagatgattttactatatttttc

SEQ ID NO: 712 - DNA, 253 bp, Glycine max
  Clone ID: 700874885H1
ctgttatactgctaaaggaccctatgagtggtttcaagatcctctccctagtgatcaccttttggggatttggctcatatatttatggaagttctaaaatatggccatagactccagttcttaagatgctctctttagaaattctaaggaggtgattgttgtaagatgtatgattaaatatccgtacataaatattggtaatgttgttgtttggtaaatcacaaatatgattctttatatttaatgctttaaa

SEQ ID NO: 713 - DNA, 262 bp, Glycine max
  Clone ID: 700874912H1
gtctgacattgttttgttcccgaactctttgctctgctttttggagggttttgaaaaaaatttgaagagatttattagcacttcccagcaataacacgattagcctctcttctcagtttcaattcgttttcaattcttgccgcatcgatttccaaccctaatattctaccatgactgagtactgggtcagccagggcaacaaatggtgcgacttttgcaaaatttatatatcaaacaaccctggaagcataaggaatcatga

SEQ ID NO: 714 - DNA, 261 bp, Glycine max
  Clone ID: 700874922H1
gccatggatgctttccagcaccaaactctcatttccatcattctggccatgttagtaggcgtgttgatttatggcttaaagagaacacatagtggccatggcaagatctgtagtgcacctcaagcaggaggagcatggccaattattggccatttacacctctttgggggtcatcaacatactcacaaaacacttgggataatggcagagaaacatggaccaattttcacaataaagcttggttcatacaaagttcttgta

SEQ ID NO: 715 - DNA, 259 bp, Glycine max
  Clone ID: 700874940H1
ggcatccatgttgtgaagagcagaggatggataacataccagagcacatagtatgggagatattgagtaggataaagaaaacaagtgatagaaatgctgtttctcttgtttgtaaacggctttattatttggacatgcagaaaggaattgtataagggttgggtgtggaatggatcctgcagatgaagctttgagctgtctatgcataaggtttgagaacttgtccaaagtggagattacatactctggatggatgtcc

SEQ ID NO: 716 - DNA, 257 bp, Glycine max
  Clone ID: 700874941H1
gaactactcgaatcccaaactggggacacttccactgggtctgtgattcaaactttgcgtcttcaagtatttggggtgctacattgggttgtttcactaggcctcattctggccattgactttctcttgaagaagccttcgtagcagcttcgattgagttcccaagtgctctgtttgggatgttctgtattttctctgttttgattattcttgattgtgctataccttctgctgctgtggctttgatgaagtttttt

SEQ ID NO: 717 - DNA, 264 bp, Glycine max
  Clone ID: 700874947H1
gactatataaagtcactggatgctgatgaagatattgcccttttgaagtttcatggatggaatctgccagttgaatgcgcgcgcactcttcaaatctcaaccatgcttctgaagaaaggagtgaagagagggatgacccctttgccattggaagccttatgtgcagggaatccttgaacaaggagtctgtgattgagggaattgtaaaggcagctctggattctgttcttccttgcacaagtgaagccacatttctggatactg

SEQ ID NO: 718 - DNA, 258 bp, Glycine max
  Clone ID: 700874950H1
ctgagatacccaagcaagggaaacaagctccagtgcttcatggtttgccagattttgctgaagtttacagtttcattggaagtgtatttgatccagaaacaaacgaccatgtccagaagctgaaggaaatggatcctataaattttgaaactgttttgttgttaatgagaaacctcactgtcaacttgtctagccctgactttgaacccatcaagaaggtattgtcaacatatgatgtcaataccgtggcagtaggaa

SEQ ID NO: 719 - DNA, 95 bp, Glycine max
  Clone ID: 700874952H1
ctgtttttaacgaaatcccgtaatttggagttgatatactacttgtagttagattgtgttaagattatatgtataccaggattttcatttgattt

SEQ ID NO: 720 - DNA, 254 bp, Glycine max
  Clone ID: 700874960H1
gcgactttttcgtctatatccctcaatatggcggtggcactgcttccttgaatgttactgtagctgcttccattgttctccatcatttcggagtttgggcaggttttactgagagatctcgtgatggaaataatttgttgtggctgagagacccgtaaaacagggtggacgtaattactgcactgaaacagaggattctatcattgaagagcggaaagctagaagagaaaatgctgccaatggtttctttgatg

SEQ ID NO: 721 - DNA, 258 bp, Glycine max
  Clone ID: 700874962H1
ctgaaaaggatgtttctgtagtaatggaacggattcggagaactgttgatgccacaaatggacatggttgatgtgggtggggtcaattagttatgcaaatttagttggtttattgattctttattcttttggaaagccagcatcatcctaggaggaataatcaatcaccaaggggtagttggatgacatggacatggtgttatgcaatggagtggcttcaaaatgattggtggtgaattttaattttaaaacctacgc

SEQ ID NO: 722 - DNA, 226 bp, Glycine max
  unsure at all n locations
  Clone ID: 700874972H1
aagctctttcttgttgaaactgtgagtctatgttatntgtggcggagatgaactccaccaccaacacttcgaattctcagtcaatggctgcagcagcaccgagtgatggttctgggaaganggtaagaaagccttacaccataaccaagtccagagagagttggactgaggaagaacatgataagtttctcgaagctctccaactatttgacagggactggaagaa

SEQ ID NO: 723 - DNA, 169 bp, Glycine max
  Clone ID: 700875004H1
cataaacggatttggaaggattggaaggaacttcttgaggtgctggcacggtcgcaaagactcccctcttgatgtcattgccatcaacgacaccggtggcgtgaaacaagcctctcaccttctcaagtacgattcgatcctcggaaccttcgatgctgatgtcaagcct

SEQ ID NO: 724 - DNA, 173 bp, Glycine max
  Clone ID: 700875014H1
ctggccggttcgacaggcaagttactgtggatagacctgatgttgccggcagagttaaaattcttcaggtgcattctagaggaaaagcacttgcaaaggatgttgactttgaaaaaattgcaaggagaacccctggattcactggggctgatctgcagaatctgatgaatgaa

SEQ ID NO: 725 - DNA, 167 bp, Glycine max
  Clone ID: 700875017H1
gtatcctttcatgaagcatctcatgatcttaaaaagggcagcaccaccacttcctcctgtctcacaaaggatgaaactgatccaggttctattacccttgacttgacactcaactttaattccggtgatggcgagttgaaaggctcaagtgatgctagcagtgaagt

SEQ ID NO: 726 - DNA, 168 bp, Glycine max
  Clone ID: 700875020H1
gaccaactcatcagccaatagagcacttggcaagcttcagggcaatgccaaacactttgatgcttcgtccagctgatggtaatgaaactgctggatcatacaaagttgctgtggttaacaggaagagaccctcaattcttgcactttctaggcaaaagttgacccaac

SEQ ID NO: 727 - DNA, 112 bp, Glycine max; identical to SEQ ID NO: 703
  Clone ID: 700875026H1

SEQ ID NO: 728 - DNA, 164 bp, Glycine max
  Clone ID: 700875088H1
ccgcgtgacagcagccatgatatagcatccttcactccaccaacacagtgccgtcctgatcctagcaagtctgaggatgttcttgccggtttcgactgcctaccatccgagcccgcaatgccccgcgcatttccacccgtagagcaaaatgataaaacgaaacg

SEQ ID NO: 729 - DNA, 248 bp, Glycine max
  Clone ID: 700875123H1
cttggttcttcgtctccgtggtgggatgcaaatctttgttaagaccttgacgggaaagacaatcacccttgaggtcgagagctccgacaccattgacaacgttaaggctaagattcaggacaaagagggtatccctccagatcaacagaggctgatctttgctggaaagcagcttgaggatggccgtacccttgctgattacaacatccagaaggagtccactcttcatttggtactccgtctacgtg

SEQ ID NO: 730 - DNA, 245 bp, Glycine max
  Clone ID: 700875139H1
tacaactacaaaggttgctgtaggagataagatattgaagtagtgctaagtgcctaacacctgcagtgaacaatggcctctgcatcagcatctcttctcaagtcttcacttgttcttgacaagtctgagtgggtgaagggacaaacacttcgccaaccttctgctgcatcagttgtgagatgcaaccccaccaccccatcaggcctcacaatcagagctggttcctatgctgatgagctcgttaa

SEQ ID NO: 731 - DNA, 238 bp, Glycine max
  Clone ID: 700875142H1
agaatgcctctttctatagggggaggagctggtgcaaagaatgctattctcatgaatatgccaaatgctgttctttcaatgtggagatattttgttggagatctcgtctttgaagtttctaagatgacttctccctacattaaatgtacagtctctttcttcatagcatttggaaatttggctgatgacaccatcaattttgaggcttttccccacaagctggtgcagtttggagaga

SEQ ID NO: 732 - DNA, 245 bp, Glycine max
  Clone ID: 700875167H1
tccatctttgccttctgcatgttggttctctgtaaacagatactgcaaaagaagaataatattgaatatttggttgggttgaatccctgggttgaagcgttgcagacatcacggctattctaagagtgtctcgctctctcattcatgtcccaactgtacgacggaggacaggttgcgtaactgccaccaacccttcgccgcacggtgggcgtggtgctttgccttctgaaggtggtagcccttca

SEQ ID NO: 733 - DNA, 243 bp, Glycine max
  Clone ID: 700875170H1
attggaatggacttgtggaatgcatcttctggtggcgctgaagctgcaaaaatgagacataattcaatctggtgccccgggagttgcccttggtgatcaatgggtacaagatgaacgtgagctgaaaagacagaagaggaaacagtcaaaccgagagtcagccaggaggtcaagattacgcaagcaggctgagtgtgaagagttacaaaagagggtggaatcgctgggaggtgagaatcaaac

SEQ ID NO: 734 - DNA, 235 bp, Glycine max
  Clone ID: 700875174H1
tgaaacaataaccaatccattgaatttgaatctgatcacattgtcatatccataaagaagggggggaaaaaaagttagcactttgcagaagcattgcaattattttaagttgcaatagctagctgttagaaatgaaccactactgtgaaagatgttgaatcatacgtacgtgtgttctatcagagaagctgcttttgatcttgtgttactacggtagatgccaaatgagtggaag

SEQ ID NO: 735 - DNA, 238 bp, Glycine max
  Clone ID: 700875178H1
ggatgcaccttttgctgagttgtgctcacactgtgagaaggaagctgtgaatgtttcccttggaaaccttctaacatacccatttgttagagatggcttggtgaacaagacattgtcactaaaaggaggatactatgactttgttaagggatcttttgagctctggggccttcagtttggccttgcatcctctttctccgtatgaacatcaaccattatcaatgacctcatcttggtt

SEQ ID NO: 736 - DNA, 258 bp, Glycine max
  Clone ID: 700875208H1
tctctcacttggggttgaagatgagaatttgtggagcaggtatggtttgatattagatttcctttaatttatttggtggacttatttcctgcatgtttctgcacccaattctattaacaattcttggtcatcaatcagcagcagctacaccaccacgtccaattcccttttagtgtttgcttcctcttccctctccagtcctgcaaaaaccaagttcctgccctcactttctagattttctgtcaagcgtccgtactt

SEQ ID NO: 737 - DNA, 249 bp, Glycine max
  Clone ID: 700875214H1
ctcaggctgaccgttctctaggccaaaagatagcatctcgtctgagcatgaggccaaatatttaatgttgttgccaaccccagaatgattgttagagttgcagacgtgcaaagagtacgataaggatgtgattttcgatcaatttgaaagaacttatccatttcttgcaattttagttgtgtacccataactccatgcatgcaactcgttgagctatctcaataaatgccgtttgtatgtgttagtatt

SEQ ID NO: 738 - DNA, 260 bp, Glycine max
  Clone ID: 700875217H1
gcaaggcaatcagaattaccctaggcatgttactgtgcacgttgttgatgggaaccttggaacaaatactcaaaatccatcacaagatatgttgtttcgagattccatgtttcagccaataggaggggttaacgggcaacgaaatgtttttaccaatacagctccatcgaacacaagtgaaagtcaaaataacactgcacgatcttctgttcatcaatcatttcttccttatcctcccttcacacaacacaaccaagacg

SEQ ID NO: 739 - DNA, 253 bp, Glycine max
  Clone ID: 700875221H1
gaagaaacacgttcgtttcgtttcgttcccatggcggtctccgtttccgcgtcctccgcgattgcttctttgaactccgaactctccacgcgcttgccaccctcactcgcctccgcatcttcttccgccaagcaatcctttctgcaattcccgtcgtgcacgcgccttcttcggattagcactccacgcgctcccgctccatcgcgacctcgattccttcctctggttcaagcgaagaaacaaacctataact

SEQ ID NO: 740 - DNA, 255 bp, Glycine max
  Clone ID: 700875223H1
gtttaatatagttgggtatggatgcaccacatgcattggaaattcaggggatattaatgaagctgttgcatctgcaattactgaaaatgatatagtagctgcagctgtactgtctggaaataggaactttgagggccgagttcacccattaacaagagctaattatcttgcttctcctcctcttgttgttgcctatgcccttgctggcacagtggacattgactttgacactgaacccattgggatagggaagga

SEQ ID NO: 741 - DNA, 256 bp, Glycine max
  Clone ID: 700875224H1
ccctcaaccaacttttgacagaaatggatgggtttgagggtaacactggtatcattgtcgttgcagcaactaacagggctgacattcttgactctgccttattgagaccgggtcggtttgatagacaggtgacagttgatgttccagagataaggggaaggactgaaatcctaaaggttcatgctagcaacaaaaagtttgatgctgatgtttctcttgaagtgattgcgatgagaacgcctggctttagtggagc

SEQ ID NO: 742 - DNA, 257 bp, Glycine max
  Clone ID: 700875225H1
tcatatcataccctttctatcctacttgctacttcccacttccattcttttcttaaccagctaggatggtgagtgttgaagagattcgtaaggcgcaacgtgcagaaggccctgccactgtcatggctattggcaccgccactcctcccaactgcgtggatcagagtacctatcctgactattatttccgcatcaccaacagcgagcacatgaccgagctcaaagaaaaattcaagcgcatgtgtgataagtcgatg

SEQ ID NO: 743 - DNA, 256 bp, Glycine max
  Clone ID: 700875227H1
ctcgcagttccttgatctctcctctcaagatgcagatattcgtgaaaactttgaccggcaagaccatcacccttgaggtggaatcctccgacaccattgacaacgtaaaagctaagattcaagacaaggaagggatcccacctgaccagcagagacttatctttgcgggtaaacaacttgaggatggtcgcacccttgccgattacaacatccaaaaggaatcaaccctccatctcgtgcttcgcctcaggggtgg

SEQ ID NO: 744 - DNA, 257 bp, Glycine max
  Clone ID: 700875229H1
ccaaattgagttcagagtcaccaccgaatccgttcctacaatggcgacggtgacgttttccttttccgctaaaaccttaactctaccctatcaccccaaaacctcaatctcgagcttcgctccggtaacgaatcttcgcctctctcattctatcgtcacccgaacccgaaattgtaaccggattcgggcggcgctggatggggatttctcggcgaaaaggagcaacaacaacgagcagagggagacgataatgttgc

SEQ ID NO: 745 - DNA, 256 bp, Glycine max
  Clone ID: 700875233H1
tgatcatgacactctgactcttgatcagattgagagtaacattgttcgatgtccagacccggagtatgcagagaagatgatatctgcaattgatgctgtgcgagtgagaggtgattctgttggtggtgttgtgacatgcattgtgaggaactgtccacgaggtctcggttcaccagtatttgacaaacttgaagctgagctggctaaagctgcaatgtcattgcctgcaaccaagggctttcagtttggtagtggg

SEQ ID NO: 746 - DNA, 251 bp, Glycine max
  Clone ID: 700875236H1
caaattcattttaatcctaattctgcacttcttgatcattcgatttttctcctcaagatgcagatattcgtaaaaactttgaccggcaagaccatcacccttgaggtggaatcctccgacaccattgacaacgtaaaagctaagattcaagacaaggaagggatcccacctgaccagcagagacttatctttgcgggtaaacaacttgaggatggtcgcacccttgccgattacaacatccaaaaggaatc

SEQ ID NO: 747 - DNA, 251 bp, Glycine max
  Clone ID: 700875237H1
atttgctaggatttcaggtgtgcagctgaaacctccgtgtcccacgaaaaccttacaaaattgaattgtggtattacagtatccaacagcaccatgctggattctgccactccccatgacaaaatcaccacagcagcttctggcttcgtacttgaggatgttcctcatctatctgcttacatccctcacctccaaacatatcctgacccgttgcaagacaatccttcctattctgttgttgcgcaatatta

SEQ ID NO: 748 - DNA, 254 bp, Glycine max
  Clone ID: 700875240H1
ggatggtgcgggttctggaggctctagcacacctttaactgccgtatatggttctacaaagtgtggccttaggcaacttcaaggatcactattaaaggagtgcaagcgatccaaagtaggtgtccatactgcatctcctggcatggttcttacagatctgcttttaagtggctcaacggtccaaaacaggcagatgtttaacatcatctgtgagcttcccgaaactgttgctagaacactagttccacggatgc

SEQ ID NO: 749 - DNA, 255 bp, Glycine max
  Clone ID: 700875241H1
ggggattcgtggtagaggatgtgttgcacttaattacagatgatgatcaaacaaaagatgctgacacaagaattgcttttggttgtggccaagttcaaactggtgtgtttctaaatggggcagctccaaatggcctatttggacttggaatggataatatatctgttcctagcatcctagccagagaagggcttatttcaaattccttttcaatgtgttttggatctgacagtgctggaagaatcacgttcggtg

SEQ ID NO: 750 - DNA, 253 bp, Glycine max
  Clone ID: 700875250H1
caagcgtgaatagtgaagatcaggatcttggtaggccaatgagaagaagcagcatggaaataaaaacatcctacactcattcattgggcctcacaagctgcactgagtcaaaggcaagcggttgggctagtgaaagtcttaaccaataccttgaaagaatatgctggaaaaggagtttaggaaacaagcatctttcccccttctgtgtgcacaagagggaactttacttcccatttgatgaagcgagtatgta

SEQ ID NO: 751 - DNA, 252 bp, Glycine max
  Clone ID: 700875259H1
cagaacatgagggatatgatccttttcttggtggaattcaaaaatatgccactcccatgatgcccctagatgaagaaattctttctaaagttgcacaagatatggttgaggaatggtttgattgtgttgatgaggaggattcctttgaggaagtttctttaagtgcagcacttaatggtgttgagggtttggactatatggaaagaattcctcttgccacatctgagggttttcctcatgtgctttcacgca

SEQ ID NO: 752 - DNA, 250 bp, Glycine max
  Clone ID: 700875261H1
gtacaatcctccttggttctctgaggctattccatctgccccttatgatcctcttgttttaagacacgcctttgagcaggcagtcataaaaaggttgatgactgatgtgccttttggtgttctactctctggaggtttggactcttctttggttgcatccatcacttctcgttacttggccaacacaaaggctgctgagcagtggggatcaaagttacattcattctgtgtaggccttgagggctcacca

SEQ ID NO: 753 - DNA, 252 bp, Glycine max
  Clone ID: 700875265H1
gccatgaccatgcttatggttggaggttgccatgtcttgatgccaaaatttgatgcagaatcagctgttgatgccatagagcaacatgcagtgacatcttttatcacagttcctgcaataatggccagtctgatttctataattaggcacaaagagacctggaaagggggagaaactgtcaagaaaattcttaatgggggtggaagcctctcacatgagctcatcaaggacaccagcatattcttccacaaa

SEQ ID NO: 754 - DNA, 246 bp, Glycine max
  Clone ID: 700875268H1
gtgaaagagaatccgaggcgaagagaagagaaaaattaagatggaggggaaggagcaggatgtgtcgctgggagcgaacaagttcccggagagacagccgattgggacggcggcgcagagccaagacgacggcaaggactaccaggagccggcgccggcgccactggttgacccgacggagtttacgtcatggtccttttacagagcagggatagcagagtttgtggccacttttctgtttctata

SEQ ID NO: 755 - DNA, 247 bp, Glycine max
  Clone ID: 700875269H1
gcttctactaaagggtgaagagacaattatagaaccaaagaaaaatttagttgcacagaaatctctcatgttagaggcatgtgacctagaagattatacttgctcaagttacttgaaggacctcaatcgccacaggcaattaatcatggagtaaactaaacaaattataactcattagtgggattttattgttttcccctatgtatatttgttgaaaggatggagtgatattttgtagcagtgtgtg

SEQ ID NO: 756 - DNA, 250 bp, Glycine max
  Clone ID: 700875272H1
caagttgcagtttgcagcacttccaacgagaaggcggtatgcataatcagcaatccaattccttaaatgaatcttttctgacataagggaaaattggctcactgatccttgtttcatagtagttggagtttcaattcctaatagttatagcctcatggttatgtattgacattactgtgtggtttttcaagaacgcaatccgggtaatttgagctgttaatgggtcaaacttcaaattattattaattat

SEQ ID NO: 757 - DNA, 249 bp, Glycine max
  Clone ID: 700875273H1
tccatctttgccttctgcatgttggttctctgtaaacagatactgcaaaagaagaataatattgaatatttggttgggttgaatccctgggttgaagcgttgcagacatcacggctattctaagagtgtctcgctctctcattcatgtcccaactgtacgacggaggacaggttgcgtaactgccaccaacccttcgccgcacggtgggcgtggtgctttgccttctgaaggtggtagcccttcagact

SEQ ID NO: 758 - DNA, 249 bp, Glycine max
  Clone ID: 700875274H1
gattgaattctgaaggaggagtgctgaaagtgagccctgatggtcttctccagcaaagctcaactgtagcagattcaatttctttcaaattttctgatggtataactgaatcagttccatgctcatacattgaatttgctgagcgactggtgctgccgcagtataaaaatttacctgacacagaggttaaagagttccatagaagagatggttttgaggtagcaagtgctgacaagatatttgaaagca

SEQ ID NO: 759 - DNA, 250 bp, Glycine max
  Clone ID: 700875275H1
ccaagcaataacgataaagaaagaaattttatggttatggaggtctcagcatacatttgcaacaacaacttcatcttctcttcttctcgtgccataacacaaaaatcttctgcttctttctcatcacctatgcttgtcaaatccatggccactcccaagcctcttccctcagtctctagaactgtaggctctagaaagaactcaactgtgttcccacttggggaacaacctaggagcagccccgcgacag

SEQ ID NO: 760 - DNA, 250 bp, Glycine max
  Clone ID: 700875276H1
aaaaaacccacgctctgcagccgctacgttaaaacctacaaatacaccatggaaaacgacgccggtttccctctcatccccaacgtgttctccggcttcaactccctcgtggcctccgcggcacgtggctccctctccgctgcacgtttcttaacggggcagtttaaccccgctaacggcattggcctggccaacaccagcttagccttcttcgggaatcgtctcttcgcgcttggcgaatccgacctcc

SEQ ID NO: 761 - DNA, 249 bp, Glycine max
  Clone ID: 700875277H1
ggaagatggagtcgctcttcaagttttgactaaccagttcatgttgaagccacaatggaatcaaatgtttgtttcataattgtttttgtttctcttaggttagattttcaaattctgcagtagtgcagattgggtcttggaagagaggtccaacggcaaaaagttcagccccccctccttgactttgtagcttgtctcaatgtgtattctggaaagcttttagctgtagaaaactcatgttggtgagcg

SEQ ID NO: 762 - DNA, 248 bp, Glycine max
  Clone ID: 700875289H1
attctgaggtgaccaattctgttcttcttttctcgcataataaagtaatcaataagcacataaaccttcgaggacatggcatcagccttgtccacgaccagtgtgctttgctggaggaatcctcagcacatgcatattatctcaccctcttcacagacacttcaaaatggaactctaagaactgtagctgcttcagcctcaaaagatatcagcatagaaagtgacaagtgttcctctttgttggtgaa

SEQ ID NO: 763 - DNA, 249 bp, Glycine max
  Clone ID: 700875294H1
attaccaagaacttcatgaccctgcccaacatcaaggttcctctcattcttggtatctggggaggcaagggacaaggaaaatctttccaatgtgagcttgtctttgccaagatgggaatcaaccccatcatgatgagtgctggagagttggaaagtggaaatgcaggagagccagcaaaactgatcaggcagagataccgtgaagccgcagacttgatcaagaagggaaagatgtgtgctctcttcatc

SEQ ID NO: 764 - DNA, 249 bp, Glycine max
  Clone ID: 700875296H1
ggtcaattgaccgaggcagttcggcgtcgtccttacactgttgtactgtttgatgagattgagaaagcccatcctgatgtgttcaacatgatgcttcagatcctggaagatggaagactaacagacagtaagggcagaacagtggatttcaagaacacacttcttataatgacatcaaatgttggaagcagtgtgattgagaaaggaggccgcaaaattggatttgatctggattacgatgagaaggat

SEQ ID NO: 765 - DNA, 254 bp, Glycine max
  Clone ID: 700875304H1
gagactacatgaagcaaaatgttcaatgtccagaagcaaattatccaacatttctttatgcaatgcccatgtcccatacaaaagtgttctttgaggaaacctgtttagcatcaaaagatgctatgccttttgatttactaaagaagaagctcttttcgagattaaatacaatggggatcagaattaagaaaacttatgaagaggaatggtcttatatcccagttggtggatccctaccgaacacagaacaaaag

SEQ ID NO: 766 - DNA, 251 bp, Glycine max
  Clone ID: 700875305H1
gtcactttaatatttttgtcggtgaccttagtcctgaggttacagatgccacattgtatgcttgcttctctgtatatcctagttgttctgatgcaagggtaatgtgggatcagaagacaggccgttccaggggatttgggtttgtttcttttcggaatcagcaggatgctcaaagtgctataaatgatttgactggaaaatggcttggaagtagacagattcgttgtaattgggcaaccaaaggggccagt

SEQ ID NO: 767 - DNA, 252 bp, Glycine max
  Clone ID: 700875308H1
atccaattgaaattttaaaaatgactgggataaacttaagaattcaattattgaaattgaataagtaaacaatttaattggattggtcgaatggtatcaaaaaaatggagtactaactcccatttcttatttattattgaattaaccgatcaacttgctttgttatcgaacatttctttttgatttcaaaaattttccggaaaaaatttgaatctatttttatatgcgaatcaatcctactacttctggtcc

SEQ ID NO: 768 - DNA, 250 bp, Glycine max
  Clone ID: 700875310H1
taatgataatcatgtcattgctggtgcattactgggagttggaattgtgaattgtagtatcaagaatgactgtgatcctgcaatggcacttctaggtgactatatagataaagaagacacttcaatcaggattggtgcaattatgggtttgggaattgcatatgctggttcccagaatgagcagttacgggagaaattgacaggtgtactgaacgattctaaagcttcacttgaggtgcttgcatttgct

SEQ ID NO: 769 - DNA, 249 bp, Glycine max
  Clone ID: 700875313H1
cggaatatccataggttctattacgctatgtctgctaagtggtcaagttcacatctacatacttatggttcttttctctgagagcactactccttttgtaaatcttagatggtaaatctgttgttcagaattccatttaccttcatgtacttttcttaccattacttatgacattaattacatatataggtacttggatgttgctggccttaagagctccaaactttacatttggaatggcattgcatt

SEQ ID NO: 770 - DNA, 252 bp, Glycine max
  Clone ID: 700875318H1
gttctaagaaaaaatagcttcaggtctggtattcctgctgaattgagttcatactatcagcttgagcgattggatatttcatcaaattcatttgtggggccttttcagccaggattgttgtcacttccttctattacttatctgaatatttctgggaacaaattaaccgggatgcttttcgagaatctttcttgcaattctgagcttgatgtagtggatttatcctcaaatcttttgactgggagcttacct

SEQ ID NO: 771 - DNA, 250 bp, Glycine max
  Clone ID: 700875321H1
aatgcagttgctttgcctgctggtggaagaggagatgaggaggaacttgccaaggaaaacaacaagagtgcctcatcatccaaggggaaaatcaccttcagtgtcaccaagaccaagcctgagaccggcgaggttatcggtgtgttccagagtcttcagccgtccgacactgatttgggagcaaaggctccaaaggatgtcaagatccagggtatctggtatgctcagcttgagtcatagagtgtttttt

SEQ ID NO: 772 - DNA, 109 bp, Glycine max
  Clone ID: 700875324H1
cttgaagtttgcttcctgatataggttgtaattttgtcaaattttagtttaggcttattgcacttttagtattttagtcccattataactaatgtgagttcaattcggt

SEQ ID NO: 773 - DNA, 248 bp, Glycine max
  Clone ID: 700875325H1
taaaattctatgtgagtgaattgggaggatgctgtgtctgggtcgattcggcggggtctctcactacccaatcaaatccggttggagtcggagggactacaccaataacaggcccagatggtgtttgatggccgcccaggaatccgactcttcttttgcaccctctcttgactccgacaaaaccgcctctgctggattctgcatcattgaaggcccagaaacggtacaggattttgccaagatggaac

SEQ ID NO: 774 - DNA, 248 bp, Glycine max
  Clone ID: 700875326H1
cgtgaatgcgtataaaaggaaaataaagaaattagcgtcaaaatgttgggtgtgttcagcagctccatagtgtcgccgccggacgagctcgtggccgccggcagccgtactccgtcgccgaagatgacggcggcggcgctgcggaagcggttcgaggagaagaacccctccgccgtgtcggtggaggtcggagagcatgtccagctcgcttatacccaccacaacgagtcgccgtttcagcccagatc

SEQ ID NO: 775 - DNA, 109 bp, Glycine max; identical to SEQ ID NO: 772
  Clone ID: 700875327H1

SEQ ID NO: 776 - DNA, 252 bp, Glycine max
  Clone ID: 700875333H1
cgcggcttcaaccttgtagttattctctttcttcttttttagctatccctctcttgaaaaatctagatctcgttcttccttgatctacgttacgcttttagtgaccggatctgtatggatctgaaccagatctacacgccgatggtggttttggcctggtctttcatagatctgatgcatggaggctcagatctactgtacagaggtgtgcgattcatgttcgtctctcttttggaatctgtttcgtagaaa

SEQ ID NO: 777 - DNA, 249 bp, Glycine max
  Clone ID: 700875335H1
ggaaaaaatggcgtgcaggagcatgcttcgttcatcgattctggtggaacccttccaattgcaacctcttcattttagtaacagacccgttagcgcttatccgtttcgccgtggcaaaggactaaccctccgttgctccagcaacgagacgccgtcgtttcaggacgatcagggtccacctcaagaggccgtgttgaaggccatttccgaggtgtctaaggcagaagggagggttgggcaaacaacaaa

SEQ ID NO: 778 - DNA, 247 bp, Glycine max
  Clone ID: 700875338H1
gcaaaatggagaccctgtcgagagactcaagacagaatctgttgaaatggcttcaaaccaagattgcagtgctaatattcatggttcttcctctgtatgcattgataatctggatgcatcagagacctcaacatcttttgtggttcagcttggaagaaatgaagctgataacaaagatgcttgtatgagatattgggactttgagaaatggatgcgaaaggaatgtctaaatttctcagtactttct

SEQ ID NO: 779 - DNA, 248 bp, Glycine max
  Clone ID: 700875341H1
gaatagttgaaaatggggctgtctttcacgaagctgttcagccggctctttgcgaagaaggagatgcgtattcttatggtgggtctcgacgccgccggtaagaccaccattctctacaaactcaagctaggagagatcgtcacaaccattcccaccattgggtttaatgttgaaactgtggaatacaagaacatcagcttcactgtctgggatgttggtggccaggacaagatccgtcctctgtggag

SEQ ID NO: 780 - DNA, 244 bp, Glycine max
  Clone ID: 700875343H1
ctccggcttgcctcgcgcctggacgccgtcgtggcccgcctcgacacgcaggcgaagatgacgacgatcagcaagtcgatgggcaacatcgtcaaatcgctggagtcgtcgctggccacggggaacctccagaagatgtcggagaccatggactcgttcgagaagcagttcgtgaacatggaggtccaggccgagttcatggagagcgccatggcgggatccacctccctctccactcccgaag

SEQ ID NO: 781 - DNA, 248 bp, Glycine max
  Clone ID: 700875351H1
agaagattaaacagcatgagcaggaggtttctactacgatgaatgcttttcacatcatttcgctctcggaggggttcgatttgtcgccgttgttcgaggaaaagaagagagaagagaaagagttacggtttgcgaccacgcgccccgcgagcagcgtgatttcgagattggaagatttggcgaaggcggtgaagttcgacgtgaagaagagcgagactaaggtgaggttgcagggtcaagaaaaaggg

SEQ ID NO: 782 - DNA, 244 bp, Glycine max
  Clone ID: 700875357H1
gaagttgtcagtatcttattgtcctctatccttggtatccctgatggtttcaactctattcaactcctttgggtcaacctcgtaactgatggtttcccagccactgctctctctttcaaccctcctgacccacaaatcatgaagaagcctcccaggaaacatgatgagcctattattacttcatgggtgttcgtccgttatcttataattggaacatacgttggtctcgccaccgtcggaatat

SEQ ID NO: 783 - DNA, 246 bp, Glycine max
  Clone ID: 700875364H1
cttcaacctcaccaaaggaactaagaatttcattgaggctagagaaagtggtgatcaatatgtcaaagaatccaaaagttttctttgatattctaattggaaagatgaaagctggacgagtagtgatggagttgtttgccgatgcaaccccaaaaacagctgaaaacttcagggctctctgcactggggaaaaggggattggacgatctgggaaacctttacactacaaaggttctgtatttcatc

SEQ ID NO: 784 - DNA, 245 bp, Glycine max
  Clone ID: 700875366H1
tgccgctgaaagactgggtaggggtattgagactgatggaattaccacccctgtgctgaacacttctgcctacttttttaagaaaaccgctgatctcattgatttcaaggagaatcgtcaagtgagttatgaatacgggcgctatggaaacccaacgactgtggttctggaggagaagataagtatattggagggggctgaatcaactgtgataatggcatctggaatgtgtgctagcgtagtcc

SEQ ID NO: 785 - DNA, 242 bp, Glycine max
  Clone ID: 700875370H1
cctcattaagccgccactttctctctctttccttttcgtcttctttttcttcttcgttgggtttgttgccacttagtaagaaagagggtgtgaagagagtggggagaagatttggtgttgtggccatggcggagtctaagagtactgtgcttgttacgggagcgggtggtcgcacaggacaaatagtttacaaaaaattaagagagaggccaaaccaatatgtggctagaggtctggttaga

SEQ ID NO: 786 - DNA, 243 bp, Glycine max
  Clone ID: 700875371H1
attccccttgttgtgttgtgttctctgcaaccatgcttctcagaacagcttcatctttctctctcctcaaagccaacgccgaccatatactccctctccccaactcttcttcttctggtattattcgctactctcagtctctggggaaaaacttggttccatgcgctaccaaggacaccaacaaccgccccttaaccggcgtcgtttttgaaccctttgaagaggtcaagaaggagctcgacc

SEQ ID NO: 787 - DNA, 243 bp, Glycine max
  Clone ID: 700875373H1
cgtattcagcactccgaaggttttcgccatttgcgtcctcgttggagttcgttcaagctgattcggaatccgaggaggagagtgattgcttgtagtgttactgagccacataatggtagcgacgagaaggagaaagaagcagataaaaatggagaaacactacctttggaagattcctctgagcaaagtatccctccacctgtagatgcagaacaaataaatgagtttagtgatgaaaataaa

SEQ ID NO: 788 - DNA, 240 bp, Glycine max
  Clone ID: 700875375H1
caaggatcaaattcctgctgttgacaagttgtattctactaaggttaataagtttgcaaaaattatgaaccttagacaaagtgttgttggtgatcttaaacttcttactgatgggaagttatatgagggtaagcatattcctgtatctaatattagtgcaggggaaaatcatgtagttcaaatacccctaatggcacaggaggaaattctgtcttctagtgcaagtgatttcagaactgc

SEQ ID NO: 789 - DNA, 241 bp, Glycine max
  Clone ID: 700875378H1
ttggcagagatggcgtgagtcatatccaactgatggttctaaggctgaagatgctataactgtgttcactggagttccaactatctatgcccgattgatacaaggttatcatgcaatggatcctgagctacaagctgcttcagtatctgctgcaaagaacttgcgtcttatgatgtgtgggtcctctgcacttccactacctgttatgcaagaatgggaagccatcactgggcatcgctta

SEQ ID NO: 790 - DNA, 238 bp, Glycine max
  Clone ID: 700875385H1
gttttatttttaagtgtggagtgctgtgcaggtcaaggcccttttacttgttcgtccggttgttcccatcttctctctcgtaccaatcaaatcacacttttgtgttgtgttgggaaaccctaaaccccgttttcggtgagatcgagatcgatcgaacatggatgaggagtacgatgtgatcgtgttgggcacgggtctcaaggagtgcattctcagcggtcttctctccgtcgatggc

SEQ ID NO: 791 - DNA, 243 bp, Glycine max
  Clone ID: 700875388H1
gtcttgcaattgaagttgaagtcttgcccttctctcttcaactccaaacacaagacatcatcatccatggctgcctccgtctccactgtcggagctgtcaacagagctcttttgaacctgaatgggtctggacctggggtttcagctcccagttcatccttctttgggagcagcttgaagaaggttattggctcaagggtccccaacacaaagatttcctctggaagcttcaagattgttgct

SEQ ID NO: 792 - DNA, 235 bp, Glycine max
  Clone ID: 700875392H1
atgataccagatgaaagggaaagcttgacaacaggccaaagatctttgaatgggcaacatggaaaatgctgaggtccaaattgatgctctatctatatgcctcaacatcaatggatgggaaatgatgatatcacttggtttcatggctgctgcaagtgttcgagtggcaaacgagcttggaaaaggaagctccaaagctgcaaagttctctatagttgtgacagtgcttacatcc

SEQ ID NO: 793 - DNA, 236 bp, Glycine max
  Clone ID: 700875393H1
gaggaattaaccggcataaacgatccaatattagcagggcaggagtttctcaaaagagggattcgcacaaaatgggtgattgtaaaaatgggttctaagggttcaattcttataacagcatcgagtgtagcttgtgcacctgcattcaaggtgaatgttattgacactgttggatgtggagacagttttgttgctgctattgtctatggttttatacataatatgccactggttaa

SEQ ID NO: 794 - DNA, 238 bp, Glycine max
  Clone ID: 700875395H1
gagcctgccacattaccatcttcactcagaccaaccttctctgagaaggtggacaccaccccattcgggactgtagttgagaatttctatatgactgatgccattacaagggcatcaaagataatggcacaatgcagtgccatgctgttgaagaagtgaaacatggattttttattttttggtttcaataaagaagattcacgtttttcccttcctggccatgcaagattgcttgcca

SEQ ID NO: 795 - DNA, 239 bp, Glycine max
  Clone ID: 700875396H1
cctcgacatgggtctgcttgttgctggaactaaataccgtggtgagtttgaggagaggttgaagaaactgatggaagagatcaaacaaagtgacgagataatacttttcatcgatgaagtgcacactttgattggagcaggagcagcagaaggggcaattgatgctgctaacatactaaagccagctcttgcaagaggtgaactacagtgtattggagccacaacattagacgagtaca

SEQ ID NO: 796 - DNA, 245 bp, Glycine max
  Clone ID: 700875415H1
gcctcctcaaggagaaagacaacttaaaagctgaggtggcgagcctcaatgagaaggtgcttgcaagagggaaacaagaggggcacatgaagcagcaggctgaaagtgaagaagaaacaaaaagattattgcatttgcaggaacaggaaccaccccagaggcttttactggaatcagtttcggagggagaaggatccaaagtctcttctgttgtcgggggttgtaaacaggaagatatcagttca

SEQ ID NO: 797 - DNA, 240 bp, Glycine max
  Clone ID: 700875446H1
ggcgaactgatttcgttatcagaacaagaattggtggattgtgatactggatataaccaaggatgcaatggaggacttatggactatgcatttgagttcataatcaacaatggcggcattgattctgatgaggattacccataccgtggtgttgatggtagatgcgacacatataggaaaaatgctaaagtcgtttctattgatgactacgaagatgttcctgcctatgatgagttagcc

SEQ ID NO: 798 - DNA, 235 bp, Glycine max
  Clone ID: 700875472H1
gcaatggtatagtgtgttgggcaaccatgactacaggggtgatgttgaagctcaattgaatccaatccttcagaaaattgatcctagatggatctgccaaagatcatttattgttgatactgaaattgctgagttcttcttcattgattcaacaccttttgtggacaagtattttcttaagccaaaggaccacaagtatgactggagaggagtgcttccaagggaaaaatattta

SEQ ID NO: 799 - DNA, 237 bp, Glycine max
  Clone ID: 700875473H1
gttagcagagtgcagtgacttgagaatggccttgccagtggtcgtcgacgcagagtacctcaaagaggtcgacaaggctcgccgcgatctccgcgcactcatcgctaacaggaactgcgctcctctcatgcttcgattggcctggcacgatgccggaacttacgatgctaagaccaagactggtggacctaacggttcgatccgtaacgaggaagagtattctcacggcgccaacaa

SEQ ID NO: 800 - DNA, 235 bp, Glycine max
  Clone ID: 700875475H1
tacgtgcgtatgggtcaatcagagatgttgttttcttgacggaagaaattgtttccatcttgatgcactctgtgagggaaattgtatgcagtggcctgccaagggatcgattggaaaagttgaaagcaaacaaagatggcataaaatatggacaggtttccctcgctgcttcaatgactcgggtgaagcttgctgctgccctcggggcctctttagtatggatatcaggagggtt

SEQ ID NO: 801 - DNA, 106 bp, Glycine max
  Clone ID: 700875479H1
atgaaataagactcgcataggtattttagctgcttggagaaaccattatttgttgtgtacataattcattcccgtgctctcttaggtcgtgctgcctctgattact

SEQ ID NO: 802 - DNA, 259 bp, Glycine max
  Clone ID: 700875505H1
tcttcatcaacgatcttgatgcaggagctggtcgtcttggtggaaccacccaatacactgtcaacaaccagatggtgaatgccaccctcatgaacattgctgataaccccaccaatgtgcagcttcctggtatgtataacaaggaagagaatccccgtgtgcccatcatcgtcaccggtaacgatttctccacactctatgcgcctctcatccgtgatgggcgtatggagaagttctactgggcaccaacaagggatga

SEQ ID NO: 803 - DNA, 260 bp, Glycine max
  Clone ID: 700875507H1
gttccccatacctcctgctatctgcagtggaaggcgtgaaaagtgtggaattgagaaggagaacaacttcaagcagcccggagagagataccggtcttgggcacctgacaggcaagatagatttgctcgccgatgggttgatgctttatctgacccacgggtcacccatgagatccgcagtgtctggatatcatactggtctcaggctgaccgttctctaggccaaaagatagcttctcatctcagcacgaggccaaata

SEQ ID NO: 804 - DNA, 254 bp, Glycine max
  Clone ID: 700875512H1
aaacctaactactaaaacaaataaactaacatataaaatcattccaagaaagtctttatagtaaaaataggggtaaaacactactttatcataagaactgataaggcccgacggattattagattcagaaaattttattgcagctaattctttagttactccccctcatattcagcctgagtggtattatttattttcttacgcaattcttcgttctattcctagaaaattggggggagtcttgtctcttatgg

SEQ ID NO: 805 - DNA, 256 bp, Glycine max
  Clone ID: 700875549H1
aagacatctggctaccaacaaggaagtcagtcaaatggcatatccagccaatctgaagctgattctacaaacacaactatatttgtcggaggacttgactctaatgttacagctgaagatcttaagcaaccattctcccagtatggtgagatagtctctgttaaaatacctgttggaaaaggatgtggttttgtacaatttgcaaacagaaataatgctgaagaggcattgcagaagctaaatgggacaacgattg

SEQ ID NO: 806 - DNA, 248 bp, Glycine max
  unsure at all n locations
  Clone ID: 700875563H1
ctcttctcatttcattctncttccttcttttgtcttcccttagcntagtttgaagatcatggggagaggaagggttcagctgaagcagatcgagaacaaaatcagccgccaagtgacgttttccaaaaggagaactgggctgcgaaagaaagctaatgaaatctctgtgctctgtgatgctcaagtggcactgattgtgttcaatgctaaagggaagctttttgagtattcttctgaatccagcatgg

SEQ ID NO: 807 - DNA, 254 bp, Glycine max
  Clone ID: 700875569H1
ggatgaacctgtggttagttttacggggaagaagaaggcatcgaagaaagaaggtggtagtttgttcagtgcatctgcttttgatgctattgatgatggtgaggaggaggatgggccagtgattagttttaaaggcaagaagaagtcctctaagggttcgaagaaaggcggtggcagtttgttctctgcctcggcttttgatgctattgatgacgatgcggatggtgaggtggtggatgataagaatgacgatg

SEQ ID NO: 808 - DNA, 248 bp, Glycine max
  Clone ID: 700875575H1
aactagtcgaactcgaagttcgcgaccttcttacctcctacgaattccccggtgacgatacccccatcgtctccggctccgcactcttagccctagaagcccttatggcgaaccctgccatcaaacgcggcgacaacgagtgggtcgacaaaatctacaaactcatggacgaagtcgacgactacattcccatcccccagcgccagaccgacctcccattcctcctcgccgtcgaagagttttctcca

SEQ ID NO: 809 - DNA, 246 bp, Glycine max
  Clone ID: 700875578H1
ggcgcttacaaccaatcacaagtttctttccagatgggaaaggttggagagaagcttgatatcgactttgtagtttccactggagacaacttctatgacaatggactaactagtgaccatgacaacgcgtttcaagagtcattcactcaaatttacacagcaaaaagcttgcaaaagcagtggtacagcgtgttaggcaaccacgactataggggtgatgcagaggcccaattgagcccggtcctt

SEQ ID NO: 810 - DNA, 250 bp, Glycine max
  Clone ID: 700875583H1
ggttgaggcaactgttaagactggaatcatgcgtcaaatggaagcatttagagcagggttcaatcaggtttttgacatctcatctttacaaattttttctccccaagaactggattacttgctttgtggccggagagaattgtggaagactgagacactagccgatcatataaaatttgaccatggttatactgccaagagccctgccatagttaatttactcggaattatgggagaattcacaccagag

SEQ ID NO: 811 - DNA, 245 bp, Glycine max
  Clone ID: 700875592H1
ggttcatcatcataaccttcaatgaaaagaaatggctgaggcaagcattggcagcaaaagcagcagatggtctttacagggaatgacagctctcgtcaccggtggatccaaaggaatcggttatgctatcgtggaggagttggcacagcttggagccactgtgcacacttgcgctcggaacgaagctgaactcaatgaatccttaaatgaatggaacacaaaaggatacagagtaactggttccg

SEQ ID NO: 812 - DNA, 243 bp, Glycine max
  unsure at all n locations
  Clone ID: 700875596H1
cactgattgtgttcaatgctaaagggaagctttttgagtattcttctgaatccagcatggaaaacgtcctggaacgatatgagagacatactcatatagggaaacttgttggagatggtgatgaatcacagggaaactggtccttacaatgcttcaagctcaccggcaaagttgaagtcttagagaggaacttgaggaaacgngtgggagaagatctggatcccttaaacttgagagagcttc

SEQ ID NO: 813 - DNA, 261 bp, Glycine max
  Clone ID: 700875614H1
gtggtatccccaattccccattgagcgcaccgaaagcaaagtgtctctctaacctctgcaaaagtccaaggttgcacggttttaactgcttaggtttttgtcttcaaaattaaaactgtgcaactttggttgcaaagtcataggggttaagttgtgtttgcatgaaagtgggcttgagataattgtgcctcttgtatgatggaatccctttggaagcttttgtatttgctggagcctgcgcctgtcacacttatcactaca

SEQ ID NO: 814 - DNA, 261 bp, Glycine max
  Clone ID: 700875617H1
ggagaaagcaaaggctcgtgctttgaaacgtgttgttggggatcccttcaaaaagggtgtcgaacaaggacctcagattgatgtggaacaattccagaaggtccttaggtacataaagtccggtattgaaagcaaggccacccttgaatgtgggggtgaccaaattggctcaaagggcttctttgtccagcccactgtcttctcaaatgttcaggatgacatgttgatagcaaaagatgaaatatttggccctgtacaaac

SEQ ID NO: 815 - DNA, 255 bp, Glycine max
  Clone ID: 700875621H1
gtggatcatctaggagggttgctgtctctagtagccgtgatgcatttgttggtgctgagtcagatatccgtactcgcactgctgaggctagccctggagcagcacatcgagctttgagtgggcaaagaagttctccaattggatcttctgatcctaagagagttgtatcatcagggagaaatgcttctcatgtgaaaaattatgacactgcacttaggggcatggaaggtttgcaattagaaaatgatgagagga

SEQ ID NO: 816 - DNA, 256 bp, Glycine max
  Clone ID: 700875635H1
cttgggctattacagggttttgctgctggtttgatgcttagcatatcgttctttgatttggctcacaatgctttgaactcattgggcttcttgaaaggcaacctttggttttttgctggggtaatattctttgctgttgttgccagttttatcccagagccaacacttacacccacttctgatgtgaagggcagaaagaaaaatggggatgaaggaggcaaggatattatgaaaaagcatcgccggcaagttttgt

SEQ ID NO: 817 - DNA, 256 bp, Glycine max
  Clone ID: 700875636H1
aacacatgaggtcctttgcaaacatctgcaatgtagggataaagaatgaacaaatggctgaggcttcagcacaagcttgtgtcagtattccttccaatccctggagttctctgcaaaggggtttcagtgcataataactccctgtaatgtgcactagtaaagaccaaagtatgattattgttacattatgttacatggttgtacttgtatatacatatcttgtcccacctttgtaaatacatttgggacactacta

SEQ ID NO: 818 - DNA, 254 bp, Glycine max
  Clone ID: 700875637H1
caaatttcttggagggatatggacaataacgaggaaataccctcaacacccgcaacaccaggcactcctggtgcacctctttttggtggcttcagtaatggtaggaacaataatagcaagaagtccctcctgaagagttgtaggtgcttcagtgtggaggagtggagcttagaagatggagggctaccggcagtgtcatgctcattgccactgccatcgcctccaccggtagtccctcttgcaagaaagattgg

SEQ ID NO: 819 - DNA, 253 bp, Glycine max
  Clone ID: 700875638H1
ctggcacgcggcgagttgcggtgcatcggtgcgacgacgctagacgagtatcgcgagcacgtggagaaggacaaggcctttgagcgtcggttccaacaggtgttggtgaacgagccgtccgtcccggacacggtgagcattctgcggggtgtgaaagagcgatatgaggcgcatcacggagtgcagatcatggattcggcgctagtcgctgctgccaagcttgcagaccgctacatcaaggggaggttcatgc

SEQ ID NO: 820 - DNA, 262 bp, Glycine max
  Clone ID: 700875647H1
gaataaaacaagaggaggaaatgcaacttacttgttgatataaacttcacagagagaaagttgttgtaaagccttgttgctgccatggccacccacgcggctcttgcttctacaaggatcccttcaaacacaaggttcccatccaaggcctctcactctttcccaacccaatgcgccttaaagagacttgaggtgacagaattctctgggcttagatccacttcatgtgtcacatatgctaacagtgctagagaatcttcct

SEQ ID NO: 821 - DNA, 257 bp, Glycine max
  Clone ID: 700875649H1
attttgttttagttgtttgtcagaagcacactccccttgttcatgtctgatgtgggagctttgggctaagaagtgtcgagacgaatcagaaactgttaattggataactgttcatacaaaaccatgtccaaagtgtcacaaaccagtggagaagaatggtggctgtaacttggttagctgtatctgtggccaagctttttgttggttgtgtggtggagctaccggccgagagcatacttggtcaagtatagctggtc

SEQ ID NO: 822 - DNA, 252 bp, Glycine max
  Clone ID: 700875657H1
ctaacatcgtcatcgtcgttgctatgcagacggaggcacttcccattgttaacagattccagctcactgaggaccctgacaccccgtttccgcaaggggttccttgggtccgttatcaggggacatacaaagatcttaatataagcttgatttggccgggaaaagatccaactttgggggttgatagtgtaggcacgatatcatctgctcttgtaacgtatgctgctattcaagcattacaaccagacttga

SEQ ID NO: 823 - DNA, 252 bp, Glycine max
  Clone ID: 700875658H1
gtttaggatcagtgtttaagcgagatgaccagagacttcaacagctgagggagagagatgctcgtgaaaaagatcccaacttcatctcagagagttactctgaatgttacccagggtatcaagaatataaccgtgagatagtggacagtgatgatgaagatgacttatccaaaatggatatgggtggaagggcaaagggtcgtcttcatagatgggactttgaaactgaagaggaatgggcaacttacaatg

SEQ ID NO: 824 - DNA, 255 bp, Glycine max
  Clone ID: 700875661H1
gaagatgactggggggggtatcactatgcaatcgacgccgggaagctcaggatacttggatttgtatccagagcggaagatgtcctttttcaaaaatccttacattctcggactggctgctgtcgccggcatcggtggtctcctcttcggctacgacactggtgtgatatcaggggctcttttatacattaaggatgattttgaggaggttagaaacagcaatcttctccaggaaacaatagtcagcatggctat

SEQ ID NO: 825 - DNA, 260 bp, Glycine max
  Clone ID: 700875663H1
gctgtacagtgtggtaacctatatccctcttgatttactcaaatttgctatccgctatattctaagtgggaaggcttgggataatcttttggagaacaagactgccttcactacaaagaaagactatggtaaagaagagagggaagctcaatgggcggctgcacagaggacacttcacggtcttcagcctccggaaacttccaaccttttcaatgacaaaaatagctacagggagctttcagagattgcagaacaagcca

SEQ ID NO: 826 - DNA, 254 bp, Glycine max
  Clone ID: 700875667H1
gaaagcgtgacggggttgattatgtgaaaacctgatttcattcaatgacaccattgttggcaagcaacagattctatgtgtaagttgacttattttctaggtctatacatctactgcaaaattggtatttgggtattaatcatgaaatagtttttctagtcttagcttataagtgtttaaccctttgataattttagggtgcatttgggcaaaaacagcttaagtaagcatttattcaatatgttagtattata

SEQ ID NO: 827 - DNA, 250 bp, Glycine max
  Clone ID: 700875688H1
ggtgactgtgctctgctctcatctcattcatattcatttcaatggcaactcaaggtcaagtcattacctgcaaagctgcggtggcctgggaacccaacaagcccttaaccgtccaagacgttcaggttgctccgcctcaggccggcgaggtccgtgtccaaatcctcttcaccgctctctgccacaccgatgcttacacttggggcggcaaggatcccgaaggtctcttcccctgtattctcggccacga

SEQ ID NO: 828 - DNA, 249 bp, Glycine max
  Clone ID: 700875690H1
gcgcttaattagtaggctttggcctatttgttgtcccttcctaagatgaagaatggtggcatcgatccaaaccaaaaatcagattcaaattcaatggattgattattgtttcatgatctgatcactttgtcatatccataaagaagggagaaaaagaaagtttggaatttgcagaagctttgcaagtattttaagttgcaatagctgtgagaaatgaaccactgtgcaagatgttcaatataatacata

SEQ ID NO: 829 - DNA, 258 bp, Glycine max
  Clone ID: 700875714H1
tgaaagaatcatggcacttgatcttcctcatggtggccatctttctcacggatatcagactgataccaaaaagatatctgcagtctcgatattttttgagacaatgccatatcgattgaatgaaagtacaggatacatcgactatgaccagatggagaaatctgctacactcttcaggccaaaattaattgttgctggagctagcgcttagcacgtctctatgattatgaacgtgtacgcaaggtttgcgataaacag

SEQ ID NO: 830 - DNA, 259 bp, Glycine max
  Clone ID: 700875730H1
aggcagaggatgttattgaagacatcaaagcctggggattttccccaaacatagttacttataacactttgattgatgggcattgcaagaagggcagtgcccgaaaaatgtacagagctgatgccattttgaaggaaatgcttgctaataaaatttgtccgaatgagattacctttaacactcttattgatggtttttgtaaggatgagaagtgttggctgcaaagaatgcttttgaagagatgcaaaggcagggactg

SEQ ID NO: 831 - DNA, 248 bp, Glycine max
  Clone ID: 700875753H1
gatggctactgggtttccatcaacattcaatggtgtaagatctctgcaggactctcctgttggaagtcctgtgtcatggaattcgcgtgtgcctcatcctttttcgtacccgcacgagtcatctgacattgatgcttctatagattctccaattggaagccccgcatcttggaattctcattctcttaaccagggtgacaatatgctgcccgaatgaggaaaaaatggggaagtgctcaaaaaccatt

SEQ ID NO: 832 - DNA, 258 bp, Glycine max
  Clone ID: 700875764H1
cgtccttacactgttgtactgtttgatgagattgagaaagcccatcctgatgtgttcaacatgatgcttcagatcctggaagatggaagactaacagacagtaagggcagaacagtggatttcaagaacacacttcttataatgacatcaaatgttggaagcagtgtgattgagaaaggaggccgcaaaattggatttgatctggattagatgagaaggatagcagttataacagaatcaagagcctggtaactgagg

SEQ ID NO: 833 - DNA, 253 bp, Glycine max
  Clone ID: 700875766H1
ggaagtagtggaggacaaggaaacgggattgcagaaatacaccgtagcaccgggagtgaacaagttatcaggggacaaggctgttgtgtgccacaagcagaactacccttatgctgttttttactgtcacaaaactgagaccacaagagcttactctgtgcctttggagggtgctaatggggttagggttaaagcggtagcagtgtccacactcacacgtcggaatggaaccctaaacatttggcctttcaag

SEQ ID NO: 834 - DNA, 248 bp, Glycine max
  Clone ID: 700875775H1
ggaagtagtggaggacaaggaaacgggattgcagaaatacaccgtagcaccgggagtgaacaagttatcaggggacaaggctgttgtgtgccacaagcagaactacccttatgctgttttttactgtcacaaaactgagaccacaagagcttactctgtgcctttggagggtgctaatggggttagggttaaagcggtagcatgtgccacactcacacgtcggaatggaaccctaaacatttggcctt

SEQ ID NO: 835 - DNA, 250 bp, Glycine max
  Clone ID: 700875777H1
tctgaagcagctcaatgagttcgtccgcaagaccggtggcgccggcaaaggtcgcactaacatgcgccgcaccgtcaagagtgctcctcagagcatttggtatggccctgaccgtcccaagtacttgggtccattctcggagcagattccatcatacctgaccggagaattccctggtgactacggatgggacactgctggatatcagctgacccggaaaccttcgccaggaaccgggagctggaggtga

SEQ ID NO: 836 - DNA, 256 bp, Glycine max
  Clone ID: 700875780H1
cagaacttgaagaagcttacggaggtcttcggtgtagagtgggccaacgatgctatcgttcccaaggtcatggctatggcccagcaccccaactacctctaccgaatgactacatgcttcgccgtctcaacactggcgcctgcactgagtctggatgtcattgaacagtccatcatccccatgatggacaagctggtcaatgacgattccccaacatcagattcaacgtggcgaagtcatatggtcagctcatcaa

SEQ ID NO: 837 - DNA, 261 bp, Glycine max
  Clone ID: 700875824H1
caggtaaattgtttacttggggtgatggagacaaaaatcgccttggacatggggacaacgaggcacgccttaaaccaacttgtgtggctgcacttattgattccaattttcataaaattgcttgtgggcacagtttgacagcaggcctgacaaaatctggacgtgttttcactatgggaagtactgtttatggtcagcttgggaatcctcaatctgacggaaaggttccatgcttggtcggagacaagattgccagggaat

SEQ ID NO: 838 - DNA, 259 bp, Glycine max
  Clone ID: 700875877H1
ccctatcatgatgagtgctggagagttggaaagtggaaatgcaggagagccagcaaaactgatcagacagagataccgtgaagccgcagacatgatcaagaagggaaagatgtgtgctctcttcatcaacgatcttgatgcaggagctggtcgtcttggtggaactacacaatacactgtcaacaaccagatggtgaatgccaccctcatgaacattgctgataaccccaccaatgtgcagcttcctggtatgtacaac

SEQ ID NO: 839 - DNA, 260 bp, Glycine max
  Clone ID: 700875881H1
gataatccatattttcgattgggttacaacagtttgggtgcttttgcaaccattaaccatcttcacttccaggcttattatttggctctgcccttcccaattgagaaggcccccactaagaaaattgcaagtttaaatggtggggtgaagatatctgaactgttgaagtatccagttagaggtctcgtctttgagggtggcgatacgctggaagatttatcaaatgttgtttcagatgcctgtatatgtcttcagaacaa

SEQ ID NO: 840 - DNA, 257 bp, Glycine max
  Clone ID: 700875901H1
acttaaacagtataacttggataacaacatggacggtttttacattgctcctgcttttatggacaagcttgttgttcacatcaccaagaacttcatgaccctgcctaacatcaaggttcctctcattcttggtatttggggaggcaaaggtcaaggaaaatccttccaatgcgagctcgtctttgccaagatgggaatcaaccccatcatgatgagtgctggagagttggaaagtggaaatgcaggagagccagcaa

SEQ ID NO: 841 - DNA, 248 bp, Glycine max
  Clone ID: 700875907H1
gaagcatctaagtgagatacacagtagttaggtagcaagcataagtgtctaaccttagaaacatatctgctacatatcgtgtgcattttggaattgtgccactaaaattctattcatctatggctgcctcatcttatgctatgcaatcaatccttgcaaaccctatgatccgcatttccagcgggtctagggagaaccattttggtgttcctgcttatcacatgagaaggaatgttggcctgagagtt

SEQ ID NO: 842 - DNA, 251 bp, Glycine max
  Clone ID: 700875913H1
ggcagattccaacaaacatcaaataatgcaggtatgaactatcaaggtcccggaacaagagatgcattcaggtcaccactgccgaattggaatcagacaaggcatgcgccggtaaatgctaacgttaatccaagaatagaaaacaacaggcaagcttttacacttcctggatcaagacactcaatgccttcccatgagaatatccggagtcctcctcctaatgctcctaatactcctagacctggttatgg

SEQ ID NO: 843 - DNA, 249 bp, Glycine max
  Clone ID: 700875929H1
aggccctatcatagctattcggtattctttagacacaaaggtaatagcaatccaacgttcaaaccatgagatacagttttgggatagagagactggggggacttttagccataagtgcaggccagaatcagaaagtatacttggattcttttggacagatagtcaacagtgtgatattgttcttgttaagaccagtggtctagacttgtacgcatataattcagagtcaaaatcactgcaactggtgca

SEQ ID NO: 844 - DNA, 245 bp, Glycine max
  Clone ID: 700875944H1
attcctcagtgcaacacatccaacagcaagacgcaaactagtaacagagagaaagcatttcaaagaagaaacaaaacgatgtcgtttatgcgaggggattttctttctcgaacgaggaagctcgtgaagggtttggccaaggcgcaacccgcgtggctcaaagccatggaacaggcaccacctgcaacgtttcctcggtctgccgggaaaattccgaccattactcttcccgaggatgtttatgt

SEQ ID NO: 845 - DNA, 248 bp, Glycine max
  Clone ID: 700875946H1
caaccatggcaatggcaacccaagcctctctcttaaccccacccctctccggtctcaaagccagcgaccgcgcctccgtgccatggaagcaaaactccagcctctccttctccagcccgaagcccctcaagttctccagaacaatcagagcagcagccgccgacgagaccacagaggcaccagcaaaagtagaggctgcaccggtcgggttcaccccaccagaacttgacccaaacaccccttccccg

SEQ ID NO: 846 - DNA, 248 bp, Glycine max
  Clone ID: 700875947H1
cagattgtcaaggccgaggacagtattggtccagaagtagaaaagttggtggcttctcttccagatggaggtgttctccttctagaaaatgtgaggttttacaaggaggaagaaaagaatgaccccgagcatgcaaaaaagcttgcctctctggcagatctgtatgtgaatgatgcatttggtactgctcacagggcacatgcatcaacagagggtgttactaaatacctgaagccatctgttgctgg

SEQ ID NO: 847 - DNA, 244 bp, Glycine max
  Clone ID: 700875951H1
aaagatattcattctaagggaaaaatgacagaggagcaatccaaaaaggtggctgagactgagagttttccctctaatcctgcacctgaacctgttgttgttccaaaggaggatgtggcagaggagaaatctgtaattccacaaccctctccctctcctgctgatgagtccaaagctcttgtcatagttgagaagactagtgaagttgctgaagagaaaccgattgaggggtctgtgaaccgag

SEQ ID NO: 848 - DNA, 242 bp, Glycine max
  Clone ID: 700875953H1
cttcaaaacactcataacacaaagcacaaagcaaagctcatccttgagttaaaaaatggcagcagcttcttccatggctctctcatccccatccttggctggcaaggccgtgaagctgggcccatcagccccagaagtgggaagggtgagcatgaggaagaccgtcaccaagcaggtctcctcaggaagcccatggtacggcccagaccgagtcaagtacttgggcccattctctggcgagc

SEQ ID NO: 849 - DNA, 244 bp, Glycine max
  Clone ID: 700875961H1
ggcatcaaggcttccctcaaagacgttggagtcgctgttgtggccactgctgcgagcgcagttctagctagcaacgccatggccattgaagtgttactgggcactgatgacgggtctctggttttctctcccaactctttctccgtggcccctggggaaaagatcgtgttcaagaacaacgcaggtttcccccacaacgttgtgttcgacgaggacgagattcctagcggcgtggatgcaggga

SEQ ID NO: 850 - DNA, 238 bp, Glycine max
  Clone ID: 700875984H1
gaaatggcgatggcaatggcgcttcgcaggctttcatcttcaattgacaagcctctgcgccctctcttcaatgccggttccctctactacaagtcgtctttgcctgatgaagctgtttacgacaaggagcgacccggagttacatggccgaagcagttgaatgctccacttgaggtcgtggatcctgagattgctgatattattgagcttgagaaagctaggcaatggaaggggctag

SEQ ID NO: 851 - DNA, 238 bp, Glycine max
  Clone ID: 700875985H1
aaattacaacaatttccctcaattattcatcaaccaaccaccttaatagccttttccaatggttccttaaagatccaacttggtcggagtaaacatggcggctagtggaagttccttttccaacatcactagcttccttcgcaaccaacaaccctcttcccaacctctcgattcttctctcttcctctctgctccttcaatttttgtttcaggttcgagatccatggtgagttttgaa

SEQ ID NO: 852 - DNA, 238 bp, Glycine max
  Clone ID: 700875991H1
cttaattggtttcgggcaagggcagcccacatctcttgtgggcctgaaccacctaaccccatctcagatctctcagatccaggcccaaatccagatccagaatcacagcaacacgctgagcttcctagggccgaagcccatccctatgaagcacgtgggcatgcctccgaagcccacgaagctatacagaggggttcgacagaggcactgggggaagtgggtggctgagattagactc

SEQ ID NO: 853 - DNA, 240 bp, Glycine max
  Clone ID: 700875993H1
aactgaagtcaagtctgtggagatgcaccatgaatctcttacagaggcacatcctggtgacaatgtgggattcaatgttaagaatgttgctgttaaggatttgaagcgtggttatgttgcctcaaactcaaaggatgaccctgcaaaggaggctgctaacttcacagcccaagtcatcatcatgaaccaccctggtcagattggaaatggctatgcccctgtcctcgactgccacacttc

SEQ ID NO: 854 - DNA, 269 bp, Glycine max
  Clone ID: 700876001H1
gtttctgttgtattttctcaattacaacatcgtattctgcaaattcaaaccgggtcttggttttctgaaagatgggaggtggcaaggacaagcatcatgatgaatctgacaaaggaattttttcacaccttgctcatggggtagctgtgcagcacatggtggacatgggtacccacctggggcttacccaccaccacctggggcataccctccacaacaaggatatcctccagctgggtatcctccacaacaagggtatcctccagctg

SEQ ID NO: 855 - DNA, 265 bp, Glycine max
  Clone ID: 700876009H1
gctctgcgagatcttgagtcgccgatttgaaaagatgagtaagcttcagagtgatgctttgcgtgaagccatctcaggaatcatggccgattccaaggagaagaatcgcaaatttgtggagaccatcgaactccaaatcggtttaagaactacgatccacagaaggacaagcgtttcagtggctccgtcaagttgccccacatccctcgccccaagatgaaaatttgcatgcttggtgatgctcagcatgttgaagaggcagaga

SEQ ID NO: 856 - DNA, 263 bp, Glycine max
  Clone ID: 700876013H1
ctgattctctcttttcacttcctttctctttcttcattcttctttctcttttcaactattttctttacatttttttctttttctctcgcttttttcgcgttcactttctctactctgttttacgcattttatttattgttttgtagttaattttgcgattcgagtaattggtatgcttgtgttttctagaagacgattttttcacgacgattaagctgcgttttcgccggtgtcgttttaccgcaagatggtgtcgttttcgg

SEQ ID NO: 857 - DNA, 188 bp, Glycine max
  Clone ID: 700876017H1
attattttgtactctataagaaggaatgataaaacacaatgccgggtaagaaaaaataattattcggaaagttgttttgccatggcagccagctggttagctcgttggaatggtcacatctactgacgagttaggtacctacttgtaagtttccagattttgatattgatttgggaagattatcatcg

SEQ ID NO: 858 - DNA, 255 bp, Glycine max
  Clone ID: 700876062H1
tagggccattgatgggcttaacgtgtacaacatactagagccatgctaccatttccccgatgctgccacagccaaagaaaatggaaccttaccaaggagtttcaagcaattaggagttactgagaggcctctccagtgagaaagagaatgtttggtagagcttggccttttagagcaccagtcaaacctggtcttgttccattatggccccaattggctcaaactaggcacgtcgcatgtgttagtgatgaagta

SEQ ID NO: 859 - DNA, 253 bp, Glycine max
  Clone ID: 700876078H1
ccagtcatttccttgaagttccttatgcaaatcccttcagaaaatctctaatatccaattgtcaacaatcaccattgcggaagcccaaaacaaatccatttcaccgaagaaccatgaccgttacaacagaatcgcagcagcgacaaacgacgaggaggtgccatccggcgtcgttttgttcgggaagtatgagttaaggcggttgctgggagctggcgcattcgccaaggtgtaccacgcgacgagcgtggac

SEQ ID NO: 860 - DNA, 253 bp, Glycine max
  unsure at all n locations
  Clone ID: 700876085H1
gtggctctcatcgtcttctccaccaaaggcaagcttttggactactccaaccaaccttgtacnncaaagaattcttgaacggtatgagaggtattcgtatgcggagaggcaacttgttggagatgatcaaccacaaatgaaaactgggttatagaacatgaaaagctcaaggctagggtggaggtactacagagaantcaaaggaattttatgggagaaganctggacagcttaaatcttagaggacttcaga

SEQ ID NO: 861 - DNA, 249 bp, Glycine max
  Clone ID: 700876090H1
attaaaatatattcaattttgcgtttctctgcctaaaaggattgaaagatgggtcaagcattcggttgctaccaagtcgatcagtcaaatgtggctatcaaggagcattttggaaaatttgatgatgtctagagcctggatgtcactgcctgccttggtgtcttgggtaccagattgctggtagtctgtcgctgcgagtgcagcaacttgatgttcgatgtgagacgaaaaccaaggacaatgtctttg

SEQ ID NO: 862 - DNA, 250 bp, Glycine max
  Clone ID: 700876111H1
cttcatccccaaaaccactttcagtttcagaacacaaagcaatggtggcgctcctagtggcaactacatccgaccctgcttccatcaacccggccaacgcgcttttgggcatgcccgggtggaaacccggtccccatttccaggatgaatgaagagctatgtgaatgaaggggtgagggtgttggtacatgggaagagcatagttgcggaagatgagttggacaagaggtgggaagaagttactggggag

SEQ ID NO: 863 - DNA, 252 bp, Glycine max
  unsure at all n locations
  Clone ID: 700876112H1
gagaagaaactagcaattactgtcttcagtttccctccagacaaaggaaacgtggggaactgctgcctatctcaatgtcttcgcctccatatactcagttatgaaagaactaaaaaaagatggttataatgttgacggccttccagagatccagaagcnttgattgaagatgtaattcatgacaaagaagctcaattcagcagcccaaatctgaatattgcttacaaaatgagtgtccgcgagtaccaaaat

SEQ ID NO: 864 - DNA, 250 bp, Glycine max
  Clone ID: 700876113H1
catttgaatgacaaaatgctcaagctgaatgagttgcaaaggtcaactaaggatgaagttgctggagttagaagtactattactaatatccatgaagacttgggttatttgcaacaaacagtggaaacattggattataggttagctgattgagttctaagcaggattatgcaaattatggattgtcatatctcatcgactatgtacacggaaaaagccagaaaaagcccgaattgttgcaggagcaact

SEQ ID NO: 865 - DNA, 247 bp, Glycine max
  Clone ID: 700876127H1
tttgcatttgatcccttggagtttggcattccacggtgcaatattgaaagcttaaaaggtggtggtccagaatacaatgcagaggttttgaagcgtgttctaggtggagagagagggccaattgcagatgctttgattctcaatgcgcagcagctctcttagtcagtggctgtgtaagtaacctagctgaaggggtttctgtggcacgtgaaacacaacaatcaggaaaggctctgaaaacactcaa

SEQ ID NO: 866 - DNA, 248 bp, Glycine max
  Clone ID: 700876128H1
gatagatctatctgtattctatcatttacagttgaatatatacaaatatcagtatataacaacatatattaaaaaaataacaacatatattaaaaaagtcagaataaaaaaacaaatcctttatagtatttcttgtaataaatgtgtttttggaatagggataaataaaccatggaaaaatctaagcgactctttatgaaatccaagcgatcttttcgtaggcgtttgcccccgatccaatcggggga

SEQ ID NO: 867 - DNA, 251 bp, Glycine max
  Clone ID: 700876132H1
ctccgaaatcgcacacggtggtcaatgtctcagcatattagtgttacagttgtggattttgcatttcactgaaacatgtatgcgagtggggaattctgatatctatggattcctcgagccacagtccattcagaggtctgggcaatcgagtttgagtctgaaagttacataaagagttggatgcagagttcacaatgcgatgtatatcttggagcctacctaaatggacactggcagatggtggtcatcct

SEQ ID NO: 868 - DNA, 245 bp, Glycine max
  Clone ID: 700876143H1
accacatccatctttgccttctgcatgttggttctctgtaaacagatactgcaaaagaagaataatattgaatatttggttgggttgaatccctgggttgaagcgttgcagacatcacggctattctaagagtgtctcgctcttcattcatgtcccaactgtacgacggaggacaggttgcgtaactgccaccaacccttcgccgcacggtgggcgtggtgctttgccttctgaaggtggtagcc

SEQ ID NO: 869 - DNA, 245 bp, Glycine max
  Clone ID: 700876145H1
ggaacactgaatatggacagttctttctggaatggtactctggtaaattgctggaacacggtgagaggatcctcgtatctgctaaaggaatattccaaacaactggggtgaaactatcagggaaagttgctggaatccactggattacagagcaaggtcacacgcagctgaactaactgctggctactataacacacgacataacgatggatatctgcctatagcaaggatgctggcaaaacatg

SEQ ID NO: 870 - DNA, 246 bp, Glycine max
  Clone ID: 700876146H1
cttgaatcttcgttatccttctttttttctccttgaactcgaatattcactatggcagatgaggtggttctgctagatttctggccaagtccatttgggatgagggtcaggattgcacttgctgaaaagggtatcaaatatgatccaaagaagaggacttgcagaacaagagccctttgctcctcaaaatgaacccggttcacaagaaaatcccggttctcatccacaatggcaaacccatttgtg

SEQ ID NO: 871 - DNA, 243 bp, Glycine max
  Clone ID: 700876160H1
ggaaaaacttaccgacttcgtgtacataatgttggagtatcaacaagtctgaatttcaggatccagagtcataacttacttctagcagagacagaggggtcttacacagtgcaacagaactacactagcttagatattcatttggacaatcttattcttttctgttaagcacggatcaaaatgcaagtacagattactacattgtagcaagtgccaggtttgtgaatgaatcacgttggcaaa

SEQ ID NO: 872 - DNA, 238 bp, Glycine max
  Clone ID: 700876167H1
gttaatttgaagaacttgttgctttttggagccgcggatacatattgggggacatctagatccgttcatgggtcagcatcattggcaagggactattacgaagtgcttggtgtgagtaagaatgctagttcttctgaataaagaaagcatactatgggcttgcaaagaagctccatccagacacaaacaaagatgatcctaaggctgaaaagaagtttcaagaagtttcaatggcata

SEQ ID NO: 873 - DNA, 238 bp, Glycine max
  Clone ID: 700876169H1
gttcccatcattgtcaccggtaacgatttctcaacactctatgcacctctcatccgtgatgggcgtatggagaagttctactgggcaccaacaagggaagaccgcattggtgtttgcaccggaattttccgcactgatgtattcctgaacaggacattgtcaagcttgttgacaccttccctggccaatccattgatttctttggtgcactgagggccagagtatatgatgatgaagt

SEQ ID NO: 874 - DNA, 241 bp, Glycine max
  Clone ID: 700876171H1
ctccagcattgtggacacaaatttcacagtaggcaccatctttggtgtgtggcctggagataagttgactgggatcaccggaagagatcaagttgctgcagccatgggggttttgggtcctagaacaacatatgtgcttctctaaaagacttccctggcacccatgaatttcttctgcttgatgaaggaaaatggcagcatgtcaaagagaccacagaaattggtgaaggaaaactgttct

SEQ ID NO: 875 - DNA, 240 bp, Glycine max
  Clone ID: 700876174H1
cacaaagagactgaaagaacagcaatggaagctgcattatgcagtgcacttgctctttcacccaatcaagtattcaatgcagcaaatcctggagataaaaatgttcctttgaaatatagcaaagatcggagtgttgtaagacagtggcagccactggaatattagggaaaggtggtgggttgttggagaggccaaccatagagacaacatcacctggtcgggaatctgaatttgacttaa

SEQ ID NO: 876 - DNA, 236 bp, Glycine max
  Clone ID: 700876181H1
ctctttgtgtgtctctttctctatttctgagtctcagtgttaggggggttattcattattcataataacttggctttatagcattttcccttttgatataaaatgggaaggcaaccttgttgtgacaaagttggttgaagaaggggccatggactgcagaggaggataagaagctcataagcttcatcctcactaatggccaatgttgctggagagctgtccctaagctagcaggg

SEQ ID NO: 877 - DNA, 238 bp, Glycine max
  Clone ID: 700876188H1
ctacatcctataagtggatccattcaccagaacttctgtcagcattaaaatcccctttgatgcgtttatgtgccaggtaccttctgcaagagaagaaaagaggaaaggctttggactctgtagcaaattttcacttcaaaatggagcgatggttgaaagaataaactggatggcagatcgttcagataaaggtctttctcaaagtggagggatcatggtgaactacgtgtataggttg

SEQ ID NO: 878 - DNA, 236 bp, Glycine max
  Clone ID: 700876191H1
ctcaaattcgcaatccgctatattctaagtgggaaggcttgggataatcttttggagaacaagactgctttcactacaaagaaagactatggtaaagaagagagggaagctcaatgggcggctgcacagaggaccttcacggtcttcagcctccggaaacttccaaccttttcaatgacaaaaatagctacagggagctttcagagattgctgaacaagccaagagacgtgccgaa

SEQ ID NO: 879 - DNA, 237 bp, Glycine max
  Clone ID: 700876194H1
gcggtgaaggcggggatcatgaaggtgctggtggagctgatggcggacttcgagtcgaacatggtggacaagtcggcgtacgtggtgagcgtgctggtggcggtagcggaggcgagggcggcgctggtggaggaagaggcgtgccggtgctggtggagatcgtcgaggttgggacgcagcggcagaaggaaatcgttgtggttattctcttacaggtttgcgaggacagcgtggcgt

SEQ ID NO: 880 - DNA, 256 bp, Glycine max
  Clone ID: 700876210H1
tgcctggaatgcagggctttaaccctgtaatgatgggtgatgggttatcgtatgggcctgttggccctgatggctttggtatgccagatcttttcggtgtgggaccccgtggttttgctccatatggtcctaggtctctggtgattttggaggtcccccagcagccatgatgtttcgtgggcgaccctctcaacccgggatgtttccaggtggtgggtttggaatgatgttgaatcctggacgcggtcctttcatg

SEQ ID NO: 881 - DNA, 143 bp, Glycine max
  Clone ID: 700876214H1
attaattactcgcgtcgcgtcttttctccgagacgcgactcggcgcgtgggtggaaatctgggaatttgtataatttctaaatttttatgcctttttttgtttaatttgggttggaaatttataaattattatcgtgttgtta

SEQ ID NO: 882 - DNA, 257 bp, Glycine max
  Clone ID: 700876223H1
taacttccgattcatggcagcgtcttctcctctccctttacccgaactccatttcctttctccgcaaatcacccccaaacgccgtatttccctctccaaactcccctccatttcccgccacgtcacctccaacgttctctccgcaccgcgcgaatccgcgcaagcagagaagaatccgcgttggccgaccgagtcaacgacgtcgaatggaccggaaatggcgccgccgccgctgcttccaacgccaatggtgcctc

SEQ ID NO: 883 - DNA, 254 bp, Glycine max
  Clone ID: 700876225H1
agaacagcacgagcatgcgagagctgcctaaaagtaagagcaaggtggtattgtgcagctgatgatgctttcctttgccatggctgtgacaacatggttcactcagcaaaccaattagcaagcagacacgaaaggtgaagcttcaaactgcatcctccaaggtcaactactcagtgacccctaaggtagcatggcacagtggattcacacgcaaggcaagaacccctcgcagcaacaacaagcactcatcgctg

SEQ ID NO: 884 - DNA, 138 bp, Glycine max
  Clone ID: 700876233H1
tgatattctaggagatgcaataattgtattttgtatattcttgtttaagaaaatcaaccaagaactttttatttttttggtgaatagaacgttttatcatttgttttggtgagtagaacttcttgtcatgtaggttgt

SEQ ID NO: 885 - DNA, 176 bp, Glycine max
  Clone ID: 700876235H1
ctgaaaatgacgattagtagtcttgcacctaaggcagagaggaagaaatcaaggaagagcaaggcagttgttaatgagaatgcacccttgttgccaaaaagtcatgttcaggagagtgatgctgggtttgagatttcaatggagcttcattttctggggctgtttttaacttgtcc

SEQ ID NO: 886 - DNA, 253 bp, Glycine max
  Clone ID: 700876237H1
gcggaatcttataatgaataacccgcagatgcaagaactaatggataggaaccccgagctggcacacatacttaatgatcccagcactcttcgtcagacacttgaagctacaaggaaccctgagatcatgccgaaatgatgaggaatacagatagagcaatgagcaacattgaatcttctcctgaaggattcaacatgctgaggcgcatgtatgaaaatgttcaagaaccgtttttaaatgccactacaatgg

SEQ ID NO: 887 - DNA, 253 bp, Glycine max
  Clone ID: 700876239H1
gttcctttaattctaggtatttggggaggaaaagggcaagggaaatcatttcaaacagaacttatatttcaggctatgggaattgaacctgtaattatgtctgctggggaactagaatcagagagagctgggagccaggaaaattgattcgtgaacgctatagaacagcatctcaagtggtccagaatcaaggaaaaatgagctgtttgatgatcaatgatattgatgctggccttggtagatttgggaatac

SEQ ID NO: 888 - DNA, 250 bp, Glycine max
  Clone ID: 700876244H1
gaagaatttggaattgcttttaatggaggttttaatcagccaattatgtgcggtggtgagccaagggccatgcttagaaaagatcgaggcaaagctgatgccccaatatattccattcagatatgcattctaagcatgctttgaacttgatcttttcatttacaaatggagtagactgggatggtccatatagactacagtttcaagttcccaaggcattacaaaacaagccaattgacttctttaataa

SEQ ID NO: 889 - DNA, 252 bp, Glycine max
  Clone ID: 700876248H1
gtatccagttagaggtctcgtctttgagggtggcgatacgctggaagatttatcaaatgttgtttcagatgcctgtatatgtcttcagaacaacaacatacctttcaatgttcttatctctgactgtggaagcaagtctatctgttaccacagtgttatgcagagaaacaagctcttggagaagtggatgctgagcttcttgacacccaagtgaatcctgctgtgtgggaaattagtgggcacatggttcta

SEQ ID NO: 890 - DNA, 251 bp, Glycine max
  Clone ID: 700876250H1
gttccctctgcagcaaaggtgtatggtgcagttccaagtgcagcagcatcggtgagtcccagcatcggaggagcaattgaatcgttgccggttttggatgtcgtgcctatatcgcaacaagccgaggctctaggaaagctttgcttgagaatgtgaggaggcttaaggaatctcatggaagaactatgtcatcattgagtaaaactgatgaaaatttatctgcctcccttttgaacatcactgctcttgaa

SEQ ID NO: 891 - DNA, 246 bp, Glycine max
  Clone ID: 700876258H1
gtcaaggtccttgatcagaaattcggtatcatcaagggtaccatgaccaccactcactcctacaccggtgaccaaaggcttcttgatgcgagccaccgtgacctgaggcgtgcaagggcagcagcatcaacattgtccccacttcaacaggagcagcaaaggcagtggcccttgtcctcccaaccctcaaaggcaaactcaatggcattgcactccgtgtgccaacaccgaacgtctcagtggtgg

SEQ ID NO: 892 - DNA, 245 bp, Glycine max
  Clone ID: 700876273H1
gcgcaagttaaaaccagcttttggggaagctaatatgagaggttttacaaattaacttatacataagctaattttagcttatgagaaaaacttatttcttgttttcttctcttataagtattcatgacccagcagaaataccctgcattgcttttagattgtttcttgtgctgctatatataaactgctgaaccgtatttacgtttgtacgactcacatttgcttttgtgaacagccaagaggtt

SEQ ID NO: 893 - DNA, 246 bp, Glycine max
  Clone ID: 700876283H1
gcaacgtgaagatgcaggaaacgggttgtatcattacaatggatcaatgatgacttctctggagttggatgaagattactactggaaagaacttgcacgttctcttttaccgtcacccagctgttagtacttgtatgatatattaattagtatttgtgcaagtaataatcaacaaattgttgctactgcttccactggcagagctagcaaggtccatgagggaaccctatttccctccttattata

SEQ ID NO: 894 - DNA, 243 bp, Glycine max
  Clone ID: 700876292H1
aaactgtgttagactcgttgatgcctgcttttacttctgttgactctgagactgcaagtagttcagcacctgttgacaaggataaattcatccgtccagaaagtttaaataactttgtaatatttgcaccagtgattttacaactgtttccaaagaagttcatgtgagaacacgtagaatacgattagttgggctagagggagctggtaagactactcttttaaaggctgtcttgcataaatg

SEQ ID NO: 895 - DNA, 252 bp, Glycine max
  Clone ID: 700876323H1
ggatggttcagtgcagggatctaatgatcagactttaacagcaggcaatgaagggggctctcttgtgagagacaataacacaaaagcttcttgtgctgcaggttctagttcgaactaagcatatagaaggaattgcttgaactctgagatttgttttgtccaaaaggaagaaatagaattgcccattggggatgtgaaattccatggatggcattgcctattggctggcgcagaccaggcaagtgataatcc

SEQ ID NO: 896 - DNA, 250 bp, Glycine max
  Clone ID: 700876339H1
gtactccttctggaagtaagggagctcaacttagaaaacatattgatgccacgttgggtagtggaaatctgagggaagcagtaaagctacctcctggggaggatttaaatgagtggctagctgtcaacactgttgatttcttcaaccaggtgaatctgctttatggtacccttacagagttctgtactcctgagaattgtcggacgatgtctgcaggacccaagtatgaatatagatgggcagatggtgt

SEQ ID NO: 897 - DNA, 249 bp, Glycine max
  Clone ID: 700876374H1
tatatacacggtcaaggaatttactgccatcaatgctgttgcatagtctttggaatgggttcgtcttcttagatttgatgaaatagcttcttgaacgttgtggttctctagtaagcagagagtccaatgtgtaggtagaatttcaggcactagcatgcgggtttgtgctttggatcagcaattttcagaagtaaatgcatatgcatatagaacagtacctcgttaaggtacgctgatcaagtgtatgtg

SEQ ID NO: 898 - DNA, 249 bp, Glycine max
  Clone ID: 700876381H1
attttgcccttttcgctcagggattgaagtgaaacctggcaaaccgtgtccttatcacgctgacaatgtgcgagggaagcttcatgttactcaggctactctaggcattggctcatcatcggagaaaagcattcttcagtgctcttctggacacaaaagtccagttttcttgtgttcattgctaccagataaggttattttgcggatgatgatggggatgatcttagggatgactatgaatatgattca

SEQ ID NO: 899 - DNA, 245 bp, Glycine max
  Clone ID: 700876386H1
gcaaacttcctcctcctaccttggggtgtttagtatccaaagtgattcttaggatcgagagacaaccagtaaatccaaacaatgaacttaaaatttagcagtttccttgttgatggtaccgtggaacagaattttgacaatcacaaagtggaaggacaaaactcagcacctagcaaccaacaatgagagacataagatcatgattaagagccccaaagaagcagattttccattaaaacaggagg

SEQ ID NO: 900 - DNA, 250 bp, Glycine max
  Clone ID: 700876394H1
aaaacattcaactttggcttttggacacttattaaggcttctggaaaaaggaccggtggagtatcaacgtgtgattctacttatgctcaaagctctcctccagcacacaccaatggatgctacccagagtccacatatttatgcaattgtatcccaattagtagaaagcactttgtgttgggaggcactaagtgtgttagaagcccttctacaaagttgcagttcattgactggttctcatccctatgaa

SEQ ID NO: 901 - DNA, 253 bp, Glycine max
  Clone ID: 700876421H1
gagcaagaacactgttccaatacggaatctaaggcaaagcaaaccaaacatcttgaatcatgggttcaacaggtgagactcagattaccccaacccacgtatctgatgaagagcaaaccttttcgccatgcaactagccagtgcttctgtccttccaatgatcctcaaatcagcacttgagcttgatctgttggaaatcatagccaaggctggccctggtgttcatctttcccccactgacatttcttctcag

SEQ ID NO: 902 - DNA, 256 bp, Glycine max
  Clone ID: 700876444H1
gggaaaaccacttttgtcaagagacacataacgggagagtttgagaagaaatatgaaccaaccattggtgtggaggttcatccactagacttccataccaattgtggaagaattcgcttttactgctgggacactgctggccaagaaaaattcggtggtcttagagatggttattatattcatggacactgtgctatcattatgtttgatgtaacagctcgcatgacatacaggaacgttgctacatggcacagag

SEQ ID NO: 903 - DNA, 248 bp, Glycine max
  Clone ID: 700876513H1
ggtggcccaaaagctggcagacttagggcattggccaatgagccaaagctattcaatggcttaaagttttatttttctggggattatgtgtcaacttataaggaagatctcgaagaattaattgaagtgggaggaggtactgttttgagaagcaaggaagaattggaatcacaaagacatgaatgcaaaggagattcttcacagttgctgattgtttacaaccttgatcctcctcaaggatgcaaatt

SEQ ID NO: 904 - DNA, 247 bp, Glycine max
  Clone ID: 700876529H1
gaaaaacaacagaactttcaaggcgtgaaagagaggagatagagaaacagagagcccatgagcgctatatgaggctgcaagagcaaggaaaaacagaacaagcaaagaaggatttagaacgtttagctcttatacgtcagcaaagggaagatgctgctaaaaagcgagaagaagagaaagctgcgaaagagcagaagaaggctgaggcgcgcaagtgagtttcctggaaaatgtcatgccaccaaaa

SEQ ID NO: 905 - DNA, 241 bp, Glycine max
  Clone ID: 700876563H1
atcactgctgatgcatctggtgctaagcatctgaacataacattgactagatcgaagtttgaggctttggtgaatcacttgattgaaaggaccaaggtaccatgtaaaagctgcttgaaggatgctaacatctctatcaaggatgttgatgaggttcttctagttggagggatgactcgtgttcctaaagtccaagaggtggtttcagagatctttggaaagtctcctagtaaaggagtaa

SEQ ID NO: 906 - DNA, 243 bp, Glycine max
  Clone ID: 700876573H1
cagatgttgttgagcagctgttttatttcaatcacttgttctgttttcttcttgttaggagcgtggtttctttcttctctgagaaaggacaattgttttgagaaaggaaactgttcattcaaactctgggttatgatggggatcaagcgtcttcaatgttggagattcaagtcatgacaatccttttcttacattcatacattgagaagtggaacttttgctatgaagtattagcttttgatt

SEQ ID NO: 907 - DNA, 237 bp, Glycine max
  Clone ID: 700876576H1
aaattactctcatttctgcaagtatgcttgctctgaagaaaatcctgagctcctggacatgggaggtccagttgaaggtggatttagtgtcgcatttgatccccttgatggctccagcattgtggacacaaatttcacagtaggcaccatctttggtgtgtggcctggagataagttgactgggatcaccggaagagatcaagttgctgcagccatgggggttttgggtcctagaac

SEQ ID NO: 908 - DNA, 239 bp, Glycine max
  Clone ID: 700876590H1
gttcttcggaaatccttatcgtgctggggatcagcctaaccctggtggtggctccgtagagagcactccacatggtcctgttcatgcatggaccggtgatatcaaccaccctacaatggaggacatggggaatttatatgcagctgcaagagaccccattttctattgccaccattccaatgttgataggatgtggtccatatggaaaacacttggtgggaaaagaagggatttaacag

SEQ ID NO: 909 - DNA, 221 bp, Glycine max
  Clone ID: 700876593H1
gaaggttcaatggatgcatattgacatggctggtccggtgtggaatgaaaagcagcgctgtgcaacaggatttggtgttgctactttggtggaatgggttttgaggaacgcatcttaaatgcgaactgaaatgaaatcttgttcaattgtagtgtgatatatatactaataacttatctgaagggatataaaaggtgtgtgccccgaggcagattttagcc

SEQ ID NO: 910 - DNA, 253 bp, Glycine max
  Clone ID: 700876630H1
gaaagatataacaaatcagtggcacgggaagctactattaagtatcttgagttggccaagaagcatgggctaactcctgttcaacttgcacttggatttgcaagagatcgtccattcatgacaagttcaataattggtgcaacctctgtggaccagctaaaagaagatattgatgctttcacaacaactgagagacctttaccagcagaagtcatggcagatattgaagctatcttcaagagatacaaagatc

SEQ ID NO: 911 - DNA, 249 bp, Glycine max
  Clone ID: 700876664H1
cgcgttttccaattccccccaaatctcacgcctagggtttctatcgcaaaccctccctacctccaaccaggtcgcgtgcaaagggatttcgaagcttcggaagaaaaaaatgaaacctgttttctgtggaaacctggatttcgacgcgcgtcaatctgacgtggagaggctcttcagaagatacggcaaagttgatagagttgacatgaaatccgggtttgcttttgtctacatggaagatgaacgtga

SEQ ID NO: 912 - DNA, 244 bp, Glycine max
  Clone ID: 700876672H1
gagagttttcttatcaccttagctcgaatcaatggcctaccaaaactccatccccttctatgaaaaatactggtacaagcacaattataaaagggtaacagatagcttgcttttaatcctcctcttatcgctgcttggttaccgcgttatctctatcaacaactactctttattcccttggtttgttgcctttttatgtgagtcgtggttcaccttctcttggtttttaaccctaaccactcaa

SEQ ID NO: 913 - DNA, 240 bp, Glycine max
  Clone ID: 700876683H1
gcaaactacatggcaaaacgattggagaattattatcccgttcttttccgtggagtcaatggaacagttgctcatgaattcatcattgacctgagaggctttaagaatactgctggaattgagcctgaagatgttgcaaagcgcctcatggactacggttttcatgcaccaacaatgtcatggcctgtgcctggcacactcatgattgagccaactgagagtgaaagcaaggctgaacta

SEQ ID NO: 914 - DNA, 262 bp, Glycine max
  Clone ID: 700876709H1
gataccaaaaagatatctgcagtctcgatattttttgagacaatgccatatcgattgaatgaaagtacaggatacatcgactatgaccagatggagaaatctgctacactcttcaggccaaaattaattgttgctggagctagcgcttatgcacgtctctatgattatgaacgtgtacgcaaggtttgcgataaacagaaagctatactattggcagatatggcacacatcagtggattggttgcagctggtgtcatcccat

SEQ ID NO: 915 - DNA, 257 bp, Glycine max
  Clone ID: 700876716H1
ctctctctctctcctgctggaaatggcaactctgcactctcttgcattgtcctctccactctccaactcacttcagaagccacgctcatgtgcagtcccatcttcaattgttcatcaaagtacaaactcttcattcaatggtcaaacattacacctgccgtgtttaaggttacctgtgctaagacaaaatactcccatgcacatgcctgttatcatgatggtcaaaccaaaaatacagttcatccagggaactgatg

SEQ ID NO: 916 - DNA, 258 bp, Glycine max
  unsure at all n locations
  Clone ID: 700876718H1
atggagcccagaagaggacgangccctgcgggcgctggttcaggcccacgggcctcgaaactggtcggtgataagcaagtccattccggggagatccgggaaatcgtgccgcttacggtggtgcaaccagctctcgccgcaggtggcccatcgccccttctacgcaggaggaggacgaggccatcatcatggcccacgccaagttcggcaacaagtgggccaccatagctcgcctgctcaacggccgcaccgataacg

SEQ ID NO: 917 - DNA, 259 bp, Glycine max
  Clone ID: 700876726H1
gtcattattagtgcagtgctcaccagcagggcaattttccagaggatgaagaactatactatctatgctgtgtcaatcaccattcgtattgtgtttggtttcttgtttattgcgttgatctggaagtttgattttgcacccttcatggttttgattattgccatactcaatgatggtaccattatgactatatccaaggatagagtgaaaccatcaccacttcctgatagctggaaactgagggagatatttgctactg

SEQ ID NO: 918 - DNA, 244 bp, Glycine max
  Clone ID: 700876820H1
gatcattctcgcaaatcagctgaacaggctgtgaaggccatcaaggcagctgaggaaggaagaacagttgaggagtatgattaccttccatacttctattcccgttcatttgatctgtcttggcaattctatggcgacaatgtcggcgacacagtactattcggagacaacaatcctgcgtcgtcaaagcctaagtttgggacatactggattaaagatgggaaagttgttggggtctttctgg

SEQ ID NO: 919 - DNA, 244 bp, Glycine max
  Clone ID: 700876826H1
atatgtagtctacattgtctttcaactgtggacacacaggcagttatttgaagccgaagatgagggtgaggatggtgaggacggtgaagaagaacaagctgtgattggattatggagtggcattgcttggttggtagggatgactgtgttcattgctgtgttgtctgaatatgtggtggatacaattgaggatgcatcagattcgtggggtttgtctgtgagctttctcagcataatcttgcta

SEQ ID NO: 920 - DNA, 246 bp, Glycine max
  Clone ID: 700876827H1
caatgttgtctttggcggtcaacagatcatcaacgggaatgagacattgccctatttcccaattgatcaccatgtcgatccatatggccgcagtaaatcaattgctgaacagttggttcttaagaacaatgcccgtactctcaagaacgactccgggaatcgtctttacacttgtgctgttcgtccagctgcaatctatggaccgggtgaagacaggcaccttccaaggatcgtaaccttggcaaa

SEQ ID NO: 921 - DNA, 241 bp, Glycine max
  Clone ID: 700876851H1
gtactttgttgccttttcgttcatcaataggtagacaattcacaagagtccagcttttttaattctgaagcaaaatcaccattgaaattttacatacctcagtgtgttttgggatttaattggtattgaactctgttcttcttcctggcaatttctgtctctgttggctctacttcaggactggaccatagtccaacatatctgctccaatagtttagtatatcatcaaagttaatattaa

SEQ ID NO: 922 - DNA, 241 bp, Glycine max
  Clone ID: 700876860H1
atccaaatcaacactaaaggtttcaaagacaaagaatacttcactcgtgaccagatgtgaaattggtgacagtctggaagaattcctcacaaaagcaacaccagataaggggttgatcaggttgttggtgtccatgggagaagcattaagaacaatttccttcaaagtgaagacggcttcttgtggtggaacacaatgtgttaatacttttggggacgagcagcttgcagtggatttgcta

SEQ ID NO: 923 - DNA, 239 bp, Glycine max
  Clone ID: 700876867H1
gtttgaagtgctgggaatcccttgtggatgcaaacggacaaagtccacatgcctatgccatgatgaggaataatgactcttataatgcgctggtcgcccgtaaacttgctgacagacaaaggggtgaaatttcggtaacaattgcaaatgcaatagagcaacagtcactgagagtggagcttaagcaaaagcaaagttacttagtcaaacgaggtcagagttcttgtgccaagtgtgcg

SEQ ID NO: 924 - DNA, 115 bp, Glycine max
  Clone ID: 700876870H1
aagcaatacataactttctccagtatcaacagtgcagttataaagttctacgaaagggaaacaaatttgacatcaactttgacaaaattgattatgaatagaattgattttggtt

SEQ ID NO: 925 - DNA, 249 bp, Glycine max
  Clone ID: 700876924H1
ggattgcctcctcgctccaactacttattcttaggcgattatgtcgaccgtggaaagcaaagccttgagacaatatgtcttcttttggcatacaagataaagtaccctgagaacttcttcctccttagaggcaatcatgaatgtgcttccataaaccgcgtctacggcttctacgacgaatgtaaacggcgattcaacgtcaggctatggaaaatatttgcagattgcttcaactgcatgcctgtggca

SEQ ID NO: 926 - DNA, 244 bp, Glycine max
  Clone ID: 700876955H1
caaaacattgtcactgaaaggaggatactatgactttgttaaaggatcttttgagctctggggccttcagtttggccttgcatcctctttctccgtatgaacatcaaccattatcaatgacctcatcttggttccctaagttaaagatgtggccaccattctccattggaagctataggggccatgcttagaggtcgtgtgtatctgcaatgaagaggcctagccaccttcatcaccatatgat

SEQ ID NO: 927 - DNA, 240 bp, Glycine max
  Clone ID: 700876988H1
gttctaaaaaaggaatcaaatcgtatgttgctcaccattttatttctgtttcttattaaataataatatctggataaaagaaaatcctgagaaatataaaagcatcatgtgtatggagaagcacggccatgatgaggaggagcaacccaaacctgtggttctaatcacaggatgttccacgggagggataggccacgcgcttgcacgatccttcgcagcgaacaggtgcagggtggtggc

SEQ ID NO: 928 - DNA, 262 bp, Glycine max
  Clone ID: 700877008H1
aaatgacttacaagtttctcaacaccataattgatgacctttttgcctttgtcattaaaatgccaacactccatcggctttctgtcttccgtgatgatcttatctttgtcatatacttataccagaggtggatttataaagtggacaagaaacgtgttaacgaatttggttttggaggtgaggatgatcaggctgtggcagagacagacgctgcaaaggaagaagagaagaaaactaattgatttggttttctctcaacaat

SEQ ID NO: 929 - DNA, 260 bp, Glycine max
  Clone ID: 700877009H1
ttttgtcattggtgttaagttgacaaccataaacaatatgtgtgcatatgggctcaatcctggtatttcaggttctcgtcttttgggcaccattcctcagtctatttcacagcaaactgtttggaatcaaatggcaacagtgagaacaccattgaattttgattctagcaagcagagcttttgtcaattttctattgaccttctcggtggaggaattttagtggacaaaactggagattggatcacacttatacaaaatt

SEQ ID NO: 930 - DNA, 259 bp, Glycine max
  Clone ID: 700877014H1
caagattgttggaagcaaaggaaaggccataggcattgatcgatttggagcaagtgctccagctggaaaaatatacaaggagtttggtatcaccaaggaagctgttattgctgctgccaaagaactttcgtagatatatttgttgagtttcttttatctcatctagaacttgtggttttcacttgtggctttgggttactgttacatgacttgttttttgagatatcactttagccacaataaggaagattagattgtt

SEQ ID NO: 931 - DNA, 261 bp, Glycine max
  Clone ID: 700877015H1
cagatacggctacaaacttgttgagaatggcaatataagagctgcactttctaccactgatgttattgagcttccaacacaagataaactaaaaaccgtgcttgacaaagtgaaagacttttttggagatgcaaaggaatcttttggaaagataacatcattgggcactactgaaacagaggagtcagaggaagacacaaaagaaaaagccaaggttaaaggatgaaactatagctggaaatgatttgcttgaattgttat

SEQ ID NO: 932 - DNA, 260 bp, Glycine max
  Clone ID: 700877020H1
aactcttcaaaagggagaagaaaaggaaagaaaactctcaaaaaactattatagcaatggcagaacaaaaccaaaaccaaacaactgaagctggaaggcaccaagaggttggtcacaagagccttctccagagtgatgctctttaccagtatattctggagacaagtgtctacccaagagaacctgaatccatgaaagaactgagagagttgacagcaaaacacccatggaacatcatgacaacctctgcagacgaaggg

SEQ ID NO: 933 - DNA, 256 bp, Glycine max
  Clone ID: 700877022H1
caagattgttggaagcaaaggaaaggccataggcattgatcgatttggagcaagtgctccagctggaaaaatatacaaggagtttggtatcaccaaggaagctgttattgctgctgccaaagaactttcgtagatatatttgttgagtttcttttatctcatctagaacttgtggttttcacttgtggctttgggttactgttacatgacttgttttttgagatatcactttagccacaataaggaagattagatt

SEQ ID NO: 934 - DNA, 257 bp, Glycine max
  Clone ID: 700877023H1
cagatacggctacaaacttgttgagaatggcaatataagagctgcactttctaccactgatgttattgagcttccaacacaagataaactaaaaaccgtgcttgacaaagtgaaagacttttttggagatgcaaaggaatcttttggaaagataacatcattgggcactactgaaacagaggagtcagaggaagacacaaaagaaaaagccaaggttaaaggatgaaactatagctggaaatgatttgcttgaattg

SEQ ID NO: 935 - DNA, 251 bp, Glycine max
  Clone ID: 700877026H1
tgcaattgaagttgaagtcttgcccttctctcttcaactccaaacacaagacatcatcatccatggctgcctccgtctccactgtcggagctgtcaacagagctcttttgaacctgaatgggtctggacctggggtttcagctcccagttcatccttctttgggagcagcttgaagaaggttattggctcaagggtccccaacacaaagatttcctctggaagcttcaagattgttgctgtagaagagaag

SEQ ID NO: 936 - DNA, 250 bp, Glycine max
  Clone ID: 700877027H1
atattttgctgtgtgatttggagaccaaaacggtggaaattgtcaattatcagggtcgtggaggaaccatttcatgggaatctagcaaagtagttccttactttctaccagcttggccacacacttcctcggtgtcggtgtcatgacaacatggaacaagggaaaacttgtcgtttttcaatctagaggcacttggtcttttccattctgtttttgatctggatatgatgaaaattaagggtctgtttta

SEQ ID NO: 937 - DNA, 246 bp, Glycine max
  Clone ID: 700877042H1
gtaaaatacaacatacagtctatcatagtcagaattgagaacaatcgttggtgtggaacgtgacaatggtggcgacgaacgtgaaggcagaaaccatgtctctgatggacaagcgcaggccttggaggctgagatgaactccatcatcgcccgcctctcccagccaggcgctcctggcctctccggaaatctcgtcgattccgaggattttccccattccgatatcgacgtccccgttgttcgagc

SEQ ID NO: 938 - DNA, 248 bp, Glycine max
  Clone ID: 700877054H1
gaagaatggaacttggagataatttgctgttatgtagtgataaataccctgaaatggctgtcgtgcatgatttacttttctgattgcaaggagaggaaaatgcagaagaaagttgatgaggaatcaggtaaagatcttgcaaaatgattcattgaagaatggaacttggagataatttgctgttatgtagtgataaatttgtttttatgtggagttagtgatgagaatttgaataatgtacaagatgt

SEQ ID NO: 939 - DNA, 248 bp, Glycine max
  Clone ID: 700877055H1
tttccatgctggcataagcagaaaatttggtggagaatctcttgggcgatttcgagtatgaagttcaggttccatatttgctgtatagaaatgctgctcaagaagtgaatggtatctggttctataatgcacgtgaatgtgaagaggttgccaatctttttagcaggatccttaatgcgtatgctaaggttcctcccaagtcgaaggtttcttccacaaagagtgagtttgaggaactagaagcagta

SEQ ID NO: 940 - DNA, 245 bp, Glycine max
  Clone ID: 700877057H1
tactgagcgtgagagcacatgccgggagctgctctttcgaaacgcagacgctttggctgtgaacgcgtccacgcgggaagaactttgtgagcgcttgaatcttcctgctgaatggattagcgaggcactggcggtgagggctatcgtaaagcaggagcgccacgaagaaattgcgcactgggtagctgctcggcactatgaagaagctcatacgtgcttgatttcgcatgtagcgatgcgctgct

SEQ ID NO: 941 - DNA, 245 bp, Glycine max
  Clone ID: 700877061H1
gtttcccgccatatatccaataagctttaaccatgtctgcctttgttggaaagtacgcagatgagcttatcaagaatgccaagtacatagccacacctgggaagggcatcttggcagcagatgagagcactggcaccattgggaagcgcctatcgagcattaacgttgagaacattgaggccaaccgccaagctcttcgcgagcttctcttcaccgctccagatgccctccaatacctctctggt

SEQ ID NO: 942 - DNA, 244 bp, Glycine max
  Clone ID: 700877070H1
gttttccttgacactcctgggcatgaggcatttggagcaatgagagctcgcggagaagtgttacagacatggctattattgttgtggctgccgatgatgggattcgtcctcaaacaaatgaagctatagctcatgccaaagcagcgggagtacccataatcattgcaataaacaagatagataaagatggagcaaatccagaacgagtcatgcaagagctttcttcaattggtttaatgccaga

SEQ ID NO: 943 - DNA, 241 bp, Glycine max
  Clone ID: 700877074H1
tgggttctaaaggactcaccgatgcatcaaagatagccattttgaatgcaaactacatggcaaaacgattggagaattattacccggttcttttccgtggagtcaatggaacagttgctcatgaattcatcattgacttgagaggctttaagaatactgctggaattgagcctgaagatgttgcaaagcgcctcatggactacggttttcatgcaccaacaatgtcatggcctgtgcctgg

SEQ ID NO: 944 - DNA, 241 bp, Glycine max
  Clone ID: 700877075H1
attgggccaaatctctgaaagactgaccgttcaggtttctgatgtaaagaatgtcattatctggggcaatcactcatcaacccagtatcctgatgttaatcatgcaactgttgcaacctcagctggggagaagcccgtccgtgagcttatagctgatgatgcctggttgaatggggaattcattactactgttcaacaacgtggcgctgcaattatcaaagctagaaagctttcaagtgca

SEQ ID NO: 945 - DNA, 243 bp, Glycine max
  Clone ID: 700877078H1
gagctcttatgagtaccttagcactggacttaaacagtacaacttggataacaacatggacggtttttacattgctcctgcttttatggacaagcttgttgttcacatcagcaagaacttcatgaccctgcccaacatcaaggttcctctcattcttggtatctggggaggcaaaggtcaaggaaaatccttccaatgcgagcttgtctttgccaagatgggaatcaaccctatcatgatgag

SEQ ID NO: 946 - DNA, 245 bp, Glycine max
  Clone ID: 700877079H1
gcaaaaggtaacactagttcctcgtggtcaagctcggggtcttacatggttcattcctaatgatgatccaactctgatctccaaacaacaactctttgcaagaattgttggaggactaggtggaagggctgcagaagaaattatttttggtgagcctgaagttacaactggagcagctggtgatttgcagcaaatcaccggtttggcaaaacagatggtaaccacatttggaatgtctgatattg

SEQ ID NO: 947 - DNA, 279 bp, Glycine max
  Clone ID: 700877101H1
cttccattcacaaccttaaacctttctttcttgtaaactttattgattgattctgagaatagaactaagagggtatagacatggctagcgcaattgcagcttcttttttggttctgcttctggctttccccactgtatttggagctgaccatgaagttggtgacactagtggatgggccctcggagttaattacaacacctgggcctctgggaaaactttcacagttggtgacactttggtgttcaagtatgactccactcatcaagttgatgaggttg

SEQ ID NO: 948 - DNA, 139 bp, Glycine max
  Clone ID: 700877104H1
tgatattctaggagatgcaataattgtattttgtatattcttgtttaagaaaatcaaccaagaactttttatttttttggtgaatagaacgttttatcatttgttttggtgagtagaacttcttgtcatgtagtgttgt

SEQ ID NO: 949 - DNA, 273 bp, Glycine max
  unsure at all n locations
  Clone ID: 700877141H1
gaaataataataagtattatcttagtttgggtgcttatatatataattgcatattaataattaatggtgagggagcaccagaactactgagagatgctatgcatagtttaattacttgttttggtactcacgttgtgtgcagatccaagtgctgaagttattgctttatcaccgaccacactaatggctacgnncaggttcatatgtgaaatctgcaacaaaggatttcaaagagaccaaaaccttcagttgcaccggcgaggccacaacttg

SEQ ID NO: 950 - DNA, 274 bp, Glycine max
  Clone ID: 700877147H1
gcaagcaaaaagaaagaatcccaggcgaggagaaagatggaggggaaggagcaggatgtgtcgttgggagcgaacaagttccccgagagacagccgattgggacggcggcgcagagccaagacgacggcaaggactaccaggagccggcgccggcgccgctggttgacccgacggagtttacgtcatggtcgttttacagagcagggatagcagagtttgtggccacttttctgtttctctacatcaccgtcttaaccgttatgggagtcgccg

SEQ ID NO: 951 - DNA, 273 bp, Glycine max
  Clone ID: 700877163H1
caggccaggaacttcaccaccagaatcatgctcaagccgatcgaggatcctcacgtcgatctcattgcaaccgtttcgggtcctcttgatcacaagccaaaagacagtattgccggagatgcattgtttcgctggcaaagtgatgttaatgatcctcatacgtttatggacctttatgtatccacgtctaatccgattttgcagatgagatcgtgcgcttactatcccaaatatggatttggggcttttggagtgtttcctctgctgttgaag

SEQ ID NO: 952 - DNA, 264 bp, Glycine max
  Clone ID: 700877169H1
gcaaactacatggcaaaacgattggagaattattatcccgttcttttccgtggagtcaatggaacagttgctcatgaattcatcattgacctgagaggctttaagaatactgctggaattgagcctgaagatgttgcaaagcgcctcatggactacggttttcatgcaccaacaatgtcatggcctgtgcctggcacactcatgattgagccaactgagagtgaaagcaaggctgaactagacaggttctgtgatgctcttatt

SEQ ID NO: 953 - DNA, 266 bp, Glycine max
  Clone ID: 700877170H1
ctgttgaatcgcgtcgattaaggttttgagatttctaggctttcatctcagacagtgaaaaaatgatagatataagtacacttaatgctgcacagattactgtgctgggatctgccttttgtgctatgctttccatgcatttcacgtcgcagttactgtctcagcatctcttttattggaagaatccgaaagagcaaaaggctattatcattatcatcctcatggctccaatctatgcagctgtctcctttgtgggtctcttggat

SEQ ID NO: 954 - DNA, 270 bp, Glycine max
  Clone ID: 700877179H1
gcgaattggtggctgtggatgtgagtttcatggggaagacgcattttgttgtggaggagaagcgggttagggggggtgatgacgatgtcgtggtggcggagagcggatcgccgccggagagactgatggcggagatttaccagcatttcgcgaacccgcggagccccgggagtgatcggtccaggaggcagaggcggcgcgagaaggagaggctctacgggaggaagtgggagcctcagcattttgtcaagattgtcaactgctcgccga

SEQ ID NO: 955 - DNA, 264 bp, Glycine max
  Clone ID: 700877183H1
gaaggaactcatcaaatataaaggcttccaggtgccccctgcagaacttgaagggcttcttgtaagccatccctccattgcagatgcagctgttgtcccacaaaaggatgttgctgctggtgaagttcctgttgccttcgttgtgagatcaaacggctttgatctaactgaagaggctgtaaaagagtttatagctaaacaggtagtgttttacaaaagactgcacaaagtttattttgttcatgctattcccaagtctccatc

SEQ ID NO: 956 - DNA, 266 bp, Glycine max
  Clone ID: 700877189H1
taaaggtcttgtagactctggattgacaaagatccctcgcatgttccattctggcaggttggatatcattgaaacctcagtcagtgactctaagttcggtatccccatcatagacctccaaaatatccactcctatcctgctctgcattcagaagtaattggcaaggttcgaagtgcatgccatgactggggatttttccaggtgattaatcatggaattcctatcagtgtgttggatgagatgattgatggaattcgtagatttc

SEQ ID NO: 957 - DNA, 263 bp, Glycine max
  unsure at all n locations
  Clone ID: 700877190H1
gtgcatctaattccanattcacccataaaaatncttccttttgctcaccagccatntattatgatggagggagtgagaatattcaagcatcatcaaagggaaaatatgttgaaagcttcaactgctcggaggcaccaaggaagaaaagcaagangatagaaaacaagaggaggtttagtgatgaacagataagatcactagaatgcatatttgagtcagagtcaaagcttgagccaaggaagaagatgcactggctagagatc

SEQ ID NO: 958 - DNA, 258 bp, Glycine max
  Clone ID: 700877221H1
aaacaaggaacatacctaagagtttgcgagagagacagagagagatgaagtggagtccgaaccaagtctcatagctgagagtttaggatcggaattctgccaccgttcttcttcatctcacctacaaccttacctcatattagcacaaaattagtttgcttctatgagccaactgtcgtgttttcttcagcttcataatggtcttgaagggtctatgtgagaggattgtttcttcaaaatgctcttctaaaagctcca

SEQ ID NO: 959 - DNA, 257 bp, Glycine max
  Clone ID: 700877230H1
ggatacatcagcatcctttgaactgcagcagcccggatgtcaagttccttgttactgactgggagagattacctggatttggaattggggctcagattgctggcatgtgtggacttcttggtattgcaatcacgaaggaagagtccttgtcactaactattacaacagagctgaccatgggagttgcaaagggtcttcccggtctagttggagttgttacttctttcctgaaacctccctagaatgtcggcaacgtg

SEQ ID NO: 960 - DNA, 260 bp, Glycine max
  Clone ID: 700877231H1
gcaaaacttgttctattgtgtttctgtgttaaactgcaggtggggattgtgctaatgtgtaaagtcacccaatacgtttcaatatacctcatgtacttgatcttgacatgttgtgatcattgcaagaaggtgaatccaagtttgtttctagcgcctcaagcgttagcagctcggcaactacagaatcaaggcctggaccaaagctagacctgagacgttttgtcttgcatcttgaaggtgaggaagagttagttgaggtg

SEQ ID NO: 961 - DNA, 252 bp, Glycine max
  Clone ID: 700877286H1
ccgcggcttcaaccttgtagttattctctttcttcttttttagctatccctctcttgaaaaatctagatctcgttcttccttgatctacgttacgcttttagtgaccggatctgtatggatctgaacagatctacacgccgatggtggttttggcctggtctttcatagatctgatgcatggaggctcagatctactgtacagaggtgtgcgattcatgttcgtctctcttttggaatctgtttcgtagaaa

SEQ ID NO: 962 - DNA, 319 bp, Glycine max
  Clone ID: 700763714H1
aaagcttacaaggacttgaggagtggcagtccgaagtaaattttctaggacgtctttctcataccaatcttgttaagctgttgggatactgtttggaggaatcggagcttcttctggtctatgaattcatgcaaaagggcagtttggaaaatcatctatttggaaggggttctgctgttcaaccacttccttgggacatcaggcttaagatagcaattggagcagctcgtggcctcgctttcttgcatacatccgagaaagtaatttacagagacttcaaggcctcaaatatattgcttgatggatcctataatgcaaa

SEQ ID NO: 963 - DNA, 319 bp, Glycine max
  Clone ID: 700763720H1
ccttcttatagtccaacttcaccttcctacagccctacatcaccctcttacagtccgacgtctccatcatatagtcctacatcacctgcttacagccccacatcacctggatacagcccaacctcgccatcgtatagccctacctcaccatcatatagccctacgtcccctagttacaatccgcagtcagcaaagtatagtccttcgttagcatattctccaagcagtccgagattgtctccatcaagtccatatagtcccacatcaccaaattatagtccgacatcaccatcatattcaccaacatctccatcttatt

SEQ ID NO: 964 - DNA, 317 bp, Glycine max
  Clone ID: 700763736H1
gtaccaccaggctttaaaggatctgtatacgcatctgactcctattcagcgggtcaacatcgcacggcaccctaacaggccaactttccttgatcatgtgtttaacataactgagaagtttgttgaactccatggtgatcgggcaggttacgatgatcctgctattgttactggtctagggactatagatggtagaagctacatgttcattggtcaccaaaagggtagaaatactaaagaaaatattcagcgtaactttgggatgccaactcctcatggttacaggaaggcccttcgcttgatggaatatgcagatc

SEQ ID NO: 965 - DNA, 319 bp, Glycine max
  Clone ID: 700763737H1
catagacccagagctattcctcaattatcaatatcttctgcttctctctctcgatgagaaacaacaacacatacagcaaaacatgacaaccaaaggaacaactcactctgaacccaacaacactgaatgttgcatgtgtggggatcttggcttctctgatcagctttttcaatgcaaagcctgccaattcagatctcaacacagatactgcagcaatctctacccgaagccagagtctcttggaacctgcaattggtgtttgagtcaaagagaggacaccaaagagaggtcaaccaattcatcaaattcttcctcatct

SEQ ID NO: 966 - DNA, 323 bp, Glycine max
  Clone ID: 700763748H1
tggttctcttcttaaaagtattgtcattgatggagaaacaacattacctatatatacagtgttagaggtatacagagtgtcagatatggaacttgttagggtgcttcctagtgcagaagatgaggtcaatgtggcatgctttcatccttttgccggaggaggactagtttatggaacaaaggaaggaaagcttagggtcctccagtatgacggtgctcatgcagtgaatggcgctggaccaagttactttcctgaggagaccatcgttggagtcagtcagtgagcaaggtttagacaaatgattggacatgtaattcaaagat

SEQ ID NO: 967 - DNA, 315 bp, Glycine max
  Clone ID: 700763752H1
gtatgctgacaaggaagatatctttgttcctgatattttctgggactatacaagtgctaaagtactaacaatggagtgggttgatggagtcaaactaaatgagcaacaagcaattgagagacaaggattaaaagtcttggatctggtaaacgcaggcatacagtgcagtctcagacagttactcgagtatggatattttcatgcagaccctcatcctgggaatcttttggcaacacctgaaggaaagcttgcttttcttgattttggcatgatgagtgagactccagaagaagcaagatatgccataattggtca

SEQ ID NO: 968 - DNA, 337 bp, Glycine max
  unsure at all n locations
  Clone ID: 700763862H1
agagttattatcccaatttcctttcttctgtggctaatgctatatcagcgaaaagcatgtttcatgttttctacagtccaagagcaagtcatgcggattttgctgtgccctaccaaaaatatatcaaaagcatcaagaatccagtgaccatcgggacaagattcaaaatgaaatttgaaatggatgaatctcccgaaagaaggtgcactagtggcatagtgactggaatgagtgatttggatccctataaatggcctaagtcaaaatggaggtgcttgatggtcagatgggatgaggtattgagttaaccnccagatagagtgtctcctgggagtga

SEQ ID NO: 969 - DNA, 221 bp, Glycine max
  Clone ID: 700763869H1
ttggcaagtaaatatttctgttcctgaaggttgtgctgatccaagtgctagaagttgtgatgggacttgcgtgtaacattcttagaattctcaatgtcttaggtgcaaagagaagatgccaagtttgagatgattttactatatttttcatattggactgtcttcctctataattttgagttaaagtgtccacttaaattgaatttggtgccttttccttt

SEQ ID NO: 970 - DNA, 166 bp, Glycine max
  unsure at all n locations
  Clone ID: 700995901H1
atgtgtcttcctttcctgggagtgatagggtttatcgccatggtgtttcaattcaaaagtttgaagtttctttgtctttgatttcatgtttaattttgttagcctgattgatatcatattttttttctnatttaacaattgaaataatacgtgctgcctttctttc

SEQ ID NO: 971 - DNA, 298 bp, Glycine max
  unsure at all n locations
  Clone ID: 700995904H1
cagattttcgtcaagactttgacgggaaaanaccatcaccttggaggtgganagttcagataccatagacaatgtgaaagccaagattcaagataagganggtatncccccagaccagcagaagcttatctttgctggtaaacagnttgaagatggacgagcccttgcagattataacatccagaaggaatctaccctgcanttggttttgaagcntcgtggtggcatgcaaatctttgttaagactttgaccggcanaacaataactntagaagttnaaagttcnnatnccatcacc

SEQ ID NO: 972 - DNA, 171 bp, Glycine max
  unsure at all n locations
  Clone ID: 700995905H1
aactagtgttttttgatgctatgattttgccctgtccttcaatttagttgtctttcttagaagtaaaatatggatcagtttttttgtagcaaagcaacttggttttntttttttccnagtttgntatgagtggcaaaatatnattttnaacatggnatatncggnaagatt

SEQ ID NO: 973 - DNA, 292 bp, Glycine max
  unsure at all n locations
  Clone ID: 700995906H1
taccttgggacaacaatgagaacaaacctgtcactaacagtagggatacacaagaggttatgttggagcctgggctgaaattaattaaaattttcaaggaatataccagcaagacatgcattttggatgattttggcttctatgaggctcgtcagaaaactattttggagaagaaagcaaagcaacaattcccaaagcaggtatgggaagggaaacctgctgatgagaagattgagataaatggggaagttaatactcaaaaatctgaagttagcccggaattgcncaagga

SEQ ID NO: 974 - DNA, 290 bp, Glycine max
  Clone ID: 700995907H1
ggatcatcaaacatgaagagtttctgactcataggctggcccttctgcacgcggccgacaagtatgacatatctgatttgagagatgtatgccatgagagtcttctagaagatattgacacaaagaatgtacttgataggctccaaaatgcatctctatatcagttgatgaaactgaagatgagttgcatccgatatcttgtgaagtttggtaaaatatatgaaattcgtgaagatttcaataccttcctgcaaaatgcagatagggatctgattgctgaggtcttccat

SEQ ID NO: 975 - DNA, 287 bp, Glycine max
  Clone ID: 700995908H1
aagaaagacacagccattgtttacttttcattgattgagccaaagctttgtattttctgcgataattttccattgggtggaagaaagtctcaacctttattcgaaagagcaaggatctgagttgagttgagtgatcatgtgtggtggtgcgattatctccgacttcataccggcaggtcccgccagcggggcgcggcgcgtgaccgccgacatcctgtggccgagtttgaggaagcgctctcgaagccgctgctggacgatgatttcgaggctgggttcagagaatc

SEQ ID NO: 976 - DNA, 170 bp, Glycine max
  Clone ID: 700995909H1
accattactcagcactgccattcttcaatcacactaatggctgtcaccttctcagatcttcacaccgaagagggcatcaaatgccctcgatcaattcctttctgggaaaacctatatctctggggatcaattgacaaaggatgatatcaaagtgtatgcagctgttgtgg

SEQ ID NO: 977 - DNA, 287 bp, Glycine max
  unsure at all n locations
  Clone ID: 700995910H1
tagaatgtgtacctttataaagtaaattgcaacaagaaaatcagaggaaaaatattctcaagtatcaaataatgatacaacaatagcttcttctaattatttgatggaatgtctatcccacatattaactcctttcttcatatgataattgaagaacattactctcgggaactgggaatttggaaaataagttggttgtgtaaagtagatagcttatggcttagtatccattgangatatcagctaacaagctagagtagaatctcgcaattactactcttataagt

SEQ ID NO: 978 - DNA, 284 bp, Glycine max
  unsure at all n locations
  Clone ID: 700995913H1
cttgtggaagctgctatttttgaagacgaaaatggtgtttcgagttctgaagttgagctacattcttgacaaactggatagtaaatggacggatcagtaccttgactttgattacattagtttttcaaccgggaaatggtttctcaaatctgcaatctactatgagaatgacaccatattgggctgccactcctgtcctaagaagaacctgacagagctggggtttaactttgcttattncaatgccttgaaattagtaatgaactncatagtgtctcggaacc

SEQ ID NO: 979 - DNA, 283 bp, Glycine max
  unsure at all n locations
  Clone ID: 700995914H1
agggatcgccggcggcaccctccgaagacggagatacacccactcactcaccaccactttcccaganaataaccaacgcctacaatttctcggaatttattttgcgttttggtgcctttgttgttcggattttcaggtgagggagctcgtgtcgtgtgtcgtttagggctaaaaatggggtttaagtgggtgnactgatgtcatngntgnggctngtgattcgncaacttgcagaaatcgaggcaatggctgcatctaaganactgataacaaganaagagtg

SEQ ID NO: 980 - DNA, 286 bp, Glycine max
  Clone ID: 700995916H1
atcaggagatgttcctgcggtaatgaaggctttggaggagataggttgtcagctaagggaaaacccaccaagacaagtcatttcaattagcccaacatacaattatgctgcaattcgaccatcccaaccatatcttgacccaacttcaggacaaccaatcttgcagttgattatgttacattcgagatgctgatttccggaaacaatggttggtgggttgattggccggtgtggctcaaacatatcgagaatcagaaatgagtctggagcaatgattaaggtttat

SEQ ID NO: 981 - DNA, 301 bp, Glycine max
  unsure at all n locations
  Clone ID: 700995917H1
gagagaaagtgctgcagaatacacacatacacaccacttcttcaagagagagaggtgtgtgaaggaaaataagaactgaaagaaaaattttgcaaaggaagatatgaaactttgcaaatttaacaactgagaaagaagatctgngatttctctctcnnnnnnnnnnnnnnnnnnnnnnnnnnnnnnnnnnnnnnnnnnnnnnnnnnnnnnnnnnnnnttcttcgagtctgaatttgtatcattgacaatttttncacaaagggttgttgtctcttcagagaganacagatcttgaggttgg

SEQ ID NO: 982 - DNA, 298 bp, Glycine max
  unsure at all n locations
  Clone ID: 700995918H1
gggagaactaattttataagcttaagcttttctattgggggtaangattgacatgtgatttggaaggattaagaatccaagaggatatacaaacttggcttactattgcataattggttggagaggtaagaggatggataatggtaaagtttttggttctgatggtattcttattaacgtttggaaatgtgtagaagaacagtgcatcatttgttttactgagttatttaatgagattttaaatctaagaaaatgtcaaatgagtgaaggagaaatactttggttcctaatattcatt

SEQ ID NO: 983 - DNA, 175 bp, Glycine max
  unsure at all n locations
  Clone ID: 700995919H1
ccaagatccaggacaaggagggtatccccccggaccagcaacgtntcatcttcgncgggaagcanctncgangacggangtacccttgcngcctncnagatccanaaggngtcaantctccacttggtgttgngtcttcgtggtggnatgcccttttcgtgaagactcttacggg

SEQ ID NO: 984 - DNA, 175 bp, Glycine max
  unsure at all n locations
  Clone ID: 700995920H1
atcttgtcanaacacatcttgatatcctggatttgtatgaatattatttacatttttccattagcttggcttcaaaaaaactcggaagcgcttttgtatatgttggaaccattcttggttgcacaatctaatgaccgtaatccttacaacattgatangnangaatctgaagaag

SEQ ID NO: 985 - DNA, 289 bp, Glycine max
  unsure at all n locations
  Clone ID: 700995923H1
caatttttaatcgcatcgaaataccaacttcatttgatcctttaaatggtctatacattggtgcgcatgggctttactcctctgaagttattcatctaagacgtagatttggtcagtggcaagangacaatggggccaaggagccttcaaatcttgagttttatgagtatgtagaggctttgaagctaacaggggatccttatgtaccagctggtcacgtggcatttcgtgcaaaaattggaaagaggtatcaattgcctcataaagggataatacctgaagagtttgg

SEQ ID NO: 986 - DNA, 290 bp, Glycine max
  unsure at all n locations
  Clone ID: 700995924H1
ttttaaagagcaggcacaaaaccaagcttaacttccttgttttgtgtctctttctcccaagattctgccgaggtcttaagggaatatattattatctccatgtgcggngtttccaagnngaaaccttctacaatttggtttggtcatggaggagtatgcaaaanaagggatgcatcatataatttcagctttgcttganttttctgcagcagatgatctggttagtttcaaagatgcggttgaaaagganggtcatgatattgatggggtanggttttggtatggaaggt

SEQ ID NO: 987 - DNA, 287 bp, Glycine max
  Clone ID: 700995925H1
tgctgactgtgatgggtgtgttcaaatctaagagcaagtgttccactgtgggtatccaaggcattgcttgggcttttgggggaatgatctttgctcttgtttattccactgctggaatctcagggggtcatattaacccagcagtgacgtttgggctgttcttggcacgcaagctctctctgacaagggcaattttttacataatcatgcagtgcttgggagctatatgtggtgctggtgtagttaaggggttcgagccacacctctatgagaggcttggtggtggt

SEQ ID NO: 988 - DNA, 166 bp, Glycine max
  Clone ID: 700995926H1
cattttgctctacccagtcgctttgttcattgcgtttctgaacgatgtgtggcattagttgtgcagtcactctacgtggccaccatccattatgcggcagtcgtgattcattgagcaagacactcgatgagagtttggacacgatcaaacatcgaggaccagactc

SEQ ID NO: 989 - DNA, 171 bp, Glycine max
  unsure at all n locations
  Clone ID: 700995927H1
ctcnagaaaaccattgntggcactcccttcactccatctntgcnttagccaccacactgcacactctcctncgccaacaaccaaaccccagaaagttaacccctttcccttttnctcgaaccanaagacacgattttnaacgaaacaaacgcgacccagaagcagangaag

SEQ ID NO: 990 - DNA, 283 bp, Glycine max
  unsure at all n locations
  Clone ID: 700995928H1
atatattccattctctctgtgtatttccctacctctcccttcaagatgcagatcttcgtcaagaccctcaccggcaagaccatcacccttgaggtggaaagctctgacaccatcgacaacgtcaaggccaagatccaggacaaggaaggaatccccccggaccagcaacgtctcattttcgccggaaagcaacttgaggacggcngtacccttgctgactacaacattcagaagganagtactcttcacctcgtctgacgtctccgtggtggcatgcagatct

SEQ ID NO: 991 - DNA, 285 bp, Glycine max
  unsure at all n locations
  Clone ID: 700995929H1
tcatcattggttccctgctgatcatcaagttcgtggtggtggctggaatggatctgatggtggnggtctttcaagtcaaagtcttggcactggagcaagcgctgatcagagtttatttagtattctgtcagagtgtgaccaattgcattcaggtacaccaagggtaaacacggttgcaccaccggcttctcatccattagattacttcaccagacgtgaagcacctagtggcctggtgcctgatgatacggtatggatgagcttgccgccacatcagaattcttc

SEQ ID NO: 992 - DNA, 286 bp, Glycine max
  Clone ID: 700995931H1
aatgaagaagcaaggtcctgtagcggcatttgattcctatgttctggctgccgtttgtggctcttgcctgtgagcttcagctgttccctatgatctcacgaggagacaatcactcagtccccaacaatgtacaaaatatagccaagcctgtcaaaatagatggatcttcccatgcattgcagaatggcatagattcagcaatacgccatactcacagaattttagcaattttagaggcggtgttttcattgaagccatcttctgttggtacctcatggagttacag

SEQ ID NO: 993 - DNA, 284 bp, Glycine max
  unsure at all n locations
  Clone ID: 700995932H1
tggtgtggtgcgcggtggcggtgctactgtncngccgcggcgggcgcgtcgtgggtggaggaggcggcgaacccgatacgaatggtggcgggggtggaaccggagncggnctcgggtgatanggcagtgccggcgcgcgntgaagtttgctaggttcatgagcaggttcgggaagagttaccgaagcnaggnagagatgangganaagtacganatattctcgcaaaacctcaggttcatccgctcccacaacaagaaccgcttaccctacactctctctgtta

SEQ ID NO: 994 - DNA, 295 bp, Glycine max
  Clone ID: 700995933H1
aatggtggccacagttggtattcctgagaatacaggtatagcattggcctgtgctatgaatagttcttttagggggcgtgccagttctgatatttacaccatctgctctcaagactgtgaattatggaatcctgcttgcacaaaagcaatgactatgtcatttaatccaaacccgtgttctgatgcatggagtttggaatttctgaagcgtaccggatttcattgtgatatcatttgtgtcactggatggactgccactccaatgcaggatgttcaggttacaattgattggttt

SEQ ID NO: 995 - DNA, 297 bp, Glycine max
  Clone ID: 700995934H1
gagagagcaaatgtttgaagtactgaatatttattttactgtgacattgcagttgaacctgaatggttctggagctggagcttcagctcccagttcagccttctttgggaccagcttgaagaaggttattgcctcaagggtccccaacagcaaggtttccggtggaagcttcaagattgttgctgtagaagagaagaaagagattgaagagacccagcagaccgacaaggacagatggaagggtcttgcctatgatatctcagacgaccaacaagacatcacaagaggaaagggttt

SEQ ID NO: 996 - DNA, 295 bp, Glycine max
  unsure at all n locations
  Clone ID: 700995935H1
gagaaattttggatctcagtttttggcaggaaaaaaaaattgcatttgagtaaaaataacagagtgtagtgtagggtcttgttcttnntactgtgctaaatttgttggatggcggagaaatcatgcatcaagcgccttcagaaggaatatagagccctttgtaaagagccagtttctcatgttgtggctcgtccttcaccgagtgatattcttgagtggcattatgtgttggagggaagtgaaggaacaccttttgcaggtggatattactatggaaaaatcaagtttcctcctg

SEQ ID NO: 997 - DNA, 295 bp, Glycine max
  Clone ID: 700995936H1
gcactggtggcaacccatgctgctttaccccctgaagtttactggaagtcggtgcttcctactacgccaatgccaaaagccatcactgatatcctttactctgattgggtggaagagaaaagcagctcagtgcatgttggaggtggaggcgtgaacgtgcatacaggaaaaggaggtggcagtggcaccactgtcaacgttggtggaaaaggaggcggaggcgtaaacgtgcatgcaggccacaagggaaagccagtgcatgtttcagttggctcaaagtctccatttgattacg

SEQ ID NO: 998 - DNA, 292 bp, Glycine max
  Clone ID: 700995937H1
gaaagtgagtgagagaaagagatcacatagcagaatggcttctactcaatgtttcttgcaccaccatgctcttaccacccctgccagatccccatcacaacgcatcatggttagcaccaagcctaaccagcttgtttgcaaggcacagaagcaagaggatattgatgtcagcccaatctctcgccggttagctctaaccgtgctcattggtgctgatgctgttggctccaaagtccaacctgctgatgcagcttatggggaagctgccaatgtgtttggaaagccaaagaca

SEQ ID NO: 999 - DNA, 284 bp, Glycine max
  unsure at all n locations
  Clone ID: 700995940H1
ttctgtaaaanctcatggttcatctgcagcaatagttcctggtaacgatgaagtttctgagctgggaacaccacaacatggaatggataaccgttctgatcaaattatggataattcaacattggaacatggcttaattaatccaactgaaacggatgttcattatgccacatccagcgaaaacttcgtttataaggataatattacagacaaagtcactgggtatactgctgatgctatagctcttcacctagatggantgagttacaccngctgnacgagtt

SEQ ID NO: 1000 - DNA, 169 bp, Glycine max
  unsure at all n locations
  Clone ID: 700995941H1
agaagaacaagtagttganaacnaagaaggagaagcaaatggcttcctcaatgatctcttccccagctgttaccactgtacaaccgtgccggtgccggcatggttgctccattcactggcctcaagtccatggctggcttccccaccagaaagaccaacaatgacatta

SEQ ID NO: 1001 - DNA, 281 bp, Glycine max
  unsure at all n locations
  Clone ID: 700995942H1
cagccttccgggtgactatggatttgaccctctgggactttcagaccctgaaggaacaggagggttcattgagccgaaatggctagcatatggtgagataatcaatggtcgttatgcaatgttgggtgcagttggngcaatagcacacnnaattctaggcaaggctggtctgatccctcaggagacagcactcccatggttcagaacgggtgtgttcccacctgcaggaactacaactactgggcagactcctacacactgttcgtgtttganatggcang

SEQ ID NO: 1002 - DNA, 164 bp, Glycine max
  unsure at all n locations
  Clone ID: 700995943H1
tttttagtctacttttgactattatatatcaggtggtttagtgtttacttgcgactttgctaagactcattgtttatgattgttcagcctttagagatgtttaatctttctntattagctcnctagattcttcaacatacacnaataacaactttatcncttnt

SEQ ID NO: 1003 - DNA, 284 bp, Glycine max
  unsure at all n locations
  Clone ID: 700995944H1
acgtttcgttagatgggtctcagacttcttttcttggggagatattgtcgaggtaaagaacaatatcgttgacttgcgtcaacgccacccttgattacggatcatcgaacctcgattgggccgctaacaaggtcgattccaagtttgatgaatggnaggctacgttgaaaaagaagctccgctccaggaaatatcccagacaaagtggggaanaaaagcgcgggaccaaaggcccaaaatgatgtccccaaggatgcaatcaacangatgaagcaagccgacgt

SEQ ID NO: 1004 - DNA, 166 bp, Glycine max
  unsure at all n locations
  Clone ID: 700995945H1
gtgttcggccnnatcnggtcacccttcgtgttcttgnggtactttnctcctttgccantgcnatgatcagtattcnaacttccaggatttagcaanttnctatggctaattcccgangaggatgtggatgatacatcatntccagtanaantttggaatggtgtna

SEQ ID NO: 1005 - DNA, 113 bp, Glycine max
  unsure at all n locations
  Clone ID: 700995946H1
cggangagtgaaatcnaacaaccatagacctagaagangagcattccaatntgaatggcgatgngcacctgngnagcaacaagtggagggcagaaggtgtggacagannttgt

SEQ ID NO: 1006 - DNA, 281 bp, Glycine max
  Clone ID: 700995947H1
caagaatgcgcgaatatgcttagcttgcgatatggatgctacgttctctgctgtgttttctggtgatcgtgctccttatagccccgctaagtttttatacagttggtggcagcacgcagcaaaccttgccacttatgaacaacaggatgcgcatgagtttttcatttccatgcttgatggaatccatgagaaggtggagaagggtaggcgtaagccacatactgaaggcaatggtgactgttgtattgctcataaagtattctctggtattttgcgatcag

SEQ ID NO: 1007 - DNA, 283 bp, Glycine max
  unsure at all n locations
  Clone ID: 700995948H1
cagaatgaacggcttaagaagtgaaanacccccctctcttggaggctgagcgtgctgnaagangaaagagggatggtgcctcggaaggtcaagcctcagaccttgagcatggtgatgcagtgccggcggcaaatgtgggattctgtagggtgctttcacttgcaaaacctgaggctggaaagttggtgatcggtactgtggctctgttgattgcagccacatcaagtatcttagntcanaaattnggtgggaaganaattgacatngtctctagggaaatgaa

SEQ ID NO: 1008 - DNA, 296 bp, Glycine max
  unsure at all n locations
  Clone ID: 700995950H1
ggagaccacgccatactggtgtaatggttgggatgggtcagaaggatgcttacgtgggtgatgaagcccaatcaaaaaggggtatactcaccttgaagtatcctatagagcatggcatagtcagcaactgggacgatatggagaagatttggcatcacacattttacaatgagctacgtgttgcccctgaagaacaccccgtacttcttaccgaggcaccactncaatcccaaggccaacagagagaagatgacccaaattatgtttgagatttcaatgtgcctgccatgtatgtt

SEQ ID NO: 1009 - DNA, 168 bp, Glycine max
  unsure at all n locations
  Clone ID: 700995956H1
agtgtatctatggagagtctactccaaactaggtgaatggattcaaacctttactgcacttaatttttaaggcaatgcttctggttacatgtaaaccctcttaaagngnatcaattttgagacagatcaagggaattagttgnatgtgtaaatgtatggcagttatna

SEQ ID NO: 1010 - DNA, 290 bp, Glycine max
  unsure at all n locations
  Clone ID: 700995957H1
ccaatatattccattctctctgtgtatttccctacctctgcccttcaagatgcagatcttcgtcaagaccctcaccggcaagaccatgcacccttgaggtggaaagctctgacaccatcgacaacgtcaaggccaagatccaggacaaggaaggaatccccccggaccagcaacgnctcattttcgccggaaagcaacttgaggacggncgnacccttgctgacnanaacatncagaaggagggnancttgacntngtcctnggtctcggtggggggnatnnaaattttt

SEQ ID NO: 1011 - DNA, 282 bp, Glycine max
  unsure at all n locations
  Clone ID: 700995958H1
gagaaaagtaaaacccctcactactgatagattttcattcctccgaggaaaaaaaaaacatgtcggatgctttgatcaatggattggccggagctggaggagggatcattgctcagctcatcacatacccacttcaaactgtaaacactcgccaacaaaccgagcgtgatccgaagaaagacacgaggagtcaaggggccctcgaacgaatgtgnccaggttgnaaaagaagaggggngggaacggttgtatggnggntgatgccatcggtantgggtacac

SEQ ID NO: 1012 - DNA, 283 bp, Glycine max
  unsure at all n locations
  Clone ID: 700995959H1
gtgcagntcccgngccaaatttctttgtgccaatggttcagcaggcgacaacagggacagngtcctggtgnaaggcgtacaggtgcagtccagcagtcccagcagcccgttccaatgatgccacagcagatgctacctagggggcgtgtctatcgttatcctcctggtaggggtatgccagatgtttctatgcccggggttgctggaggtatgttttctgttccatatgatgtgggtgggatgccactggcgtgatgcatcaatctcccagcaaattcctgtt

SEQ ID NO: 1013 - DNA, 280 bp, Glycine max
  unsure at all n locations
  Clone ID: 700995960H1
acttgcatcaattgttgtctgaagatccaagtgaactagagaagctggaccatgcgtgcaaagaatggggtttctttcagcttataaaccatggagtggaccctccagtggtggaaaatatgaagataggtgttcaagaattcttcaaccttccaatggaaganaagcagaanttntggcaaacaccagaggatatgcangggtttggccagttnnntgttgtatcagaggnncaananctanaatgggcagncatgttctatgctcacacatgtccatt

SEQ ID NO: 1014 - DNA, 281 bp, Glycine max
  unsure at all n locations
  Clone ID: 700995962H1
cggggactcttcnggcggcanagcgccggaaacctagactcnatccgtgcgccgtcacgcaacagggatggnccttcgtngctgatggccgtcgccnncgaaccatcggnagactggactcctcgtcgcgccaacaccttcgagaagctcgctaagattgggcaagggacgtatagtaatgtgtataaggcaagggaccttgtgacggggaagatagtggcattgaagaaagtgagatttgataatttggagccagagagtgtgaattcatggcaagagag

SEQ ID NO: 1015 - DNA, 282 bp, Glycine max
  unsure at all n locations
  Clone ID: 700995963H1
gnagatgctgttgaaaagggacttgtgaaggctgtnggtgtttcaaactatagtgagaagcgactccgtgaggcttatgagaaactcaagaagagaggtattccattagctactaaccaagtaaactacagtctcatctaccgggtccctgaaganaacggcgtaaaggctgcctgtgatgaacttgggattacaataattgcatattcaccaattgctcaaggtgctntcactnganagtacatcctgatanaccaccaagtgggccccgaggcagaattt

SEQ ID NO: 1016 - DNA, 245 bp, Glycine max
  unsure at all n locations
  Clone ID: 700995964H1
tgttgcaataattgcaaacgatccttctcattttggatgtttagcactgttgtctcttcctatcagtagttggtgctgactggatgtnctgtaganggntgttgaatccaacagatncncannaaaanctntnntctnatgatccncagttttgatatntanggngttcattanttgccttagtncanactgnaaagngcngttcgatgtaaacaggaatcagctntagccntggngggngnnta

SEQ ID NO: 1017 - DNA, 297 bp, Glycine max
  unsure at all n locations
  Clone ID: 700995965H1
caacacttccgaaccttgcattgtatctacccacttctcaaccaacaatggcaatggcaacccaagcctctctcttcaccccacccctctccggtctcaaacccagcgaccgagccaccgcgccatggaaacaatcctccaccctctccttctccacctcgaagcccctcaagttctcgcgaacaatcagagcagcagccaccgaccagaccacagaggcaccggttgggttcaccccaccggaactggacccaaacanccnttccccgatcttcggaggcagcaccggcgggctct

SEQ ID NO: 1018 - DNA, 80 bp, Glycine max
  unsure at all n locations
  Clone ID: 700995966H1
cttaaccattagaaaacaatgctgcgctcggaggactagcncgaccacatatnaagagtncanangacnnagnntgttct

SEQ ID NO: 1019 - DNA, 293 bp, Glycine max
  Clone ID: 700995967H1
ttcgattccatttctagaaagctcgtcgaaacaacctacgccgtcgacaacacctaccttctgttttcagcgtatcttgtcttcgccatgcagctcggcttcgccatgctctgcgccggctccgtcagagccaaaaacaccatgaacatcatgctcaccaacgtcctcgacgccgtcgccggcggtctctcctactacctattcggctttgcattcgccttcggcggcccctccaacggcttcatcggccgcccaaacttccgcctacgagattacccgatgggctctctatc

SEQ ID NO: 1020 - DNA, 292 bp, Glycine max
  unsure at all n locations
  Clone ID: 700995968H1
atgtgtcttcntttcctgggagtgatagggtttatcgccatggtgtttcaattcaaaagtttgaagtttctttgtctttgatttcatgtttaattttgttagcctgattgatatcatattttttttcttatttaacaattgaaataatacgtnctgcctttctttcaaaaaanaaaaaaaaanggnngncnnnaggttngtggnnncgtngnccngggantnaanncggntccgggccncnagggcganccagtttaccntnnagtgggccnaaagnntccntgtggttacc

SEQ ID NO: 1021 - DNA, 287 bp, Glycine max
  unsure at all n locations
  Clone ID: 700995970H1
cggaagacaagatttgtgatctctatgacctttttgttgatgggttagatgaaaatgctggtccgcaaatcagaaagttgtatgctgagcttgcggaattatggccaaatggttacatggacaaccatgggatcaagcgtgcaatttgcaggtcaaaagaaaggcgcagagcactgtacaacagacataaggatcaggagaaaattantgccgcnaaagttattggcacctcgacaagaggaggatgttcatttgatcctagtccattacttcgcaacagcccatgc

SEQ ID NO: 1022 - DNA, 224 bp, Glycine max
  unsure at all n locations
  Clone ID: 700995973H1
aacgagaaagtngatctagttcgaggaagcatcctctctgcgtatctgctactactgttcctaagaaaatgagtttaatcattgcatctaccatggtcaaaaatatcaaaataccaatacctcttacgtcccatgttaatctaacaattaatantaaccttcttnttcaacccctccactcactcctgtttcntttccataanccccatgagtnccctcatcca

SEQ ID NO: 1023 - DNA, 281 bp, Glycine max
  unsure at all n locations
  Clone ID: 700995974H1
cgcatactcaaagtagcttcgaagttcgtatttntattggcatatcatggagaataataatcagtcgttttggcaattcagtgaccagctgaggttacaggcatctaatttggcgaacctttctctaaacgattcgatttggagcaacagttacatctccaagaggcgtgatgaaaggattaattttgacatcaaagttgggggtgagatcaactctttcaagtcaaaggagccagcttgtgattacaatganaacatgaanggatctcttcctnccgtgc

SEQ ID NO: 1024 - DNA, 280 bp, Glycine max
  unsure at all n locations
  Clone ID: 700995975H1
ganaagtgagatacactaagttatcctcataaatacactgctaattaggtggcaagataagtgtctaaccttagtaacattgccacatattgtgttcattttggaattgtgccactaaaattctattcaattcatctatggctgcctcttcttatgctatgcaatcaatcctggcaaaccctttgatccgcatttccagcgggtctagggtgaaccaatttggncgttcntgctttgcacatgagaaggaatgtnggcctgagagtnaggtccatggcta

SEQ ID NO: 1025 - DNA, 282 bp, Glycine max
  unsure at all n locations
  Clone ID: 700995978H1
tgataattcattttacacctcagattaccagtatagtccacagaacaataacaataatgtacaggatatgggcatataagtttatgaaaggtataccaaactttgtaaagatagttgaagttggtccaagggatggattacaaaatgagaaaaacattgtaccaacagatgtaaagattgaattgattcatagattggcatcttctgggttatccgtcattgaagctactagttttgtatctcccaaatgggttcctcagttggcagatgcaaangatgtaa

SEQ ID NO: 1026 - DNA, 280 bp, Glycine max
  Clone ID: 700995979H1
ctcagatcagcaaaatcagggtaggacaggtttatgcagcttcaataatgtacgggtactttctcaagcgagttgtgcaaaggttccagctggagaggacaatgaagattcttcctaatgcaacagaagagaatagcattcaacaaactgttgtagatgattcaagaatcagaggcggagagggccattctcatgttatgtcccatcctgaagtttctactttgcctggtggtggcatcagctctgggggatttggctatggttcaaaagtgtccagttg

SEQ ID NO: 1027 - DNA, 280 bp, Glycine max
  unsure at all n locations
  Clone ID: 700995980H1
caaatcagagtaattggaacttgaaacttgtcattcattcatggcgattgangcatggttgatggacgaaagcaatgaagatccaagactccctcaccgccgcaatcccaacaagtcagtttcattggaccaattagcagaatttggggtgttatactggaagctgaatccaactatctatgagaacgatgaagagttggccaagattaganaagataggggatacaactacatggacctgcttgatttatgcccagaaaaggtggaaaattatgaacag

SEQ ID NO: 1028 - DNA, 298 bp, Glycine max
  unsure at all n locations
  Clone ID: 700995982H1
aaaagcgtttctaaaatctaaatgcacaaaaaatanagaaanatagagagantaacagcanctccttttctctctgtcgctgtcccctacgnngatcccaaatctactagggattctcattcgntgcgattcggccggaagctttcgttttgcggatttttttaatnattatttttcctngctatcaggaaagttgaaaaaaagatggaccatgacaagactggatgccaagctcncccaganggtcctatattgtgcatcaacaactgcggattttttggaagtncagctagcttga

SEQ ID NO: 1029 - DNA, 169 bp, Glycine max
  unsure at all n locations
  Clone ID: 700995983H1
atgtgtcttcctttcctgggagtganagggtttatcgccatggtgtttcaattcanaagtttgaagtttctttgtctttgatttcntgtccaattttgntagcctgattgatatcatatttttnntcttatttaacaattgaaatactacgtgctgcctttctttcaaa

SEQ ID NO: 1030 - DNA, 288 bp, Glycine max
  unsure at all n locations
  Clone ID: 700995984H1
ctgggctttctttcaatggttttattcgggtggagataactgtggatttnntcantttcccacttttggattgaaagcatggaaaaactcattttattttgatttcagcatgacttatgtcggagcaggaatgatttgttcccatcttgtaaatttatcattgcttcttggtgctgtnatttcatgggncattatgtggcccttaatcaggggactaaaaggggnatggttnccngcaagcataccaganannagcatgaagagtcntaatggttataangntttant

SEQ ID NO: 1031 - DNA, 289 bp, Glycine max
  unsure at all n locations
  Clone ID: 700995985H1
ttttcatcattctcatatcctcaatcaccccccctcgcactcgctcttcccttcctctggtggcgacaatgtcgactcctgctaggaagaggctgatgananacttcaagangctgcaacangatccgcntgcngggatcanttgtgcnccccaggataacaacataatgctgtggnatgctgtcatatacntgncctgatgatactccatgggatggaggcacgttcaagttgacactccaatttactgaggactatccaaataaaccaccgactgtacgatttgtgt

SEQ ID NO: 1032 - DNA, 276 bp, Glycine max
  unsure at all n locations
  Clone ID: 700995986H1
ttagttatctactcttttctgcatgtntgtnctcnccaacgactcctccgcnanagagtattattcaatattttggttgggntgaatcccggggttgaagcgttgcagacatcacgggctattctaagagtgtctcgctccctcattcatgtncgatctgtacgacggacgacgggtagnngcgtaactgccgttaaccctncgccgcacgtgggcgtggtgctttgccttctgaaggnggtagcctcagacttggctnttcctcgctggnggngg

SEQ ID NO: 1033 - DNA, 283 bp, Glycine max
  unsure at all n locations
  Clone ID: 700995989H1
gnagctacatgtcaaaaacagggagaagcttctcacatcccttcgtcaacacctctccgactcttctcgttctctccatggcttcgtcctccttcaaggtggcgaggagcaaacgcgttacgacaccgatcacttggagctcttcaggcaagagagttacttcgcttacttgtttggagtcatagagcctggattctatgcagctattgacgttgcaactgggaattctatcctatttgctcctaggttaccttctgagtatgctgtttggttgggggagatt

SEQ ID NO: 1034 - DNA, 281 bp, Glycine max
  unsure at all n locations
  Clone ID: 700995990H1
gccaccactctctctctccgatggccactgttacttcttctttctctttctccactctcantgcaatcttcttcgccgaggaacctctccacactctcttccaattcaccaacttttcgcatccgcgttggtttctcctgtcactatgttggagttcgagcttccaattccgcttccaaaatagtcgttcgatgctcctctgccgtcgcagaacctccaactgtttctgagacaangtnaaattntctnaggggnatannagcggccagtnccntagnatc

SEQ ID NO: 1035 - DNA, 280 bp, Glycine max
  Clone ID: 700995991H1
caaagtcctaccactactccacactttcttataagttataacaatcaacccactctcagattacgctctgttgaatgaaaagctaaggaatatgagaaggccatggaagcattctaagaacaaacatgatctctttgaatgtcttccggacgatctcgttgttcttattctttccaagctcagcgccaccgcttcatctccttccgatttcatcaacatcatcttaacatgcaagaggctaaaccgctcaggcctgcaccgtcttgtgttgtctaaagcc

SEQ ID NO: 1036 - DNA, 280 bp, Glycine max
  unsure at all n locations
  Clone ID: 700995993H1
ttatgagatgccacttactgggagtatgtattctccatctcatttgccagangcatgaggaaattggaaattatagaaatcagagaggctcctgagttgagacatgtatttggtcagaacattcattcttcccagcaataccaaagcaagtttcaaattgagtttcctgttttggaaagagtgacactccatagtacaccaaatatgattggcattttcccagaaaattattctgcaacatgctcatctttgcaattgcttgtcatgaacaatattgggc

SEQ ID NO: 1037 - DNA, 277 bp, Glycine max
  unsure at all n locations
  Clone ID: 700995994H1
tagaactatcaatgctacgattgtnctcgccgctggcactttcgccgtcaccaaacttctcacgattgatagcgattactggcatggatggacgctatacgagatactaagatatgcgcctcagcacaactggtctgcttatgaggaagctcttaagacaaatccagttcttgccaagatgatgattagtgggattgtttactctataggggactggattgcacagtgctttgaaggaaaacctctgtttgagtttgaccgtgcacggatgttcaga

SEQ ID NO: 1038 - DNA, 278 bp, Glycine max
  Clone ID: 700995995H1
ctgcctgctgcgacttccttatgcataattttactgtttatagaaattgtgaagctatactgttgtaattgtcatgtaaattgttccctttttcatcttacttgatttggtaaactccggttacttgtatccaaataagatgggccatttgtattgcgggggctttgtataattgtacaattatctacttgtaagaagttcagattcgggcgacaacatttgtaatgcagaattaggtcattaacattgtaaatcttctggcgatgattggaatatca

SEQ ID NO: 1039 - DNA, 284 bp, Glycine max
  unsure at all n locations
  Clone ID: 700995996H1
agaaanggaagaggagagagaaacgaagaagaagagtgtttctcacatcacatgggctccttgcccttggggnnnnnnnnnnnnnnnnnnnnnncgggcggcggcggctatacatccgtcgcaaccgccgcagtctcagccgcaacccgaagttcctcgccggagctccgatgtggagaccgataaggatatgtcagctactgtcattgaggggaatgatgctgtcactgggccacataatctccaccacaattggaggcaaaaatggggaacctaaagagacc

SEQ ID NO: 1040 - DNA, 279 bp, Glycine max
  unsure at all n locations
  Clone ID: 700996001H1
gaagtttaaatcttgcaaganctattggtgacatggaatttaaacagaataagtttctttctgctgaaaaacaaattgtaactgccaatccagacatcaacactgttgagctttgtgacgaagatgagtttgtggtgttagcttgtgatggcatatgggattgcatgtcaagtcaacaactggttgattttgttcatgaacaattgcactcggaaacaaaactttctgccgtgtgtgaaagagtacttgatcggtgtttggcaccatcaactgccagtg

SEQ ID NO: 1041 - DNA, 279 bp, Glycine max
  unsure at all n locations
  Clone ID: 700996002H1
gcaagcactagccctgattttgtgccaaaaactgttgatatagcagccaaagaactaatagcaattgcttcccctggacaagttacacaggtacagcttgaccgagccaaaaaatccacaaagtctgcagttctaatgaatctggaatctagaatgattgcatcanaagatataggaaggcagattttgacttatggagaaaggaagcctgtggaacagttcttgaaggccgtagatgaaatcacgttgaatgatatcactaaaattgctcagaagatt

SEQ ID NO: 1042 - DNA, 281 bp, Glycine max
  unsure at all n locations
  Clone ID: 700996003H1
ctcgggccgcaccaacctgaaggctacccactggcaagangtggccgacgccgtcaccgcgcagtgccccaacgcctcccccacggcgaannaccgccgtgcagtgccgccacaagatggagaagctccgcaaacgctaccgcaccgaaatccaacgcctccgcaacctccccttcccccgcctcaacaacgccaacaccaattccccttcctcgtgggtccacttcaaatccatggactccatggaaaaaggccccaaccacaaaccccactccgacatc

SEQ ID NO: 1043 - DNA, 276 bp, Glycine max
  Clone ID: 700996004H1
gccatgatgcaattgggggaaggactatgtaaactgagaaagatggaattctcaaatgggccgtttcaaaagtttgagaaagacatttcagctgttctagattttatctaccagactcagatagaattagctgcatgtagtgaggatatgtgtgttgcaatggatcgatcagaaaggtcttaccaacttctaggggaatatgcttcagggcagcgtgtgtatgatctagaactttgtagtgatgcatcagtgtacattgtgttctgccctcaaggc

SEQ ID NO: 1044 - DNA, 275 bp, Glycine max
  unsure at all n locations
  Clone ID: 700996005H1
cgcaacgttcagaaaccaaatcgtgttatccttttccatgacttaacnacaggtttgantcctcattacccgcctctctctggaaaccagcaaaaccacctttctctactatctatcggttccttttgtactctgagtgggtagaagacatggtgaggctcactgctgacttgatctggaaaagccctcatttcttcaacgcgattaaagagcgtgagtnagatcttcgaggcaacaagatagctgtaattgagaacttgggtgctactgaggac

SEQ ID NO: 1045 - DNA, 273 bp, Glycine max
  unsure at all n locations
  Clone ID: 700996006H1
gcttgtgtaccaaactgggttgtctcaagaccccagcaacactctcctccttgtcaactatgcccagttcctctacctcgttgttcacgattttgacaggttcgtgaatattaagcatccttaactnnnnnnnnnnnnnnnnnnnnnnnnnnnnnnnnnnnnancnncgttaaatttcagtttttgctatgtntattttacttttattgantgataatacatattatttataagactcaaaaaananaaaaaaaggggnggccgccgantagt

SEQ ID NO: 1046 - DNA, 274 bp, Glycine max
  unsure at all n locations
  Clone ID: 700996008H1
gctgcctgctgcgacttccttatgcataattttactgtttatagaaattgtgaagctatactgttgtaattgtcatgtaaattgttccctttttcatcttacttgatttggtaaactccggttacttgtatccaaataagatgggccatttgtattgcgggggctttgtataattgtacaattatctacttgtaagangttcagattcgggcgacaacatttgtaatgcagaattaggtcattaacattgtaaatcttctggcgatgattggna

SEQ ID NO: 1047 - DNA, 273 bp, Glycine max
  Clone ID: 700996009H1
aacactcataacacaaagcacaaagcaaagctcatccttgagttaaaaaatggcagcagcttcttccatggctctctcatccccatccttggctggcaaggccgtgaagctgggcccatcagccccagaagtgggaagggtgagcatgaggaagaccgtcaccaagcaggtctcctcaggaagcccatggtacggcccagaccgagtcaagtacttgggcccattctctggcgagcccccgtcctacctaaccggtgagttcccaggcgatat

SEQ ID NO: 1048 - DNA, 273 bp, Glycine max
  unsure at all n locations
  Clone ID: 700996011H1
ccaccgttccagggcagctcgtgtgggagatcgtcaagaaaaacaattccttcttggtcaagcagtttggaaggggcacncggagcgtcgaattcagcagagagagcaacaatctctacaacctcaattcgttcaagtactctggtttggcaaacaagaaaactgttactgttcagcctgagggcaaagatcaggctgtgttgttggctacaaccaagacaaagaagcaaaacaagcccgctgcattgctccacaaatctgtgatgaagaagg

SEQ ID NO: 1049 - DNA, 266 bp, Glycine max
  unsure at all n locations
  Clone ID: 700996012H1
ttagtgaggntccacttactgtaaaantcgatcatctcaaggataaaacttacaacaaagacgatgatattataaaggccacatctttcgaggttatatcaaccctaagagatgttcttaaaacaagttccctttggagagatcatgttcagacttacactaagcatataggtgattttacttatccaaggcttgcagattttggtgctgcaatatctggggcaaataaattgcaatgccaacaagttcttgaagagctagatgtg

SEQ ID NO: 1050 - DNA, 274 bp, Glycine max
  unsure at all n locations
  Clone ID: 700996013H1
ttccgatagcgcgaantgttcgtaggaggcatttctcgcgacactaccgaacacgttctcaaactccacttcgccaagtacggcgtcgtttcggactccacaatctccgtagaccgcaccacccgaagccctagaggttttggcttcgtcaccttctccgacctctccgcagctgataaagccctccaagacacccacgtcatcctcggaagaacggtagaagtgaaaaaagcaattcccaggagtgaacaacatcaacaccaaaacccattac

SEQ ID NO: 1051 - DNA, 273 bp, Glycine max
  unsure at all n locations
  Clone ID: 700996014H1
ctgttacgagtcagcaagagagaaatatcttgttgagttgatttctgatcccaaattgagtttgagtttcagccatggtatctgtttctctgctcttattcctatctntctttgccttctttgcaccctctgaatctcacgacaaagtctcgttggaattgtactacgaaagcttatgcccctacagcgccaacttcatcgtgaatcacctcccaaaaatcttcaccccagatcttgccccaatcgttcacctcaaactcgttccttggggca

SEQ ID NO: 1052 - DNA, 277 bp, Glycine max
  unsure at all n locations
  Clone ID: 700996016H1
actttcgaaagantttatccaattganattttaaaaatgactgggataaacttaaganttcaattattgaaattgaataagtaaacaatttaattggattggtcgaatggtatcaaaaaaatggagtactaactcccatttcttatttatnattgaattaaccgatcaacttgctttgttntcgaacatttctttttgatttcaaaaattttccggaaaanatttgaatctatttttatatgcgaatcaatcctactacttctggtcctgaggtttc

SEQ ID NO: 1053 - DNA, 276 bp, Glycine max
  unsure at all n locations
  Clone ID: 700996017H1
acaaagagaagcattagcactaggagcagcaacaactagtctcagctgaaatggcctcttcagtgatggcatctgtggccctcaaacctgcccctttcactgttnagaagtcctcagtgagaggccttccctctctctcaaggaactcttcttcattcagagttgtggccagtggcaagaagatcaagactgacaaaccttatggaattaatggtggcatggctttgngggatggaactgatgcatctggcaggaaaggaaagggaaagggtgttt

SEQ ID NO: 1054 - DNA, 273 bp, Glycine max
  Clone ID: 700996018H1
ggaattttggagagtaatggttgggtgtattcaactcattgctcattcaagttgtattcagctgagtctgcttggaattgcttgaagaacagatggattttcttctggggtgattcaaaccatgttgacacaataaggaatttgctcaactttgttttagacttgcctgaaataccttctgtccccagaagatttgacatgaacttttccaacccaagagacccttctcaaacagttaggattacaagcatcttcaatgggcattggaatgaa

SEQ ID NO: 1055 - DNA, 272 bp, Glycine max
  Clone ID: 700996019H1
gcaactttaatgggcttgaacagtatgctcgaaacaagcgtgttcaggttgcactaacagaaaagtgggccgaaacttacaagaacaaagggataggattttactcaatgcaccctggttgggctgagactcctggggttgcaaagagtatgccaagcttctctaaatcgctttcagggaagcttagaacaagtgaagaaggtgcagacacagttatctggttgacattacaaccaaaggagaaactggtatcaggtgcattttattttgat

SEQ ID NO: 1056 - DNA, 273 bp, Glycine max
  unsure at all n locations
  Clone ID: 700996020H1
ggactaccagangtccatcgacctcgacaaggacttcatcttctctcacatccaattgggcgttacanagtacaagatgggcagcatcgcctcgtccatggccactttccgccgctgcatgaagaacttcgccacagtacccgatgtgtacaactactacggcgagcttctcctcgaccagcaaaaataccaagaagccatcgagaagttcgacaggcagtagacatggaaaagagctccaagcctctcggcatgaacgtcctgccgctgatc

SEQ ID NO: 1057 - DNA, 270 bp, Glycine max
  unsure at all n locations
  Clone ID: 700996021H1
tcaagttaaagatatagacatggatganaatgctgattcttttgtggatgaatctgttatggaaaaggttctccagaagaggagtttgaggatgcgtaacatgcaaagagcttggcaggnatctcctgagggcaggaagatgctggaattccggaagtctctaccatcattcaaggagaagcaaggtttacttgaagctatagcacataatcagggcattcaccggctttgctgatgactaatctttgtcggagaatcttgctggtcacc

SEQ ID NO: 1058 - DNA, 270 bp, Glycine max
  Clone ID: 700996022H1
attgaaattcaagagtatacagccgtaagctctgatgcgacattgcttgcaactgatgagctagatgctgtatctactgccaaggctgctttagccgaaacagaggccagaaaaattcccagtgaaattgataagagtgtaaatggtgaacatcaagcagaagaaaatagtaatgacctcatatgggctgatccagtttcatgctgttatgcgctgtatgcaaagttgaaccccgatacagttctcttgcagcaatcacctttagccctt

SEQ ID NO: 1059 - DNA, 270 bp, Glycine max
  Clone ID: 700996023H1
gcggttcttccatttgactcttgttctgaacgacttttcaagagaatcaaaccatggcagtgaaagtatacggtccccactgtgcttccaccaagcgggtgctggtttgtctggttgagaaggaagtcgaatttgaggttgtccctgttgatgtcactaagggggagcagaaggatcctgagtacctcaaactacagccatttggagttgttcctgtcatcaaagatggagattataccttatatgaatctcgtgctataatgaggtatt

SEQ ID NO: 1060 - DNA, 272 bp, Glycine max
  unsure at all n locations
  Clone ID: 700996024H1
aacagttaattcaaggtcgtttccagatcatcaacgtatggcggccanttgaaaaccctgcttccgaccaccctctcgcagtagtagactggcgcagnacctcgccagangattttattgccacagatctcatgtatcccaagcncgnggntcattaganctagatnancgcggtaaggtngtcctgcnagatccgaacaactacaattctacggacgggtncgangtcaagggtgagaccatgggcgangcaccaaacgacaagcacaagt

SEQ ID NO: 1061 - DNA, 269 bp, Glycine max
  Clone ID: 700996025H1
cccaattcctaattgtttaaacctaattctcatttcttcatcgttcgattcttctcctcctaaagatgcagatcttcgtgaaaactttgaccggtaagaccatcacccttgaggtggagtcctccgacaccatcgataacgtgaaagctaagattcaagacaaggaagggatcccacctgaccagcagagacttatctttgcgggtaaacagcttgaggatggtcgaacccttgccgactacaacatccaaaaggaatccatctccacc

SEQ ID NO: 1062 - DNA, 268 bp, Glycine max
  Clone ID: 700996026H1
ccgacgaggagcttctcgttcagtatctgtgccgcaaggtcgctggccaccatttctctcttccaatcattgccgaaattgacttgtacaagttcgacccatgggttcttccaagtaaagcgattttcggtgaaaaagagtggtactttttcagccccagagacaggaaatacccgaacgggtctcgacccaacagagtagctgggtcgggttattggaaagccaccggaaccgacaagatcatcaccaccgaagtagaaaagttggc

SEQ ID NO: 1063 - DNA, 271 bp, Glycine max
  unsure at all n locations
  Clone ID: 700996027H1
ggnaaagctcatatgtttgcnatggtaaagatgttgtggagcttcttgaggcctcacatttgagcttagaaggagaaaagatcttggatgaggccaaaaattgtgccataaattctctcaagtttggtttctctcccagttccatcaacatcaaccgatcactccaatctggttgttgaaaaaatggtccatgccttggagcttccatcccattggagagtacagtggtttnaggtcaaatggcacgtggagcaatacaaacagcagaaaa

SEQ ID NO: 1064 - DNA, 272 bp, Glycine max
  Clone ID: 700996028H1
ctccgatccaataaatggcggaaccgtcgtccaccgccgccaccgctgccaccgccgccatcgcttccaccgccgccaccgccgccaccgcttccaccgcttccaccgcttccaccgctgatcctccggcgccagtgactaaaagctgggccgacgaagcagacgaagaaaccaacaacacctccaccgccgagtcagaaagctcctccattaacctggaagcgttaaccatcgacgataaagaaaagaatcttccaaattcttggatgatc

SEQ ID NO: 1065 - DNA, 272 bp, Glycine max
  unsure at all n locations
  Clone ID: 700996030H1
ctgcttctnctccttgtaagtncctctcgctcgctctctccgcctgnntcttctcnttgtggactgtaaganctgaactaagagatggggttgtctttcaccaagctttttagccggctctttgctaagaaagagatgcgtattctcatggtaggtcttgatgctgctggtaagactaccatcttgtacaagctcaagctgggagaaattgtcacaaccattcccacaattggattcaatgtggagacngtggaatataagaatattagctt

SEQ ID NO: 1066 - DNA, 271 bp, Glycine max
  unsure at all n locations
  Clone ID: 700996031H1
tccttgtgaagcgtgatgagctcaccttggagggtatcaagcaatttcatgtcaatgttgagaaagaggaatggaagcttgacacactatgtgatctttatgagacattggcaattactcagagtgtcatttttgtgaacaccagaaganaggttgattggctgactgacaagatgcgaancgagaccacacagtctcagcaacccatggagacatggaccaaaataccagggacattattatgcgtgaattccgttctgggtcatcccgt

SEQ ID NO: 1067 - DNA, 274 bp, Glycine max
  Clone ID: 700996032H1
ttgtgcgcacccaaatactacaagcatttcatttatttttccattccttataaaacccgaaaacaaaaaccacgcaatggtcacgtccaacaccaacaacaccatcctcaaaatctccaaactcgcgatcctcctcgttttgttcgcttcagtctgcaacgtcgctatgtcggactccaccgccaaacccctcgaccagcacgccaccacgggctctgaccctactgcgccagggttcacatcgtgtacaccgagagaccacagaacgaggagc

SEQ ID NO: 1068 - DNA, 273 bp, Glycine max
  Clone ID: 700996033H1
ctgtactctatttcggataaaaatgtccaagagattaagatcagcccgggaatcatgttgttgatttatgctaaagcaagtagccatgtcccccttaaaatcctttcaatagaagatggtactattttgaagtcattcagtcatctcctttatcggaataagaaggtagattttattgaacagttcaacgaaaagctacttgtaaagcaagaaaacgagaacctccaaattcttgatgtgcggacttttgaacatacggaagtttgcagaagt

SEQ ID NO: 1069 - DNA, 270 bp, Glycine max
  unsure at all n locations
  Clone ID: 700996034H1
gcccggtttcagatcacagaagcactgaaggcaaagcgggctgaacgagtagagttgatttctcaggtcaagtctctaagaggcgacagtaggcaatttcagagtattgtggatgagaaattgaaaganattggacctctgcagcaagcactgggcaagctgcggactacaaataatgccggccggggtggtttgtgttcatctgaggatgaacttaacagtgttatatatagtttacaataccgcatacagcatgagagcattcctttg

SEQ ID NO: 1070 - DNA, 269 bp, Glycine max
  unsure at all n locations
  Clone ID: 700996037H1
aacgagaaagaactggtatggatggtacacaggatgagatatctganttaatctgtgacctgcagaaggtggcaatcaattcaaataagagccttagaagagttgcagtcgggccaacagaccacttctttttgcctagttcagcagggcattacggtgatagagaatctgggactccacaagatgaacaaaaagaaaaatctgtttgtgtacctagcttcccaagcatcagtgctcatagtgtccttggccaatttctttttgatgtt

SEQ ID NO: 1071 - DNA, 270 bp, Glycine max
  unsure at all n locations
  Clone ID: 700996041H1
catggcttctctctcttnctccgccaangaccttgccccactcttccaacgacacngncgncggccaactacctctgcgcccaattcgattccatttctagaaagctcaacgtaacancctacgccgtcgacaacacctaccttctgttttcagcgtatcttgtcttcgccatgcagctcggcttcgccatgctctgcgccggctccgtcagagccaaaaacaccatgaacatcatgctcaccaacgtcctcgacgccgccgccggggtc

SEQ ID NO: 1072 - DNA, 81 bp, Glycine max
  unsure at all n locations
  Clone ID: 700996042H1
gtgaaaaggctgttacacacactgccaccaatngaggcctttttcctaccattttgacgtgcnccaaatcagagttttttc

SEQ ID NO: 1073 - DNA, 268 bp, Glycine max
  Clone ID: 700996044H1
ctagaaaacggaagcatttgtcagaacccctatctgaagcacagctggatatcaatggcttagcaacaagttcaccaaatgttcatcaaacgcaagtaggcaataaaatgaagacaaggaaaaggaaatgatactttatgcaagagccctgtttaaccttttcctaaggcttcaaattacagtatccatccttttgtgagattgagatcccatgagatgatcggctaggatctcgatggatttgtttccatttaggaaggtaatcata

SEQ ID NO: 1074 - DNA, 269 bp, Glycine max
  unsure at all n locations
  Clone ID: 700996045H1
caatttgctgatcgcaacaccaaaatccttactcctaaaaactgtcaatctgtagaaatgcatttcaattcacagaaaatggcaaaaaccatagggaggctggctgaaaaaacaccagaagttggtgaaactgtcagtggtttgctagtaaaaaaaggcttcacatatcagataatggcacctgatgatcttcatgtcttttcacagctatcaacaacaaacataactcagagaattnccgttccttactctggtgcctttagtttcat

SEQ ID NO: 1075 - DNA, 267 bp, Glycine max
  unsure at all n locations
  Clone ID: 700996047H1
gcacaaagcaaagctcatccttgagttaaaaaatggcagcagcttcttcnatggctctctcatccccatccttggctggcaaggccgtgaagctgggcccatcagccccagaagtgggaagggtgagcatgaggaagaccgtcaccaagccaggtctcttnaggaagcccatggtacggcccagacgagtcaagtacttgggccaattctctggngagccccgtcttacctaaccgtgagttcccaggcgantacggntggganatg

SEQ ID NO: 1076 - DNA, 269 bp, Glycine max
  unsure at all n locations
  Clone ID: 700996049H1
cgnacgaagcagaagangcatctcagaacagaaccaccgaacccactcagaagcaaatccgaaaacccctcatataatagtactggtattcagctgttcatgacaaaagcctgaaccgatcatgtcagaaggtgcagaaattgatgagcgtgtggaccttgacgaggaaaattatacggaagagatggatgatgatgttgaagaacaaatagatgatgatggagtggatggaggtgaagatgaaaatgctgaaggtagtgttgaagaac

SEQ ID NO: 1077 - DNA, 268 bp, Glycine max
  Clone ID: 700996050H1
gttgatgctctaatgcagatatcaggcatcatgaattgattcacgccagatgggcaatgcttggtgctgctggattcatcattcccgaggccttcaacaaatatggagcaaacctgcggtcctgaggctgtttggttcaaggtttgcaagctttataacaactttcactgtgtcaagttcactaatacattatttttttatgacactcaacaaatgaaattcaatagatcttacaagtgctaatgaaagactcttcagtttctcttct

SEQ ID NO: 1078 - DNA, 228 bp, Glycine max
  Clone ID: 700996051H1
aaatattaaatttcacagaggatgggtggtgaggaattgagtttgatggagaacgaaaggaaagggaggaggctgtggaagaaggtgaagtaccagctggtggagtaccactccttgcccggttatttgagagacaacgagtacattctcgctcactatcgatccgaatggccaatcaagcaggttttgttgagcgctttcaccatccacaacgaaaccctcaacgtt

SEQ ID NO: 1079 - DNA, 267 bp, Glycine max
  unsure at all n locations
  Clone ID: 700996052H1
tatttctcagcaccagtcagcaacaacaacacccctttcctttccacaagacataaaaaagngaanacagctttttttgttctttcacctcgattcacgaactgggnccatcctctgattgtggattattggatttcattttgagctacaccacacccccaagactttgactttcaacccaaaaccagctctttgtggtttgccaggttgccagttactgtgatatcataatggattccccacaatctgttgtgncacccttcagga

SEQ ID NO: 1080 - DNA, 263 bp, Glycine max
  Clone ID: 700996053H1
cacatctggtctttaatgatgatattcagggaacagcatccgtggttcttgctggactagttgcatctctgaagttggttgggggtaacttagctgatcacagattcttattcctggtgctggagaggctggcactggcatagcagaactcatagcacttgaaacatcaaaacagacaaatgctccactggaggaagtgcgcaagaatatttggctggtggactcaaagggattgattgtcagttctcgcaaagattcgctcc

SEQ ID NO: 1081 - DNA, 267 bp, Glycine max
  unsure at all n locations
  Clone ID: 700996054H1
cncatgtactaattaagatttaaaataaaaganaagaaaactgataacataggatatactttgtatatgtngtccagaatattcacgatgagattttttggtgagtacaattcatgaatganatgacttgtacaatagcatactttccaacaacgtannnnnnnnnnnnnnnnnnnnnttacattaatattgatgtactaattaagatttaaaataaaaganaaganaactgatatcataggatatactttgtatggtccagaattc

SEQ ID NO: 1082 - DNA, 266 bp, Glycine max
  Clone ID: 700996057H1
cactcacacaccatggatttgctctcaatctctccctctcaccctttaccttcttccattcgaaccctttccttcaaaccctaagccacccatttcctcctccttcttcttcatccccaaaccccattcacgcttctccaaaaccccaccaaggtgcgtcttcacgccggcctcgccaatcccctccaaaaacacaaactttgggtcccagtttcggaaccctacgagcctcaccttcgagctctcctcgccccagactccctcga

SEQ ID NO: 1083 - DNA, 263 bp, Glycine max
  unsure at all n locations
  Clone ID: 700996058H1
ggagctgtttttgatcttcctgaggagattgctaaagaattacttaatagggacataccacctggaaacaccgtttccaagatcaccaagctaccttctttgcaagatgatgggcctccaagtgatttctatgggaggttctctgacagagatagaagtagccgaagaggttctacttctaggggaggttttagttctangggaggttccgcttctagggaccggagaggttttaaatcctcacggggctgggatgtggaaga

SEQ ID NO: 1084 - DNA, 266 bp, Glycine max
  unsure at all n locations
  Clone ID: 700996060H1
ggcaaaaaacacgaggacgttcctattttctccatgctaacaccttcgctcctccacgatttcgccattacgaanaaatacgcgatcttctgtgatattcagctcggattgaaccctcttgacatgatctccggtggctcccccgtcggctccgtcgcctccaaggtcccaaggatcggaatcctccctcgtgatgctaaggatgagtcgatgatgaagtggtttgaggtgccggggttcaacatcattcacgcgataaacgcgtg

SEQ ID NO: 1085 - DNA, 258 bp, Glycine max
  unsure at all n locations
  Clone ID: 700996061H1
ctaaaacatctccagtgggttcttcttcttctattacaacaacganatcaaaaaaccatgaccatggccatggccacgatcctgctcctgttcanggtcttcgcggtttcatcggccctagacatgtcgataatctcgtacgacaacgcccacgccgccacgtcgcgcaggagangggagctgatgtccatgtacgagcagtggctagtaaagcacggcaaggtgtacaacgcgctcggagagaaggagaagaggttc

SEQ ID NO: 1086 - DNA, 266 bp, Glycine max
  unsure at all n locations
  Clone ID: 700996062H1
caattttattggtcagaaatgagttagtatggttaagtatttcacactggatcatctanttctaatattataagctaaaggaccaagaactgaaattattataacctcaacttgaactatccatacatagccactttaccactcactcttgtgttgttgccttcatggccaagccagtgtccattgaggtatggaacccaagtggcaaatacagagttgttagcaccaaaccaatgcctggaatcgttggatcaatcttctcgttc

SEQ ID NO: 1087 - DNA, 260 bp, Glycine max
  unsure at all n locations
  Clone ID: 700996063H1
ctttggnggatctccaatacttgtcgctcctttctaaggtttgcaccgagttggagtcccacaccggcaccgcngagnaaggtcntcgccgaattcatcaccgatttggcagctcatcgganaacttcaggaattaaaggccaagctcaacgacaacggtgccgacatgcngattaccttgtccgaantctcttcacnattattcgttcgttcttttccccaaccctacaagntncaacntcaaacatgggccaattgtc

SEQ ID NO: 1088 - DNA, 268 bp, Glycine max
  unsure at all n locations
  Clone ID: 700996064H1
cttttctcagttttctgcttcttcctcatagtctctcncatganntaatcactgatcatggcggctacgtttgatggattctccatnagggactacacatccaagatgaggtccatcgatgttttcaagtgctggcccttcgcatccacctcctcacgtgatacgtcacgtgaggaggttcagtcgtggcttccgcccatgaatccgtgccctagatccgacgatttcaacgacagccangccnaaaatctggagaatccgccttctg

SEQ ID NO: 1089 - DNA, 263 bp, Glycine max
  unsure at all n locations
  Clone ID: 700996066H1
gnaccgatctgagatcccagagtacttgaccggagaagtccccggagactatggttatgacccatttggtcttagcaagaagccagaagatttttccaaatatcaggcatttgaattgattcacgccagatgggcaatgcttggtgctgctggattcatcattcccgaggccttcaacaaatatggagcaaactgcggtcctgaggctgtttggttcaagactggagctctgcttcttgatgggggtaccttgaatacttcgg

SEQ ID NO: 1090 - DNA, 265 bp, Glycine max
  unsure at all n locations
  Clone ID: 700996067H1
cgaaaatcagaaaagctattgttgatttccatggtgaantggttctcttagtcaactacagcaacatcaattacacagggttggcaaaaattctgaagaaatacgacaagaggacaggggggcttctgcgtttgccgttcatccagaaagtgttggagcagccctttttcacaacagatttgatttcaaagctcgtgaaggagtgcgagagcataattgatgcagtgttcccggccgaggaagaagctgaaagagcaaaggaagc

SEQ ID NO: 1091 - DNA, 264 bp, Glycine max
  unsure at all n locations
  Clone ID: 700996068H1
cgcgaaggaagaaacacgaggaggagcaagaacgtctaaaccaaataaagttgttgggtaaaaacaaatcccgaccaaaattgtcatttgctcttggatccaaatgaccatgggcttcggcaacatgtgtctatttatttagtctaaagtgtgtatgggcttaatttaattccctatttgtgtctgtaatttgaggaaattatacagccctcctcagctatagtgtgacagcgttgttactgtttccngtttgcattagatttc

SEQ ID NO: 1092 - DNA, 243 bp, Glycine max
  unsure at all n locations
  Clone ID: 700996069H1
gaagaaagaaaagtgtgaagatgaacctaattttatggataactggcacaaccatcgggacaacgactgggagaaagcggggccagaagagaagaagggtgcttctttcagattcagattatgcatcttctggatcatctgattttgagtttaccatatctgaagaagagagagaacaggtgagagaagccaanagattgtgtggaaatttgagaaataacttgaggagttcatcccatccaa

SEQ ID NO: 1093 - DNA, 260 bp, Glycine max
  Clone ID: 700996071H1
tcgagcccagaggtagacacgaccatggtattagcagagctcgggtcccgattacaggacgcgctggccaagctaaaccgcacgacggtagtggacgatgaggcacttaacgctttgctcaaggagatctgcggtgcgttgctccagtcggacgtacaggtgaatcttgtgcgccagttcgcgacaatgtcaagctggctgtgaatcttgaggacgtgagctcgggcatgtaccgtcgccgtctcatccagaagtcggtg

SEQ ID NO: 1094 - DNA, 262 bp, Glycine max
  unsure at all n locations
  Clone ID: 700996072H1
ccaaagtttaagaaaaggcctccattaaggcgtgggagagtatcaccacatctccctgttcctgaccacataccaaggcctccttatgtaggttcagatatacttccagaaattgcaagtnagcatcaaattcatgattctgaaggtatagctaaaatgagggctgcaggtgagcttgcagcgcatgtcttaaactttgcaggaactatggttaggccttccataacaactaatgagcttgataaagcagtgcaccagatga

SEQ ID NO: 1095 - DNA, 260 bp, Glycine max
  Clone ID: 700996073H1
ctcatcaagggttgtgaaagcagagaagtgagatacactaagttatcctcataaatacactctaattaggtggcaagataagtgtctaaccttagtaacattgccacatattgtgttcattttggaattgtgccactaaaattctattcaattcatctatggctgcctcttcttatgctatgcaatcaatcctggcaaaccctttgatccgcatttccagcgggtctagggtgaaccaatttggcgttcctgctttgcac

SEQ ID NO: 1096 - DNA, 260 bp, Glycine max
  unsure at all n locations
  Clone ID: 700996074H1
aatgaaccaaaatccagagtaaaaggcgaanagcggtgggagcgatgcgcatcatggttgctcccataaactaaatggctatgtctttacctcttcgtttctattcctccnncgtctttctctctcacttctcttggggttgtgagaaaagtgctcgggactcttacaacagatattgttcaaccaaggagtggaaattggcacttagcaaaaagaggtggaagactcatatcgtttaagggtcgtgcgaggctggtaca

SEQ ID NO: 1097 - DNA, 260 bp, Glycine max
  Clone ID: 700996075H1
tcagcatctgctgtagattttcctagggtgaatgagagctacactggaaggaagcagcgatatgtatggggaaccacattagacagcattgcaaaagttactggcattattaaatttgatttgcatgctgaaccggataatggaaaaacacaacttgaagtaggaggaaatgttcagggtctctatgacttgggaccagggaagtatggctcggaagctgtttatgtccctcgtgtccctggtaccgattctgaagaaga

SEQ ID NO: 1098 - DNA, 262 bp, Glycine max
  Clone ID: 700996076H1
gatcaccaaagtacttgtgagtgtatacccaacacaaactaagatcaacatggactactacacccgcgtttcagaagttgagagggaacctatcatggagtattccacaccacgaccaatgatgggcaactaccaccaccctaatgctcaccgtgtcctcaacgagaagattgtttatgaggaggatgtgattggaggatcccgccacaaccacatgcatcaccaccaccctgagactcatgagagagtcaaggtggtggag

SEQ ID NO: 1099 - DNA, 199 bp, Glycine max
  unsure at all n locations
  Clone ID: 700996077H1
attcagtgttcagtttgggttccttcccttctcaacactaacactaacactaacaccattcactttctttcacttaaaccaaactctattactttctcttcttccttttcttctnccctcaccagaatcagaatcagagcctcctcttcctccccaaccgttgaagaagccgctatgagcatcgacaacctccgacgtt

SEQ ID NO: 1100 - DNA, 262 bp, Glycine max
  unsure at all n locations
  Clone ID: 700996078H1
ctactcttttctgcatgtntgtnctctcaacgactcctccgcgaaanagtattattcaatattttggttgggttgaatcccggggttgaagcgttgcagacatcacggctattctaagagtgtctcgctccctcattcatgtccgatctgtacgacggaggacgggtagttgcgtaactgccgttaacccttcgccgcacggtgggcgtggtgctttgccttctgaaggtggtagcccttcagacttgctcttcctcgctgg

SEQ ID NO: 1101 - DNA, 260 bp, Glycine max
  unsure at all n locations
  Clone ID: 700996079H1
ganaacctagagggctactcagacagtgttttggtgagtgatgaaccaatagaagacagacttggtggaaatatggtaatttctcaatcaagagtaggaaagtctacacctganaatattgtggatgatggtcaaccagagcatctaatggttgatggggagctgcagcctataaggagagaatcaattatgatgatgtcttgctactgatcctgtaaatgataggacaacagccaaagaagattctggccctgcaaatt

SEQ ID NO: 1102 - DNA, 265 bp, Glycine max
  unsure at all n locations
  Clone ID: 700996080H1
ggaaaagggtcattagagaacttgttcagggtcgagactatgctactcagttgaagtttctgcttcagaagcctattggccctgatgggtctgtttctgctaaggaacttgtgggccaatgtgctgagatctttcgctgaaactctctctgtgttgacttcttcttccgaggattcaacaagtggtcatgatcatgacgacgaggttattgctcagaatcttgtaatttccggagaagatgcctcgcaggtggcaagcantaatg

SEQ ID NO: 1103 - DNA, 262 bp, Glycine max
  Clone ID: 700996081H1
caaattctccgatctaactccggccgagttccgccgccagttcctcggcctcaagccgctccgcttcccggcgcacgcccagaaggcgcccatcctccccaccaaggatctccccaaggatttcgattggcgagacaaaggagccgtcactaacgtcaaggaccaaggggcgtgtggttcgtgttggtctttcagtacgacgggagcgttggaaggagctcattatctggccactggtgagctcgtgagccttagcgagcaa

SEQ ID NO: 1104 - DNA, 259 bp, Glycine max
  unsure at all n locations
  Clone ID: 700996083H1
tttgaatcgcgcaaganaataccctttggaccacgattagattttagtgcagaagatgcggtgcattaccagcttgaagccttgaagtataatgaccagcctcgtccagactatggaatcgaggttatgtacaggtttgctggatttgatccctttgaaaggtctccctattttggccctttctttgatttgggccagtttgaacggtttaggcgaatttttcaccatctacttatcgggtcttactaggtcacaagga

SEQ ID NO: 1105 - DNA, 260 bp, Glycine max
  unsure at all n locations
  Clone ID: 700996084H1
ccaagcttctgtccaaganacactgaaaaagcacgagcttactagacctcttgctcctaaagagttggaatggtttgcngcctcngcccttttggctttacctattattttagtggctagagtgttttcagctgttttctgtagcaaaaaagtgaataaacctgctcgaaatggaaacaatcaccatgcacgacgtaaacataagcnagggcatctagncaagcacacaacatgncattggttcctgctttatttttttc

SEQ ID NO: 1106 - DNA, 259 bp, Glycine max
  Clone ID: 700996085H1
ataagcaaaagccaattgatacgtgcatatcacaaaactactcttaaacacacacacaccccaaaaaaatcctctatcaccaaactcacctatttcctcaacttcaaggccctatagtcccagcaagtgagtgagcgtcacacaacatggaatatacttattcagcaggtgtagaggcagaaactcacacaagtagcagcaccaccccatcaagatcaaagaagagaaacaacaacacaagaaggttcagtgatgaaca

SEQ ID NO: 1107 - DNA, 260 bp, Glycine max
  unsure at all n locations
  Clone ID: 700996086H1
caaaaatgggagaaatagaataactgaatatcgtatagctcaaaataaagatttaaccaaatgcaattcatatgaaaaaagccaattaattctttacaaagaacaacaagtaaacgcattnnnnnnnnnnnnnnnnnnnnnnnntagatacgatcttttatcctataattttatcaattatgcgnnaagaaagactcatatatttatggatatagatccctatttcaagtaaaaaaaaaaccaagngatttcttctaatt

SEQ ID NO: 1108 - DNA, 260 bp, Glycine max
  Clone ID: 700996087H1
ctcaatcatccatagacatggccaccgtcacttctgcagcagtttctattccctcattcactggcctcaaggcaagcgcaggcaaagtgagtgccgccgcagttaaagtctcagctccccaagccacaaggttctgcggcatcaaggcttccctcaaagacgttggagtcgctgttgtggccactgctgcgagcgcagttctagctagcaacgccatggccattgaagtgttactgggcactgatgacgggtctctggtt

SEQ ID NO: 1109 - DNA, 261 bp, Glycine max
  unsure at all n locations
  Clone ID: 700996088H1
cgcttctcatatcccctaccccaaagcaatttccncatttgaaggatacaattgtgaagggatttgggttcacggcggaagatgatgttacgattacggggttcgatcctcgagacgccgaggtagggcattccgtggagtaccaattcgacctcgaaatcgatcacaaggttattcccttcaagctcctcgaagacgtcaaacactgggattacgtcgatcttcccattttccgggccgaggcccaatccggtttggtcc

SEQ ID NO: 1110 - DNA, 218 bp, Glycine max
  unsure at all n locations
  Clone ID: 700996089H1
gtntctcagactcaactcaacataaacactactgatcactgatcaccacaaacacttccaccacctcaacctaacatgtcatcgcagggttacctccaccgcataggcttcaccaggaagagagaaaggctcatcaacccaatggaccgaacctcaccactgccaccatcttcggttcagaaacaacaaggcatgtcagagtcattccactacccttt

SEQ ID NO: 1111 - DNA, 257 bp, Glycine max
  Clone ID: 700996090H1
accgcgcgcgtttcacacctccataactcggagtagcatacgcagcgtcgttgactcgcaactcgtaacttggcctcgcgcgccgatggcgtcggtccccagcaccgtcgctccccgcaccttcctgccgtcgattcccaagccgagagctcctcttcacgccgcgaaatccgtcgccagcgccgcgcgcaacttcccgagactttcgcacaacctcattctctccggaaacaaacgcgcggtggcggtgaatcggc

SEQ ID NO: 1112 - DNA, 258 bp, Glycine max
  Clone ID: 700996091H1
caagaacggcttcaggctcttgcgatcaacaaacgcagcgttttgatctcagatttgagggggagagaatggcaacaacagtgagaagtctgaagataaagacaagtacgtgcaaacgtatagtgaaggagctgcattcttatgagaaggaagttgagagagaagctgccaaaacagctgatatgaaggaaaaaggagccgatccctatgatctcaagcaacaggaaaatgtcttggctgagtctaggatgatgattc

SEQ ID NO: 1113 - DNA, 259 bp, Glycine max
  Clone ID: 700996093H1
ctgggaaccgtcaagctcccgaggatgccggctctcgatccgccgtcaaagactaccgaattcgaaagtctctcgaccacgacacgatccctcagaccggtgatgcccctgctaccgctatgagcgccgaaaaggccatgccccgcgccgagtctcttccaacaactctgccatcgagaaccccgcccaggccaaggctgccgagctcttgcaggaacctcaccagcccgagtcgttgcccagggaatcggcgctcgag

SEQ ID NO: 1114 - DNA, 114 bp, Glycine max
  unsure at all n locations
  Clone ID: 700996094H1
gaagggtgtatctgantttctcagtnttgttcttgatgggctttttattttcctatgttttcagatgtatcaaccaccagcagtacctctggtgctgctatgtttctttgaaat

SEQ ID NO: 1115 - DNA, 262 bp, Glycine max
  unsure at all n locations
  Clone ID: 700996095H1
ctactagtttagtgtcacgnaaataacccgcagacgcaaacgtgaaaacacagacaagacgcatacgtccgtctcaacgtgtttgagattataaagacttagtggaagggtaagctgaagttgaagagttgaggggaaaacaagcagtgaaggaggttgaggtactcaataaagttttgatttgtntgaattggggggcttgttgccaatgttggatacagttgtatgtgctagaaacagtcaacagtcgcttcataaggtg

SEQ ID NO: 1116 - DNA, 262 bp, Glycine max
  Clone ID: 700996096H1
gagaaagatgcagctgggatgtcgtgacatggaatggtggatgaggaggaggcagttgccatcgcgattaagacaaagagttcgccattttgaacgtcaaagatgggcagcgatgggaggagaagatgagatggaaatgatcaaagacttgccggaggggctgaggagggacatcaagcgccatctttgcctcgacctcattagaaaggttcctctattccacaacatggatgatcttattcttgacaacatctgtgacagg

SEQ ID NO: 1117 - DNA, 168 bp, Glycine max
  unsure at all n locations
  Clone ID: 700996101H1
cgtccacatatgtttaaatctgtaatagctgccagccatcctgaattttcatctccgagngcaacaggatgctttagaatttttcctacattttcttgatcaagttgagcgagctaatgctgggaaagttgaactggatccatcgacgagtttcaaatttggtattga

SEQ ID NO: 1118 - DNA, 165 bp, Glycine max
  unsure at all n locations
  Clone ID: 700996102H1
cgtccacatatgtttaaatccgtaatagctgccagccatcctgaatnttcatctccgaggcaacaggatgctttagaatttttcctacattttcttgatcaagttgagcgagctaatgctgggaaagttgaactggatccatcgacgagtttcaaatttggtatt

SEQ ID NO: 1119 - DNA, 288 bp, Glycine max
  Clone ID: 700996103H1
cttgataaccactgatcttttggctcgtggtattgatgtgcaacaagtgtctctagttataaactttgatctccctacacagcctgagaactatctccaccgtattggtcgtagtgggaggttcggaaggaaaggtgttgcgatcaattttgtcacaaaggatgacgagaaaatgctgtttgacatccagaagttttacaacgtgcaagttgaggagctgccttcaaatgttgctgagctcctttgatcagattttgtcctccgtcgtagtagatgaaattagtttgc

SEQ ID NO: 1120 - DNA, 283 bp, Glycine max
  Clone ID: 700996105H1
gtcggtgatagttgagtttgaagtagtgcttcgcgtctacattcagttcaatggcttcttccatctgtgctctctcgccttccgtccaatcacagctcactaaaaccaccctcgttgctccaatccctctctatcaacgaagcaagtgcgaaatgagcaggaggagttttgcgtttaagggaattgtggcctctggcgtttcggtcgcggcttctactctcacagccgaagcagaaccatcttccaaaggttttgaaagattgccgtacaagccggaagggta

SEQ ID NO: 1121 - DNA, 280 bp, Glycine max
  unsure at all n locations
  Clone ID: 700996107H1
actctctctaacttcagggcagagctatgggcggaaattttatggaggaattggaattcatggcatcaagggaaggtctcagctctcagttgccaatgttgccactgaagttaactctgtagaacaggcccaaagtattgcttctaaagaaagccagaggccagtatacccattttctgccatagtnggacaagatgagatgaagctttgtcttctccttaatgtgattgatcctaagattggaggtgtaatgatcagggggataggggcacagggaaat

SEQ ID NO: 1122 - DNA, 278 bp, Glycine max
  unsure at all n locations
  Clone ID: 700996111H1
atataaatacgaatcaaacatgggaganaattgttatgtggaaaccgacccaactggtcggtatggcaggtttggagatgttcttggaaaaggggcaatgaagacagtgtacaaagcaatcgatgaggtgcttggaattgaggtagcatggaaccaggtcagactcaacgaggcgcttcgcacgccggacgatttgcagcggctttactcagaggttcatctcctcagtaccctcaagcatcagtccatcataagattctacacttcttggattgnta

SEQ ID NO: 1123 - DNA, 277 bp, Glycine max
  unsure at all n locations
  Clone ID: 700996113H1
cgcagttctggaaatttgggcttgtnatggcaacaacaacaagtgatacctgaagtcgttgattccttagaagatgtctctgatgtgttatcagctgagggtggtgatacttttattgtaccgaatgacgaagatgaagatgaatttggtaccacagaatcttgtccaagtacaaggtangtccgaattgtgagcaagcaaatggtagggatatatgtatctgtttgggttcagaggaggttgagaaggcacattaataatttaaaagtttccccgg

SEQ ID NO: 1124 - DNA, 278 bp, Glycine max
  Clone ID: 700996114H1
caggtttttaggctgctatttgattttgctgtttcaccaaggtttttgagtggcaaaggtgggataatggaggagaatgttggggacattccttctgtttacaggtgggaattgaccaatagggctgttcatgctgctgctagaggaggaaatctgaagattttggaggagcttcttgccaattgctctgatgttttggcttatagagatgctgatggatctactgttttacatgcagctgctggcagagggcaagttgaggtaattaaatatcttac

SEQ ID NO: 1125 - DNA, 214 bp, Glycine max
  unsure at all n locations
  Clone ID: 700996116H1
cactctcgctctgcgaccttccacttaaccgcaattcacngaactccaagcttggacgacatgtcgtttaagaaaattctccgaccgtcctcgttacccgatcacgccggcgagattttcnnnnnnnnnnnnnnnnnnnnnnnntccgacatgtgccccgccgacgacatcattttctgcggcaaatcgttcctttcaaaggccgaacagccgt

SEQ ID NO: 1126 - DNA, 292 bp, Glycine max
  unsure at all n locations
  Clone ID: 700996117H1
tcttgcgggctangggtttnagcgcanttcttctagatttaaggaagatgggtaaggaaaaggttcacatcagtattgtggtcattggccatgtcgactctgggaaatccactaccactggtcacctgatttacaagcttggaggcattgacaagcgtgttattgagaggtttgagaaggaagctgctgagatgaacaagaggtcttcaagtatgcctgggtgctggacaaacttaangctgagcgtgaaagaggaatcaccattgatattgctttgtggaagtttgaaaca

SEQ ID NO: 1127 - DNA, 289 bp, Glycine max
  Clone ID: 700996118H1
caagaacttaagtctgtagccatggcaatagtaatcaaagtggcggctctctctggttcccttagaaaagcttcataccactcaggccttatccgagctgcaattgaactgagcaaaggggaaattgaaggaattgaaattgagttcattgaaatttcggagcttcccatgttgaacactgatcttgagatcaatgggacctacccaccaatagttgaagcttttcgtcaaaagattcttcaagctgatagtattctctttgcttctcctgaatataattactctgtca

SEQ ID NO: 1128 - DNA, 281 bp, Glycine max
  Clone ID: 700996120H1
ttcccttacaaagctaacacctacacaaaaatgcttaaaatcaataaattcttttggttggccaacttttttattttaacgatacttccttgattcacttgcctgcggttgtaagatcgacttaatgattctggaaaggtttaacccttcataagttgctgttttttcattaccctactatttttttggtttgaattgacccttgattcttaagggagcctcttatttaagtgtcctttgtaccttgtgtgcttgaaagtccatgttaaggtttgaagggg

SEQ ID NO: 1129 - DNA, 282 bp, Glycine max
  unsure at all n locations
  Clone ID: 700996121H1
caaggaaganaacccccgtgtgcccatcatcgtcaccggtaacgatttctcaacactgtatgctcctctgcatccgtgatgggcgcatggagaagttctactgggcacctacaagggacgatcgtgttggcgtctgcaatggaattttccgcactgacaatgttcctaaggatgacattgtcaagcttgttgacaccttccccggccaatctattgatttctttggtgcactcagggctagagtatatgatgatgaggtgaggaagtggatttctgttgttg

SEQ ID NO: 1130 - DNA, 280 bp, Glycine max
  Clone ID: 700996122H1
tatgatcctgttcgtcatgcagaaacgttccccatacctcctggctatctgcagtggaaggcgtgaaaaggttagttttgatcaattgcttaatatgaaaacgtggaacatctgttagggaaggaatccacctgccatgggtttcagtttagattgcagagttcatttcagtttttgtttgtctaagaaacctaaccacagattttagaattctaataaaaatttctaaaatgttcaaagcatttgacataatgtatatttctttgatatgcttttctag

SEQ ID NO: 1131 - DNA, 278 bp, Glycine max
  unsure at all n locations
  Clone ID: 700996123H1
ggtagccgactgaaggctgctttgagtgccagggatctggagatggagatggaactgctcggtctagaaagccctgctcgcnnnnnnnnnnnnnnnnnnnnnnnattgatcgaagagattgccaggatctcttccccatctttccggagcaaggaattcaataggattgttgatttgaatcctactaaccttgatgacctgttagcatctgctgaccctnctgtattttctcaactacatggactttctgtgcaaccttcaacacccacacaaagtgg

SEQ ID NO: 1132 - DNA, 277 bp, Glycine max
  Clone ID: 700996124H1
gagacattgtatcagtttccctctgaggatgatgacttgtttgatggaggttatgaatcaggtgatgatgctcgtggtattgtaccctctaacaggccgcctgaggtgaacttgaagaatgtgctttctgggatctttgctattttgtctggacggaccaaggctccgagtgttactgcaaaccagcagctcccaagttcaaatgtgtcattttttgactctggaatcaatggggatgttttccttgactcttcggtgtacacgccaagtgctccgc

SEQ ID NO: 1133 - DNA, 274 bp, Glycine max
  unsure at all n locations
  Clone ID: 700996125H1
tagtttctctcattccttctgtcccttaattgcgaanaaatcnttcttcttcccatggaaatggaaccgacgtgcgtcgacacttccctcaaccttaacgttattccttccncacacatcgannaancngnggttagtacnnnnnnnnnnnnnnnnnnnnntcaactccaaaccattgtatatataatatattaatgaaccttaattcttttcatctcttatctcactaaatatggctaaaaggcatgaatataacttaatttgaatgaaaaaa

SEQ ID NO: 1134 - DNA, 275 bp, Glycine max
  unsure at all n locations
  Clone ID: 700996127H1
cgnaagtttgcttaaaanacacggagatttgacagancgtcttgctagggattctgacaagataatatttgancgtctacagaaggagtttgaagctgcacgagcttctcaaactgaagagatatgtttagacggggaagagtggaatgatggactactagctacaataagagagcgggtgcatatggaggcagacagaaaagcaatgcatggggatgctgacatattagcatgtcctcaggataaaattacatataaaattggaaacaaggtaa

SEQ ID NO: 1135 - DNA, 153 bp, Glycine max
  unsure at all n locations
  Clone ID: 700996128H1
attgctttgtgcggggatcattcaaaatcagtctaaatcgtgaactccaggtctgatttcataaattcatctctgtgtcagattcacagcaaaagaatgttgacttgtggctggaccccaacaattaggtctcagctnctcatgttttctctc

SEQ ID NO: 1136 - DNA, 277 bp, Glycine max
  Clone ID: 700996129H1
agcttcaccacctgtctgcaagtctcctttctgaggttgaaaagctccaatcccagttgctagaaagagatactgaaatttctttcttgaggcaagaggttactagatgcactaatgatgctcttcttgcatcacaaatgagcaaccagagttctgatgagatctttgagttcttgatgtgggttgacacaattgtgtctcatgatggggtgcatgatatacatcctgatatgaagagcaacagtaaggttcatgaatgcaaagaaatacttcatag

SEQ ID NO: 1137 - DNA, 256 bp, Glycine max
  unsure at all n locations
  Clone ID: 700996130H1
gttgttgtaactcgttcttctacntttgttgttctgtacctgtgtttgttttttctcnccacctgaaaatgtcttgctgcggtggtaactgtggttgcggaagctcctgcaagtgcggcaacggctgcggaggctgcaagatgtacccagacttgagctacactgagtcaaccaccaccgagaccttggtcatgggagtggcacctgttaaggctcaatttgagggtgctgaaatgggtgtgcccgctgagaacga

SEQ ID NO: 1138 - DNA, 283 bp, Glycine max
  Clone ID: 700996132H1
ctatgctttaatattgaggtctctcactgttttagaaggtttagcactctatgctgatcccaattttaaggttcttgcggcatcatacccatattttgctaagcggctcttgacagatccaaacccatatctaagagatgctcttatagagttgcttttccaggatgggaggttcaggtggggtagacttgaaaacctgctagcccaggggagaatggacagggatttctctgcaaaagaggctttgcaacctgtcctgaaggtattattgagtccagatggt

SEQ ID NO: 1139 - DNA, 289 bp, Glycine max
  unsure at all n locations
  Clone ID: 700996134H1
gaacaactaaacagctaaaagatgcaatagcaattgctggggaagaaactgccaaatgtaaagcagcaaaggaagtaataaagtcacttacagcccagttgaaggacatggctganaggctacctgtaggagctgctaggactgtgaaatcaccgactcttactgcttcttttggttccaatccttgttccaatgatgttagctatgcttccattgatcggttaaatattcaagctacaagcccagaggcagatttaactggatcaaacaaccatttacattcaaatgg

SEQ ID NO: 1140 - DNA, 284 bp, Glycine max
  unsure at all n locations
  Clone ID: 700996135H1
acacgatgaacaaataaaaatgtcgagaataaggtttggagaatcattgtgagcattttggtttacnaaaacaatcatcaatcatgggaagcgatananaatcganacgagcttcaccctcccaacgtgaagatgagaagagaagcaagangcagagaacggtagaggatgaggaaaggnagaagcggaaaagggaaaagaaggagaaaaggaaggacnagaaatctcaccagcatttcaaagaanataattctgataaggggaagttgaaagataagcacaga

SEQ ID NO: 1141 - DNA, 282 bp, Glycine max
  Clone ID: 700996136H1
ctctctcagtttttgctattctgagtgatgggtatgccctgccgctgttcccacacctcccacatcatctgaaatcatcatcaccagcttcttccgccacaagtcttaaattacaacaatttccctcaattattcatcaaccaaccaccttaatagccttttccaatggttccttaaagatccaacttggtcggagtaaacatggcggctagtggaagttccttttccaacatcactagcttccttcgcaaccaacaaccctcttcccaacctctcgattct

SEQ ID NO: 1142 - DNA, 277 bp, Glycine max
  unsure at all n locations
  Clone ID: 700996137H1
attaagcgaggtgttaggtctggaaacatcacgcctgatacttcggcaattagattctctgatgaagcgcttgatgagcaaaagcatagcatcagggttgctgatgaaaaagtagccttggctgtccaggcttatgatttggtagatacaaacatacaacaacttgatcagtatctgaaaaagtttgatgaggagattcggcgtgaaagagaaaacgctncaataactggagtacctgcttcaggtcctgaaggtaatacaaaatctggaaggggta

SEQ ID NO: 1143 - DNA, 276 bp, Glycine max
  unsure at all n locations
  Clone ID: 700996138H1
aatggttnggagaaagcaaaggcctccaagcctccaatgttgcctgatgactttgacaaaccggagtttgccacggtcaacattcagngtgatctgttctatggttacgatactctcatggagaatgtctctgatccttctcacattgagtttgctcatcacaaggtcacgggnaggagagacngagccaaacctctgccattcaagatggattctcgtggttcatggggcttctctggagctaatgaagggaacccacagancnctgccnagttt

SEQ ID NO: 1144 - DNA, 274 bp, Glycine max
  Clone ID: 700996139H1
cgctaaaggaactgcatacaccttttttacacatgccaatgccaagtttgctagggatctgattaagattttacaagatgctggtcaggttgtgagtcctgctttgtctgcattggttcggtcggctggttctggtcaatttggatcagggggaagttttcgctcaagaggacgaggaggctatggaaatcgaggtttaacgtcaggttccaatgccattcctctaggttcgaagaggccctggcagtgtctgtagttttggtgctgctttggg

SEQ ID NO: 1145 - DNA, 271 bp, Glycine max
  unsure at all n locations
  Clone ID: 700996141H1
cattctnnangatggacggctggatganagaaaagcaatgaaggaagagttgtcaggggaggggaaatttaatgttctgataacacactatgatcttataatgaganataaagcatttctcaagaaaatccattggctctacttgattgtggatgaagggcatcgattgaagaatcatgagtgtgctctagcaagaaccctggactctggctatcacattcaacgaagactgctgttgactggtaccccaattcagaacagtttgcaggaa

SEQ ID NO: 1146 - DNA, 272 bp, Glycine max
  unsure at all n locations
  Clone ID: 700996142H1
gcccaacatcaaggttcctctcattcttggtatctggggaggcaagggacaaggaaaatctttccaatgtgagcttgtctttgccaagatgggaatcaaccccatcatgatgagtgncggagagttggaaagtggaaatgcaggagagccagcaaaactgatcaggcagagataccgtgaanccgcagacttgatcaagaagggaaagatgtgtgctctcttcatcaacgatcttgatgcaggagctggtcgtcttggtggaaccacccaat

SEQ ID NO: 1147 - DNA, 269 bp, Glycine max
  unsure at all n locations
  Clone ID: 700996143H1
caaaattcattttatcaaataaagttgttgccaaagagaagtttgagaaatatgaacaaggtaagttcgagttcnaaggtgcagctttgttcatgtctccattggttggattactcatagtgaatattctttgcttctttggtggtttatggagactatttaatgtgaaagattttgaaaagatgtctggccaactttttctacttggctatctggcggcgctcagttatcccatttttgaggggataataaccatgaaaagcaaggtg

SEQ ID NO: 1148 - DNA, 272 bp, Glycine max
  Clone ID: 700996145H1
caatcatggaggagttcgaggatgcagtctcattcgtatctaagaacagcggcatgaagacatcacaagatgataaattgagattctattcgatgtacaaattagccacggtcggcccgaacgatacaccacgtccaggattttttgactttgcaggtcgtgcgaaatgggacgcgtggaaatcgtgtggtgaattatcaccagaagatgccaagactgaatacgtcaaactgctagatcgattagatccgaaatggcgggaaactctgccc

SEQ ID NO: 1149 - DNA, 271 bp, Glycine max
  unsure at all n locations
  Clone ID: 700996146H1
annagttatctantcttttnctgcatggtttgtgnctctcaacgactcctccgcnaaanagtattattcaatattttagttgggttgaatcccggggttgaagcgttgcagncatcacgggctatncctaagagtgtctcgcnccctcattcatgtccgatctgtacncacgnaggacgggtagttggcgtaatgccgttaacccttcgccgcacggtgggcgtggtgctttgccttctgaaggtggtagcccttcagacttgctcttcct

SEQ ID NO: 1150 - DNA, 275 bp, Glycine max
  unsure at all n locations
  Clone ID: 700996147H1
cctgtcctgtatattgataaaatgataacatcatggattaagatgaaaaanaacttttcaatcatttganacagctgaagggaaaaagcaccttgcttctcatttattcataggaaaaaaagaagtgatgaatggactgtatctttattgtttattttagttcctctctttattttctcacccattgctcctgcttaatttgattcttgtcagtttctgtctggtaggtccattatcagaattttcattggaaaagagtaacatgtctctcacca

SEQ ID NO: 1151 - DNA, 280 bp, Glycine max
  Clone ID: 700996150H1
tgatcctctacaactccctcatcctcctctccttggtcctcatgatcctcgccatcgacaccgacaactccctcctcctcttcctcgctatcctcatcgtcctcactctctttttagtcgcccacgtctacatcaccgccctctggcacctcgcctccgtcgtctccgtcctcgagcccgtctacggcctcgccgccatgaagaagtcctaccacctcctcaagggcaggctccggttcgccgctgtctcgtctccgcctatttggtcgcctgcggggtt

SEQ ID NO: 1152 - DNA, 276 bp, Glycine max
  Clone ID: 700996151H1
ccgacttcatgggtccagttgctgcagttttggtagctttcactgtcttctttgcctttgtattttccttctgcatcagggcactgaacttccaaacaagataaaagaacttcaatgttaaagtacaagttatgctatggcatgttgtaacggtctaaatgacctgtgtatgtaaataactgaggctggagtcaatgctcaagatttatgcaacattataagcttaatagatggccacgatagttttgctggcggagtgttcttcagcaagtgtaa

SEQ ID NO: 1153 - DNA, 276 bp, Glycine max
  unsure at all n locations
  Clone ID: 700996152H1
atcgatanagatttgnattnccctttggcaatacttgtgctgatattaggcacaccatantctagtgcttttgggaagagtgaaagtaatgtgaaaacagctgtttttctgttctcccaagtttgaacttggaccggntncggtagccaataaantngattatgatattgattttccaagaggtcatattgccctcaagagtttccaatgctgaagtagttgntgaagcagggaactctgtggctctccatgaaacttatctccntcactgggttg

SEQ ID NO: 1154 - DNA, 265 bp, Glycine max
  unsure at all n locations
  Clone ID: 700996154H1
ttgcaagantgaaaaccttctcttacccttctctcaagtttcaagagatttcatcatggctccaaagaaggacaaggctccaccaccttcctccaagcccgccaaatctggcggtggcnnnnnnnnnnnnnnnnnnnnnnnnnnnggaaagcaaaaggagaaggtgaacaatatggtgctgtttgatcagggcacctatgacaagctcctttctgaagctcccaaatacaagctcatcactccttccattctctctgatcgtttg

SEQ ID NO: 1155 - DNA, 271 bp, Glycine max
  unsure at all n locations
  Clone ID: 700996155H1
gaagtataactgcttactttccctcaaaatgatactttaatctaagtattttatctaaataaattctatagccctgaccggcacatcaaccaaagtctctaagatatattggaagcatggtagctgatgttcatcgtacgttgctttatggaggcatctttttgtaccctgctgacaaaaaaagtccaaatggaaaacttcgtgtcctgtannnagtcttcccaatgtcattcttgatggaacaggcaggaggacagtctttcacgggcaa

SEQ ID NO: 1156 - DNA, 267 bp, Glycine max
  Clone ID: 700996157H1
aagttttgttggggggtctttgaagggtctttgcttcaatctgaaacgaaggcaacaaagaagagaattgaccaatttggttgttgcttcatccacctcaagtgttacaaatagcaatgctagtggcaggttttacttcaacatcactggttttcctttcccacttggtccttttctcaacaggcgcactattaggactgaggctgtgaaggattgtatatggctattcgaacaagagcaggcattaggcttcagcagtgtttccac

SEQ ID NO: 1157 - DNA, 267 bp, Glycine max
  unsure at all n locations
  Clone ID: 700996158H1
tcgatggtgaagctgaattggctcaaggtggtggagaagaagtgtcgaattttgacttcgacttgtttattattggggctggaagtggtggcgttcgtgccgctagattttcatccaatttnngagctaaggtggggatttgtgagcttccatttcatccaattagttcagaaacaattggaggagtcggtggaacgtgtgttattcgtggttgtnttcccaaaaagattttggtctatggagcatcttttggaggtgatcttgagg

SEQ ID NO: 1158 - DNA, 271 bp, Glycine max
  Clone ID: 700996163H1
aacatggagctgttgtctctgagactcaccccttcaccttctgcttcgacttcatcgcttcctgcagcacttgctcactgctccaagctatgtgagtttcaaccgcggaagaagaagaaggtgtgtttcgacgcgcctaggcttgcggtgcggtgtgtgaaagcctcggcgcaggaaccggtgatactatcgacgatggagagactcggactgggttcaccacacctgccatggaagtcaccacattcaatcgaaccactttcaccgatgc

SEQ ID NO: 1159 - DNA, 276 bp, Glycine max
  unsure at all n locations
  Clone ID: 700996164H1
gcgtactcagactcttgtcaaaagtgctatcgttcaggttgatgctgctccattcaaacagtggtatcttcagcactatggtgttgagattggtaggaaaaanaagacagctgccaagaaggaaactgcagaggagggtggtgatgctgctgcagctgcagaagaagccaaaaagagtaaccatgtgcagagaaaattggagaagcgccagncagatcgaaagcttgatgctcacattgaggagcagtttggtggtgggcgtttgttgcttgcatt

SEQ ID NO: 1160 - DNA, 108 bp, Glycine max
  unsure at all n locations
  Clone ID: 700996165H1
cagaattatgtttgtactataaaatacgctctgacttgtacactgtaagaatcaanaattattttatcaaattcaaggagaaaaaacaattagcacagcagcttacgc

SEQ ID NO: 1161 - DNA, 280 bp, Glycine max
  unsure at all n locations
  Clone ID: 700996166H1
anaagttggagcagagattganaagcaaaacatgcaggaatcagatgtagacagaaataatgatttaacactccgtcattctaagatgcattgcaattccagtgtctcagaaatatgtggcaaggagggccaagattgtctggacaaaaaatgttctagctcacttacaaacacaacagatagacatattgaaatgattagaaattctgaaattacagaagcagttatcattgatagcaagtgtgatagcttaactttgaatggtgaagggcatcaagaa

SEQ ID NO: 1162 - DNA, 273 bp, Glycine max
  unsure at all n locations
  Clone ID: 700996167H1
tttgagctaaccatggccttgagtggttgcacctcactcaaggatatcactcgtgatcacattgtcactgattgggaccaacctcgcattcttccccgcgcattgccaagattatgaanaatttgctcctcatttgagccaagtttgtataatgtggtgcagaacaatggaggaaacagttctatatgtgtttcatgaacctcctttcttttcctttttggagaactcatttaaggttgtatttggaaaactctatgcttaatttcttttaag

SEQ ID NO: 1163 - DNA, 272 bp, Glycine max
  unsure at all n locations
  Clone ID: 700996168H1
ctgaagttcatcgatttatggtttccatcacatactctcaantgnggttgacaganacaccactgggaatgccaaaaaaatgtgccttcttggttgcagctttgtggttgagattcataaggtgatacctttgctattgattccccacttaatgcttgacaagagtggaccacaagtttgtagttcattcattagctattccttgatgcaaaataggcacacaagtttttgtagagtgcctgttctgcttatacacgatccatgtgaagacg

SEQ ID NO: 1164 - DNA, 272 bp, Glycine max
  Clone ID: 700996169H1
aaggcaatgaatctgatgcaggcggttcgctacgacgcctacgggggaggtcctgccggcctcaagcacgttgaagttgccgttcccagtccaaaggcaaatgaggttttaatcaaactggaagcagttagcattaaccctattgattggaagattcagaagggtcttctccgtcctttatttctccccagaacctttccccacataccttgcactgatgtggctggagaaatagttgagatcggaactcaagtcaaagatttcaaagttgg

SEQ ID NO: 1165 - DNA, 271 bp, Glycine max
  unsure at all n locations
  Clone ID: 700996171H1
ctgccgccatggccggcgccgtcgctgcccagatctcgggcatcncctcagcagtgcactgttcagctncggcctgctcgntgttggtgaccttggccagtgtctcgccctccagcaattgatccctcttgtcgttggccaaaacagcggatccgtggtcgagcccctcgacaactacctctcctccctgtgctccaacagcacagccaagtgctccaacgccaccctcacctcgggcccagtccaccgtcgagtcggcgtgcgcgtccga

SEQ ID NO: 1166 - DNA, 146 bp, Glycine max
  Clone ID: 700996172H1
gaaaaaacacattgaaaagccctctctcccaaaaatttggaaccctaatatgcaaattaacttatcatcaaggctagtacagatacaaagtcctggactcaatcccatcttcaattcccatcttagctacttctcaaaccctctta

SEQ ID NO: 1167 - DNA, 265 bp, Glycine max
  unsure at all n locations
  Clone ID: 700996174H1
ctacaataatcttaccggaacagttcctctatctatgcaaaatgnctttaacttgaggctttcattcaacaatttgaagggtcccattccatatggtttcagtgggagtgagctaatagggaacaagggtgtatgtagcgatgatttctattacatagctacacatcaattcaagcgttgttcagcccaagacaacttagtagtcatggccggcagcaacaaagtaaggcacaagcacaatcagctggtcatagttctccctatc

SEQ ID NO: 1168 - DNA, 264 bp, Glycine max
  Clone ID: 700996175H1
ctggatttctctcttctaaatcaatcaatactgattttatttactcaatcaatcctccaatcagtgaatcaaaatgtccggagacgaaggccccaccaccgcctacacatggcaaatctccgcccaggaccagcagggcggtcccggtctcgacaaagacatgaaggagcaagccaactggacccagctcgagtactggggtgatgacggcaaaccctacctcaaagagtacgaaggccgcggcctcctcgagaacaaggccgt

SEQ ID NO: 1169 - DNA, 264 bp, Glycine max
  unsure at all n locations
  Clone ID: 700996176H1
caactcgttaaagtgcgttcggagttgttgaaggttggagagagtggtgttgactgaatccataaccggttcgggaactccgaacgcactttaacgagtttttgtctctctccgaccctcaaaccctctcccaaatgccccctcttcaacgggctcattccctcttncctcctcgccaaagtcacatctacccttcttgcattgaacctaaggtgtaccggggtccacccagatgatcatcccatcaaatcagagcttgatagg

SEQ ID NO: 1170 - DNA, 266 bp, Glycine max
  unsure at all n locations
  Clone ID: 700996177H1
acggatacatcgcaggactcgcgtttgtcttcgatctaacaaggtattatctattactttcacaatcaggcgtaanaggttttctttttaccgtgctaataatagctaacaacgcatgtgcaattgataacattaatggaagcaagtaattcgtatatgagaaacgattcaaagaagtttatgtgttcgatgctttcgatttggggaattcgtaattgaagtggtattaattccaatttttgggcatgttctttatttacagagat

SEQ ID NO: 1171 - DNA, 266 bp, Glycine max
  Clone ID: 700996178H1
tacaacaacatgtaccgcataatgttcgaccggaggttcgagagcgaggaggatcccatcttccagaggctaagagccttgaacggagagaggagtcgcttggcgcagagctttgagtataactatggtgattttattcccatcttgagactcttcttgaagggttacttgaagatttgcaaggaggtgaaggagacgaggttgaagcttttcaaggattacttcgttgacgagaggaagaagcttggaagcaccaagagcaccaa

SEQ ID NO: 1172 - DNA, 267 bp, Glycine max
  unsure at all n locations
  Clone ID: 700996179H1
acgatggagcaaganttagatccctctgttccttgttgtcagcatctgctttctgcaatcttagcgatggaaccttccgagtgcttaatctcccacgccagggcgtgtggcggaggctctatcaccgaccaagttcaacaattcatctcggatcattgcctttccactcctggtgattttcatgctccttacttgaagacttttctcaagaaactcatcactcaagttgagttcgaccgtggctgtgtgttggaccacttgtacgaa

SEQ ID NO: 1173 - DNA, 273 bp, Glycine max
  Clone ID: 700996180H1
agcttcaccacctgtctgcaagtctcctttctgaggttgaaaagctccaatcccagttgctagaaagagatactgaaatttctttcttgaggcaagaggttactagatgcactaatgatgctcttcttgcatcacaaatgagcaaccagagttctgatgagatctttgagttcttgatgtgggttgacacaattgtgtctcatgatggggtgcatgatatacatcctgatatgaagagcaacagtaaggttcatgaatgcaaagaaatacttc

SEQ ID NO: 1174 - DNA, 278 bp, Glycine max
  unsure at all n locations
  Clone ID: 700996181H1
atcttagtccaccaaaatcttataantagtgccaancccaaaccaaccacacctacaacgcacctttctttctcttttccctttttcttaggcacaccacacacccactcaaataatagaaactgagatgaatcctgatcagtttcagaagaacagcatgttcgtagaaacccctgaagatggtggcaaaaacttcgacgatgatggacgagtcaaaagaactggtacatggataactgcgagtgcccatatcataacggcagtnataggtctggngt

SEQ ID NO: 1175 - DNA, 236 bp, Glycine max
  unsure at all n locations
  Clone ID: 700996182H1
gcgctttctgcaaaccgaacatttcatctccaaagggatcaacaggtcgaaggagaaatggggctgacattcacgaagcttttcagccggcttttcgcgaagaaggaaatgcgaattctgatggttggtcttgatgctgctggtaagaccactatctctacaagctcaagctccggagagatcgttactacaattcctaccattgggttcaatgttgagactgtggaatacangaa

SEQ ID NO: 1176 - DNA, 250 bp, Glycine max
  unsure at all n locations
  Clone ID: 700996183H1
cattgaccattgttgtngttgttgcttttgttcgttctcgccatgccaatgttgtcttcgagaggcttcatcgcttatctcgtatctgctttctcttgtgctgttctgtctgcgctttttctcaccaaccacatccatcatgatgataacaagccaattactttgttagcctctcgtgtgtctgaaactcttaaagtttggccagacttggagccaagttggagacttgtgttggcaacggttattgggt

SEQ ID NO: 1177 - DNA, 268 bp, Glycine max
  unsure at all n locations
  Clone ID: 700996184H1
cggacatttgangtgtctttactcaccattgaggagggtatctttgaggtgaaagccactgctggtgacacccatcttggaggtgaagattttgataacaggatggtgaaccactttgttcaagagttcaagagaaagaacaagaaggacattagtggaaaccccagagcacttagaaggttgaggactgcttgtgaganggccaagagaacactttcatcgactgctcagaccaccattgaaattgatctctatacgagggaattga

SEQ ID NO: 1178 - DNA, 267 bp, Glycine max
  unsure at all n locations
  Clone ID: 700996185H1
aagttgcagtgttcttatcatgggtggtcttttgatgggtgtggatcttgtgttaagatacctcaggctncatctgaaggccccgaagcacgtgctattggatctcctaaagcgtgtgccactaggttccctaccatggtgtctcagggcttgctcttcgtttggcctgatgagaatggttgggagaaagcaaaggcctccaagcctccaatgttgcctgatgactttgacaaaccggagtttgccacggtcaacattcagcgtgat

SEQ ID NO: 1179 - DNA, 265 bp, Glycine max
  unsure at all n locations
  Clone ID: 700996186H1
gcaagtngccctaggtttcaagatctttgccaggcaggagttaaggggcttataacagcaatcgatcgttttgagccaaacaggagatttcggctatcaacttatagtttgttttggataagacatgctatcattcgttcaatgaccctctcaaacttcacacgtgttccctttggacttgaatcggttcgagcagaaattcaaaaagctaaaactgagttaacatttgagcttcagaggtcaccaacagaggaagaaataatag

SEQ ID NO: 1180 - DNA, 264 bp, Glycine max
  unsure at all n locations
  Clone ID: 700996188H1
tttcttcctcagtagtgtcattnacgcttctcttctctgcagcaactatgcctaaccctaaggtcttcttcgacatgaccatcggcggtcaatctgctggccgcatcgtgatggagctctacgccgacgtcactccccgcaccgccgagaacttccgcgcgctttgcaccggcgagaagggcgtagggcggagggcaagcccctccactacaagggctcgtccttccaccgcgtgatcccgagtttcatgtgtcagggtggcga

SEQ ID NO: 1181 - DNA, 264 bp, Glycine max
  Clone ID: 700996189H1
ctcgcattgtctccgaagcacaccaaattaaaaccacacgcacccgcgacgacacaccgtatcaccaaacgacaacaacaaccacgcgcgtttcgcacctcacgaactcggagaagcaaacgcagcgtcgtcgattcgtcactcgcaactcgggcacgcgcggcgatggcgtcggtccacagcaccgtcgctccccgtaccttcctgccgtcaattcccaagccgagagctcctcttcacgccgcaaagttcgtcgccggcggg

SEQ ID NO: 1182 - DNA, 262 bp, Glycine max
  unsure at all n locations
  Clone ID: 700996191H1
gcactgcactggttcatctctccactcatgtcccagcaatcaaggacaagcttgaggatgcagatgagaggctaggagctgacattgtgcaaaaggcactgatagctcctgcagcattgattgctcaaaatgctggaatagaaggtgaagttgttgtggagaaaataaagagtggtgaatgggaggtcggttacaatgccatggcagacaggtatgagaatttanctggaggctggagttatcgaccctgccaaggtaacta

SEQ ID NO: 1183 - DNA, 265 bp, Glycine max
  unsure at all n locations
  Clone ID: 700996192H1
aaaaaaaaaaactcagaaagaagagagagaaagggaagaaagagaaagaacaaagaaggggaaaaatancctgataactgagataacaataccatagatatagagagatagttccgagctccaattcccagaaaataaaaattaaaactttgcttcgctttttctcttcattgtttttcttcctcttctacccctttgatctcatgcaatctcccctcatggatccctttgatttgattcgcaaaggggtttaattgcttgagat

SEQ ID NO: 1184 - DNA, 263 bp, Glycine max
  Clone ID: 700996193H1
aattgagaaaggctgccgaaacacataaggacaacttatctgcacttatggtaacatatccttcaactcacggtgtttatgaggaaggtattgacgaaatttgcaagattattcatgataatggaggccaagtatatatggatggtgccaacatgaatgctcaggtgggactcacaagcccaggttggataggagcagatgtatgccatctcaatctccacaagacattttgcatccctcatggaggaggtggccctggcatg

SEQ ID NO: 1185 - DNA, 218 bp, Glycine max
  unsure at all n locations
  Clone ID: 700996194H1
gccgcagtaaagtagagttatggnaacagccctcacttgcttcttctgtggtanactcccacctgcaactgcaagtgagcactttcgttgtaataatgcctccccctctagacacgtgcatttctctttgcctcttcatttgttattggaacccataggctaattcgaaacgccnctaacaccaatgaaactaaggtggtttccagtactaatgtcaa

SEQ ID NO: 1186 - DNA, 266 bp, Glycine max
  unsure at all n locations
  Clone ID: 700996195H1
aatcgtttttntgatactgatttctaacactctgaagcacatttcatctgtggtccaaacacaaaatcttttgtttgccctgcttttgttttgttttgttccattccatccattcacctgttctatgttcatctccagcaccccttgattcattcattcaaaagccacaaacttgaattgatgatggggtacctctacctttcttgcagagccgaatccgctgtctcaacctccaattcggtgtcctcttccaaagagaaaagcag

SEQ ID NO: 1187 - DNA, 272 bp, Glycine max
  Clone ID: 700996196H1
atcatcggcaatattcatcagtttggaacactaccacatcgatctcttcgagatctctctctcaaatatggtgaaatgatgatgctgcagttggggcagatgcaaactccaaccctagtggtgtcatctgtagatgttgccatggaaataatcaaaacttacgacctagctttttctgaccgaccacacaacactgctgcaaaaatcttactctatggatgcgcggacgttggctttgcaagctatggagacaagtggagacagaaaagaaa

SEQ ID NO: 1188 - DNA, 257 bp, Glycine max
  unsure at all n locations
  Clone ID: 700996201H1
ctcaggagcagcacgctaacacagagtgttacagtcacctgtgttcntcacagtcacagacaatggttccaatcaattcccgtaaattatagattctgtgacgctgctcggaactctctancatccaactccgccatcttcaagtggaaaagaacggctaattataatcgtaaccgttctggaatgggaaccttcaccacgcgcgcgttggcgcagcggcttccagaacgccgacgaactcatcgattccgtcgaga

SEQ ID NO: 1189 - DNA, 245 bp, Glycine max
  unsure at all n locations
  Clone ID: 700996206H1
ctgatgttttgggtgcatgttcacccaagactttctcctgtaaancgtnaccctaaacctttccaaagtcttgtaagccattactcaccctaacgtacttgctccgttcgtaagaacacttcgactttgcccttcgcctcgcctcgcctcgcctcgcctccgatttccttctttctccaccaatggaagttccttcggaggtaccatctactgacactggcaccagcaccgggcaacnggcgaaa

SEQ ID NO: 1190 - DNA, 243 bp, Glycine max
  Clone ID: 700996207H1
ggaaacagtatacctattttggcaaccaaaaaaatcctgagagagaaattccaaggcagaagatattgaaacatttgaaaatgggttatacaacaagagaaagaagggaagaggagaagggtaaataatgtaaatattgtatgcttctgaatcagttgcattttcacatattacattaaccagtcccattcgaaactgctcgaatgtttgtgattaacctcatctcactagatctagcttcct

SEQ ID NO: 1191 - DNA, 240 bp, Glycine max
  unsure at all n locations
  Clone ID: 700996208H1
tttgataaccgtgagtnacagannactccattctccaaggtttggacgaaatagagaggcgcattgagnatggagagttcaattggagagctgacagggaggatgttcacatgaacattgaggccgcnctcaccgacttgatcggtgagcctgccaagangctccacactgcacggagccngaacgatcaggtcttgacggattttcccctctggtgtcgcgacgccattgacaagatcc

SEQ ID NO: 1192 - DNA, 239 bp, Glycine max
  unsure at all n locations
  Clone ID: 700996209H1
tcgaccattaattcgacacacaatgagtancnacgccgtcaagccgctgcaaaatctgctggacgcgtttggcgcgcgtctggcacgtctagagacgcaactgggtatggagggagcgcttacctctgcgcatgttgtgactgctgccgtctcgcccgccgccgtttccgaggatttgtcgccacagctcaaggcgtacgacgagtncgtggctcagtatttcccgcccttcctggacg

SEQ ID NO: 1193 - DNA, 238 bp, Glycine max
  Clone ID: 700996210H1
gagaaagatgcagctgggatgtcgtgacatggaatggtggatgaggaggaggcagttgccatcgcgattaagacaaagagttcgccattttgaacgtcaaagatgggcagcgatgggaggagaagatgagatggaaatgatcaaagacttgccggaggggctgaggagggacatcaagcgccatctttgcctcgacctcattagaaaggttcctctattccacaacatggatgatctt

SEQ ID NO: 1194 - DNA, 241 bp, Glycine max
  unsure at all n locations
  Clone ID: 700996211H1
gnattggnccattatctatcgttaatggaagtggaagtagcacttccattttccattttgcatttcncagtagagtaggcaangccaaatccaaagggaacacgttnattcaattgcaattatttatattaattaatnataattnacaaattgtgtgtggccagnactccaatnnnntcnntcaactanncgacatggttttccattcncggnatctccnggcnagcntngtaccccagat

SEQ ID NO: 1195 - DNA, 239 bp, Glycine max
  unsure at all n locations
  Clone ID: 700996212H1
cttcactcttaactgtagaaaagaaaaaccgaagatgagcttgttncantgaggagagaaaaccgcacgctgtggttactccatatccagttcaaggacatgtgaaccctttgtttaaactagcgaantgcttcatctcagaggctttcacataacctttgttcacactgagtacaactacaagcgtttgctcaagtcaaggggtcctaatgcccttgatggcctaccagattttagat

SEQ ID NO: 1196 - DNA, 240 bp, Glycine max
  unsure at all n locations
  Clone ID: 700996214H1
ccgctcacggctgggattgcccgaaacatttgaatttgaggatatgagtgacacatattggacagacagggtcnttgacaatggtagtgaagcacaaccagcgcaaccgtgtcaaccaccacaaccagcacggagaaaccggaaaaaagaccatcaacttgttcctactgagccagggaagcctgttcaagttagtcgtaggccatattccaggaaacagtattctaacaacaatcacat

SEQ ID NO: 1197 - DNA, 240 bp, Glycine max
  Clone ID: 700996215H1
gcacactcaaaagtctaatggcacttgtaaagtctctaagtcggagaattctggtgcttcagaattggttcaaactgagaaaacagatggtcttaattgtgcattaacaattgaaggggtgcaaggcaatcagaattacccaagacatgtccctgtgcacgttgttgatgggaaccttggaactagtactcaaaatccatccccagatatggtgtttcaagactccatatttcagccgaa

SEQ ID NO: 1198 - DNA, 240 bp, Glycine max
  Clone ID: 700996217H1
gagaacttcaagtgagggtgagagtgacacaaatctagagagagcactagtactctaaaagtctattatattcttcaaaatatgaccatgcatcgcgagtcttgggcttttgtcttcggcgttatgggcaacatcatctcctttggagtgttccttgctccattgccaaccttttaccaaatctacaagaagaaatccactgaaggtttccagtcacttccttatgttgttgcactgttc

SEQ ID NO: 1199 - DNA, 249 bp, Glycine max
  unsure at all n locations
  Clone ID: 700996218H1
cnggcagctcacaaaactggaggtgaaggagattgctgacataatgctcaaagaggtgtttgatagactgaaggtgaaagatattgaacttcaagtgacaganagattcagggacagagtggtggaggaaggttatanccctagttatggagctagacctctaagaagagccataatgcgacttttggaggacagcatngctgagaagatgcttgccaganagatcaaggagggcgactctgttatagt

SEQ ID NO: 1200 - DNA, 243 bp, Glycine max
  unsure at all n locations
  Clone ID: 700996219H1
caattcttggatagtttgtatatggancaggacatggatgatgttgtgactaagacagcaattggcgtgcttggagatttagctgatactttgggcagtagtgctggccccttgattcagcaatctgtgtctagcaaagacttcctcaaagagtgtttatcatctgatgaccatttgattaaggaatctgccgaatgggccaagttggcaatcagtcgagcaatttcattttgaggctattgc

SEQ ID NO: 1201 - DNA, 244 bp, Glycine max
  unsure at all n locations
  Clone ID: 700996220H1
ccgatttctaagaaggaaccaccttttgttcccactttcctaagtntccttctcgctcccgtctctgaaatttcgagggtttcatcgttgctgaatcaacaattcggaaccagttagcaatgttcagattctggggatcacaagagcaacaatcacaggatggttcttcgcagtcacagtcgtggtatccgccgtcggtggtgagttcaccaacttcgtcgaggcctgttacaccgactgcatc

SEQ ID NO: 1202 - DNA, 241 bp, Glycine max
  unsure at all n locations
  Clone ID: 700996221H1
ttggatttantgtgaagaatgtngcagtcaaggatctcaagcgtggttttgttgcatccaactccaaggacgaccctgccaaggaagctgccaacttcacatcccaagtcattatcatgaaccatcctggccagattggtaatggatacgcaccagtccttgactgccacacttctcacattgctgtgaagttttctgaaatcttgaccaagattgacaggcgatctggtaaggagcttga

SEQ ID NO: 1203 - DNA, 241 bp, Glycine max
  Clone ID: 700996222H1
ctgtttttctactagagatctcttttctctagctagtgtaatatcattaatcaatggctggcactatctttggataccctttcagacacttcatctggggtcacccaccaattttcaaagaatggtccggctcaacagccctcttagattggctcgaatcacccactgcccacatcttaaaaattaacgttccaggattcagcaaggaagacataaaggtgcagattgaggatgggaatat

SEQ ID NO: 1204 - DNA, 188 bp, Glycine max
  Clone ID: 700996223H1
gaaaaaacaaaaagtccaaaccatggctcagaaaaccgagaaagaagaaaccgacttcaaggttcccgaaacgattacgctttgcgttaacaactgcggcgtcaccggaaaccctgctacgaataacatgtgtcagaagtgcttcaccgccttcaccacctctaccgccaccacgtccggcgccggag

SEQ ID NO: 1205 - DNA, 236 bp, Glycine max
  unsure at all n locations
  Clone ID: 700996225H1
cgcatgtggaggatttgctgagcaatcgtttcaaccnatggcacttacgtgtgatcaccagcttcaagaccgatcaactttcaaacacacggatgacattttcttgtacaagcgtaacttctgggactnagatacttggttttatgcctgtatgataatgaaatcatgtagcatctgaaatgctttaaccttgtagcaagtccagtacaaattgaatggctctgtggtgtttttgc

SEQ ID NO: 1206 - DNA, 236 bp, Glycine max
  unsure at all n locations
  Clone ID: 700996227H1
cngagaacagcatctcggggaaaagggtcaccgaaggagagcttgtggaagacttagtgattaatcgctctcacgagcttctcttcacttgctcacccactcttctcttgaacggtttagctaccggtgccaaaggcatggtaggtcttgatcgatctcgcacttctttttcgtctcaggtttttcactcacttggaactcagagaaaaatcactctttgtctctcttcctcttct

SEQ ID NO: 1207 - DNA, 237 bp, Glycine max
  unsure at all n locations
  Clone ID: 700996228H1
cgnttatcctaagtctttgggaatagtgctgcaatggcttcaagtcaggaggaggtgacccttttgggagctactggaagcccatttgtgtgcagggttcatattgccctcaagttgaagggagttcaatacaaatatgtcgaagaaaatttgaggaacaagagtgaactgcttctcaaatccaacccagttcacaagaagattccagtgtttattcacaatgagaagtccatagca

SEQ ID NO: 1208 - DNA, 235 bp, Glycine max
  unsure at all n locations
  Clone ID: 700996229H1
atnatttaaaagcangaactcggcaangtaattttccagctgnttatcaaaaacatagtttattgtanttataataaataactcctgctcaatgtgtaaattactagccgcagnatactgactgtgctaaggtagcataatnattagttttntaatnaaaaactagaatganaggnaaaatgaaaaaaaaactatttcaaattaaaaattagaaattagaacttaagtnaaaata

SEQ ID NO: 1209 - DNA, 238 bp, Glycine max
  unsure at all n locations
  Clone ID: 700996230H1
cttccagagaagacgacaacnagaataagaagaaaaagaagaaaaacgttgttaagtccgaagaaaaggaacagcctttggtcacggaggctaatggagaaaagaaggaggatcccaacgcgctttccaacttcaggatttcggaacccttgaggcaaaaattgaaggagaagggtatcgaatcactgnttcccattcaggccatgaccttcgacaccgttctcgatggttctgattt

SEQ ID NO: 1210 - DNA, 239 bp, Glycine max
  unsure at all n locations
  Clone ID: 700996231H1
cgnaaaaaaaaaccctaacgcactcgagaccctgagatttttcatcttcgtttctcattctctttttgatcatggacgtcgaggtccggcagatcttcaacaagttcgacaagaacggcgacggaaaaatctcggtaacggagctgaaggacatgctcgnggccctcggatccaaaacgacggacgaggagttgaaacgcatgatggaggagctcgaccagaacggcgacngtttcatc

SEQ ID NO: 1211 - DNA, 240 bp, Glycine max
  unsure at all n locations
  Clone ID: 700996232H1
gaagacgttgatctcgctgtcgcngccgccaaagctgccctctcccgcaacangggcgccnattgggcctccgcttccggctccgttcgggctcgctacctccgcgccatcgctgccaagatcaccgagaaaaagcctgaactagcaaaactcgaagctattgactgtggaaaaccgctcgatgaagccgcctgggacatcgacgatgttgctggttgctttgagttctatgctgacctt

SEQ ID NO: 1212 - DNA, 202 bp, Glycine max
  unsure at all n locations
  Clone ID: 700996233H1
cttttcctccacaaaatgatgcnccanaatcaagagggttcccactgtcgtttccaactaccaaaaagacgacgctgcagactctcctcgtcccgtcggaggttgtggtcggaattgcctcaaagcttgttgccttccagatgcaaagctgcctttgtatgctttcaagaaggctaatggaaaggatttggccctgcatgca

SEQ ID NO: 1213 - DNA, 128 bp, Glycine max
  unsure at all n locations
  Clone ID: 700996234H1
cccctctttcctatcacactttctagntagctagccaaccagagtaagatctaaagatatttcttatatatcctatggtccgagagtgcccttgttctgcgccaaccctttcttccacacaacatacg

SEQ ID NO: 1214 - DNA, 239 bp, Glycine max
  unsure at all n locations
  Clone ID: 700996235H1
gcttgcttctgttccttgtagttgaagtcgctccccctcattcttccttttctacttgccactgtttcctattcgtcattgccgcaaatgaattccgtcgcttctcatgcatgatcgcaccttcaactctcttcttcttcaccatggctttacttcaagtagcatcaccttatcatcagcttctgcttgctttcaccacaacggnctcactcctggtgtgttccatgtcacanaaaacg

SEQ ID NO: 1215 - DNA, 231 bp, Glycine max
  unsure at all n locations
  Clone ID: 700996237H1
ccttcttccattaccggcgaacgaaatcggtgacagaaaagcaacaagcaatctccntccccaaatcgtgaaatccgatgacgaccgctgcaagacccacatgggcacctgctaaaggtggcaacgaacaaggtggtactcgaattttcggtccctcacaaaagtactcttctagggacatcgcatcgcacaccactctcaagcccaggaaggaagggcaggacacacagg

SEQ ID NO: 1216 - DNA, 238 bp, Glycine max
  unsure at all n locations
  Clone ID: 700996238H1
cagaaatagaatcatctctctgtctagggtttcattctttttcagctttatttgttctgtagatccatctagcttcggtgctgcaaatggacgtcgcagtcactgccgttcggtcaccgctgatcgtcctgggaagtncggtcaacgggtccgcctcagctcggttgggttccacttttgggttttccagaaagctatgcttgaattcagtatttatcccgaagcaagttcgtagaag

SEQ ID NO: 1217 - DNA, 238 bp, Glycine max
  unsure at all n locations
  Clone ID: 700996239H1
cgnataataatattgggaaaganaatganagtnccaatgttggggcttttgatgtaaataggcttcagaagcttaaaggaaaaaaagggaatgggaacgggaagaagaaagatgctcttgttgttgctgctgccaagggagagcccaaaaaggtggataagccaaacagggtttgggatcaaccggcgccgcaaaccaaactggactttactgatcacgtggatggagatggggatag

SEQ ID NO: 1218 - DNA, 235 bp, Glycine max
  Clone ID: 700996240H1
ttagttcaagccttcaagcacaaaaatgataaccattgtcgcttcttacaatgtcactccaaatcagccaactcccagtgatcctatttggctatccgatagtgatcaaattgggaacctacgtcatgtaaacactatctatgcctacaaatcaagacccaacaacaccattgatattgagaggatgaagaactctcttagcaagattttggtgccatactatccaatagctggc

SEQ ID NO: 1219 - DNA, 234 bp, Glycine max
  unsure at all n locations
  Clone ID: 700996242H1
cgngaactctttgtcttcggggatccattccgttggttgccaagagatagatactgcaagcaatatcagtaaggataaaattttggacagaacaaacaatggtgagaatcagcaaaggcctaaacggaaacagatggaagatgatctcgatattaacgtggaggcaacgtttcagagagacctgactgtgaaagccgtcaactgtcagctacctaatgataaaaaagttaagca

SEQ ID NO: 1220 - DNA, 231 bp, Glycine max
  unsure at all n locations
  Clone ID: 700996243H1
ttcatttcacttaaataaatgagtcacttagctaccatcacctacgagcgactcatcatcttcttgaactcttcgaaattnacgttgccgtcgccgtcggcatcgacgtttccgatcatcctccggcagtcactgagggancacttctcccccaacctccgcatcacggagtgcagctccttcgccgagatcagcccgttcttgtccagatcgtacagctcgaacgcctcc

SEQ ID NO: 1221 - DNA, 232 bp, Glycine max
  Clone ID: 700996246H1
cttaaattgcagcaatcttcgtctctgatccatggcttacgttgagcgaggtgttgtcaaatcaaagcgatcaatatggcgacttaaaacaatcactgattttttctgggccattgttaacttcataggcgtgtttttcgcaactatgttctcgatggaaaagtcagatgcgtacagaaaacgttctgtgggtaagaaatgggatggcggtgctcctggaggaggtcctggc

SEQ ID NO: 1222 - DNA, 234 bp, Glycine max
  unsure at all n locations
  Clone ID: 700996247H1
ctccaattgacaaagaacttaaaaaggttgctcagaagactgctgcnacctttgcaccaagggcttccacggctacaaaaaaccctgcagtgcctggnactgttttgtacagtgtttttgaggttcaagggtatgtttcaatgttgttgggaggagctttgtcttttaatctcatattcccttctgatgaacctgacatttggagattaatgggaatgtggtccatttggatgt

SEQ ID NO: 1223 - DNA, 246 bp, Glycine max
  unsure at all n locations
  Clone ID: 700996249H1
cntgatattcaatctcgctctagattggcaaaccntttcctctacaanagcacaatttgttngtggaaaanccttcccatatgatatacttggtgctggttcaccttcttcagaacgattttcctggaaagggagntcangaaancacccaaaacgnttgatacccgattgaggccangaatagatcctcaatacatgaggttcnggctcagatggcnacnntttgtttaacttgtctcttgatga

SEQ ID NO: 1224 - DNA, 235 bp, Glycine max
  unsure at all n locations
  Clone ID: 700996253H1
cttagtcttcctggtgacaatggatttgnccctctggggctagctgaggacccagagaacttgaggtggtacgttcnagccgagcttgtgaatggacgttgggccatgttgggtgttgcaggaatgttgcttcctgaggttttcacccngtttggaatcatcaatgcccctcaatggtatgatgctgggaaatcagagtactttgcatcttcctcaaccctcttcgtgatcgagt

SEQ ID NO: 1225 - DNA, 235 bp, Glycine max
  unsure at all n locations
  Clone ID: 700996255H1
cnacctcaccaaaggnactaagaatttcattgaggctagaganagtngtgatcaatatgtcaaagaatccaaaagttcttctttgatattctaattggnaagatgaaagcnggacgagtagtgatggagtngtttgccgatgcaaccccaaaaacagctgaaaacttcagggctctctgcactggggaaaaggggattggacgatctgggnaacctttacactacaaaggttctg

SEQ ID NO: 1226 - DNA, 235 bp, Glycine max
  unsure at all n locations
  Clone ID: 700996256H1
cacaatgtaccaaccgccaaattattttggaccaacaacaactacagtatcgtttatgtaacgaacaaaccaagaaaacttgaaaganaaactagtgggaggnacgagaggcagaagagcagagagagaagtgttcatggatctgcgttgtttgaaaaccttgacgagagcgcttctcgcacgtaacctgtgtttatggttctctgtgttttctgtcacttgttcatgtccattt

SEQ ID NO: 1227 - DNA, 230 bp, Glycine max
  unsure at all n locations
  Clone ID: 700996257H1
cgatgattagcacttgtacttatcctagcaanttccagagagttaacaacagcgtgctctttctgaccttgnntactctcttcatttgagtcgtggcttcgttgaattgaggttcttgcagcgnccgaggctctcccgttttgagtgttttggtatgcngaaggtgcncggtgactagagctnactctttctcgctggattctgctccactttcagtgtaggaatggttc

SEQ ID NO: 1228 - DNA, 230 bp, Glycine max
  unsure at all n locations
  Clone ID: 700996261H1
catcaaccaaaatggggttgtacaagatttcattatgtctattgtgtgtgttggggttagtcattgtgggtgatcatgttgcgtatgctcaagactcaccaacagactatgttaatgcacacaacgctgcaagatcacaggttggtgttccaaatattttgggataacgcagtcgctgcttttgcacagaactatgctaaccaacgcaaaggtgactncaaactcgtcca

SEQ ID NO: 1229 - DNA, 233 bp, Glycine max
  Clone ID: 700996263H1
caacaacaactatctctcatccttcttctttctgtatccgtaacacttgcaacacacatggctacaatcaccaacactttcatattcaaaccccccatctctcatcacccaaagcagcttctttattcccaccgctcttctctacgctttctcaccaaatttaaaaccccctccggagcgaattctcggcggctggttccgaaagccacggcggctcccggggccaagaagac

SEQ ID NO: 1230 - DNA, 235 bp, Glycine max
  unsure at all n locations
  Clone ID: 700996264H1
caacatcaaggttcctctcattcttngtatctggggaggcaagggacaaggaaaatctttccaatgtgagcntgtctttgccaagatgggaatcaaccccatcatgatgagtgctggagagttggaaagtggaaatgcaggagagccagcaaaactgatcaggcagagataccgtgaagccgcagacttgatcaagaagggaaagatgtgtgctctcttcatcaacgatcttgat

SEQ ID NO: 1231 - DNA, 240 bp, Glycine max
  unsure at all n locations
  Clone ID: 700996266H1
ctaccctcaacatagtaaagcagctggtgcaagtnaagcaatggcncaaaccatgttgctcatgtctagtgtctctagcagttattccgtggatttgaagaaagaccttttcctccaattgcagannnnaagtttaaggcctaagttctctcaactctcattcaacccacttccaccatcaacttcttngnnttcttcaccccgtacattcacaaccctggctctcttcaaatctaagac

SEQ ID NO: 1232 - DNA, 237 bp, Glycine max
  unsure at all n locations
  Clone ID: 700996267H1
gatcaccaaagtacttgtgagtgtatacccaacacaaactaagatcaacatggactactacacccgcgtttcagaagttgagagggaacctatcatggagtattccacaccacgaccaatgatgggcaactaccaccaccctaatgctcaccgtgtcctcaacgagaagattgtttatgacgaggatgtgattggaggatcccgccncaaccacatgcatcaccaccaccctgagat

SEQ ID NO: 1233 - DNA, 235 bp, Glycine max
  unsure at all n locations
  Clone ID: 700996268H1
cacatttccacacaagacgtcagccgcggtggtgtcgcagacacttctcatcgacaccaacaccccagctatcaacgctgcgcccgtagagctagacggtgtacccatggcgggcatcaccaacccaggggatganggggacaaggaancgagatttctgagtggagaggcgagagtcggggcgggcgaggcacgttccatgcatcccgtgcacaccaaactcttcattatattg

SEQ ID NO: 1234 - DNA, 234 bp, Glycine max
  unsure at all n locations
  Clone ID: 700996269H1
ctactgtggtcactcgtaaacagtaggcacagccacaccccaatgnctttctccattctttccatcttcaagggataagcttgtcttcccaactcacagaggtttcaagaaatccttgcaaaactcaacactgtcatgcccttctctttactcaaccggtgctgcctatagaaagtcccgttttgtttgcaatgctcgtgaagcagtaaatgaagttaaagtggtgactgactc

SEQ ID NO: 1235 - DNA, 234 bp, Glycine max
  unsure at all n locations
  Clone ID: 700996270H1
cttccttgcaggcaganaggaagangcttcaagaagagctcacacaaggngcttcagccaaganagaacttgaggtggctagaaacnngatcaaggagctacaaaggcagatacagcttgaggctaaccaaacgaaaggccagttgttgttgcttaaacaacaagtttctactctactggtgaaagangaagaggctgccaganaagntgctgaagttgaaaagaaattganag

SEQ ID NO: 1236 - DNA, 231 bp, Glycine max
  unsure at all n locations
  Clone ID: 700996271H1
ccgtgacttactacatctaatttcatttgcctcttttagtagccatggttttccaaacaaacaataatcctcactttatcttgtttcccttaatggctcaaggccatatcatccccatgatggacatagcaagactattggctcaccgtggtgtgattgttacaatattcaccacnccaaaaaatgcatcacgttttaattctgttctttctcgtgctatttcatcaggcc

SEQ ID NO: 1237 - DNA, 202 bp, Glycine max
  unsure at all n locations
  Clone ID: 700996272H1
cngaaatcatagagtatctaagagcaacatacgctctttagtaagtgatgctatgatagggagaggcttgtaagggtttttaagtctcatgatatgcaccttcatttccttttgtaaatgtaattgcnaatggttctaagttctaacgggtaaatcaaattttctctatatagaaatttcaaatagtggaatcaagtgcctc

SEQ ID NO: 1238 - DNA, 226 bp, Glycine max
  unsure at all n locations
  Clone ID: 700996273H1
tncgactcgatncangnacggttntcaccaccacaactgtgtnnaagatnntgcaggaanccttaggnccttccctacagagtatgatatctctttcacaagcgctggtgtcnctgggaggttggataggtacatgtctagcagggaattgatggattcggttgagagagaagaagggtgtggtggacacactgctgtggaggtcaaggatggaaccttcagctgg

SEQ ID NO: 1239 - DNA, 227 bp, Glycine max
  unsure at all n locations
  Clone ID: 700996275H1
tttgcttaggccattggtcatggcaactcgaagactttcattgctcctctctcgctctctatcttccacttcttttcaagcttcnttctctacttcactcactagggagaaactctggcaagtggggaaactttaacagattcagcactgcagcagcagttgaggatttaatcactccacaagttccaataacntacannngnnntctgataaatggacaatttgtg

SEQ ID NO: 1240 - DNA, 228 bp, Glycine max
  unsure at all n locations
  Clone ID: 700996276H1
cttcactgtgcagatgccaaatagcagtccaccaagaatgctatggggcaaagaatgttcaggattttacttcttgggtttgtagagtatgtgaaactcctgatgttgagagagagtgttgcctctncccagtaaaaggtggtgctctaaagccaacggatgttgaaatgttgtgggttcatgtaacatgtgcttggtttcgacctcaagttgttttccaaaaccatg

SEQ ID NO: 1241 - DNA, 228 bp, Glycine max
  Clone ID: 700996277H1
cggaagacaattcataggattttgaaagtccagtactcaattcctgattatgttcatatatctcccgagtgccgtcatctaatctcaaggatctttgtggcagaccctgcacagagaataagtattcccgagattcgaaatcacgagtggtttttgaggaacctgccggctgatcttatggtcgagaacacaatgaacaaccagtttgaggagcctgatcaaccaatg

SEQ ID NO: 1242 - DNA, 227 bp, Glycine max
  unsure at all n locations
  Clone ID: 700996278H1
tgagttcagttaaagatcaaggcagctgcggatcatgctggacattcagcacaactggggctttagaagcagcctatgcacaagcatttgggaagagtatctctctttctgagcagcagctagtggactgtgctggccctttcaacaactttggctgccatggtgggttgccatcacaagcctttgagtacattaaatacaatggtggaccngagacagaggaagca

SEQ ID NO: 1243 - DNA, 231 bp, Glycine max
  unsure at all n locations
  Clone ID: 700996279H1
ctcacaacaatattgtttcatcactcagatcccttaaagatgacaacagcagaaganacttcaaacttggatctcatacgccaacacctattaggggaaaatatcatctcagactcctcctttttctccaatctccttcatcatcctatgaaacttgaagcaccctcatcaccagaatttgatttcacctcatatatctcagacaacacaagctttttcactttccttgaa

SEQ ID NO: 1244 - DNA, 254 bp, Glycine max
  unsure at all n locations
  Clone ID: 700996281H1
ctnaanctgctcgatcnggtnttgctcgagccgaatcggctcgagaagcaatacagcttgcccccacatgagtgtggataacctggacctgtgttcaaccccttgaactttgcanctactttggaggccaaggagaangaacttgccaatgggagattggctatgttggcattcttgggattcatagttcaacacaacgtgacaggcaaaggaccatttgagaacctcttgcagcacctctctgacccgtggca

SEQ ID NO: 1245 - DNA, 236 bp, Glycine max
  unsure at all n locations
  Clone ID: 700996282H1
ctaactgggtttgggatgaaagtnaccctttgtatcagtcaaaagattgcagcttccttgatggaggatttcggtgttctgagaatggaagacctgatttgttctacacaaagtggaggtngcaacccaaagcttgcaacttgcccagattcaatgcaacaataatgttggaaacgctgcggaacaaacgcctagtgtttgctggggactcaattggtagaaaccaatgggagtca

SEQ ID NO: 1246 - DNA, 233 bp, Glycine max
  Clone ID: 700996283H1
ccaattcttggatagtttgtatatggagaaggacatggatgatgttgtgactaagacagcaattggcgtgcttggagatttagctgatactttgggcagtagtgctggccccttgattcagcaatctgtgtctagcaaagacttcctcaaagagtgtttatcatctgatgaccatttgattaaggaatctgccgaatgggccaagttggcaatcagtcgagcaatttcatttt

SEQ ID NO: 1247 - DNA, 149 bp, Glycine max
  unsure at all n locations
  Clone ID: 700996284H1
aagacgtggaggctagctacactgtgtagctgcttgatggatgtcaaaaaatgtgaaaccaaacatgctctataagtnacttttaattttgacaacttatgtatggttatatgcctttgatagagtatatcattactccacacacatnt

SEQ ID NO: 1248 - DNA, 230 bp, Glycine max
  unsure at all n locations
  Clone ID: 700996285H1
cgaactatattcagaccaaatgcgtggttaancgcaaaggcaaagaaacagctgctgaaactgaaaccttgtgttttacaaagtccaaggataacaataacatgtgcgaccgccacagcggaaaacgctaccctttgttgtcgttttgggagctgccggaatacatgaaggacaacgaatacattctacgttattacagagccnttggcctttcangcaagnnctcttca

SEQ ID NO: 1249 - DNA, 229 bp, Glycine max
  unsure at all n locations
  Clone ID: 700996286H1
cnagcttgttgacaccttccctggccaatccattgatttctttggtgcactgagggccagagtatatgatgatgaagtgaggaagtggatttctggtgttggtgttgacagtgttgggaagaagcttgtgaactcaaaagatggacctccaacctttgagcagcccaagatgactctggagaagctcttgctgtatggtaacatgcttgtccaagaacaagagaatgtc

SEQ ID NO: 1250 - DNA, 229 bp, Glycine max
  unsure at all n locations
  Clone ID: 700996287H1
ctnaaatgggacttgggactctgccactgaccccttcttacagcagnntctcttcaaagtcaggagggcttttacatgacatcaccaatcacagcagggttaatagaagcatgaaattcagagtttcagccaaacaagagaagcaagaagagaagaaaaagcaatcttngttcagcagtgtgactgaagctcttgatttttctcaagtgagatctgctgaggatgctca

SEQ ID NO: 1251 - DNA, 224 bp, Glycine max
  unsure at all n locations
  Clone ID: 700996289H1
cgcctccgaaagangagaagggtcctcaaaatcgcacaaaggatggaaactctggggaggacttcagtaaagattctattgagcgcgatgaaaggcgtctcacagaattaggtcgcaggactttggaaatatttgtccttgcccatatattcagcaataaaattgaggtttcctaccaggaagctgttgctctaaagagacaagaagagctcattcgtgaagaa

SEQ ID NO: 1252 - DNA, 203 bp, Glycine max
  unsure at all n locations
  Clone ID: 700996291H1
cnngatnnncanncataaggtccatngaacttgttgattcatctcacagtatcctcctgtattgactctccaaaaatatggaatgtatgttctggtggtaacatcttgtgttgcaaggtggatggaaatgagaagtttgctttatttggagggaaaggtgttgaaatgaatatttgggatcttaacaacttcactaagatctg

SEQ ID NO: 1253 - DNA, 226 bp, Glycine max
  unsure at all n locations
  Clone ID: 700996294H1
ctcgcagaaacgtattgtttttctctctttccgcggcctagatctgnncagtttggaaaccctaactgctctcaccaacgacatcaccactctctccgatcaactacctctttcgtcgccctaagtcatggcaggaattgcacccgagggatcacagtttgatgctcgtcaatatgatacncngatgaatgagctgcttacgtccgatggtcaggatttcttcaca

SEQ ID NO: 1254 - DNA, 228 bp, Glycine max
  unsure at all n locations
  Clone ID: 700996295H1
cggaacaataggcggcagtttacatcccccagtaacttccatgctgatggggtgaatgacttatttagctctcaggctgtaatagaaaacacacgagcaaatganattttgaaacaggcccctttcttgataccatttacaagcagggttaaaatattctcttctcaactagctgctgttaggcaaaggcatggacctcaagctgtattttctagaaatcgattcagg

SEQ ID NO: 1255 - DNA, 229 bp, Glycine max
  Clone ID: 700996296H1
gcaaccttatcaacatcctttacctcttaatttttctcatcagtttaaaactactattcttcagaaaaaggttaaaaaacccagcaccaagtccaccatctcttccaataatcggaaacctccatcagctgaagaaacagccacttcaccgagccttgtacgacctctcacagaaatatggccctaataatatcctctctctgcggttcgggtcccaacccgtcctcgt

SEQ ID NO: 1256 - DNA, 276 bp, Glycine max
  unsure at all n locations
  Clone ID: 700996301H1
ttatcaagagatgcaganaatccaggaaacaatttgtatgtnacaggattgtctcctaggattaccaaganagaactggaganacattttgctgctgaaggaaaagtgatagatgtccatctggtagttgatccttggacaagggaatcccgtgggtttggctttgtgacaatggagactcttgaggaggctgaacgatgtgtaaagtatctgaatcgctctgtacttgaagggcgtgtcatcacggtggagaaggtataatacttacctagcaat

SEQ ID NO: 1257 - DNA, 202 bp, Glycine max
  Clone ID: 700996302H1
tgattgaagaagatgccgatcagaaacatcgccatcggaaggcctgaagaggctactcaccccgacacgttgaaggcggggttggctgagttcatctccaccttgatcttcgtgttcgccggttcaggttccggcatcgcctacaacaagctcaccgacaacggcgccgccactcccgccggcctcatctccgcttccatcg

SEQ ID NO: 1258 - DNA, 272 bp, Glycine max
  unsure at all n locations
  Clone ID: 700996303H1
cantcttggtattgtcaagcacgtggatgccaagaatgtcaccattcttgaccagtcaccccaccagcttcgccaaggccaancagaaggagccactcaangaatgcaaaataatcgaaggggatgccgaggatctcncctttcgaactgattatgccgatagatatgtatccgcangaagtattgagtactggccggatccacagcgtggcatcaaggaggcatacagggttttgaaacttggaggcaaagcgtgtctaattggtccggtc

SEQ ID NO: 1259 - DNA, 270 bp, Glycine max
  unsure at all n locations
  Clone ID: 700996304H1
cttttccgctcccgtagganatcgaagatttataattccaatcatanatagtaatcgtaacatcgtagtataatctgattcatcaacagcgcttgtcggaaacagagtcggtttagtttgttagttagttgtttaatgaacgcaattcggtcccgttggttgacgagaatggcagaagacattgggaaaagcaacctcgaatcctcttctgcttcaacaacttcccgaggcttctggccttctgtcttacgttggatcccctcttccacc

SEQ ID NO: 1260 - DNA, 266 bp, Glycine max
  unsure at all n locations
  Clone ID: 700996305H1
cntcccacaaacactggcatgcntctttgaccacaactgcttcttcnnttcccaatctttttggacaccctctattgctcttcctcccttggtgtagtttgtgtaaaagggtatctctatttatagagtttccattgtctctggaggcaattttcgaccttaggtgtgttttggagagtttttttttttttggtgtngttaantnnttgaggttggttggtttntnaaananaaaatggtgggtncncnanctnttgtgggannat

SEQ ID NO: 1261 - DNA, 264 bp, Glycine max
  unsure at all n locations
  Clone ID: 700996306H1
ccaagatttggctttgtgtctttgtgtgctcatttttcactaaacaccaacccaacctcatacacaaacatncttaattttgattttttgttattattttctttgtttgtnaattacttatattaagcatcatgggaaccccacaatccaataacttgccaccaggttttaggttccaccctacagatgaagcgctcattcttcactacctaaggaagaaggttgcctctattcctttgccagtttccatcatagctgaggttg

SEQ ID NO: 1262 - DNA, 263 bp, Glycine max
  unsure at all n locations
  Clone ID: 700996308H1
cnactcgttaaagtgcgttcggagttgttgaaggttggagagagtggtgttgactgaatccataaccggttcgggaactccgaacgcactttaacgagtttttgtctctctccgaccctcaaaccctctcccaaatgccccctcttcaacgggctcattccctcttcntcctcgccaaagtcacatctacccttcttgcattgaacctaaggtgtaccggggtccacccagatgatcatcccatcaaatcagagcttgatagg

SEQ ID NO: 1263 - DNA, 262 bp, Glycine max
  Clone ID: 700996309H1
ggagaacagggtaatattacaggaatggtttgaccgcgttgactcggagaaaagtggaagcataacagcggtacagctgaaggtgagactgctcttgctgtgggcaacctggaatttccgctctcagttgttcagcaaatgatcaggtgagctgaccctcggatccatcttcttcttctctattttaacttcaatttttgttttcccttaggatgtacgatttcgacaggaatggtactatgagctttcaaggtatctctaa

SEQ ID NO: 1264 - DNA, 261 bp, Glycine max
  unsure at all n locations
  Clone ID: 700996311H1
caaccatgcgctccaagaatgaagcgctgcagaccgcccacgcgcgcgcagaagccgacctcgccaactttgaggcccgtgaagctgtgctgaagaagaaggatgtcgaacgtaaganagttctggcagagaagcncaaggccgagcgccagaaccgccagcagatgatgggcgagcgcgagaagaaccgacagcgcaantncaacgcgcaaggcggcagggagtgggnttttgaaaaagaggagggcttctcaggtactg

SEQ ID NO: 1265 - DNA, 264 bp, Glycine max
  unsure at all n locations
  Clone ID: 700996313H1
cncataattcattttacacctcagattaccagtatagtccacagaacaataacantgatgtacaggatatggcatataagtttatgaaaggtataccaaaccttgtaaagatanttgangttggtccaagggatggattacaaaatgagaaaaacattgtaccaacagatgtaaagattgaattgattcatagattggcatcttctgggttatccgtcattgaagctactagttttgtatctcccaaatgggttcctcagttgg

SEQ ID NO: 1266 - DNA, 267 bp, Glycine max
  unsure at all n locations
  Clone ID: 700996314H1
actcttcttctcaccgtcgcaggcgtcaccaccgccatcgccgataccgtgataaggactccctcaagattcgaaagaagagcaagtcccaatcccaatcccgcggagaacgacgccgtaggatcaccgccactcttccgattccgattcctattcttcatcttccctctctgnttactccagaagtgaaagttcttctgatagtgagcatgaaacatcttcaccgttcaaagaggcataaaaagagtgacaggccaaagaagaatt

SEQ ID NO: 1267 - DNA, 272 bp, Glycine max
  unsure at all n locations
  Clone ID: 700996315H1
ccggcgtcgccattcgctcatgggcatgcttcagaatgttaacgcttctgggagttcccagntgttatcgacgcatcccgcgattatatccaattctgcagtgaatcccatggttgttcaacctccaggtgtctcttcacatgccgctccttcattttcatataatattccccaaagtggtgccattttttctagcaaccagcagcatgcacaatctagcantctacttcatggntgccaactgccctgtcttttcctgtgcatccagtaat

SEQ ID NO: 1268 - DNA, 265 bp, Glycine max
  unsure at all n locations
  Clone ID: 700996319H1
tttcatcattctcatatcctcaatcaccccccctcgcantcgntcttcccttcctctggtggcgacaatgtcgactcctgctaggaagaggctgatganagacttcaagangctgcaacangatccgcctgcngggatcanttgtgccccccaggataacaacataatgctgtggaatgctgtcatatttnnncctcatgatactccatgggatggaggcacgttcaagttgacactccaatttactgaggactatccaaataaa

SEQ ID NO: 1269 - DNA, 232 bp, Glycine max
  Clone ID: 700996321H1
ctatctccgaatcaaccgcataagctatgtaccaagatgctttccatacactatttgtttctcttatttctatataattaattatgccctcttatccctccattccttgattctctctctcacaaatggaagcaaaattggttgcacagtgcaatagtccaacactaactttagctcactggaaactaaaacaaccttgtgtggttggagtgctggcaaggcctgctgatga

SEQ ID NO: 1270 - DNA, 262 bp, Glycine max
  Clone ID: 700996322H1
catatattcctagttgatattatctatagatggagccaattgaacaaggaagccaacctgaaaaggaaaaatggaaggccaaggccacaacagaagtaaaaggcgccaaagcagaacaagtttggcctcttttggaggatttctttggccttgacaagtggttccccaccctctctacatcccattccagttgaaggtatctctggccaacctgggtgtgttcgcttctgcgctggtttcaagacccctgtggatgatggca

SEQ ID NO: 1271 - DNA, 261 bp, Glycine max
  unsure at all n locations
  Clone ID: 700996323H1
ccgaagcaccacccgttgtggttcccgtttccccatcagatactctcaccatgttctntcaggcagagggaacagtgagtgaaacagctattccagctttgaccaaagctttagaggagacagaaggtgttacagatttgaaggttcagcttgctgaaggacttgcaattttagagttgaagaagcagacaacagtccaagctacaggagtggcttctagtcttgtagaaaccatacaaggttcaggctttaaattacaga

SEQ ID NO: 1272 - DNA, 262 bp, Glycine max
  unsure at all n locations
  Clone ID: 700996324H1
ccncagctccaagttgagcctcattcccagagccgttgattcttccaccgcacaatcttccgtccgtttccgacganggcttctccgtttctaagctttcatttggtgtgattggtctaggtgttggactctcactcttgtcctacggttttggggcatattttaatattctccctggatctgaatggtcagctataatgttaacttatggcttccctcttgcaattattggaatggcactcaantatgcagaactcaagcc

SEQ ID NO: 1273 - DNA, 258 bp, Glycine max
  unsure at all n locations
  Clone ID: 700996325H1
cngcaatgtagagtaacaatgaaaaactgttaganaatccgtatcttcaaatgtgtggcatacttcaactggcaaatnatctggggattgacctatgatcttcaaggcgtgactttctgggagattgttatacggggtaggacatctgcatcggtttgaggaattattgctattgnttctcagggaaaacttccattattcgattggctcagattgaaacgcctatccaggacatactctagtttgaatgtttcattc

SEQ ID NO: 1274 - DNA, 259 bp, Glycine max
  unsure at all n locations
  Clone ID: 700996326H1
gnaatttgtcgcttttgtgtttttctgcagatgtctcggtgggaagtagttgatgttcttgttcttgttnttgattcgtgaaagaagaactgaaagcatgaagctctccttctccgtcccatnatccaaaccccactcgaagcccaaagccgtctccaacaccttcgacgacaattccacctcccaaaacgacagccggcggaaccaaatacctcatcaccgaattcgacccttccaaacccgctcccacctccgtnct

SEQ ID NO: 1275 - DNA, 258 bp, Glycine max
  unsure at all n locations
  Clone ID: 700996327H1
ccatgggatccctacaagaatcggcntngcaagcgccttcaattctcccttctggactacaaattccgnngctcccatctggaacaataactcatcgctgactgttggatctagaggtccaattctgctggaggattaccatctggtggagaagcttgcaaactttgacagggaacggatccccgaacgtgttgtccacgctcgtggagctancgcaaagggtttctttgaagtcacgcatgacatttctcacctcac

SEQ ID NO: 1276 - DNA, 258 bp, Glycine max
  unsure at all n locations
  Clone ID: 700996328H1
accaaagtttcccagaccagttgagataaacttgatggctatatcactccaaaaagttggaagatacggggaagttggatggagctaatagaattcagaaaatggttttctttagcttgcaatgcatggcaaaaggcgggangcatgatcatattggagggggatttcacagatacagtgtggntgagtgctggcatgttccacacaacatacgacgngnnntnatactgtntntgtnaaancnccctacaatattat

SEQ ID NO: 1277 - DNA, 113 bp, Glycine max
  unsure at all n locations
  Clone ID: 700996329H1
aaagggtgtgaaggncantataatcancacacccntnaacgaanccttttcatntacaacggccattggaaaatncaaaagctantggcaacaanatncacatcccanacnat

SEQ ID NO: 1278 - DNA, 266 bp, Glycine max
  unsure at all n locations
  Clone ID: 700996330H1
ccnctcttcggtcntctantccngggtcttcttatcttgnttgctcnagtccctcagtgttgcacgaatgaaatatgtagctggcgatgatttaccagctgttacgcctgctcgaaangacactcgactgaancactcttttccttttcttgaatcactgaatgagattatggaaacaaacagaagtgaggnatctcagagtcatgtgcacaggttgtatttccatggcccaaatacattcagtgaaccttggcatctacttcatt

SEQ ID NO: 1279 - DNA, 268 bp, Glycine max
  unsure at all n locations
  Clone ID: 700996331H1
caaagagaagcattagcactaggagcagcaacaactagtctcagctgaaatgggcctcttcagtgatggcatctgtggccctcaaacctgcccctttcactgttcagaagtcctcagtgagaggccttccctctctctcaaggaactcttcttcattcagagttgtggccagtggcaagaagatcaagactgacaaaccttatggaattaatggtggcatggctttgnnggatggaactgatgcatctggcaggaaaggaaagggaaa

SEQ ID NO: 1280 - DNA, 272 bp, Glycine max
  unsure at all n locations
  Clone ID: 700996333H1
ccnatgtgacnataaagatactgtattgtgggatctgccacacggacctccactatgcaaaaaatgaatggggcattactatgtatcctgtagtacccggacacgagatcattggggtggtaactaaggtggggaganacgtgaangggttcaaggaagganacagagtgggtgtggggtgtttggcggcttcatgtttggaatgtgagcactgcnagaccgatcagganaattactgtgaaaagttgcaatttgtctacaacggagtattc

SEQ ID NO: 1281 - DNA, 268 bp, Glycine max
  unsure at all n locations
  Clone ID: 700996334H1
ctgagactcgaggttcctctgtttcgtccccaggcttgaantgaanacaggttgtgattgtaatttgnaaagaaacatgctgaagtccatagtgggttgctgcaaggtgtacatatcagagagcagaaacagaactgcattggaatcaatagaacgagcttccaagntcttccctttggctccaataatcaacaagttcgaggatgtgacctacaacagagttggttacacccttgtctctganttgggtcattcagggccatgccac

SEQ ID NO: 1282 - DNA, 263 bp, Glycine max
  unsure at all n locations
  Clone ID: 700996336H1
cgaanaacgggctactgctagaatgcaaaaggagtatgctaaatcggatgcaatcaggaaggatttggctgtacttggtattactcttatggacagtccaaatggcacaacttggaggcctgccattcctcttccacttcaagagctgctctaagtcaagagttgttcaacatctccaaagcaaaaccaagaaatgtaagttactaggttctggtatatggaaatcaattataagggatgccacgggtgtatctcgctatcaa

SEQ ID NO: 1283 - DNA, 261 bp, Glycine max
  unsure at all n locations
  Clone ID: 700996337H1
cggaaacatgtcagcngtggttgctggttcctcctcttcattctctgccaccttcacccccataaggagcccctccttaaaaaactctcaactctctcattccaaggcactcacttcacctcaatgccaganaacatctttacaagggctctcacttcatgaagccaaaaggggtgtttcagaatccttcctagttgagaacaacaatggttcctccattgctggaaggagacttgagatcacagcacgaactgctggggc

SEQ ID NO: 1284 - DNA, 259 bp, Glycine max
  unsure at all n locations
  Clone ID: 700996340H1
gcttctctttttccacatgatactaatcctccaaggtcagtgattcagtagctgagaatctgagggcatcactaccnatgaatatgttgtagcaatgagagccatgagtnaagcacctgcaggagcatccgtagatgaggatttgccaaatatacttttctctccaacaggctcagccacaactggattgagtggaggaagttctcttggttngcagtataaaggggcttggtgtacccctcctagggtattcgtggat

SEQ ID NO: 1285 - DNA, 256 bp, Glycine max
  unsure at all n locations
  Clone ID: 700996342H1
cgtcacttatggaaccatcagcacaaggnggggatgtcatcatgagantgatggcaaggnactcaatgtcagacaggcttgcagaagacattgatgctgccatcaagaggatctcagatgaagcntatgaaattgcactggagcatatnaggnacaaccgtgaggccattgacaagattgtggaagtccttctggagaaggagactctgagcngagatgnaattccgtgctatattgtctgngtttgttgaaattc

SEQ ID NO: 1286 - DNA, 256 bp, Glycine max
  unsure at all n locations
  Clone ID: 700996344H1
cngagaggatgcaaattttgtcacaaaacagtggaaaaaggtgaagggaaggatgtctctgcacgttcactgccacattagtggaggtcattttctcttggatatattagcaaggttaagatacttcatcttctgcaaggagctaccagtggtgttgaaggccgtcgttcacggcgatgaaaacctattcaacagctacccagaattgcaagatgccttggtttgggtctactttcactcaaacattccagaattc

SEQ ID NO: 1287 - DNA, 259 bp, Glycine max
  unsure at all n locations
  Clone ID: 700996345H1
tcgaatccagagcagctaacanaataaaatatagttgcttgcnggccggtcgtcagtncagactagctggntcagngggggtaaganagtgttccgttagtgttctcacagtctcagtgcgaccttgcttggtcaacaatttggagagtttgcttctacacggaaacgaagactttcgagaacaaatattaaaccgggaagaaaaaaggggaaaaaaagtaaataaagtgcgcatatggcacgaaaaggaaatccgatt

SEQ ID NO: 1288 - DNA, 266 bp, Glycine max
  unsure at all n locations
  Clone ID: 700996347H1
cctttttcgaagaatttgaagttgggtatccacgaggatagccagaacaggtccaagttggctgatttgctcagataccactcaacaaagagtggagacgaattgacaagcttgaaggactatgttacacgaatgaaggagggccagaaggacattnactacattacaggaganagcaagaaggcagtggagaactctcctttcttggagagactcaagaagaagggctatgaagttctcttcatggtggatgcaattgatgagta

SEQ ID NO: 1289 - DNA, 268 bp, Glycine max
  unsure at all n locations
  Clone ID: 700996349H1
tccnatggtgaagctgaattggctcaaggtggtggagaagaagtgtcgaatttngacttcgacttgtttattattggngctggaagtngtggcgttcgtgccgctagattttcatccaattttngagctaaggtggggatttgtgagcttccatttcatccaattagttcagaaacaattggaggagtcggtggaacgtgtgtnattcgtggttgtgttcccaaaaagattttggtctatggagcatcttttggaggtgatcttgagg

SEQ ID NO: 1290 - DNA, 261 bp, Glycine max
  Clone ID: 700996351H1
ccgagaaaaggaaaccggttgctgttcctgccaataagagaactcgagcaagcaacagcaatggaggtccaatgccaccagccaaagctgggcgtttgactaatgcatatgtatcatctttccctgctgctcctacatttgtcaggtctccatcacacgggcaatacccagctgctcttccaccttacccttccccaccccacatgtatggcagcagaagtcccccgacaaatccttatgctgcttattcacctgagccgg

SEQ ID NO: 1291 - DNA, 256 bp, Glycine max
  Clone ID: 700996354H1
catgatttaatggatgtcaaactctggcaggtgcacactctcttgaaaggattggagaaaattgctgccagtgcagacattccaatgttggtttgtggggactttaattcaattccaggaagtgctcctcatgcacttcttgcaatggggaaggtagatccatcgcatcctgatttagcagttgacccacttaatatattgcgtcctcacagcaagttggttcaccagttgccactggtcagtgcttattcgtctt

SEQ ID NO: 1292 - DNA, 256 bp, Glycine max
  unsure at all n locations
  Clone ID: 700996355H1
cngggaagngcatatganagangatgcagttttggntganaatgattctgcaaacctggtcacaaagtcagaatgagttccatgatgaacaggaggcattaaacaattctagccgtgaaaactcctctgattttggagtagttgaaaggnaaagagtgaggcaaatattcagggnatggatgaatagtggttctagggatcatgcatcaaatcattcccaaggaaataattcaaggggagaatggcttggggaaac

SEQ ID NO: 1293 - DNA, 255 bp, Glycine max
  unsure at all n locations
  Clone ID: 700996356H1
cnggaaagcaagctctcattatattcttnggtggagtgtntcagtgaatgggggaattgcccctccantaaatttttcactccttccaaagccaccaccaaaggagaaagatgcatcatcttttccttgggtcaaggttgcagttgccatgttgtctgctttgacatttaccttgttgtgcctgtngtttattntgacacgctacaagagatacatgatatttganacccttgaggactgggagcttgattgtcc

SEQ ID NO: 1294 - DNA, 250 bp, Glycine max
  Clone ID: 700996359H1
ttactgttaagtattctcggcatatcataattatgatatttatatcctgtgtaaagtaagtagatacaaccacgaatcgtgtttatatttggaagatgctattgtactttcttggatatggacacccctaattccatctaatgttcagaaaattttatttaccaggatgtgttgtgtttacattggcttacaccttgcttaccaaacttaccaagaaattcaatttgtgatgcaggcaagacaatcactt

SEQ ID NO: 1295 - DNA, 255 bp, Glycine max
  unsure at all n locations
  Clone ID: 700996360H1
cgnttggtttccaaaacctngtttcttctnantacaaaaaaaaaaaatgntgcagaagctgtgtttgatggnttntngacnatgccctccnggactttctttgcagcaaganctggccatggttggctgnacnattaccaagggttgtaaaccattattgcnttnctcctgtattgaaactngaaattatcagatatgggtcctccctaaatccattngagnagtctagcaagtnccagaaagngtggttcaatt

SEQ ID NO: 1296 - DNA, 192 bp, Glycine max
  unsure at all n locations
  Clone ID: 700996361H1
tgtccccacttccaggtcgtgccggaagcctgttagccnacccgncccaaaggaaacgggntgctcccggttctgcccagccggtnnnnnnnnnnnnnnnnnnnnnnntgttgaagagaccgagccgtgatgattcaagggtggccaggagccaaagtttgnagatgactacgattctacgtaggggccagt

SEQ ID NO: 1297 - DNA, 261 bp, Glycine max
  unsure at all n locations
  Clone ID: 700996362H1
ctgatattcaaaacatatctntcctagatgctgcgggatctgctgacgtattcaaaaaatgaagatgacttatccagtgtatttttaaagaaaggnacatattctgcttttgtagaactgcacatagaacaaggacctattctggaagatgaaggtatatctataggcatagttactgccattgcagctccagcaagtctaacggttgaatttgaaggcaatggtggccatgcgggtgctgcccttatgcctaacagaaat

SEQ ID NO: 1298 - DNA, 264 bp, Glycine max
  unsure at all n locations
  Clone ID: 700996363H1
cgagaggatgcaanttttgtccacaaaacagtggaaaaaggtgaagggaaggatgtctctgcacgttcactgccacattagtggaggtcattttctcttggatatattagcaaggntaagatacttcatcttctgcaaggagctaccagtggtgttgaaggccgtcgttcacggcgatgaaaacctattcaacagctacccagaattgcaagatgccttggtttgggtctactttcactcaaacattccagnattcaacaaggt

SEQ ID NO: 1299 - DNA, 249 bp, Glycine max
  unsure at all n locations
  Clone ID: 700996364H1
agntgggaggagcaagcttgatttgacccaagctnttgagtaccaaagtaggaggctaatgggtctacaanttnttgacatcaagaagcatcaccagcgtggcantttncgccggaagnccaattccttnncncacccattntnntaacatgttnaaccaaaatnttgttccttnttttnanatnanttnagaggncccaaaggagagtggttcaagttntgctncagctagtattgcatnagtttntg

SEQ ID NO: 1300 - DNA, 198 bp, Glycine max
  unsure at all n locations
  Clone ID: 700996365H1
ttgaacagaaatagnatcatctctctgtctagggtttcattctttttcagctttatttgttctgtagatccatctagcttcggtgctgcaaatggacgtcgcagtcactgccgttcggtcaccgctgatcgtcctgggaagtccggtcaacgggtccgcctcagctcggttgggttccacttttgggttttccagaaa

SEQ ID NO: 1301 - DNA, 263 bp, Glycine max
  unsure at all n locations
  Clone ID: 700996366H1
ctttcgttgctacttctactgtttcttcctccgatccctcattgccgcanatgactcctcctggctagtgttaggtgaattccctcgcttcacatgcatgatcgcaccttcaactcnnnnnnnnnnnnnnnnnnnnnnnnnnnnttttncaaggttttggcgccgtggagttcgttttgtagcatcaccgtattatcagcttcagnttgntttcaccaaaacggctttactatttggtgtgttccatgtcacaaaaaacgnaa

SEQ ID NO: 1302 - DNA, 259 bp, Glycine max
  unsure at all n locations
  Clone ID: 700996367H1
ctcagaggaatcgttagatgttctgaatgaatggcttaatgttctccagtcagttcaaatcccctttgcactcattcccttggctttgcntggtgtccaaagaacagataatgggcagtttcagaattggccctgtcctcaagattatttcctggctggtggctgctctagtgatagtgataaatggctgctctattgctggaattcttctcctctgaagtgaatggggcagtgtttgccactgtagtgtgtgtattaa

SEQ ID NO: 1303 - DNA, 254 bp, Glycine max
  unsure at all n locations
  Clone ID: 700996370H1
taataatctggaaatgcaagaagcttatcttgtcaatctcgtaaatgtgttacgagaattgtatttgcacagtccagaggaagctcgccaattgagaaggaaagctctctctcgtattgaatggctgcaaaaagctgatgtgcctaccatagcaacanattgaagagttccattcgatgcagaggatgatgaatgctcctgattcaaatgataatattgatctactgttgagcattgatttgttgggtttacaa

SEQ ID NO: 1304 - DNA, 253 bp, Glycine max
  Clone ID: 700996371H1
cttcgccaagaaccgtgaactcgaagtgatccactccaggtgggccatgctcggagccttgggctgcgtcttcccggagttgctgtcccgcaacggggtgaagttcggagaagccgtgtggttcaaggccgggtcccagatcttcagcgagggtgggctcgactacttgggcaacccaagcctgatccacgcccagagcatcctcgccatctgggccacacaagttatcctaatgggtgccgttgaaggttac

SEQ ID NO: 1305 - DNA, 253 bp, Glycine max
  unsure at all n locations
  Clone ID: 700996372H1
cctaaatgaaaganattctataaattagcttataaataaactaattttttcctacaagtgtttattaagaagtttatgcttttcagttttcagttactggttaactctgaattctggataaagtggactcntgtattgatacaattagtgggtgctttttaggttnaagctgcatacgacatgttgcttatgcagagcctaactcagcgtcgggcagggaaagtagtgaacagtagtgttcgttatgctgatg

SEQ ID NO: 1306 - DNA, 249 bp, Glycine max
  unsure at all n locations
  Clone ID: 700996374H1
gngtgttccttctgttgtaggacacacattgtctcttactgaggctctatgtggcttccagtttgtgctgactcacctggatagcaggcagcttctgatcaaatcaaaccctggggaggttgttaagcctgagtcattcaaggcaataaatgatgagggaatgccaaactaccagaggcacttcctgaagggaaagctttacattcatttctcagtggaatttcctgataccctgagtcttgatcaggt

SEQ ID NO: 1307 - DNA, 249 bp, Glycine max
  unsure at all n locations
  Clone ID: 700996375H1
ccaatgtctcatagaatgcatgtagacaacagtgtaaaacttattgggaagcttttatttggtattgaaaagggtccagaagtactcaacgctgttagaccggcaggatcggcacttgttgatgantggcactgccttaaaaccatggtgaggacttttgagacacattgtggatccttgtctcagtatggcatgaaacatatgaggtcctttgcaaacatctgcaatgtagggataaagaatgagcaa

SEQ ID NO: 1308 - DNA, 250 bp, Glycine max
  unsure at all n locations
  Clone ID: 700996376H1
cngtacgaganaatgcgactctcatttctcacacatcgaaaggnccagaagggcctgatctgttctgccagttcacgcgaggcagctttttggtttagcctctttaagtctttacttaggtgagctgcgtagtggctggcaaattgtaagtaaganagtgtaagggtagagtagcggtgtatcttattattatgtaatgtatatttatnattaataagccattctgcgtttgttggtagtgttcaaaaaa

SEQ ID NO: 1309 - DNA, 245 bp, Glycine max
  unsure at all n locations
  Clone ID: 700996377H1
cgggtacgagaaaatgcgactctcatttctcacacatcgaaaggaccagaagggcctgatctgttctgccagttcacgcgaggcagctttttggtttagcntcnttaagtctttacttaggtgagctgcgtagtggctggcaaattgtaagtaaganagtgtaagggtagagtagcggtgtatcttattattatgtaatgtatatttataattaataagccattctgcgtttgttggtagtgttc

SEQ ID NO: 1310 - DNA, 52 bp, Glycine max
  Clone ID: 700996378H1
accaccaaatcttttctttcatgaaattctattattatccacacaacatacg

SEQ ID NO: 1311 - DNA, 187 bp, Glycine max
  unsure at all n locations
  Clone ID: 700996379H1
aggtccctgaggtgccgntgccggagaagatccgcaactctagaatcctcgtcctcggcggaacgggtcgggtcggaggatccactgccattgcactctccaacttatgtcccgatcttcaaatcctcgtcgccggcagaaacagggagaaaggtgaagttctcactgcaaaacttggcggcaattc

SEQ ID NO: 1312 - DNA, 267 bp, Glycine max
  unsure at all n locations
  Clone ID: 700996380H1
cgnanntcctccacgccgtgtctgtcgccgaaggngagggacattgataaaagttngacctatcgagatattgggacagtctaacccgcttgatgggatcaagcacatanatcaaggacattatgaaggcgattaanatggggattgaaccgattcctgtgcatagtgggcttggangtgnttactatttcagaaacagtaatngggaaagtgttggcaattgtgaagccnaccgatgaggagccttttgccccaaataacccgana

SEQ ID NO: 1313 - DNA, 257 bp, Glycine max
  unsure at all n locations
  Clone ID: 700996383H1
cttccatctccccagccaaaacctctctcaaganggccacattaggcccttctgtcttcgcaaccgttagcannnnnnnnnnnnnnnnnnnnnnnnnnnnnnnnnnnnnnnnnnnnctcattcaagacaggcctgtctttgctgcccctgcccccatcatcaccccaactgtgagagaggatatggcaaaggaatacgagcaagctattgaagaactccagaaattgttgagggagaagagtgaactcaaagccaca

SEQ ID NO: 1314 - DNA, 253 bp, Glycine max
  unsure at all n locations
  Clone ID: 700996385H1
cgatggcaganatgataaacagtctttgttgtggtgatgaaaaattgatgcgtgaaaggacacacctgctgttggcttgttgttcaagaatggcaatttgtaaganagatgtttggagagttgaatgtggaatcccttctggatttccgctcacagttatttgtaatagcatttttaatgagatgctcattagatatagctatgaaaaattactgcgccaggctaaagctccaagtatgtttttacaatcctt

SEQ ID NO: 1315 - DNA, 251 bp, Glycine max
  unsure at all n locations
  Clone ID: 700996386H1
cttcccgtcttctttgtacgtgatggcatgaagtttccagatatggcncatgctcttaaacccaatcccaagaaccacatccaggagaattggaggatccttgacttcttctctcactttccagaaagccttcacatgttcacctttttatttgatgatttgggtgttccacaagattacaggcanatggatggttttggagttaacacatacacactgatcaacaaggctgggaaagcagtgtatgtgaa

SEQ ID NO: 1316 - DNA, 251 bp, Glycine max
  unsure at all n locations
  Clone ID: 700996387H1
cnactttgaactggcatggcaactataggaattggagtaggagtnnacaaagcttcaacaaccccacagaccaaagtctaagtccttgtttcttggacagaggcttagaattagtcccttttggggggagcctcaatgcagtnaaagaagactattcggtgtctcaaacccaccaagagtggttcaagtttttgcactagggggtggtgaatggcttgacacagttcataatctctttgtgggtgttggng

SEQ ID NO: 1317 - DNA, 250 bp, Glycine max
  unsure at all n locations
  Clone ID: 700996388H1
ctcatgtgaanaaaggtcaaactgttgntgagaatgnttatgagctatctaataatcatgagacncagatacntgttgagaatgaaggcaatgtagantcacattttcactcaaatggtaatgatgattctcaggccacagaactggcttcatcagntcaagacgatgctccaaagaagtcttatgcatcaattgtgaaagtccaaaaagggagttcagttccaantaaagtctatgtgcctantantac

SEQ ID NO: 1318 - DNA, 247 bp, Glycine max
  unsure at all n locations
  Clone ID: 700996389H1
ctctctcttctcttccatccctgtgatctttncgcctctctgttcagggctcaaatataacaaaacattaagtgaaaatgacgcagaatgcaatagtgtccaanacaaaatccgggatcaagggggacatagccgtggcacagaagccactggcggcgcctccgccgccngggtacattcccattccgaggaggagggttttgaagaacctcgaaatcaatggaggacaaagaattaatgcatgggt

SEQ ID NO: 1319 - DNA, 245 bp, Glycine max
  unsure at all n locations
  Clone ID: 700996390H1
cttaattctctctactactgctagctgtgacttnttttgagttcaatcaaatcgcattggtatctgaaatcaggaaagatggttagcgtantgagatcaggcaggcacaaagggcagaaggcccagcaaccatccttgccattggaactgcaaacccaccaaaccgtgttgatcagagcacctatcctgattactacttcagaatcaccaacagtgaccacatgaccgagctcaaagagaaattt

SEQ ID NO: 1320 - DNA, 246 bp, Glycine max
  Clone ID: 700996391H1
gcagcacttggtgggaatcgtgatgtgacaggaagccagaacagcgttgagatcgatgctctagctcgctttgctgttgaagaacacaacaaaaaacagaatgcccttttggagtttgaaaaggtggtaactgcgaaacagcaagtggtttctggtaccttgtacaccatcactttggaggcaaaagatggtgggcaaaagaaggtttatgaagccaaagtttgggagaagtcatggttgaacttc

SEQ ID NO: 1321 - DNA, 244 bp, Glycine max
  unsure at all n locations
  Clone ID: 700996392H1
ttttcnaaaaannggtgcattcccccctttttttggataaaattgaaaaacctttacctcttttcttttgatagtttcaaatcaatgaaaatattttttatgttcaaaatnccggntgcgaaaaaaggaagaatttgaaatttctagttatacagaggaaagggcaaaagaaagttcgaaaaaagaggaggaaaaaaaaanggaaaatgaggaaagaaaacgtatagaaatagcagangcctgg

SEQ ID NO: 1322 - DNA, 257 bp, Glycine max
  unsure at all n locations
  Clone ID: 700996394H1
atttccttctctctttcaccaatcaacacaaactaagttcntccttctgttgaaagcgatagcaatggccacgaatccaatcgaagcggggaacggcgacgctgctcccaaccctaacgcgactaccaaatcctccgtgtacctgcaagactcggaggagctgaagcgagtcttcagccgcttcgacgccaacggcgacggcaagatctccgtctcggagttggacaacgtcctccgctccctcggatccggcgtcc

SEQ ID NO: 1323 - DNA, 258 bp, Glycine max
  unsure at all n locations
  Clone ID: 700996395H1
acacnacctagagggctactcagacagtgttttggtgagtnatgaaccaatagaagacagacttggtggaaatatggtaatttctcaatcaagagtaggaaagtctacacctganaatattgtggatgatggtcaaccagagcatctaatggttgatggggagctgcagccttataaggngagaatcaattatgatgatgtcttgcttactggatcctgtaaatgataggncaacanccaaagaagattctggccctg

SEQ ID NO: 1324 - DNA, 262 bp, Glycine max
  unsure at all n locations
  Clone ID: 700996396H1
ctctgtctcaactttccttcattttctctcttcctctcaccgagtcacgcactcggcttgactcgtacgaactccgatccccccccgagtcacactcaaccagcaccaccgcccgatccgacgatgtctcgcgcctcctccgccgcagattccgccgcctccggtgagatcatactgttcggagtcagagtcgtcgtcgattccatgaggaagagcgtcanatgagcaacctctcacagtacgagcatcctcaagacggcag

SEQ ID NO: 1325 - DNA, 293 bp, Glycine max
  Clone ID: 700996401H1
tggacgaaaactccttatggtcaccttcaaaaccagtcaaccaacgtgatgctgatctcatccatttttgggataagttccgcaaagctcctgagggttctctcaggaaaaatgcagctcagaaacaagttttggaagcaatgtctcatagaatgcatgtagacaacagtgtaaaacttattgggaagcttttatttggtattgaaaagggtccagaagtactcaacgctgttagaccggcaggatcggcacttgttgatgattggcatgccttaaaaccatggtgaggactt

SEQ ID NO: 1326 - DNA, 292 bp, Glycine max
  unsure at all n locations
  Clone ID: 700996402H1
gcagaatctggggttgttcctgctttggtctggtctctcagctctgatanattgggcaccggattcngggtgtnagccaaaaaagctttcttttgnntcntctgttnttcttttcggcanagtagaagatatnngtgattttcttctgtgaattnaattcgantcgtngcttctggcttcggtgcttgctgttttgttggcanaagttattggtccaattgaaatgaaanantttnagtganaagganacttagactgngtggtctggccatggagaattttatanggcana

SEQ ID NO: 1327 - DNA, 287 bp, Glycine max
  Clone ID: 700996403H1
aaccagccatgagaccagtttgatggctcgatgccgtagagtatatgcccatgctcatgattatcatattaattctatttcaaataacagcgatggcgaaactttcatatcagctgatgatttacgaataaatctttggaacctggaaattagcaatcaaagttttaatattgttgatgtaaagcctgcaaatatggaggatctgaccgaggttataacatcagcagaatttcaccctacacattgtaatacattggcatatagcagttcaaagggttcattcgtct

SEQ ID NO: 1328 - DNA, 265 bp, Glycine max
  unsure at all n locations
  Clone ID: 700996404H1
gggaacagggtaaactcaaacaaaacccaaccaaagtaccaaccaagaccagaaggctttgtanatctacctatctgtctaagccattcatcaaagctcaactggaccagatgatgtaggctcttagatccgagtnatgaaagttggatatttgatatcagtatcacaaaattattcagtgtgaagcaatatggggaacacgtgtgttggtcctagcatttcaaaaaaggttttgttcaatcagtttctgcggcgatttggcggt

SEQ ID NO: 1329 - DNA, 284 bp, Glycine max
  unsure at all n locations
  Clone ID: 700996405H1
gcacaatttgttagtggaaaaaccttcaaatatgatataattggtgctggttcacattcttcagaagattttcctgaaaaggaagatcaagaaaaacccacaaagattgataccagattgagacaaataatagatcctcaatacaatgaggttcaggctcagatggnaacaaatttgtttaaattgtctcntgntgatgttgaaactcctaaaggttccatgttggatcttaaaatttctcaatctaaaattgcacttcccaaaaacacagttggaggaaccat

SEQ ID NO: 1330 - DNA, 284 bp, Glycine max
  unsure at all n locations
  Clone ID: 700996406H1
caagacatcacaagaggaaagggtttggttgactcccttttccaagctccacagngatgctggaactcactatgcagttcatgagctcctacgagtacctcagcactggacttcgccagtacttggacaacaaaatggatggattctacattgctccagcttttatggacaagcttgttgttcacatctccaagaacttcatgacctgnccaacatcaaggttctctcattcttggnatctggggaggcaagggacaaggaaaatctttccaatgtgagcttgt

SEQ ID NO: 1331 - DNA, 280 bp, Glycine max
  unsure at all n locations
  Clone ID: 700996407H1
ctgcgtaangctcaaagctttttnacagtttgagcatttcanacaaacatgggggctgatggaaagaagattantgnagannggnngttagtnaagnttgancccaaaacccagcaatngtttcacctcaaaantngttgatttnttggagaaattggtggtgaagttcttgtatgattcttcactgcccccatcactacctcactggtattttgctcccgtgagtnacacccctgcaaccaaggaacttctntcaanggtaccttccgnattncttgaa

SEQ ID NO: 1332 - DNA, 287 bp, Glycine max
  unsure at all n locations
  Clone ID: 700996409H1
aaacaagtagttgagaactaagaagaaggaaatggcttcctcaatgatctcctccccagctgttaccaccgtcaaccgtgccggtgccggcatggttgctccattcaccggcctcaaatccatggctggcttccccacgaggaagaccaacaatgacattacctccattgctagcaacggtggaagagtacaatgcatgcaggtgtggcnacccaattggcangaagacgttcgagatcnttcctacttgccagaccttcgatgatgcccaattggcaaaggaagtc

SEQ ID NO: 1333 - DNA, 286 bp, Glycine max
  unsure at all n locations
  Clone ID: 700996410H1
aaaaaaaaagaggcaaggttaggtaataggtggttttatttgaaggaaagaatctatattgaatgttctggtcntctttgtgtttttgtagatagaagccatcagtncatggataggcttctatcatcgtcttnacccccttcttttacatttctcactcgattcgaatctgcaactgcaagattcaatttcctctccgtcnacacgttctcatnctcattgaagcggctctcctcaatttgttgccagcatgcaaatccatcnnctttttctncnnccatcncnt

SEQ ID NO: 1334 - DNA, 289 bp, Glycine max
  unsure at all n locations
  Clone ID: 700996411H1
tcatttcatggctaactattcccaccctcatatctgccaatgtctgagtcacttgctgaccctccggcaacattttccggtcataattgccggaaaccgccgcaagaccggccaagagttggtggaggaagtgttgtccttggcacaaggcctgctccaccttggactcacatctggccaagtggttgccatcttctgctttcaatagtgataggnatctggagtgnttattagcccatgcatttgttggaggaatagctgctcctctgaactatcgctggagttttga

SEQ ID NO: 1335 - DNA, 287 bp, Glycine max
  unsure at all n locations
  Clone ID: 700996412H1
gnaaatgaaatgagaanagtaaagnngttggaaaattantcaatnntagagttaggttttggtttggtttggcagaagaaagtataanggagagaggttgagtttgtttggtttttnttgcttcgtttggtgtcattgntatataatactaatactnnttnnattcnnntttnganacaacattgntntngggaggttcagatgatggngagtgagtngcaaaatgggtgtttcatggtcatgcanagacacnaaagaacatggcgttatcaagtntgggggggaaa

SEQ ID NO: 1336 - DNA, 291 bp, Glycine max
  unsure at all n locations
  Clone ID: 700996413H1
cacagacagatatcatggctaaggcggtgtgcactctcnccggcagtgacgcgacggtatacgggtcgttngtggtcacgcaagctccacgaagacgccaagagtgtaattacgggtganctcaagggacttccggctgggcaaacacgcgctgcacgtgaatgtgtttggggatgtatcgcaaccgggacggggtgtttaacccatttggtaagaaccacggggcacccgaagacgaagagcgtcgtgtgggatcattaggcatgtgaacgtagcagaggatggcatgtt

SEQ ID NO: 1337 - DNA, 292 bp, Glycine max
  unsure at all n locations
  Clone ID: 700996414H1
aaaaaanaaaatggattcaccacttcatatccaaaagnctcatgttgtatgtgtaccattcccancnaccaaggcaangtaaacccctttatgcaantagccaaactccttcattgtgtgggtttccanataacctttgtgancnactgagttcaaccacaaccgttttgttaagtcccatggaccagactttgttaagggtctccctgatttcaaatttgagaccanacccgatggcttgccgcttcggataaggatgcaactcaggatgttccagcatgtgngattctac

SEQ ID NO: 1338 - DNA, 297 bp, Glycine max
  unsure at all n locations
  Clone ID: 700996415H1
caagaacctaccataaatatacatcaaggagggttcttacgacagaatggattgacggagagaagctgtncacagagcacagaaaatgatgttggagaactggttaatgttggagtcatctgctatctaaaacagcttcttgatactggattttttcatgctgatccacacccggggaatttncatccgcactcctgatggaaaacttgcaatacttgactttgggcttgttacaaaactgactgatgatcaaaagtatgganatgatcgangcaattgctcatctcatccatcggg

SEQ ID NO: 1339 - DNA, 298 bp, Glycine max
  unsure at all n locations
  Clone ID: 700996416H1
ggcatatggatggttttggagttaacacatacacactgatcaacaagggctgggaaagcagtgtatgtgaaatttcactggaagaccactagtggtataaagtgtctattggaggaagaggccattaaggtgggaggagccaaccacagccatgccactcaagaccttcatgattcaattgctgctggtaactatcctgagtggaaactgttcgttcagacaatagatcctgagncatgaagacaaatttgactttgaccctcttgatgttactaagacttgggcctgaggacattat

SEQ ID NO: 1340 - DNA, 286 bp, Glycine max
  unsure at all n locations
  Clone ID: 700996419H1
cctttgcaaaccctttccaacaattagcaaaacatttgttaaacgatggaagtaatgtgtggtgccaaagttggcaatatggtccataaggccaagccttatgtgttaactgtggggttgcaatttgggatggctgggacatacctcttcaccatggccagtttgaaccatggaatgagccgtttggtgttcattgtgtatcgcaatgccattgctggcattggcccttgctccctttgcctgatcttgaaaggaaagtnagaccaaagatgacatggactgtctt

SEQ ID NO: 1341 - DNA, 285 bp, Glycine max
  unsure at all n locations
  Clone ID: 700996422H1
cacaattcacaaccttcaaacatatttatnanaataacacnaatggctactccaatgancctcacgggcttgctccgcgacgtcgccgccaaattancttcccgcngagccatctccgtcgcggaaaattcnacctcacccactccngcntgccatcaactggttgaanccgccgcngacagtttagtccgcngccggnatacaaacccggagacgtcntcgcttttcaccttccccaataccgtcgagtaaagttgncntgtctctagccgtcttcgagtnccg

SEQ ID NO: 1342 - DNA, 285 bp, Glycine max
  unsure at all n locations
  Clone ID: 700996424H1
gctagtatcgctatgaagaaagctgagatgggcactgagctcattgatcatttaacanncagaggagaaaaagcttttgtcagatttgaaccctgaaatcanagaccttaaagagaagcttgttgcttgcaagactgatcgcattgagactgaagcacggagagcagagctggataccaatctaaccactaaccttaggagaaggaaacaagagctggaggctgtaatatcatctgcagatgctgactcttggttgctngatgctgaatcaaagtggcaggaatt

SEQ ID NO: 1343 - DNA, 286 bp, Glycine max
  Clone ID: 700996425H1
cagatattagtttgatccccgaaagaactcttccttcctcacctagtcctttgtcacagccctcatactaaatccactagttttatgaaaggcagtttagggcaacctactgcaagaaagcagcttatgggtggacattctatggttgacaattctaggggtttgcttcattgggcacaaagcattagttttgttgcagtttccatggaccatacgttacaactagttctggccagcagattcatcaactcctggttacatagaaggtttcactccagtgaagtct

SEQ ID NO: 1344 - DNA, 283 bp, Glycine max
  unsure at all n locations
  Clone ID: 700996426H1
gtggtgttggcgctgacaaggcttttggccgtgacattgttgacgcacactacaaagcctgtatttatgctggcatcaacatcagtggaattaatggagaagtgatgcccggtcagtgggaattccaagttggaccttcagttggaatctcagctggtgatgagatttgggcagctcgttacatcttggagangatcactgagattgctggtgtggtggtttcctttgaccccaagccaattaagggtgattggaaggtgctggtgctcacacaaactacagc

SEQ ID NO: 1345 - DNA, 285 bp, Glycine max
  unsure at all n locations
  Clone ID: 700996427H1
gttgaatatattgttctccctacttttgcttatgagcacaaagtatttgttggtccattttctagaaaatttccccgtgctcaggtatgggtggcaccaaggcaatggagttggccattgaacttcccattagaattcttcggcatttttcgtgctanaacctggaagatgaagattatctggcccntggggctggtgaatagagccaaagnattctaagctcaccagagttggaatggggcctnatgtggaggtagcttcnaccaacaaacctncaaaacanna

SEQ ID NO: 1346 - DNA, 291 bp, Glycine max
  unsure at all n locations
  Clone ID: 700996429H1
gtctgctttgantggagaatctcttcnngtaacaangagacntnccggntagaagtgttttnggnatcanacagttaagaagggtgagatnggnagcagttgtgnattgctagtgnggtgcacacnttttttggcaaagcanctcatctggtggacagnaccaaccaagttggacacttacnagaaagtgttacagcaattggtaacttntgcattgctcaattgcggttggaatcgccatgagctcatagtcatgtacccgattcagcaccgcagtacagggaaggaatt

SEQ ID NO: 1347 - DNA, 293 bp, Glycine max
  unsure at all n locations
  Clone ID: 700996430H1
aattactacatcgtattctgcaaattcaaactgggtcttggttttctgaaagannngaggtggcaagggacaagcaccatgatgaatctgacaaancgaattttttcacagcttgctcatggggtagctggtgcagcacatggtggtcatgggtacccacctggggcttacccaccaccacctggggcataccctccgcaccaagggtaccctccacaacatgggtatcctccggctgggtaccctccacatcaaggttaccctcctgctggttacccaccagctggttatct

SEQ ID NO: 1348 - DNA, 280 bp, Glycine max
  unsure at all n locations
  Clone ID: 700996431H1
tgtatgatatttacgtttacggcgtgtgataaaaagatactatatagaactaaaggagattcccgtttcagttacattcaattcaacgattgaccaaaagagaattcaaaaaataacatttagatcacccaaattccaatatttctatgaaacaataattaaatctaacgnatttatttcgattgattgtatccatatggggtaataataaaagggggaggagagcttaaaanaacaagataacaaataaagtataagtgcggggggtcaaactgggtgt

SEQ ID NO: 1349 - DNA, 300 bp, Glycine max
  unsure at all n locations
  Clone ID: 700996432H1
acaatcaagaccagcttctaagaatcctatcgagttcctacagtcccacttgaaacctcccaaaaccaattgancccaccatcatggtcgcccaacccatcggcaccaaaaaggccgttgcacgccccaaacccatgggtcccaaagccgtcggcccagcaaagaagccctccgtcggcgccgcccagaccaagacagttccgtacaagaagcccacgcccatcggcacaaagaaggcccctccgcccacaacagcagcaaagaaggtcggtgcgctgcagtcaagaagccagtaggctc

SEQ ID NO: 1350 - DNA, 295 bp, Glycine max
  unsure at all n locations
  Clone ID: 700996433H1
gtagctattatactctctagagtaattgcggaatctgctagaattttctaataatgggcgaaagacgttgagcaggtcacagancaangtgnatactccgcgaaggactaccatgaccctcctncggcaccgttgatcgacccagatgagctccacaaagtggtccttgtacagagcccgcatagctgagttcatagcacactcctttttctttacannacgtgttgaccattattggctacaagagacagagtgacacccaaatccccggtaacancgaatgtnaccgcgttgg

SEQ ID NO: 1351 - DNA, 286 bp, Glycine max
  unsure at all n locations
  Clone ID: 700996434H1
ttcattgtgatatcattgtgtcactngatggactgccactccantgcaggatgttccaggttacaattgattggntatttcctctcaggaatgtgttcccaggacttattgtgttttaaatccacnaaatccttttgtgttgaataggtggatggggaaactgactttcccccagggcacttcccgaagtgttaagagaatgcctctttctatagggggaggagctggtgcaaagaatgctattctcatgaatatgcccaaatgctgttctttcaatgtggagata

SEQ ID NO: 1352 - DNA, 286 bp, Glycine max
  Clone ID: 700996435H1
tctaaaccctaaacaactctttctcttcttccttcgctcgttgttctccctcgcgtagatcgacaatggcggagacagagacgtttgctttccagggctgagatcaaccagctcctccagtctcatcatcaacaccttctactccaacaaggagattttccttcgtgaactcatcagcaacgcctccgatgctttggacaagattcgatttgagagtttgacagataagagcaagctcgatgctcagccagagttgttcatcatattattccagacaagactaaca

SEQ ID NO: 1353 - DNA, 280 bp, Glycine max
  unsure at all n locations
  Clone ID: 700996438H1
aaattgcaanaaaccaaaanaaattggaacanagattcggngaaggctaaagggagatgagaagaaggccaggaattggaggtttgcagangcatgncgntgcaagggatcaattccgtttgctgggtgaaaatgtcgcaaagatcagaaccgatttgatgaaggagcagcttgccacctttcgctntcagctcgaagatttcgctcgcaaacacnggnatgacatccgcaananacctgcattcagatnncagttntctgaaatgtgtgctaangttng

SEQ ID NO: 1354 - DNA, 287 bp, Glycine max
  unsure at all n locations
  Clone ID: 700996439H1
gggagaaggtggcttcgcctacgtctacctcgtcaaggaggctcccgacgactccgccgccgctggcctcgccaagaagctcaaaggctcntctcatctctccgatgatggaacttatgctatgaaaaaggtcctcattcagaacaatgaacagctggagttggtcagggaggagatccgtgtttcatcactgttccaatccatcccaatctgctcccgcttcttgagccatgncaatccattctgtcaagcnaacccatgaaacatcttggaaccatggagcatat

SEQ ID NO: 1355 - DNA, 251 bp, Glycine max
  unsure at all n locations
  Clone ID: 700996440H1
gttgttgtaactcgttcttcttcatttgttgttctgtgnacntgtttgtnttttctctcacctgaaaatgtttgctgcggnggtaatgtggttgcggaanncctgcaagtgcggcaacgctgcggangctgcaagatgtacccagacttgagctacactgagtcaaccaccaaccgagacttggtcatgggagtngcactgttaaggtcaatttnagggtgctgaatgggtgtnccgctgagaacgatggc

SEQ ID NO: 1356 - DNA, 284 bp, Glycine max
  unsure at all n locations
  Clone ID: 700996442H1
ctcactcttgtgttgttgccttcatgggccaagccantgtccattgangtatggaacccaagtggcaaatacagagttgttagcaccaaaccaatgcctggnactcgttggatcaatcttctcgttcaaaatgntgttcgccttganatatgtcncgagaagaaaacgattctgtcagttgaagacatcattgcttgattggtgataagtgtgatggngttattgggacagctgatgcacgacnggggagaacagttgtcctctantnggnncnaagccnggag

SEQ ID NO: 1357 - DNA, 287 bp, Glycine max
  unsure at all n locations
  Clone ID: 700996444H1
ttctggtctggggtatctgcttggtaggacttcatttttggagagtttagtttaatgtctgaatcagaagctgagcttcctactgcctttgttggtgatgttctattgtggaagangtggcatgtttccttgggtgtcattgttgttgcaacagttgcctgggtcctatttgagtggaccagtttaccatttttaacaatttgttcagatgtcttgctgattttgcattgtactgttgtttctgncatgctcaactatgcttnccttagaaatnaacaaccaccaac

SEQ ID NO: 1358 - DNA, 277 bp, Glycine max
  unsure at all n locations
  Clone ID: 700996446H1
cttattttcatttttatttttatttttncatataccaaaagagtgaagttttctncacgangttgatctttcccccaattcgtaccacctttttcttcggttcatcgtttcattggctcttttntctcttnttnntnggctttncnnaaaggnganccaaaacntttgaaagngaagtnctnantnaaaagaanttnttngtttcnggaaaaaaaaggctaaaaanggggtccaagnggatgnggttgnnntnnnntttgcatgggtttgggggttt

SEQ ID NO: 1359 - DNA, 289 bp, Glycine max
  Clone ID: 700996447H1
cacctcaaaacgctgctatctctttctccactctccccaacatggccgtcgttggcgtcctcgcgtggcaaggatctttcaacgaacacatagctgctcttagaaggttaggggtgcaaggcgtggagattcgaaagccagagcagcttaacacaattagttccctcattatccctggtggagaaagcaccaccatggctaagctcgccgagtatcacaacctgtttcctgctttgcgagagtttgtacaaatgggaaagcctgtttggggaactgtgcagggcttata

SEQ ID NO: 1360 - DNA, 300 bp, Glycine max
  unsure at all n locations
  Clone ID: 700996448H1
ggtcggtnatagttgagtttgaagtagtgcttcgcgtctnacattcagttcaatgggcttcttncatctgtgntctntcggncttcccgtnaaatcacagntnnccancnaccaccntnnntgctccnnatccctctcctatcaaacgaagnaagtgncgaaatgagcaggaggcgttttgcgtttaagggaattgtggnctctggcgtttcggtcgnggcttctacnctcacagngnnnncgaacnatnttcnaaaggttttgaaagattgccgtacaagcnggaanggtanaattatg

SEQ ID NO: 1361 - DNA, 287 bp, Glycine max
  unsure at all n locations
  Clone ID: 700996451H1
ctgaaaatgcggaatcctctgcatgatntggaatttgtgttttctttcgtatgttgcgtttgtntaattcaataaagganattagacagnnncatacttcaacgagagggtcatgtctaatttccnttattganttananaaacgtannnacgaaagannattagacatgaggctcttgtngagtatgnnntgtctatttgaaaatnccacacctnttttanttgtcgtaatgatgtgtgaagtgtgtgtaatgntacacnacncccttgccncacaaagnncntnt

SEQ ID NO: 1362 - DNA, 284 bp, Glycine max
  unsure at all n locations
  Clone ID: 700996452H1
aagattccgcaacanagagtcagnncncnatggcgcggttgntcacagtggtgtngtgngcggngagcngtgctactgtgcgccgcggnnggcgcgtcgtgggtggacgangcggcgaacccgatacgaatggtggcgggggtggangcggacgtggcncgggtnatagggcagtgccggnacgcgctgaagtttgntaggttcatgcagcaggttcgggaagagttaccgaagcgaggnagagatgaggnagangtaggacatattctcgcaaaacctcaggt

SEQ ID NO: 1363 - DNA, 277 bp, Glycine max
  unsure at all n locations
  Clone ID: 700996453H1
atcagtataatagaataaaaaaattatgaacaagatctttggntctgtatagtctttttatactatatttaaagagttacttgtaacgtaatacaaataaactcgagtatggatattgtcaggaanactatttgactttgttttttcaaccccccaataaattcgaatattatggttatgncactgttttttttcagatttcatttttctataatagagagttctattatagagatttcgntgtaaaatacataaattggatcgatactcaacatnc

SEQ ID NO: 1364 - DNA, 286 bp, Glycine max
  unsure at all n locations
  Clone ID: 700996455H1
attctcatatcctcaatcaccccccctcgcactcgntcttcccttcctctggtggcgacaatgtcgactcctgcnaggnagaggctgatgacagacttcaagangctgcaacangatcngattgcngggatcagtngtgcnccccaggnntnnnnacataatgctgnggaatgctgnncatanttactgctgatgatacttncatgggatggaggcacgttccaagttgacanttccantttactgaggactatncaactnaancaccggactgtacgatttgtgt

SEQ ID NO: 1365 - DNA, 282 bp, Glycine max
  unsure at all n locations
  Clone ID: 700996457H1
aaatgatgctcaaaatcaagagggttcccactgtcgtttccaacttccaaaaagacgacgctggcagactctcctcgtcccgtcggaggttgtggtcggaattgcctcaaagcttgttgcattccagatgcaaagctgcctttgtatggtttcaagaaggctaatattgggaaggatttggccctggcatgcatgcgccggggagcctcccctcgcattcctcgactctcttcttcttggagagtgggaagatcgcatgcngagaggatttttcgctatgat

SEQ ID NO: 1366 - DNA, 287 bp, Glycine max
  unsure at all n locations
  Clone ID: 700996458H1
gttgcagacaactctgattgagcccacgtcagggcaatatgggtatcagcatgggcatttatgggccgccatgaagggatacnagatggttttgaccatgccctcttacacaagcttggaaagaanggtgaccatgagagtgtttggagctgaattaatcctcactgatccagccaaaggaatgggaggaacagtaaagaaggcttatgaacttttgganaacacaccaaatgcccacatgctggcaacattttcaaaccctgccaatactcaggtgccttttgcaa

SEQ ID NO: 1367 - DNA, 288 bp, Glycine max
  unsure at all n locations
  Clone ID: 700996459H1
ttcatgaaggagttccaaaggattacacngggcgaanatgttactgttggtaacttttttgcngtttacttggaaacaagttcggcacttactggtngcagtcngaaggttgtggacagtggacctgatgatcatatatntgtatactatactgaccatggaggtccaggggtgctcgggatgcctgctcggtccttacttatatgcggatgatctgattgaagtcttgaagaaaaaacatgnttctgggaacgtataaaaacctagtattttatctggaggcatgtg

SEQ ID NO: 1368 - DNA, 286 bp, Glycine max
  unsure at all n locations
  Clone ID: 700996460H1
gtccatttgaagtattcaagggaaaaaatagttgnaccttcatcagaagcatgattaccatacagtctgtaatgaaaagctagagcaggagncctngggcaacaaggtttttcaaatatttcagtggcttttctcaccaaggaaaggtgataagtaccctaaaaatgaactttagtttgtttcctaggaaaggagcctcaaatcttacgctcttaataattcagactgagcgcttatccttctngcagataatcaattttacttagattgtgtgccagtacaggaa

SEQ ID NO: 1369 - DNA, 291 bp, Glycine max
  unsure at all n locations
  Clone ID: 700996461H1
agctgaaataactaaatgattctgaattcttgttccatgccgtncacaaccttctgtncacntcacaatttcagagacttcttcgattccntcgaagcttttctcttcgactgcnacggtgtgatttggaagggcgacgaactcatcgatggtgttccgcaaactctggacatgnttcgcgccaagggcaagaagctcgtcttcgtcaccaacaattcctggaagtcgcgttcttcagtacgccgacaagttccgatcgttggganttcggtttccgcaggatgagatatt

SEQ ID NO: 1370 - DNA, 292 bp, Glycine max
  unsure at all n locations
  Clone ID: 700996463H1
gactaccagaagtccatcgacctcgacaaggacttcatcttctctcacatccaattgggcgttacacagtacnanatgggcagcatcgcctcgtccatggccactttccgccgctgcatgaagaacttcgccacagtacccgatgtgtacaactactacggcgagcttctcctcgaccagcaaaaataccaagaagccatcgagaagttcgacacggcagtagacatggaaaagagctccaagcctctcggcatgaacgtctgccgctgatcaacaaggcgctcgcgctctt

SEQ ID NO: 1371 - DNA, 284 bp, Glycine max
  unsure at all n locations
  Clone ID: 700996464H1
ctgaaagctgctgaacatgcagcagaaagagagaccaaagctaaaagggaggagcangacaagctcagggaaagngnacgggagctgcgcaaaagaaaggnangagaanancaggaaatggaaagggtgcgataaaaattcnaagaaangncgcagttactttatttcacgctttacttgtggngacaatcaaagaccctctggtatcatggacggnatctaagcctaaattagaaaaggtgctcaaagacgtgcaattaatctgatcttgatccntggncacg

SEQ ID NO: 1372 - DNA, 190 bp, Glycine max
  unsure at all n locations
  Clone ID: 700996465H1
gncgtcgattcgcagttntcgctccgatttctganctccgatgcggcggcgattcggtctcggataattgaaccgagccagtgcgagancctaatcaaagactgggtatngtgattgatngggttgntntgggtaattcataggttnggngtaagttaataacaaaaagtttttcnaaanacaantantt

SEQ ID NO: 1373 - DNA, 281 bp, Glycine max
  unsure at all n locations
  Clone ID: 700996466H1
acntattcaatggnttcctgctcttctntctccatcattcacttncttccnccgnatnnagaaggntgtgtgtctctntgctttnacttcntcagcgatgcttcaaagcgctccaaggagttacatcngttgtgctgtggcggngcttcagaggcaaccttncaccactggatcagtgnggantgcaatgaccatgantgagcagatatggccagagttgtgagaaggtacagctgncncctggcgataatgtttgggtcaatgttgatatttggagncac

SEQ ID NO: 1374 - DNA, 280 bp, Glycine max
  unsure at all n locations
  Clone ID: 700996471H1
gcttgggcattcaagaggccaagctgcttcagctcccttctgtttgcaacgtcaaaaacgccagcatcaccaactgtcctaagctttagggtctatctccaagttcccccgatgctgctatcttcacatccaaattcttcgaagacaacaccttcagcacctacaacaacaaactcgcaaaccacgaccccgcagagccaaaacgcttctcatgggaagccatggttncaacctagtagtaccgttacctatgtnatggtgatggtttggccatgttcng

SEQ ID NO: 1375 - DNA, 282 bp, Glycine max
  unsure at all n locations
  Clone ID: 700996473H1
gnaagaagcagcagttgcagaagcatcaacacnacngtttncatngggaactgtaacagcgcnaccctctncccaaacccagccaanattcccgatncaggcaacatcatcaccccaaancctccaacgggatnactgtccttngtngcaactngaagnnnntccgtaggccgggntctgggncggtccatggaggacgctcgctcnagctanaacttcggnngnganttnggcagcngctaattcggcgtgangtaccatgtgaggcntaaacacangnna

SEQ ID NO: 1376 - DNA, 281 bp, Glycine max
  unsure at all n locations
  Clone ID: 700996474H1
gaaaattacaagataacttgcagtcattgcaaatnagacttacttcaagagaactcatgtgccgaaatcttcaagaaaaggttcgggatcttgagaaccangtgacaggggagagananatgagactgaaacacgaaaatatattgcttgcagcagtttcagctcaaccttcaacaatgtgggagtcaatagcttctgatcagaaaatcatgangaagccaccgcncgatccaagactgccacttagaagaattactaacattttgcctccaccacnagag

SEQ ID NO: 1377 - DNA, 281 bp, Glycine max
  unsure at all n locations
  Clone ID: 700996475H1
actgccatgaatattcatgccaccgtgaaaaggaagaaccccgaaacattttcagataaccagaaaccactnccctcttgatgatcttagacggaatgaagtgtttgcaagagaaagcattcctatatgnttggcatgtactgnatacatattattctccatcgtttctatcattgtaatccctttgatgttcccacagttgaagtggtattacgtggngtttgcctatcttttcgcancctctcttggcttctgcaatgcttaggtgcaggtttaacgac

SEQ ID NO: 1378 - DNA, 285 bp, Glycine max
  unsure at all n locations
  Clone ID: 700996476H1
gcaggtatctcttatggtgtagttttntttttctattcttaanttcatctnttcagtaatgttaaagattctntacatgantncangntgagagactgtcagagttttatgaaatatgccgtaatcttgacattggacggggagagaagnttattaaagttgcngcagnccccttcntcatttgctgcaagccatggaagagtatgtcaaagatgctccccagggaccaatagttcacaagnnttggctattgagaacaaagaagttttggctattgaatacaaa

SEQ ID NO: 1379 - DNA, 285 bp, Glycine max
  unsure at all n locations
  Clone ID: 700996477H1
cngtatcatagcagtcttcatgcagcaagcacnnccaccatctgncggttcctaaacttgatgcagggttttcgaggagctccaatcatattaacatagtgaccatcttgataagtgcttatctagggcacggatttgaacaatggagcagtttggataaaatgattattcgtttatttgtcattgaaaactgacttggatatttatactcctggatgtttgantgccatatgagaagcagcctctctgacacaagattcatctggcaatttaaaaggctagaaa

SEQ ID NO: 1380 - DNA, 288 bp, Glycine max
  unsure at all n locations
  Clone ID: 700996479H1
ctattctgcacaagctttatctattttggggccagcctgaagtgttncacacgancggttacnngattctgatgggtgttctctatggaatcggagcactggtttatgccactaggattccagaacgatggatgcctgggaaatttgacattgccggacacagtcaccaattgtttcatatattggtggtggctggggcatacgctcattatccgggccagggttantttatctcaggtggcgtgaccttcaaggttgttgatttgatatgcatctatgaacgaacag

SEQ ID NO: 1381 - DNA, 289 bp, Glycine max
  unsure at all n locations
  Clone ID: 700996480H1
gccaatggggtatggagggcctcatgcagctttcttggccacttcacnagantacaagaggatgatgctggnagaatncatcggggtcagtgtcgattcttccggaaagaccgctttgaggatggcaatgcaaactagggagcagcatatcaggagggacaaggctaccagcaacatttgcactgcttcaggcactgcttgcaaacatggctgccatgtatgctgtgtatcatggacccgaaggcctgaagaacattgcacaccgtgttcatggtcttgctggggcatt

SEQ ID NO: 1382 - DNA, 274 bp, Glycine max
  unsure at all n locations
  Clone ID: 700996482H1
ggcatatgcagctgccaagnctgctggtgnctgcctccgtggcttaaaaggagaagcnggggtagtggagtgtgcttttgttgattctcaggttacggaacttccctctttgcaaccaaggtacgtctaggtcgtgctggagcagnagcggtttattcaactgggtcccctgaatgagtatgaaaggattggattggaaaangcaaaganagagttagcaggaagcatccagaagggtgtagagttcattcaganaatnaatgtgataaggaaa

SEQ ID NO: 1383 - DNA, 281 bp, Glycine max
  unsure at all n locations
  Clone ID: 700996483H1
cnaacttggagctttgggacggatgacaacggttcaagagcagctttcagttcgcgttccagcatgactacttgcgttcgataganaattatncgaaaaggatgaaacgtaccaagatgtttgtgaagaagcatttgcccaatgttggctgccatcctttcctggcagggcttcatgccgctttgcagtggaatctggaaagctcaacggttgtagcatggcaatgtcagactcggtattcgttcgaaagcggcgatctganttgccatacaacgcgcttg

SEQ ID NO: 1384 - DNA, 239 bp, Glycine max
  unsure at all n locations
  Clone ID: 700996484H1
cacaatttctntnaagctnaagctngtggtttctttctcatctctcaaccaaaggtnaaancnagaagagagtgagagaaganaaggtcngangtaaacatacaagctttgctcttctgctcatggatcggttccaggnatcngggtacgatcaaagggngtgttgantgcacagngctatntgcgtgaaaatcntcatgcnnantactggagngancnttgtgagtcatgatatcang

SEQ ID NO: 1385 - DNA, 278 bp, Glycine max
  unsure at all n locations
  Clone ID: 700996485H1
gcttcattcaacatttctctctcccttagctagtttttaccaatggcngctgcggttagtgctgcagtctcttttccatccaccaagtctacctctctcccaagcaggacctccatcattaccccagagagagttgtattcaagaagagatgtttgtagcagtggaagggtagtntccatcagagctcaagtcaccactgaggctccagccaaggttganaaagagtncaagaaacaggatgaaggtgtggttgtgaacaagttcaaacccaagaccc

SEQ ID NO: 1386 - DNA, 282 bp, Glycine max
  unsure at all n locations
  Clone ID: 700996486H1
catttcacccctcgtctttccttgtttccggtgagggccaaccacaacatatgttaaacaaggaacaaccttccaaaacataacatcctacgccaaacaaaactttgaacatccttcagatctatacccttctctctctctctcctctantttcaaattctacattcatgggcacggaggttctacgggccacaagattgtttcacccaacggcatcggtnttccaccgcctgggcntttnccggcgaagaacctntggtacnccaccancaacaacaaaaa

SEQ ID NO: 1387 - DNA, 275 bp, Glycine max
  unsure at all n locations
  Clone ID: 700996487H1
cttcaacttcagttccctgctgaagatcttggttttaggtacctacaaggagcacttatgccagagagtaaagatgttgaaagtcctccagaagtactaacagggcgtcggagggactacaccccttcagcacaaccaggatcaagactggctcatatatctgtgagagtaaacccgttaagtgaggagactgtttctacattgatcttgtgtcgggagataaagttgagttcatctcatcatagcacctgtggaggnatcttatcatctagctc

SEQ ID NO: 1388 - DNA, 273 bp, Glycine max
  unsure at all n locations
  Clone ID: 700996488H1
aaaattcaggcctacactccctcatcacttgcttagtttgttcttcctnctactagcanagcaaaaacaaataaaaaaaatagagaaatgcaggggggtgtgaaggagaagttgttgatcanagagncacaaacatcagancaagaagaagnggcattatcattggtgaanngggtgtggatgagagcnaggtgatgngggtagtggcagcacaggcatttttccaggttctcccactttggnctcatgttataagccaagcatttattggtc

SEQ ID NO: 1389 - DNA, 281 bp, Glycine max
  unsure at all n locations
  Clone ID: 700996489H1
ccggcgtcgccattcgctcatggcatgcttcagaatgttaacgcttctgggagttcccagctgttatncgacgcatcccgcgattatatccaattctgcagtgaatcccatggttgttcaacctccaggtgtctcttcacatgccgntccttcattttcatataatattccccaaagtggtgccattttttctagcaaccagcagcatgcacatctaggnactctacttcaggatggcnaactgcctgtnttntcctgtgcatcccagtaatgccntatcc

SEQ ID NO: 1390 - DNA, 281 bp, Glycine max
  unsure at all n locations
  Clone ID: 700996490H1
ggcttctttatgttctgctgatacatgttgtaatcaataaaagcgaananatncacccccgatggtgaggtgctgctcagctttaggacatcagttgttagttctgatggtatcctattacagtggaggccagaggatcctgacccatgtaaatggaaaggagtgaaatgtgatctgaaaaccaaaagagtaacacatctgagtctatctcaccataagttaagtgggtctatatcacctgacttggggaagcnagagatctgagggttcttgntctttca

SEQ ID NO: 1391 - DNA, 280 bp, Glycine max
  unsure at all n locations
  Clone ID: 700996491H1
cctcgctctatttctcagtctctgtgtttgcggctgaggattccgaacgagtgaccttcttcgtttctcgcaaagtttaagtaatcatgggtaangaaaaggttcacatcaacattgtcgtcattggacatgtcgactctgggaagtcaactaccactggtcacttgatctacaagcttgganntattgacaagcgtgtgattgagaggttcgagaaggaggctgccgagatgaacaagaggtcntcaagtatgcctgggtgctcgacaagctcaaagct

SEQ ID NO: 1392 - DNA, 245 bp, Glycine max
  unsure at all n locations
  Clone ID: 700996492H1
anaaactttcgaaagattttatncaattgaaatcttaaaaatnactgggataaacntnaganntttcnatgatnggcatngactaggtnaacaatttaattggnttggtcgaatggtatcangnaaatggagtantaactcccatttnttattnattntngaattanccgatcanctgcttggttagcgnacattntcttttggnttncaaaaatttnccgganaaaatttgaatctatgtgtnt

SEQ ID NO: 1393 - DNA, 287 bp, Glycine max
  unsure at all n locations
  Clone ID: 700996494H1
ctgaatcctcctctgcctccgtgcaaagatttcaagactcatcaaacnnctggggcaacctgagacacactcgctcatccaacaaaacnccatggccaacgtggaaatcctcgttctacttgttgcagcggcattattaatgccattgcgacacaccacagaagctgcagagcatgttgtgggtggttctgccggttggattattccttcccaaggagacacctccttatatacctcctttgcagctaataacactttcagactaaacgacatactcgtgttcaatt

SEQ ID NO: 1394 - DNA, 289 bp, Glycine max
  unsure at all n locations
  Clone ID: 700996495H1
ctatgtggaggagccacttccggaggatgaacaagttcagcctccagcagaaggcgccgagggggganaagcagccgctactactaatgatgtggaagacaagcagatagatggtcaagcttaaaangtcagatgtttattggagtagatgtggccgttcatttgtgaacagatcgcactcagaataattttctttaacactgctttgtcggccaaaattttgcaatgtgatgttcctttggaccaaaagtttaaagcaaaacctgagttttttttnttctttcnatgc

SEQ ID NO: 1395 - DNA, 293 bp, Glycine max
  Clone ID: 700996496H1
gtctcagagggtctgtgacacacagactcacttccaagttccaagctttgggccatttattcccactgtttattgagaacaactgcagaacatggcacagattttggctccctctacgcaatggcagatgagaatctcaaaatcctctcccaatgcaagtcccattacatcaaacatgtggagttctttattgtggaaacaaaataagaaagtttcacccacaagttctgctaaatttagagtgatggcaattaagtctgacaatagcatcatcaacaggctagagggtctac

SEQ ID NO: 1396 - DNA, 278 bp, Glycine max
  unsure at all n locations
  Clone ID: 700996501H1
gaaattttgtcaaaattcggcaacactgttcctcattgatccaatantacggtttcagtagggagcgggaaatttgaaatacaagaatctgattggtttagatgcttctttgatgggtgaaatgagttcctgattggtcaattttgaatttcccgnttttcataaaaacgtctatnngaaattcgcttcttccgtntctcttaattatccattgtcgtaccgactcagtcgagtcaacggtaattacgaaatccaggagttatgtaattttccccgga

SEQ ID NO: 1397 - DNA, 276 bp, Glycine max
  unsure at all n locations
  Clone ID: 700996502H1
gcagtancggctcgtacccaagaacaagaacatggattatggcttcctgcttttgctcctcttcttccatatcttccttcctcactcctctggtaaacccagtggagtgtgtgtttctcaaggaggtcgttttcctcccttcaaatcagagggtagcactcccaaaaagggtcctaaagatttgactctttgccggatctttcgcnaaaaagacttgctgcgatgtaacccatacaccatctgcatttgtccgtnaggnagcngcntctaatgggg

SEQ ID NO: 1398 - DNA, 275 bp, Glycine max
  unsure at all n locations
  Clone ID: 700996503H1
ganattttaaaaatgactgggataaacttaaganttcaattattganattgaataagtaaacaatttaattggattggtcgaatggtatcaaaaaaatggagtactaactcccatttcttatttattattgaattaaccgatcaacttgctttgttatcgaacatttctttttgatttcaaaaattttcccggaaaaacatttgaatctatntttatatgcgcantcaatccnactacttcggtccngaggtttctgcgcttgaaaaaaaaatcc

SEQ ID NO: 1399 - DNA, 272 bp, Glycine max
  unsure at all n locations
  Clone ID: 700996504H1
aattttggccccaaaacccctatgatttcaggaaatcaaaggcttgactggactgacagagtttacctaaaggtgcttcctgaagatgagaggaagttcaaattttggccccaaaacccctatgatttcaggagtattgtcctacagtataccgaaagcatgcgactgctaagtgaagtaattattaaggccatggcaaagtcatgaacttggaagaggattgcttcctaaatgaatgtggagaaagagctgatagtntctgagatccaacc

SEQ ID NO: 1400 - DNA, 271 bp, Glycine max
  unsure at all n locations
  Clone ID: 700996505H1
gaagattatcgtgaatgcgtataaaaggaaaataaagaaattagcgtcaaaatgttgggtgtgttcagcagctccatagtgtcgccgccggacgagctcgtggcgccggcagccgtactccgtcgccgaagatganggcggcggcgctgcggaagcggttcgaggagaagaacccctccgccgtgtcggtggaggtcggagagcatgtccagctcgcttatacccaccacaaacgagtcgccgtttcagcccagatcctttgctgtcaagg

SEQ ID NO: 1401 - DNA, 266 bp, Glycine max
  unsure at all n locations
  Clone ID: 700996506H1
gttgacagtatggatgacgattggttagcgtgacaacaactacaaggatagattgttttctttaagtgaattcctatgttgctctcatttttatatttctttcggtaattgggattatcgggcactatcattgtaatcattttagtacccccctccccatttcactgctttatttattttggataaataaataagggntgcnaaatatcagtagaggcaagaacccancatcgagtgatgaacattttgctcccatgctcctgtta

SEQ ID NO: 1402 - DNA, 265 bp, Glycine max
  unsure at all n locations
  Clone ID: 700996507H1
tttcctgggaaagtggaacattgcataccacattgtaaattacaantgtagaaaggatgttaatttatcttcagtttcatgtatccttctttacttttatatttgtcttctttgatttaattcttttattactttacgtcaagcaatttggtattcatataacacatgcacggtttgtatgacacagggaggctgtcaaaaatgtttttaatccttattttgataaaggtaagctattgttggatcaagctagcttgatagtgat

SEQ ID NO: 1403 - DNA, 267 bp, Glycine max
  unsure at all n locations
  Clone ID: 700996508H1
tctgaggcaagcatcaatgtacaattgtgaaccaaagtaagctgannaaganatgtacatagcatntacaaatgtaggcttttgaactgaagcactgatgaagctggagcatgcaagtctctctcaaatgcggtattgcacgctactagtggttttctctaatgtctgatccattacttctgtatatagcacgccctcctaagcagagatacatactacttacctntactttcagatcacttttagtttctcgganaagtacaggag

SEQ ID NO: 1404 - DNA, 269 bp, Glycine max
  Clone ID: 700996509H1
ggttaaatgggcttattccttgcagttgtgtgcaaatacggaactggtttgactatcgtaatcatatctgtattgtaagtatttaatttgtgatggaatcatttccccaatttacaaataatttgggggttaagacaacggtgaatttaaatggttttaacaggtgtttgagaaacttggaccaagcttatacgattttctcggaaaaacaattatcgctcatttcccattgatcttgtccgtgagattggcaaacaactattggaatg

SEQ ID NO: 1405 - DNA, 273 bp, Glycine max
  unsure at all n locations
  Clone ID: 700996511H1
gnacaagactagtaccattctggaatgtgannnntataacaaagctgattttccagaagaatatactgatgccaaatnntttgtcatcangtcttacagcgaggatgatatccataagagtattaagtataatgtgtgggctagtacacaaaatggcaacaagaagcttgatgctgcatatcaggaggcacagcagaaacctggcggcacccctgtttntctctttttctcagtaagtatctgtgaatgatggcagtcattgcttttaattgc

SEQ ID NO: 1406 - DNA, 272 bp, Glycine max
  Clone ID: 700996512H1
catctttagttcttcagtaatttattgtgggattctattctaagattttgagaatgtctagctgtgggtgtggaagcagctgcaactgtggcagcaactgcggttgcaacaagtactcttttgacttgagttacgttgagaagacaaccacagagactctagttttgggtgttgggcctgtgaaggcccaattggagggtgctgaaatgggtgttgcatctgagaacggtggctgcaactgtggatcaagctgcacctgtgacccatgcaat

SEQ ID NO: 1407 - DNA, 275 bp, Glycine max
  unsure at all n locations
  Clone ID: 700996513H1
aggntggcgtcgagaccaganntagttgccccgantganattttntacgncgatgccgaagctacgcaagtacactcttntncccgtattgttcaaattcaggcgacnctgncagaganagcnctcgaactacttgntttgcctgatgacagcgttcctaaattactccttgatatcggntgtngatcnggacttancggtgagacactntccgagaatggacaccattggatnancgttgacattcagcatcaatgcttaatgttgcggtggag

SEQ ID NO: 1408 - DNA, 279 bp, Glycine max
  unsure at all n locations
  Clone ID: 700996514H1
tacaaggaaaaattccttcgggctatnncaacnctcnttttgntttgggtggtgattggtttcgtgatgctcatgacataaaatgtcttgcttttgatggttatttcatttccctgtactatttgcacctcactgcttcacacctcatactgcaagaggaaataaagaagtctgttccagctcagtgggacccagcttcattaaccaggttcattcagacatatggcacacacataataataggtatggctgttggaggtcaagatgtaatttgtgtca

SEQ ID NO: 1409 - DNA, 280 bp, Glycine max
  unsure at all n locations
  Clone ID: 700996515H1
gagcgagcttgtggaagctcttgttcngagcggagaagctcaactcttaacagaagattgggngggagctgtggaggatctgagatcagctgctcaaaaattgactcaggatatgaatatccgtgaagcagtaatgagggccgagaaagctttaaagataagcanacgcnaggactactacaaaattttgggatttcaaaaacagcttcggctgctgatataaaacgtgcctacaaganatcgcttacaatggcatccagataagaagtcgacaagagga

SEQ ID NO: 1410 - DNA, 278 bp, Glycine max
  unsure at all n locations
  Clone ID: 700996517H1
tttttgagtaccatgatgatgacgaaccctctgaagatgtcgacntaagcatcaagggcaagaggaaagatgatggtggcatctttttgagactaagaattgctgataaagaaggtcgcatccgaaatatttatttcccatttgacatagagctggacacggcaataagtgtggccactgaaatggttgcagagctgggacatgactgatcaggatgttaccagantagccgatcngatagatgggggaattgcgtcctggtacctgnatggagaccc

SEQ ID NO: 1411 - DNA, 281 bp, Glycine max
  unsure at all n locations
  Clone ID: 700996519H1
cggaggggttcatagntttagggaatcgattactatnactagtaataaattgtacaaaaaataanaatatanatnanatnaatataaanagaccaaacacaaattttntgtgattagtcgcggtnttnccnctaaaanatgaaagtagaccnctaaaaaaggcaaggagatgtttgnntaaanntaattcccctttcaagttcttcttttctgagcggacagggacnatatgaatgttnnattnngctcctatcaccacttacnnagcatctnatgntcnc

SEQ ID NO: 1412 - DNA, 277 bp, Glycine max
  unsure at all n locations
  Clone ID: 700996520H1
ggcancttgcaatctatcaacacaacctggaaccaattganaagaganaaagnctgattaatgacatnaatgnatccgaggagaagcaacaaggcatgatagcccgcttattgngcnaaattttgcagatgcagtgttaaacagncactccaacaggncctcgccncggcacatngnctatntcagctgatgaaacaaacattcatatnnagtccnacatacaaccatccntagctgaagttcggntttaaatcttcncactacgtagtattccttt

SEQ ID NO: 1413 - DNA, 269 bp, Glycine max
  unsure at all n locations
  Clone ID: 700996521H1
gattaatggggtataaagcttaaatgggatcaccatttgacatttcttctgtggcaagcatcaatgtctcctattttccatgcttaggtaatactttcaggtgctggttttcttaaaatgtgaaccaaagaaagcngaacaagaaatgtatatagcatgtacaaatgtaggctttgaactgaagcactggtgaagctggagcatgcaagtctctttcaaatatcgtatccaagtgactagtggttttctctgatgtctgatccanttac

SEQ ID NO: 1414 - DNA, 270 bp, Glycine max
  unsure at all n locations
  Clone ID: 700996522H1
gnagcaagttctcagcaacagctttaaatttgcacaggctctgagtgagagaagctatgagcttgtctctggtggaaccgagaatcacctggttttggtgaatctgaagaataagggtattgatggctccagagttgagaaggtgttggaagcagttcatattgcagctaataaaaacactgttcctggagatgtgtctgccatggttcctggtggcatcaggatggnccttccctgctcttacttctagaggattgttgaggaggattc

SEQ ID NO: 1415 - DNA, 269 bp, Glycine max
  unsure at all n locations
  Clone ID: 700996523H1
agcaagcgagcatggctccgaagaaggttcttctcctttgcggggacttcatggaagactttgaagccatggttccatttcaggcattgcaagccttcggtctcgccgtcgacgccgtctgtcccggaaagaaatccggcgatgtctgccgcaccgctgtccatgtacntgccggcgncccagacttatagtgagacggttggtcacaatttttcacncaatgcaacgtttgatgaagttgatgctgcaagctatgatgggttgtgggt

SEQ ID NO: 1416 - DNA, 269 bp, Glycine max
  unsure at all n locations
  Clone ID: 700996524H1
tcggctccgtccccgangtggtcgtntcgtagcccggnantacgagnaggagttcctgaaaacgcangancccagcttctcgaaccggttcgtgantgcagcggttcaccacctgtcctatgggttcaaggggttcctcttcgcgcnctacggaagctactggaggttcttgaagaagatttgcatgtnggagcttctcggtggnngcancctcgaccagttccggcattgagggagcaagaaatttgaggtttctgcgcgtgttgagg

SEQ ID NO: 1417 - DNA, 249 bp, Glycine max
  unsure at all n locations
  Clone ID: 700996525H1
ggagatgctcaggagcagcacgctncncacagagtgttacantcacctgtgttcatcacagtccacagacaatggttccaatcaattcccgtaaattatagattctgtgacgctgctcggaactctctatcatccaactccgccatcttcaagtgnagaagaacggctaattataatcgtaaccgttctggaatgggaaccttcaccacgcgcgcgttggcgcagcgctccagaagccgacgaatcatc

SEQ ID NO: 1418 - DNA, 272 bp, Glycine max
  unsure at all n locations
  Clone ID: 700996526H1
gngacgaaggaagtgaaaagagtaggttccatntgttgctcaatgagcttcaggccatgatgagtactttctttgttncagactatattccattcacgggttggattgataaactcaaaggattgcatgcacgacttgaacgaaatttcaaggagttcgataagttctaccaagaagtcattgatgagcacatggatcccaatagacaacaaatggaggaacatgatatggttgatgtcttgcttcaattgaagaatgatcgttctctttca

SEQ ID NO: 1419 - DNA, 289 bp, Glycine max
  unsure at all n locations
  Clone ID: 700996531H1
cgcgcgcntnggcgcagcggctnncagaacgccgacgaactcatcgattccgtcgaggacatttattttcgattgtgacggagttatatgganaggtgacaaattnatagaaggggtgcccganacgcttgaacatgcttcggtcnaagggcaaaanattagtttttgtcnccnntaactnaacaaagtctaggaagcaatatgganagaagtttganacattggcctgnatgtcagcgaggaggagattttgcatcatcctttgcagctgctggatatctgnagtccc

SEQ ID NO: 1420 - DNA, 294 bp, Glycine max
  unsure at all n locations
  Clone ID: 700996532H1
cnacacaacaattcactaagctaaaatcacttcatcatnngcttcctcgtgtgcttcctctgccattgcagctgttgccatctccacaccaagttcccagnagaatggatcactnctgggaagcacaaaagcttcttttcttagtgggaggaaactgaaggtgaacaactttacagcaccagttggagcacgatccagcactacagtttgcgcagttgctgagcctgatagggcctctgtggttcccaggcagcaaccctcctccatggctagatggcagtttgncaggagatt

SEQ ID NO: 1421 - DNA, 280 bp, Glycine max
  unsure at all n locations
  Clone ID: 700996533H1
tagatctagggtttattttccttttcattttgaatttgaacaanttttgcgtcttcaaagaaataggatgggagaattganagacactgaggcttacgaggaagagctcatcgactacgaagaggaagaagaaaaagctcccgattctgctaaacccgttgctgaatctgggcaagaagggttatgttgggcatcccatagttcggggatttcgagactcctgttgaaaccagagcntcttcgagnccatgtggattcnaggattggagcatccttcaga

SEQ ID NO: 1422 - DNA, 282 bp, Glycine max
  unsure at all n locations
  Clone ID: 700996534H1
gttgctgcgaaaactgctggtgccgaanatattatgatgttgaacaatggctgcctttgctgcactgttcaggggtgaccttgtcagantgatttccgaattagtcgcaaagaagaaaggnaaatttgaccanattgttattngagactacaggtttggcnaatacctgggnccaataaatccaggactnttatgcagaggnanaaatatttttnatgatgtccaaattggnatngtgttgatnnctcnggttgntgcnaacatgnnggttntcatcatgtg

SEQ ID NO: 1423 - DNA, 265 bp, Glycine max
  unsure at all n locations
  Clone ID: 700996535H1
tgataacatcanacagcattagtatgtatcancaacaagggtcagatccaacaaagcaatcaccggcaaccggttttccggtgagctatagcaattcaacancgtattcgaccaacgaggcttcctacgctccagtcccacctccccagttcaaanctcntgtcgatggtccacggctctgtgactgcttctccgaatgnggaaatgttgcatgacgtnntggtgtcnatgtgttcacttggccgattgcngaattgttgacaag

SEQ ID NO: 1424 - DNA, 269 bp, Glycine max
  unsure at all n locations
  Clone ID: 700996538H1
ggaacacactaagcagatatggatgggatgcaaatagctctacctattgttggagttattgcggctgcagctgcgaccttctatgcagtaagctttgctgaacttagagagaaatcgtttagagatttggaagaatctgaatatgaagatggggtttataggccatcccctagctcccgagagaggcgtgccagaagacaagctaacaaaaataacaanagatgnacgaccatcattcaatcatctatgcttttcccaaggtgtggtgt

SEQ ID NO: 1425 - DNA, 262 bp, Glycine max
  unsure at all n locations
  Clone ID: 700996540H1
gatggtgatggtnagaagggtgaaatgctggctgtcaatagttctgctagtaaggatgacaatagtgggatatgctcaagttctgctggtcctaataacaattctacccagactacatcattgacttctggtgctttcattgactgtcctgggtcatattattcttggccacctccacttcctggnaactataanatgcccccatttaaaaggagccatagtcacactgatgcnagtcggtatgttccataaggggtccgcg

SEQ ID NO: 1426 - DNA, 266 bp, Glycine max
  Clone ID: 700996541H1
gtttactgtgcaggtatttgatggacacggagggaagagcgctgcacaatttgttcgtgatcatctgccacgggtgattgttgaggatgctgacttccctttggaattagagaaggtagtcacaaggtcatttttggagattgatgcagagtttgcaagatcatgttctaccgagtcttccctgtcttctggtacaactgcactgactgcaattatatttggaaggtcttactggttgccaatgctggagactgccgcgctgtatt

SEQ ID NO: 1427 - DNA, 269 bp, Glycine max
  unsure at all n locations
  Clone ID: 700996543H1
tatctgaattgtntatncattcttggcnccatggtcaagncctcctccgttgtgctgtcantggnngcttcggccatggctgcttcaacntgcacatggncgtcatggaaacatgtcaagaacctcntcgtctncggtgacagntatacgcaaactggttncgatcttcaacggngatccagngcantgctgagaagcccttcggcaacccagnntaccctggctggacatccgccaaggccccaattggangattnctcgccacnaca

SEQ ID NO: 1428 - DNA, 273 bp, Glycine max
  unsure at all n locations
  Clone ID: 700996545H1
ctgggtcattgagcannttctcnattctccaannanagaacaagaacnntgtantggaattgtggttgtttctcgactttganaagaccatcgtgcgatgtcgacagtgcacaactggggcgtcgatganttgggtttcaccgattngtgtaaccagctccttcccaccatgccttggaanngtcntggataggangatganggngctcattcantggtaaaaccatagnggcctacgaagangntttgcataggatccctgcaccccagagt

SEQ ID NO: 1429 - DNA, 284 bp, Glycine max
  unsure at all n locations
  Clone ID: 700996546H1
ttaatctcttcgcngtnatttgtctctgacaacctcntcancaccancactnnccacattttcacaatttcnaatctgncnactatanaaaaccnctacgccaccacattagtacaattgcatgcagtgncaacncactncgaaggagaaaanctcccacatcggaggaacgttctncttgggcctaggaggcntttncggcgctgcngtnatgtctctgcancaaccagactnnacctnttgcctctgctgctcccacacccatgttcctctggtgttggatc

SEQ ID NO: 1430 - DNA, 274 bp, Glycine max
  unsure at all n locations
  Clone ID: 700996549H1
ctgtttctgtatcagatgatgccttcttcgattccccagtntgtgactgangccttcactgggcccatgccggancccaccgggcctcaagcncaagaaggaagggctcaaggtgaagcanccctgtggtttttgtgccanggatgtcactggtgggcttcaactgtgggagggtcaccngtgtgctnangggctgttcaggaaacncttgtggggtcgtattttggagaagntnataaaanactttcatgccgggtggcnccnatgttcangg

SEQ ID NO: 1431 - DNA, 267 bp, Glycine max
  unsure at all n locations
  Clone ID: 700996552H1
ctctgattttgtaattnagttcgatcaaatagctcccagtactttaattgatttctgaatatccatcacttaatttgaaggaangatggtgagcgtagtgagatccgccaggcacaaagggcagaaggcccagcaaccatccttgccattggaactgcaaacccaccaaactgtgttgatcagaggcacctatcctgactatacttcagaatcancaacagtgagcactgacgagctcaaagngaaattccagcgcatgtgtgacag

SEQ ID NO: 1432 - DNA, 267 bp, Glycine max
  unsure at all n locations
  Clone ID: 700996553H1
cngcattctggcctgatgtcnattttcgtgtcattattgcactgatagtgtcacagatagttcttatgggacttcttaccactaaaaaggctgcttcatcaactccatttctaattgtactcccagtactgacgatatggttccatatatactgcanaggacgtttcgaacctgcgtttgttagatatcccttacaggaagcgatgatgnaagacacattggcaacgagctncagatcccaatttaantaaagnttacntccagaat

SEQ ID NO: 1433 - DNA, 268 bp, Glycine max
  unsure at all n locations
  Clone ID: 700996554H1
gnnagaatttgacagagtgagaaatatagaaatggcgtcgtggtgcggtgctcggagcttccagattccggcgatggaagacagcgcactgcgcaaccgtgcttcattggccgccggagtagggtgtttgtcggtggccggcacctccttctggcgctcctcttcgtcaccgaagcgctctttgccattcacatgcttgagcatttcttccgatactcgtattaaggnaagtgttcaaactgaaggtgcacctgcggctttgggacca

SEQ ID NO: 1434 - DNA, 268 bp, Glycine max
  unsure at all n locations
  Clone ID: 700996557H1
ctctctgactcgaagagagggttagaacccccatcttcttcccctcaacgatgccagtgccttccaaacccataaacacctncaccatcacaatcatgctcaccttcaccttcttcctcctcttcttctccggtttcctccacttcccctccgcttcntcctcctctttccctcccatcacccgccccacaaccacgccgcccacggggaacccttctccgatctggtcgcggccttcaggaaatgggattcccaagtgggctgcgct

SEQ ID NO: 1435 - DNA, 270 bp, Glycine max
  unsure at all n locations
  Clone ID: 700996558H1
cgttcgtcaccatgactttcaagcgnannaatggaggtcgcaacaaacacggccgcggcnacgtcaagttcatncngatgctccaactgcggcaaatgctgncctaaggacaaggctatcaagaggtttctggtgaggaacattgttgaacaggctgcagtcagagatgtgcaggangcttgtgtctacgnncaatacacgcttccgaagctgtangtgaagatgcagtattgngtttcctgtgctatccantctcatgttgtgagggna

SEQ ID NO: 1436 - DNA, 269 bp, Glycine max
  unsure at all n locations
  Clone ID: 700996559H1
ttgaacgaaagtacgggatacattgactatgnaccagatggagaaatcagcaacactcttcaggccaaaattaattgttgctggagctagcgcttatgcacgtctgtatgattatgnacgtgtacgcaaggtttgtgataaacagaaagctatattattggcagatatggcacacatcagtggattggttgcagctggtgtcatcccatcaccttttgattatgcagatgtngttataccaccactcacaagtcacttcggggaccacg

SEQ ID NO: 1437 - DNA, 278 bp, Glycine max
  unsure at all n locations
  Clone ID: 700996561H1
aattggnccggggnnggccatgttgatntcaaagncttgcaggtcagatntcgtncaaacactcctttggttcttaaaggcattcaccctaagcatcaacggaggggaaaagattggagttgttggtcgaacaggaagtggaaaatcaactttaattcaagttttcttcaggctggtggancctacaggaggaaaaataatccttgacggcattgacatatccgccttggggctncatgatcttaggtcaggtttggtatcatcccntcaggagcctg

SEQ ID NO: 1438 - DNA, 291 bp, Glycine max
  unsure at all n locations
  Clone ID: 700996564H1
ttacagaacaaagggaagtataagacttgcaactttanttcccttcaataaacatgagaaaggcagggaaaaaaggtgacactgattctgttgcatgcttagcaatgtttggaangtntagagttgcagccagaaatgcatgaagtggttgattcaatggttgaaagactaagaactttaagccgaaattcagacgggcaattcatagctgtggacttgagggttgatatgttgaataagaagggctgccaaaatagtgatattgagaaaagcgctacnatgcacaagagc

SEQ ID NO: 1439 - DNA, 275 bp, Glycine max
  unsure at all n locations
  Clone ID: 700996565H1
tcactttcatttctacctccctggctctgttccgncgatgacgatggcgtttagggtgcgaaaccctggactccgcttntatcattccttctctctctcttgtccatcacttccgccaaggtcttcttcgaggagcgtttcgatgacggatggggaaatcnntgggttaaatcagattggaaaaaagatgagaacctggctgnggagtgggaccncaccnttngccaatggnatggnagacgnaanggncananntattcaacccanggaggatc

SEQ ID NO: 1440 - DNA, 263 bp, Glycine max
  unsure at all n locations
  Clone ID: 700996566H1
ggnanaacgttcaatgagttacaaaagctgcttagtaagactaatggccaagttgttggtgacttgatgactccaactccacttgttgttcatgaatcgactagtcttgaggaagctgncaggctgttacttgaaacncnatatcgtcgactacctgtggtagatgatgatggaaagctggttggactattacacggggaaatatgttaaggcggctctactatcaaaagtgcggagatggtgaaatgttgtnacaagtcatc

SEQ ID NO: 1441 - DNA, 269 bp, Glycine max
  unsure at all n locations
  Clone ID: 700996567H1
tgactgcctccaaggatcgcgagancttcgtctacatcgccaaactcgccgagcaggccgagcgttacgaagagatggtggaatcaatgaagaacgttgcgaatctcgacgttgaactgacggtggaggagcggaatttgctttctgttgggtacaagaatgtgattggtgctcgcagagcgtcctggaggatcctgtcttccatgagcagaaggnngaaacaaaagggaacgagttgaatgcgaacggattaaaggagtacagaccnc

SEQ ID NO: 1442 - DNA, 267 bp, Glycine max
  unsure at all n locations
  Clone ID: 700996568H1
ggtatagtgtgttgggcaaccatgactacaggggtgatgttgaagctcaattgaatccaatccttcagaaaattgatcctagatggatctgccaaagatcatttattgttgatactgaaattgctgagttctcttcattgattcaacaccttttgtggacaagtattttcttaagccaaaggaccacaagtatgactggagaggagtgcntccaagggaaaaatatttnatcaaagctcttgaaggatcnggaaatagcattgaagg

SEQ ID NO: 1443 - DNA, 264 bp, Glycine max
  unsure at all n locations
  Clone ID: 700996571H1
ggnaagttggtacaagagaatatatttctcaaactttgtcttttccaaatggcanngctattgagcctgcaatggatcttccattgtcangagcaggtagcgttttaggaatgggccccacactatcctacaatcattcaactgcttttgggtacaacggactgacatcagtgcctgctttgtctttttcaccagccatgtatggcatcacctggtggcccaattccatacatggtagatcaagaggaagtccagtcgtgcctc

SEQ ID NO: 1444 - DNA, 264 bp, Glycine max
  unsure at all n locations
  Clone ID: 700996572H1
cgccggcaaggggaaggcagcgaaagaccctaacaagccaaagaggcctccaagtgctttcttcgttttcatggaggagttcaggaaggtattcaacaaagaacatcctgaaaacaanngcagtgtctgctgtgggcaaagctgctggagcaaaatggaagaccatgtctgatgctgaaaaagcaccttatgtggcaaagtctgaganaaggaaagtggagtacgagaagaacatgagagcctatcaacagaaacaggcngang

SEQ ID NO: 1445 - DNA, 264 bp, Glycine max
  unsure at all n locations
  Clone ID: 700996573H1
attatgtagtgattcanatatccatgctcttcacaaagaattggatgaagtttcatgtcctatctgcatggaccatccacataatgctgttctcctcctttgcagctctcatgagaagggctgcagatcttacatttgtgatacaagttatngacattcaaattgcctggaccgttttaaaaaaatgagggacaattttnaggagaaccaaaatttacccagttctttagtanacacaaacaattctggtaatagttttgatat

SEQ ID NO: 1446 - DNA, 245 bp, Glycine max
  unsure at all n locations
  Clone ID: 700996574H1
ttcccttcacaagattctcacaaacacctcttgagaaagaannnatggctgccaacacattgangagttctgccatctcagccttcccatgtctcctttcctcctcaaaatccagatttgccgcagcagttcctctttccagctttgttgtcaccaatgcctcttcttctcgcttttccatgagtgctgactggatgcctggccagcctagaccccccctacttgatggttcagcacctggtgaa

SEQ ID NO: 1447 - DNA, 265 bp, Glycine max
  Clone ID: 700996575H1
gtaaacttggattaaatgatagagtattattagaggcacaaggtagaacaaccaagggaaaatcaattgacttggaagacatcaaatttcatcagtgtgtgcgtttggcccgatttgagaatgatcgaacgatttcatttatccctcctgatggatcatttgatttaatgacatataggctcagtacacaggttaagccttagtttgggtggaagcacaagttgaaaaacattcaaaaagccggatcgagttatggtaaaagcta

SEQ ID NO: 1448 - DNA, 266 bp, Glycine max
  unsure at all n locations
  Clone ID: 700996576H1
gnagctctattnattgattgctaccnattctgcatacttccagctgagcagattgtgtttcatctattatggttgaccttaacagtacaaggggaagctcaacgcaggaactatgcattgttttgctgcaatatttgtacgaaagaggtttaggtattatggctagctgtgatgtagtaggtggtactattagcggcttacttacgacacgacacccttctgtctgttactcgagcctgtgatctcgcnttggcatccattaaagg

SEQ ID NO: 1449 - DNA, 283 bp, Glycine max
  unsure at all n locations
  Clone ID: 700996578H1
cgggnatttcagcgcattnctatcaagntgacntctgattaccatagcaggagntgatgntgcctctatctgtcnaatggtgacatgttccagaataaccatgatgnaatcgactttnagtttttggggaacattagaggcgaagnctggaggattcanaccaatgtntangggcaatggtagcaccaacattgngcngagaggnaagatatggtcccnggtttgcacnntgcngctgattccatcagtacacncnccntctggacagactnctcagatncta

SEQ ID NO: 1450 - DNA, 277 bp, Glycine max
  unsure at all n locations
  Clone ID: 700996579H1
anagggattcatcttcggtcattttatttngtatactaaaaganngntaataannngcataatcatatnaactattnaatagnaaaaatggcccgntcattatcaaaggccaatcttcggtagnagagaaggttccnttggaacacttatttctntttccgtataccgggtctcnttcntcatttcnaaaaatttanngaatttcgacttgcaatganagacaagtgtgggggatanatataantgacaaaangatatggcacatnatcctnganga

SEQ ID NO: 1451 - DNA, 269 bp, Glycine max
  unsure at all n locations
  Clone ID: 700996582H1
gtaatgcaaaccctggttgatccaaaacgtccctgaccnctaccctgatcttctcaaagangagaaggaagctgataaagttgcngacaaactacaaagtacgggnatatctggagctggtgatggagctgcttcctcagcaccgaagcaagangaggtgaagcntcttcctggtgggncgatcccagacannggataagccngaggtntnttnttgagnnggtcctactnacaagcgcanagtggatcacnangtganggacgncccc

SEQ ID NO: 1452 - DNA, 270 bp, Glycine max
  unsure at all n locations
  Clone ID: 700996583H1
gncgaaaggnggggttaatgggcaacctaaccttgtcaccatttctgctacatcaaacataagtgaaagtccaaaacaacactgcacggtcctctattcatcaatcatttcctccttgtcctaccttcacacaggatgattatgcattcattcttcaggtgtcctccacattttcaagtcttattgtctntaccttgctacaaaaccctgacagcncatgctgcngcaagttttgctggctacattttggncctatgcanatgcagaaac

SEQ ID NO: 1453 - DNA, 269 bp, Glycine max
  unsure at all n locations
  Clone ID: 700996584H1
tgganancaattggatacnnagtggacaccnnggagaagttgatcagaaaggagaggcctttggaanagggattantaggacncaatgtctgaaactgattctnctttgatccaatgnctcactgnnaaancgacttgaagtcactgnagatcaaaggacagancctgtacanggtgcaaatgtgatgttgtgattgtggggtctggttgtggtggaggagntgcagatgnanttctgcaaattctggtccatanngtagtagcacntg

SEQ ID NO: 1454 - DNA, 261 bp, Glycine max
  unsure at all n locations
  Clone ID: 700996587H1
acaagaatgtgtgattctacactaacaaggctctaaaattatgancaaattcncgcaaatccgtagtgctttaagaataattgctgaattgtgtcaccgtttaagtcacatagtattgtgctgtgcttgagccttaaggtcctgtgttgtatgtatttgcttttatctgccttatgacgcgttcatgtgnangtacgatgtaangactgctcacctgagtacgtcgntggtgttttggggnangatgtatcacaatgcntg

SEQ ID NO: 1455 - DNA, 263 bp, Glycine max
  unsure at all n locations
  Clone ID: 700996588H1
ttgtttcttccctctgttcctgttctctaattcctttttcctcatnnatttccgttgncatctaatcactatggttttgccaacatattcagggcccaaatccaatcctcagcttccataaatatttgcaccnaaaaaatcgacaccaatctcttaaccatcgctgaatcctctacgaggatgngctctgggctgtgcctgtnttcgcgtccgttccttcaatcagttccgcgccgacgcnttcggaatacaagatcatacga

SEQ ID NO: 1456 - DNA, 264 bp, Glycine max
  Clone ID: 700996589H1
tgagtttcttcttctgttgcgttgtgtgtgagtgtgggcacggtaagatgcagaccattgctaggcgcttagggcagcaatcgctgaggccatcgacgtcgctcaagtccatctatccaatttccgatcaccattatggaatggatcacgagcgttacgtttctaccctcgccaccaagggagttggtcacctcgttcgtaagggcactggtggacgatcctccgtcagtgggcattattgctacagtatttggggcaatggat

SEQ ID NO: 1457 - DNA, 266 bp, Glycine max
  unsure at all n locations
  Clone ID: 700996591H1
gacagagggagctcttcaaagaaagagagtnnaaaggggggaaattgggttccaaaacacttcttggtgtcttatagcaaagaagggggttgggaatgttcaccaattcaaaagtcagtcccaaaagccccaatcgccaccttgtaagagcatgtttggtttacggttacaaaattatatttgaggcaaaagtaattttgctaacgaatgagaggacccttcttttgtgttattttacttttatctattggattgcatggaacaca

SEQ ID NO: 1458 - DNA, 271 bp, Glycine max
  unsure at all n locations
  Clone ID: 700996592H1
ctgtcaacagagctcttttgactcctgaatgnttctggagctggagcttcagctcccagttcagccttctttgggaccagcttgaagaaggttattgcctcaagggtccccaacagcaaggtttccggtggaagcttcaagattgttgctgtagaagagaagaaagagattgaagagacccagcagaccgacaaggacagatggaagggtcttgcctatgatntctcagancaccaacaagacatcacaagaggaaagggtttggttgact

SEQ ID NO: 1459 - DNA, 285 bp, Glycine max
  unsure at all n locations
  Clone ID: 700996593H1
ttttcttcctcctccactggctgnncctcgctgccgtgtctctgcctagcgtgaaattggccncatttcccatctgggtcctgnaaattgcgattgganacgcgtttttccccggtttctgggcttgggctcagnagtagtcagnaatgatgtctgtcncnnggcnaaagcattgnntttgctgggcaaaaattnggnacncttgtggctgcnnttcccaatggntnctntcggttggatagggnacnnngtgangaactatgcccaagctgnaatagnaatnat

SEQ ID NO: 1460 - DNA, 282 bp, Glycine max
  unsure at all n locations
  Clone ID: 700996594H1
gcagatcttcgtcaaatncctaaccggtaaaacgattacgctagaggtcgagtcctnccgacacaatcgataacgtgaaagctaaaatccaagacaaggaaggcattccaccggattcagcagcgtttgatcttcgccggtaaacaactcgaagacggcanaactctcgccgatttacnatattcagaaagaatcgacgctccacctcgtcctccggnttcgcggtggcatgcnaantctcgtcaaaaccctaaccggtaaaaagattacgctagaggtcga

SEQ ID NO: 1461 - DNA, 285 bp, Glycine max
  unsure at all n locations
  Clone ID: 700996596H1
tagaaaagaggagtttgagaatggcaacgatcagcgcggttcaggtggagttcctggagtttccagcggtggttacttcaccagcctccggcaagacctatttcctnggcggcgcaggggagagaggattgacgattgaggggaagttcataaagttcacaggcataggagtatacttggaggataaggcggtgccatcacttcgccgctaagtggaagggtaaaacttcagaggagttagttcacaccctccacttctacagggatatcatttcagggccgttt

SEQ ID NO: 1462 - DNA, 104 bp, Glycine max
  Clone ID: 700996601H1
acaatagtttcccaattggaaccaccccaggtatatcaagtatcacaacaaaaggctcttttcaagaagaagttacatcaggaattaaaggatccagtgggttt

SEQ ID NO: 1463 - DNA, 105 bp, Glycine max
  unsure at all n locations
  Clone ID: 700996602H1
atgncagctcaatattgccaacccgtccactgggtcccaaaaattaatcgagatagatgacgacaagaagcttcgcatcttctatgataaacgtatgtacagctg

SEQ ID NO: 1464 - DNA, 108 bp, Glycine max
  unsure at all n locations
  Clone ID: 700996603H1
cctaaccactactntctttttcccaattttcgaatctctctcctnccatggacccaacttccgatcccctacccccttccggccaccaccgtccccttcactgtcgaa

SEQ ID NO: 1465 - DNA, 103 bp, Glycine max
  unsure at all n locations
  Clone ID: 700996604H1
cgccaagttgcggattcgatacccttttcatccaacaaggtggactttntnttcaacaagttttctgtcaaacccgggtcagaggaggctccagatccatgaa

SEQ ID NO: 1466 - DNA, 123 bp, Glycine max
  unsure at all n locations
  Clone ID: 700996605H1
cgcgtgttacttttcttggcgaaaacagaaaggggcgaaggcgggcaaancacaaactttttttngtttttttggtaggaggcgagagcagaanaaaacatgttgggggatcttccagcagtt

SEQ ID NO: 1467 - DNA, 101 bp, Glycine max
  unsure at all n locations
  Clone ID: 700996608H1
ggacttctgaatgctacatgtgggaatgttactgagctcanaatagcaatatntgcccttagcagtaacaaaattgccgtggtcaagtattctctgttggg

SEQ ID NO: 1468 - DNA, 108 bp, Glycine max
  unsure at all n locations
  Clone ID: 700996610H1
atctcctcccatcccatttttcaggcaccaaagtttgaaacttttctccaattgggttgaggagagtttgactccaaatttttatttttctaaacgaagcagtagcnt

SEQ ID NO: 1469 - DNA, 115 bp, Glycine max
  unsure at all n locations
  Clone ID: 700996612H1
gtgaatgcgtatnaaagggaaatnaaggaattangcnntccaaanggtggggggtggttcaagcaagcttcccatantggtcggcccncnggacngagcttcgtngccggccggc

SEQ ID NO: 1470 - DNA, 106 bp, Glycine max
  unsure at all n locations
  Clone ID: 700996613H1
ctcactggaagccttgttgtgagtnagggaaaggcttcctgcactgagcaccaagttgaaacctgcttgattctttgcttagaattcccacagaatatggagacnc

SEQ ID NO: 1471 - DNA, 109 bp, Glycine max
  unsure at all n locations
  Clone ID: 700996615H1
catganattcgaacaatgattttnctcattttcttnnttaatacttttttggnttagactccctaagantctgtcgatatttccaattaaatcttcttgnctcctgtga

SEQ ID NO: 1472 - DNA, 103 bp, Glycine max
  unsure at all n locations
  Clone ID: 700996617H1
gnttttgtttccaaaaaaagctatggagaagtgtatacaaatnccatgattactacttgtgacaaaattttacattagatcacagaagaagcagtgagagaaa

SEQ ID NO: 1473 - DNA, 104 bp, Glycine max
  unsure at all n locations
  Clone ID: 700996618H1
gnatcttcccctctctctcttcctntgccttgtctccgtgtgaaagatcacaacttccaccgtcaccgatttcncaaggttgagttatttgcctggtctaactt

SEQ ID NO: 1474 - DNA, 100 bp, Glycine max
  unsure at all n locations
  Clone ID: 700996619H1
cnacggggcaggtttaccagtgggagattatgcgtagtgtagggatttccgatgctgagatatccaantntcaggatccttatnagtggctttcgtattt

SEQ ID NO: 1475 - DNA, 100 bp, Glycine max
  unsure at all n locations
  Clone ID: 700996622H1
gntttggtggccacagcaacaataacagtggcagcctcactacangctgcagctaccttcatgcaacccaccaaggtgggcatggccactcgcaacttna

SEQ ID NO: 1476 - DNA, 102 bp, Glycine max
  unsure at all n locations
  Clone ID: 700996624H1
gtactgattctgtcctatcatcacaatcaattagttcatctggntctgaacctttacattctgactctgccgaaacctggaattctcctaacatggcaacaa

SEQ ID NO: 1477 - DNA, 101 bp, Glycine max
  unsure at all n locations
  Clone ID: 700996625H1
ggcttttgatgntttcacaagatctattaagttgcagttgcccagcctatcaggtcattctcacgntgatgcaggggnaaccagttctgaaagtgttgtgc

SEQ ID NO: 1478 - DNA, 101 bp, Glycine max
  unsure at all n locations
  Clone ID: 700996626H1
cacatccatctttgccttctgcatgttggttctctgtaaacagatactgcaaaagaagaataatattgaatatttggttggnntganccccngggctgaaa

SEQ ID NO: 1479 - DNA, 94 bp, Glycine max
  Clone ID: 700996627H1
caaaccataaataagtccatggggttttgaacgggagggattttgcaggcagtatggctggagaaaaggcaaaagaacttttgcccaccgaact

SEQ ID NO: 1480 - DNA, 101 bp, Glycine max
  unsure at all n locations
  Clone ID: 700996628H1
agcttttgagttccntactatcttcctctntgcgcttcgctntggacaaaacgnacagcggggaggagcaggatccgaatcngacgcacccgacccggaac

SEQ ID NO: 1481 - DNA, 105 bp, Glycine max
  unsure at all n locations
  Clone ID: 700996629H1
ggagatctcgtctttgaagtttctaagatgacttntccctacattaaatgtaacagtctcttgtcttacanagcattggganaaatggcctgatgncancatcta

SEQ ID NO: 1482 - DNA, 103 bp, Glycine max
  unsure at all n locations
  Clone ID: 700996630H1
gcaaaccttaaagtggaacaaaaatatgaccagnngacaagcagatgtgaactccacttatgctgttgttgggattgttgtgctacttgcttccaatgctgtt

SEQ ID NO: 1483 - DNA, 101 bp, Glycine max
  unsure at all n locations
  Clone ID: 700996633H1
gttggaagagctcatctctgttttcttcgtcatcttccccaaccagagatgcgcnccacaacagatacttactaaagctttcaactttccaacaccctttc

SEQ ID NO: 1484 - DNA, 93 bp, Glycine max
  unsure at all n locations
  Clone ID: 700996635H1
ggaaaaacagttgagcagtntgattnncaangtggacnantgaacaagancatgnntgttgttcntgatttgactgatattgnacaacacccg

SEQ ID NO: 1485 - DNA, 98 bp, Glycine max
  unsure at all n locations
  Clone ID: 700996637H1
gacagaacnnagggaagtataagacttgcnacttacttcccttcaataancatgagagaggcgggagagaaggtgacncngantcggtcgnctgctta

SEQ ID NO: 1486 - DNA, 99 bp, Glycine max
  unsure at all n locations
  Clone ID: 700996638H1
gncggagtnaacatggcggctagtggaagttccttttccaacatcactagcttccttcgcaaccaacaacnctcttcccaacctctcgattcttctctc

SEQ ID NO: 1487 - DNA, 98 bp, Glycine max
  unsure at all n locations
  Clone ID: 700996639H1
ggacaattcacaaccttcaaacatatttatnagnntaacaccantggntactccaatgaccctcacgggcttgctccgcgacgtcgccgccaattccc

SEQ ID NO: 1488 - DNA, 96 bp, Glycine max
  unsure at all n locations
  Clone ID: 700996640H1
ggataacacttttgtgtacatgtgtggactaaaaggaatggnaaagggtattgatgacattatggtgtcattngctgccaaagatggcattgattg

SEQ ID NO: 1489 - DNA, 106 bp, Glycine max
  unsure at all n locations
  Clone ID: 700996641H1
ggctggttcaactgaggtgatggctttgaatttgccttctcccgcgcaagtgaagcccttatntttctcttcaaataactccacaaaacttccaggtncgcttttc

SEQ ID NO: 1490 - DNA, 105 bp, Glycine max
  unsure at all n locations
  Clone ID: 700996642H1
gntatattacttgaccctgaaagaccaattccattcgcagagaaggagangttncctgttgctgattttcttgtggtattgctgctgccagagccctgtagtagc

SEQ ID NO: 1491 - DNA, 98 bp, Glycine max
  unsure at all n locations
  Clone ID: 700996644H1
gntaatattaatatgtagttttggcaatcttattgggcagangangcnaggtggagttcatcaatattctggnnggtatcanancttcatgnntctac

SEQ ID NO: 1492 - DNA, 105 bp, Glycine max
  unsure at all n locations
  Clone ID: 700996646H1
ctcaaagagagttcagtatttatacaaataaaagttcttntcctttttcttatttctggttttccgttttggaatggctgggatttgnctgtggagttgttggag

SEQ ID NO: 1493 - DNA, 139 bp, Glycine max
  unsure at all n locations
  Clone ID: 700996647H1
gtaatttaaagtgttttgctattngtaaataactttgcntgtacagtnnttaatgggctttgtgnaaactggaatacaactnactagggcnctttttnggngtttgcnacactggtgtgntntatgtatgnntnacccc

SEQ ID NO: 1494 - DNA, 122 bp, Glycine max
  unsure at all n locations
  Clone ID: 700996648H1
ctacttctcccttctggtaattggtagtggtagcaattacaaatgtcaagatggttaacaatgacaaatctgtcacactttactgttctacctgtgtnctggaaaaggatttgcaccctatg

SEQ ID NO: 1495 - DNA, 104 bp, Glycine max
  unsure at all n locations
  Clone ID: 700996649H1
gtaggttttgtnccntatcatatcattgtagaaatttatctcaattcctttnctatctgatgtcgctgccccatttggnctgttccttgncttggccctancca

SEQ ID NO: 1496 - DNA, 97 bp, Glycine max
  unsure at all n locations
  Clone ID: 700996652H1
cggcaacatcatcgaggccgttcgccacgtgcgttccgtcatgagcgacattagggttctccgcaacatggacgancgacgaggtcttcaccttcgc

SEQ ID NO: 1497 - DNA, 101 bp, Glycine max
  unsure at all n locations
  Clone ID: 700996653H1
ggctggtgcaaagaatgctattctcatgaatatgcccaaatgctgttgctttcaatgtggagatattttgttggagattcncgtcctttgaagtttctaag

SEQ ID NO: 1498 - DNA, 104 bp, Glycine max
  unsure at all n locations
  Clone ID: 700996654H1
ttaagagtgaggttgtggcttntggagttgtatatgctgctgctcgcaggtttccaagctcaccccttccctgcnnnaacccaccatgcgtggccangcanatc

SEQ ID NO: 1499 - DNA, 100 bp, Glycine max
  unsure at all n locations
  Clone ID: 700996655H1
ctcgaanccttgagagcgaganaccacgtttctctcttgaggntaattattattattantgagtattgngncatgcgaggagccatcctntnnacanncc

SEQ ID NO: 1500 - DNA, 99 bp, Glycine max
  unsure at all n locations
  Clone ID: 700996656H1
gtctaagagcaaaatggnattccagttgagacttcaagagttcatagaattagtaanagctgngaacnatttgagagctatccacatatgctnggcaat

SEQ ID NO: 1501 - DNA, 96 bp, Glycine max
  unsure at all n locations
  Clone ID: 700996658H1
gnttttgtcccangacagccacctgagtgnataagcaaagaatccttattagcntcagcnaaaaatggcttggctgttnaacttcttagtacagga

SEQ ID NO: 1502 - DNA, 93 bp, Glycine max
  unsure at all n locations
  Clone ID: 700996659H1
ccgtgcccnactttctctcagacccganaatgaangaccncgtctaatggcagangnngcncanaacagtgatcgggaatgcnctgccaangg

SEQ ID NO: 1503 - DNA, 100 bp, Glycine max
  unsure at all n locations
  Clone ID: 700996661H1
gnattagttcattctctttgcgcagntcccnaccnctnntttcaagatgcagatcttcgtggaagaccctcacnggaaagancatactcagatgaggtgg

SEQ ID NO: 1504 - DNA, 83 bp, Glycine max
  unsure at all n locations
  Clone ID: 700996666H1
gattntntgacagngggcaattttagagcnagtgttgatttgacagcgcccnccgtcnaangtaaagcgcatggttganctnt

SEQ ID NO: 1505 - DNA, 95 bp, Glycine max
  unsure at all n locations
  Clone ID: 700996667H1
gnacaactatctctcatccttcttctttctgtatccgtaacacttgcaacacacatggctacantcaccaacactttcatattcaaaccccccat

SEQ ID NO: 1506 - DNA, 75 bp, Glycine max
  unsure at all n locations
  Clone ID: 700996669H1
gtgatcncggtagncattactcgtgacacacnnaacgtccgcttncatgtntgncatgcagatnaggcagggacc

SEQ ID NO: 1507 - DNA, 98 bp, Glycine max
  unsure at all n locations
  Clone ID: 700996670H1
gnttcatcagatgatactccaagtctcctgaaggtaaactggcgacatgaagattgccccatatatacanagtggaaggnnnaagaanacagnncngc

SEQ ID NO: 1508 - DNA, 97 bp, Glycine max
  unsure at all n locations
  Clone ID: 700996671H1
tagctctggtgagtcattgtcaaccantggtgactacatttcggatgaaccagtccaactgtntncccagagtaacatggcnatttgnngaaaaaac

SEQ ID NO: 1509 - DNA, 97 bp, Glycine max
  unsure at all n locations
  Clone ID: 700996673H1
gttgnacnnggangaagccttgcttgatngcttcangggangctcaagtatcttgaatatcatnaagctaaaactggaatngcacagctggagaaga

SEQ ID NO: 1510 - DNA, 93 bp, Glycine max
  unsure at all n locations
  Clone ID: 700996674H1
gtnagcagcatantgatctttgggttcangattctccattcganatatgggaggtnngagggngctagaggtaggaacntcagncaccannga

SEQ ID NO: 1511 - DNA, 95 bp, Glycine max
  unsure at all n locations
  Clone ID: 700996675H1
gncnatctctntcnctctctcacaccntaatagtcatgggtttgaaggangantttgagcantatgctgagaaagcaaagactttgccaccgact

SEQ ID NO: 1512 - DNA, 97 bp, Glycine max
  Clone ID: 700996677H1
gcggctctcagaaaagccgtgttctttgtaaatcgctcaatgcttcaccttttcccgcatatgctgcaaggtttgaaatcacaaaccgatgcacata

SEQ ID NO: 1513 - DNA, 101 bp, Glycine max
  unsure at all n locations
  Clone ID: 700996678H1
gtgaagagaagggctacacaaacacaatctctaatgcgcacttcaggatgngggcttccnccactgccnatgnacntcaanactcgcgtctgtctccagaa

SEQ ID NO: 1514 - DNA, 97 bp, Glycine max
  unsure at all n locations
  Clone ID: 700996679H1
gtgatatccaggagagatatcccnggganccaaggggaaagtgttggantctcnatggagcttcaaatttgganggcttatgntaaagacaagttgg

SEQ ID NO: 1515 - DNA, 94 bp, Glycine max
  unsure at all n locations
  Clone ID: 700996683H1
ggancctcatcatagttttgctaacacangtnnacactgcntctcanaaggttttcgtccaatttcgggtcccncggtngcacttggngtgcac

SEQ ID NO: 1516 - DNA, 102 bp, Glycine max
  unsure at all n locations
  Clone ID: 700996686H1
gncttgcagtaccttgcaggagcgtcgcttgaaggattctgattcaagaagccnttctgngttcatnaagctacccaacttcctcttnggattgngcaaaac

SEQ ID NO: 1517 - DNA, 115 bp, Glycine max
  unsure at all n locations
  Clone ID: 700996687H1
ggctggggagngctgttgtttcttccacaaanaaacaggcaggccacttgnttgatttccccttncacttnggcttcagnggaatnnaggggatttggccttaagggnccttgcc

SEQ ID NO: 1518 - DNA, 92 bp, Glycine max
  unsure at all n locations
  Clone ID: 700996688H1
tcgctctttctttctcccctaacacaaaacatggctttgccacaattcagcaaaccganngattaccccagnttacaagcttgtacatcgtc

SEQ ID NO: 1519 - DNA, 93 bp, Glycine max
  unsure at all n locations
  Clone ID: 700996689H1
gtgtagactccccattaacccacaanatgaccaanatatccgngttnaanactatttcttgntgcatttcgacattgtcactatagtctcgtc

SEQ ID NO: 1520 - DNA, 96 bp, Glycine max
  unsure at all n locations
  Clone ID: 700996690H1
ggnagatgagtttgagggcatcnnnagatagccgaagaagttgaattctgcaacctcacccagaaggtgggttttacgtggagaccattccgagac

SEQ ID NO: 1521 - DNA, 97 bp, Glycine max
  unsure at all n locations
  Clone ID: 700996691H1
gttgctgnaggcgataagattgcagtantgctaagtgctaacacctgacagtnaccaatgggctnctgnatnanacatctcctgctcaagtcctcac

SEQ ID NO: 1522 - DNA, 96 bp, Glycine max
  unsure at all n locations
  Clone ID: 700996692H1
gcgaatatgcaaaaaaaactgaattgtgtgaatncgaaaactaaacattgctattgtaaaagttgcaaatgcttataaacaccctaatattattgg

SEQ ID NO: 1523 - DNA, 93 bp, Glycine max
  Clone ID: 700996693H1
gcttgcttttcccatctgagtgttgaacagagaagaagggagaagccaattcatgggttgcacttcactgccatcttttattcagatgtcatc

SEQ ID NO: 1524 - DNA, 95 bp, Glycine max
  unsure at all n locations
  Clone ID: 700996696H1
cttgggcaacccaagcctgatccacgcccagagcatcctcgccatctgggccacacaagttatcctaatgggtgncgttgaaggttaccgtattg

SEQ ID NO: 1525 - DNA, 290 bp, Glycine max
  unsure at all n locations
  Clone ID: 700996701H1
ccgccatattccacaagaactctccaaggatcctccttcccacgagattctttggtgggaaaaatccaagaggtttgaaatttgaaggcagggaagatggattatttcaatgcaccaggaagaaaccatctctttgttccagggccggttaacattccggaccagatcatccgggccatgaacagaaacaatgaggnctaccgttctccagcaattccagctatgacaaaaactttgcttgaggatgtcaagaagatttcaagaccactatggaancccatttctcatcc

SEQ ID NO: 1526 - DNA, 280 bp, Glycine max
  Clone ID: 700996703H1
cttggataacaacatggacggtttttacattgctcctgcttttatggacaagcttgttgttcacatcaccaagaacttcatgaccctgcctaacatcaaggttcctctcattcttggtatttggggaggcaaaggtcaaggaaaatcctccaatgcgagctcgtctttgccaagatgggaatcaaccccatcatgatgagtgctggagagttggaaagtggaaatgcaggagagccagcaaagttgataaggcaaaggtaccgtgaagctgctgatataa

SEQ ID NO: 1527 - DNA, 279 bp, Glycine max
  unsure at all n locations
  Clone ID: 700996704H1
aaggcaatgaatctgatgcaggcggttcgctacgacgcctacgggggaggtcctgncggcctcaagcacgttgaagttgccgttcccagtccaaaggcaaatgaggttttaatcaaactggaagcagttagcattaaccctattgattggaagattcagaagggtcttctccgtcctttatttctccccagaacctttccccacataccttgcacngatgtggcggaganatagttnagatcggaacncaagtcaaagatttcanagttngcgaccang

SEQ ID NO: 1528 - DNA, 281 bp, Glycine max
  unsure at all n locations
  Clone ID: 700996705H1
cncccccttctctatcagcttggggcaaaagcaaatttatncccaccatgcattttttatcgcatnnnctccagatcaacctgcctcatctggtgaaactaagaaatcatcagctaagaagaaaatgtgnttaatctttgtttgcgttccggttagtcctggtaaaagcagattgatatggtgcttcccaaganactttggattgtggatggacaaaattgtaccacgatggatatttcatgtnggacaaaacctgnttctggatcagatttatatctccc

SEQ ID NO: 1529 - DNA, 280 bp, Glycine max
  Clone ID: 700996706H1
gtttcgaaagcttcccgaaagtcaatttctcgcgcaacgccaaatcaacaaacaaactcccgccaataccaagcgacatcagcccgcggaggctcttacgaaaacaactaagccaataccattacaaataagcaataatgggtctcatgtggactaaaggcttcggcggaaagcacgctggtaagacatcctcttccttcaatgcacaactgccatgtttaatggcgggcttgatgattgtgctctcgatacatcacacgaacttttccattgaaagcac

SEQ ID NO: 1530 - DNA, 278 bp, Glycine max
  unsure at all n locations
  Clone ID: 700996707H1
ctgttctctgttttgtncngtttcgcgtacaggaacttaaacaangaagactgcaaagggcaagggagcagcgaggccctcaaaagaatcactgaagcctgttgatgaccganaggttggaaagcggaaggcttctggtaagcctgagaaaagcagagcaccaaagaaggagaagaaggccaagaaagaccccaacaagcctaaaagaccaccgagtgctttcttcgtgttcctgaggagttcaggaaganctttaaggctgagatcctctcgtgaag

SEQ ID NO: 1531 - DNA, 278 bp, Glycine max
  Clone ID: 700996708H1
agacgcctgtaattgttcgtttctcaactgtcattcatgagcgtggtagccctgaaaccttgagggaccctcgaggttttgccgtgaagttttacaccagagagggtaactttgaccttgttggaaacaaccttcccgtcttctttgtacgtgacggcatgaaatttccagatatggttcatgctcctaaacccaatcccaagaaccacatccaagagaattggaggatccttgacttcttctctcactttccagaaagccttcacatgttcaccttt

SEQ ID NO: 1532 - DNA, 280 bp, Glycine max
  Clone ID: 700996709H1
atcacttgggcatcgcttctcctctctcccaagaaagaatcatcaatggcgattgaacacgaagacgatctcaaagacgagaagaaccctcgacctctcgacgaggatgacatcgccctcctcaagacctacggtttgggaccttactccacaagcataaaaaaggcggagaaggaaatcaaagatatggccaagaaagtgaatgacttatgtggtataaaggagtctgatactggtttagctgcaccaagccagtgggatcttgtttctgataagcaaa

SEQ ID NO: 1533 - DNA, 278 bp, Glycine max
  Clone ID: 700996710H1
ggtcagcagtgcttaagcagtttaaggaaatgtgaacgtgcagaaggagccaatgatgaagtaaaagggaagacgaaggactaaagcaccagctggatgcacttcccccttcttcacataatgctgcacgtaacataaagatctttaccattttattatgatacaaaatagataatgttctgtatcaaatttcagtcagacattggctctgtacatagggttatattatcgatgcactgtatttgtattcaaattccaaatggcgaacatatttgatt

SEQ ID NO: 1534 - DNA, 277 bp, Glycine max
  Clone ID: 700996711H1
gagggaccctcgaggttttgccgtgaagttttacaccagagagggtaactttgaccttgttggaaacaaccttcccgtcttctttgtacgtgatggcatgaagtttccagatatggttcatgctcttaaacccaatcccaagaaccacatccaggagaattggaggatccttgacttcttctctcactttccagaaagccttcacatgttcacctttttatttgatgatttgggtgttccacaagattacaggcatatggatggttttggagttaac

SEQ ID NO: 1535 - DNA, 267 bp, Glycine max
  unsure at all n locations
  Clone ID: 700996713H1
cttttnctattttnaattgtctctgcattttctcgtagaacgcgtttcttgacactccgaaaaacaagaggaaaaaattggaagttttcaaggatgttagaacagttactgatatttacaagaggagggttaatcctctggacttgtaaggnacttgggaacgctctgaaaggttcacctatcgataccttgatccgttcctgtcttttggaggagcgatctggtgcggcagcatacaattatgatgcccctggtgcttcctacacc

SEQ ID NO: 1536 - DNA, 274 bp, Glycine max
  Clone ID: 700996714H1
gggacaggaacagcaaaccagtgcccaacaattgatggtggattggactcatttgccttcaagccggggaaatacaatgccaagaagttgtgccttgagccaacttcattcacagtgaaggccgagggtgtggccaagaatgctccccttgagttccaaaacacaaagctcatgacacgtttgacctacactctggatgagattgagggaccctttgaggtgtcttctgatggcactgtcaagtttgaggagaaggatggcattgactacgccg

SEQ ID NO: 1537 - DNA, 275 bp, Glycine max
  unsure at all n locations
  Clone ID: 700996715H1
caaagattggaaaaagagcccatcaacaatcatcattctctatcntgccctcttttcccgcctatctccctatttgatttgcccttctaactctctctctaatttcatttccgtcgtcttacctttacatttcctgtcctgttagtgctgaatgctatctgaatagttcattctcttaccacctctctagagctattctaactatttactcagttcactttcttttttaaatattacatctttaacagagcatgtttgatctgtcttccatttgc

SEQ ID NO: 1538 - DNA, 273 bp, Glycine max
  Clone ID: 700996716H1
agaaagagattgaagagacccagcagaccgacaaggacagatggaagggtcttgcctatgatatctcagacgaccaacaggacatcacaagaggaaagggtttggttgactcccttttccaagctccacaggatgctggaactcactatgctgtcatgagctcctacgagtaccttagcactggacttcgccagtacttggacaacaacatggatggattttacattgctccagcttttatggacaaacttgttgttcacattaccaagaatt

SEQ ID NO: 1539 - DNA, 280 bp, Glycine max
  unsure at all n locations
  Clone ID: 700996718H1
cccaaaacaagaaacagactttgcgtttctcctcagcctcttaaaaccaaacagattttattctctcaaatggagagtccccattcactgtctccctctncctcctccgacggcgtcggcttcgagacggagganccgcggacnccgttngccgngcnncgngcgtgcagctcctcaactccggcgatcccgacctgcgcctccaagntgctcgcgacatccggngcctnacgaanacgtcacaacgttgtcggngncagttatcccaggcnntngggcc

SEQ ID NO: 1540 - DNA, 279 bp, Glycine max
  unsure at all n locations
  Clone ID: 700996719H1
catctcttcttttccaggtttngagaatgagttctgtgcaaggaccagttgtgtgcccttctgtccgtgccaaacaagtagggttctgcagcattccaatgattggggcagtgaaaatgaacgttagacgcatccgaagtgaattttggggtctcaatggcgccaaggctaaacccggttttctttcttgccatataaacacgcgaaagtgcaagactgtgcattgtacttttaatcaccctccancgacagtggaagtaccgctgacaatttcaatga

SEQ ID NO: 1541 - DNA, 277 bp, Glycine max
  Clone ID: 700996720H1
tttctcaacaacttctgctacttcctactccaaccgcacttctgctccgcaattatcatgggcaaggtcaagatccgaatcaacggatttggaagaattggccgtttggtagccagagtggctctgcagagagacgatgttgaactcgttgccgttaacgaccctttcatcaccaccgattacatgacatacatgtttaaatacgacagtgttcatggacactggaagcatcacgatgtcaccgttaaggacgagaagacccttctcttcggtgaca

SEQ ID NO: 1542 - DNA, 277 bp, Glycine max
  unsure at all n locations
  Clone ID: 700996721H1
aattaaccacacgactcacganntggtaaccgggttctgcaaatttcgccacttgcagatgaaaagtnccaaactttccactccaatcccnggtncaaatcctaaccccttgttcctttcactggttcttagaactactaggaccttgccaccaccatggctgncaaaaaggcatgtgagacattntcaaagtcattgattgaggaagtgaatagatggggttgnttgaagcagacaggggtgagtctcaggtacatgatggaattcgggtccaaac

SEQ ID NO: 1543 - DNA, 274 bp, Glycine max
  unsure at all n locations
  Clone ID: 700996723H1
ctcgcatatggcaaatgggcttggcttggnttgtntgctgcanaactctggtccggttnctattggctctttggtcaagccctncgctggaacatgctgttcagnaaaaccttcatcaatagactctctgaaagatatgagaatagcttnccgagagtngacatgtttgtgttcacggcagacccaatcattgagccacccatgatggtgactnatanagtgtnatctgtgatngctntgantatccagcagngaagctcagtgtgtactctcg

SEQ ID NO: 1544 - DNA, 273 bp, Glycine max
  unsure at all n locations
  Clone ID: 700996725H1
ctttgtaattnattttnctggtggttatantcaattnctcaagcactttgttttgctacatggctattcttaagattgaatgaagtagcagttatatatgttatgtatgaactaacatctattattgcaaatttgctttccattacttctatttatntgtatttagcaatgtgaaaatcgttagtgtattggatgatcggtagtaattactggagtctgtagtttagtttattgatggtaatatgttcattctccaagtaaagatgtcttnga

SEQ ID NO: 1545 - DNA, 275 bp, Glycine max
  unsure at all n locations
  Clone ID: 700996726H1
cttctctctcactcactcacacccaaaacaaaagaaaaattcatanctatgagtggtgctgaagcgcgaccttgtgactactgtggcaactccacagcacttctctattgcagagccgattcagcaaaactctgtttctcgtgcgatcgcgaagttcactccaccaaccagctcttctccaagcacacgcncacgctgctctgcgacgcatgcgatgattcccctgcgaccatactctgttcaaccgacacctctgttctgtgccagaatgcgat

SEQ ID NO: 1546 - DNA, 272 bp, Glycine max
  unsure at all n locations
  Clone ID: 700996727H1
attttgaatatttacaaaatcatgttgattcaatacaaaaggttgcagagattatctttggcagattatgccaacgggaattgttgacctacgaggaaaataattaacgtttttgtttcatagcagcggaaattagtagattctgtgatttctatgcaactccaatggctttggagttttgactgaagtgatatcaggctctgtataattttgtctttgttttacctgaataacagaaatgttgcattgcaagatattganattcaataata

SEQ ID NO: 1547 - DNA, 235 bp, Glycine max
  unsure at all n locations
  Clone ID: 700996729H1
ccaaccntagcnntaactatcctttttgccaactcggggctccattttctccacttancttcagtgcnccanattctncatataccattatgctncctgatggtcttgctctcnncctanttntggntccctctacctgtgcagctattggccactggttanagtttatngngnggttctatgtatntgatgnnanctcnttttgtgtgaatctaccaggcgngtnatngancga

SEQ ID NO: 1548 - DNA, 272 bp, Glycine max
  unsure at all n locations
  Clone ID: 700996731H1
ttgcngccactttccggcggaactcgcggcggagatgatgccgaagcatgtggcggtgataatggaccggaacgggaggtgggcgaaggtgaaggggctgccaccatcggcggggcaccaggcgggggtgcaatcgctgaggaaaatggtgaggctgtgttgcagctggggaattaaggttctaacggttttcgcgttctctacggataactgggttcgccccaaggtggaggttgatttcttgatgaggctgtttganagaacaataaanc

SEQ ID NO: 1549 - DNA, 274 bp, Glycine max
  unsure at all n locations
  Clone ID: 700996732H1
gtgtcctccttggttttgcttcaattatgggctttctcttctttcttttcccattctccattggcattgaagattgatcgcttggggcagactataaaaccttgtggtacagttgagaaggggcaaaagttttctttccctatcagaagtaatggtggtgagcttgaactttgttaccagagtcaacttaatcagagaagtagagtcaacctaatcagannttggagtttcataggaggatcaagaattgttgttaaaccaaatttcgtgagat

SEQ ID NO: 1550 - DNA, 276 bp, Glycine max
  unsure at all n locations
  Clone ID: 700996733H1
aaacaataagcttccttcagcaattttnacngaattacaaagtactcaagcctccattaccacataaagatagagacttgagtactttgtaattcagtaaacaataagcnnccttcagcaatttttattatagcccatagagttttattagttgattgttacccaatttgtctgtnttntccactgatntaccgaaagattgcgagtgcagttaacttgaagggtntttgcccctgtagtgagatnatattccnctactacnganaccntttgttt

SEQ ID NO: 1551 - DNA, 280 bp, Glycine max
  unsure at all n locations
  Clone ID: 700996734H1
ctagttcttaacttgttacagaaagttctctctttttatgttcttnctgcctccaaattaccactctcttcctatgctatgatacagatacaggaagaggatcaaaataccccaccatgagacaaacccaaaggaatagcaacgtcaattatggtgggaggtttcaatggagaaggtgttgtgagnnnnnnnnnnnnnnnnnnnnnnnncaacaagtggccttcatngctgcagccacttctcaagacacgtttctttgttcaatgcaaagtccacgcgg

SEQ ID NO: 1552 - DNA, 276 bp, Glycine max
  unsure at all n locations
  Clone ID: 700996735H1
gtgctaagtgtgaganaaagaaaatggcaaantctcaatttcgaannccatttcttgtacactattactcttttgttattcatcttcaacctcanncnttcatcacgcacttatggagcatcgacacccgtgcttcanntcactccctcnaanttcaagtccaaggttctgaattgnaatggagtngntcatgntgantnctntnnnncatggtgtnggaactgtcagggcnntgactcctatatgggagaaggcnnntantgtgnntnanggtgt

SEQ ID NO: 1553 - DNA, 275 bp, Glycine max
  Clone ID: 700996736H1
ggtttcgacactcgcgtctcagcctcagtttcgggatctctcccttctctcaccaatttccaggatttgaaaaatcgcagattccaaaccaggattgaggaagccagtgttcaccaaggtcgatcagcttcgtccagggaccagcgggcacactttaactgtgaaggtggtcgatgctaagatggtgatgcagaaaggtcgttctgatggtctcaatcccgccaaatgcgaattgctgaatgtttggttggtgatgagactggaatgatcatatt

SEQ ID NO: 1554 - DNA, 272 bp, Glycine max
  unsure at all n locations
  Clone ID: 700996738H1
cagaagcataatgtaaaaatacttccagctgattcagaacattctgccatctttcagtgtatccaggggttgccagagggtgcacttaggagtcnattttaactgcatctggaggngctttcagggattggccagttgataaactgaaagatgttaaagttgctgatgcattaaaacatcctaactggaatatggggaaaaagataantgtggactctgntaccctttttaataagggtctagaagtaattgaagcacattacttgtttgga

SEQ ID NO: 1555 - DNA, 110 bp, Glycine max
  unsure at all n locations
  Clone ID: 700996739H1
acaaacagagccantccatagattcccaaagnaaatgcatgatactataattantactagnanatncnattccntcactctgtttccatgcttccgntnctngaanccgc

SEQ ID NO: 1556 - DNA, 121 bp, Glycine max
  unsure at all n locations
  Clone ID: 700996740H1
ctttctctattctcttctgcatcaccattcaccgctgagagaacatccanaacacaacaaacaaaggagcctgttcggtttncaatgtgaagngagcgaacatggntctaatcgctgncag

SEQ ID NO: 1557 - DNA, 269 bp, Glycine max
  unsure at all n locations
  Clone ID: 700996743H1
gggaaacattccatcaccccatgtatccaaccttgatttgaataatgtatctcataagcttagccctctttaaatcaagggtgcatacacacctttattttctttatgcatttcatttgcttgagttaaatcctccaacatggtatattctgagatgtgtcatcagcaaaattgntggatattccgcatcaatgttatggtgacaaaaaaagttatattctgagatgttaactggatgtaggattatgtagagcaagtcaagttgttgt

SEQ ID NO: 1558 - DNA, 236 bp, Glycine max
  unsure at all n locations
  Clone ID: 700996746H1
tttcaaatcaagaaatttagntagctttctttcaactctcttgggagcttgcttagggctttaggaggnttnggtngagcanntcatcacctctttnnctccactcntagcntagntcaacttgatagattcgnccngtgggaactgatggnggaatgaanttncatggtncgcgggcaatacangcngaancncattacccatcactntgtagtggnatntcntctgatncnana

SEQ ID NO: 1559 - DNA, 100 bp, Glycine max
  unsure at all n locations
  Clone ID: 700996747H1
gnagnacaaaaatatgntacaatngaaagcntcnaggntccgattagtcctgaaacgnatccatcccagtnttngggacattagggngaggnactaccct

SEQ ID NO: 1560 - DNA, 93 bp, Glycine max
  unsure at all n locations
  Clone ID: 700996749H1
ttcnatcatgtaanggnnagggaggaatggcntntncttgcagcgagatcaanttatgantncatgcaacaggggtactgcncaagccaacta

SEQ ID NO: 1561 - DNA, 273 bp, Glycine max
  unsure at all n locations
  Clone ID: 700996750H1
catcctctaaactcatctccagacacattttctcacaactatcacgcncccaccaccaccatgtccataaatctacgcacccacgccttcgcgggtaacccgctccgatcccccaaccgggtcgacccgttttcgcccgcctccgcgctcgagaccctcacgacccgaatcctcgacgccgcgcacgtgtcctcaccgtccgtggattttaaggtcttgccttttagaaatgggagggtgctggcttcttcggagagtggtgacacgtggcgc

SEQ ID NO: 1562 - DNA, 267 bp, Glycine max
  unsure at all n locations
  Clone ID: 700996751H1
acattcttcagatcatagaatctaatattgtatgcagttttgaaaaagataaaaaaaggagaaaaatttgatctttgtgtgatngtgtnagattagatnttattagattcattgtgtagcctagnaccctcatgaattagaatgcaatccaggagtttgngcctggctcnagctctgacantcttcccaggcttganaccccctcagaaaacnctacngntccagnannnntgngacntacatntngaanccnngcgtatgttcnat

SEQ ID NO: 1563 - DNA, 267 bp, Glycine max
  Clone ID: 700996754H1
gcagattgatcaagaagggaaagatgtgtgctctcttcatcaacgatcttgatgcaggagctggtcgtcttggtggaaccacccaatacactgtcaacaaccagatggtgaatgccaccctcatgaacattgctgataaccccaccaatgtgcagcttcctggtatgtataacaaggaagagaatccccgtgtgcccatcatcgtcaccggtaacgatttctccacactctatgcgcctctcatccgtgatgggcgtatggagaagt

SEQ ID NO: 1564 - DNA, 95 bp, Glycine max
  Clone ID: 700996755H1
cacggttgatcctgaaaactttttcaggaatgaacagagtatccctgttcttcatggcgaagatagggaatcatacagatacagtgaagaatatt

SEQ ID NO: 1565 - DNA, 266 bp, Glycine max
  unsure at all n locations
  Clone ID: 700996756H1
gttatttctaaggaaattacttgttcaactcatttattctccaatgagatcttggaggagcttgagcctgctgagcnatcagcaccattgttaagtgggcctcctgcacctttaccaatgaagaagccgcttatcaggttgaacttcncctccttagncaaagctgctgacanaagtgcttaagctgcaactagcngatttntgtaaaantgacatttctagttccttgtntatttatgtnataattatgangcagtnaatnaacc

SEQ ID NO: 1566 - DNA, 269 bp, Glycine max
  unsure at all n locations
  Clone ID: 700996757H1
gctgttccccactagacaatagctncgctgcacnaaatacagagacaatgcacaactttgcatctcattcaaatgggcactnccttccaaatcancaatntaatgggagccacaacatcaatgacatggnctccnttaatacatatcttgggccgaaacttgatacttttgaacangaagccagagtctggnagagggattggctcgtttanttcncgngaatccaaactctgcagaagagtancatctgttcatctcaganganaatg

SEQ ID NO: 1567 - DNA, 264 bp, Glycine max
  unsure at all n locations
  Clone ID: 700996760H1
atgaaacnccttntnnggnttgggaatcgccttcatcctnctcntccattcctccctcgnttctcatatcccctaccacaaagcaatttccgatttgaaggatacaattgtgaagggatttgggttcacggnngaagatgatgttangattacngggttngatcctcgagacgccgaggtaaggnattccgtggagtancaattcganntngaaatcgatnanaagggtatncnnttnaagntctcgaagacntnaaacatggg

SEQ ID NO: 1568 - DNA, 267 bp, Glycine max
  unsure at all n locations
  Clone ID: 700996761H1
cttctttcagtttgtattttctaagaagacaaagcaagccatctccntcttgaatcctcccattcagatctccctgcgaatgctgctgcccaagaaaacaacccaaacccaaaacgcacccacagcgcagaaaacggcgtcgtntgnnggncccaantgaagtgcaaganacatanctcagaccttngcagcaccgttggcgtctgcgcctcgtgtctaagggaacgcctnatagccctcgtcgncggggagtcatntcacgcgcnt

SEQ ID NO: 1569 - DNA, 266 bp, Glycine max
  unsure at all n locations
  Clone ID: 700996766H1
tgctctaaaaagtactgctagaataagcgagggacaaaggatattggtagtaggaggtggaggagcagtagggttgtctgcagttcagtttgcagtagctgctggttgctctgttgtaactacttgtggaagtcaaagtgtagacagattgttagctgctggtgcagagcaggctgttgattatattgctgaggatgttgaattggctataaagggaaagtttgatgctgttttggacactatggtatgccaganacagaacggat

SEQ ID NO: 1570 - DNA, 261 bp, Glycine max
  unsure at all n locations
  Clone ID: 700996767H1
attgcagtagtgctaagtgctaacacctgcagtgaacaatggcctctgcatcagcatctctgctcaagtcntcacttgttnttgacangtctgagtgggtgaaggggaaacccttcggcaaccttctncatnagntgtgagatgcaagcccaannncccancangcctaccatcatanctggtnnntangctgtgagctcgttangacnggcangcnntggcttcatcangngngggtntnttgncctggatnagtncatg

SEQ ID NO: 1571 - DNA, 267 bp, Glycine max
  unsure at all n locations
  Clone ID: 700996769H1
ctcgacactttnctgcggaatgttnccatcgcccaatcttcgccnggtcancagatctctggagaccagaggcaacagacactactcttcccagagtggttctcagactaccagtctcaagcagagattgacggaactcattccccagaagaatgctgagatcaaggagatcaaggagaagtacggagagatgaagcttggcgattgtaccgtcagccaggcttacggaggaatgagatccgttaagtccatggtctgggaancttc

SEQ ID NO: 1572 - DNA, 91 bp, Glycine max
  unsure at all n locations
  Clone ID: 700996770H1
gcggatcagnatnaaagcaagttgcacaaaatttggtgcgncctggattgacncntttgcgnggtgnntcattcccagnatgaanatacga

SEQ ID NO: 1573 - DNA, 265 bp, Glycine max
  Clone ID: 700996771H1
cttgttcttttgtttctcttttgtactactagttctgaacatggagctgttgtctctgagactcaccccttcaccttctgcttcgacttcatcgcttcctgcagcacttgctcactgctccaagctatgtgagtttcaaccgcggaagaagaagaaggtgtgtttcgacgcgcctaggcttgcggtgcggtgtgtgaaagcctcggcgcacgaaccggtgatactatcgacgatggagagactcggactgggttcaccacacctg

SEQ ID NO: 1574 - DNA, 261 bp, Glycine max
  unsure at all n locations
  Clone ID: 700996772H1
gctgggcccatcagccccanaagtgggaagggtgagcntgaggaagaccgtcaccaagcangtctcctcaggaagcccatggnacggcccagaccnagtcaagtacttcggcccattctctggcgagcccccgncnanntaaccggtgagttcccangcgatacgnctgggacacngctgggtttccgcagcacccagaaaccttcgccaagaaccgtgaactcgaagtgatccnctccaggtgggccatgntcggagctt

SEQ ID NO: 1575 - DNA, 263 bp, Glycine max
  unsure at all n locations
  Clone ID: 700996773H1
ttagagttnttcttcctcataagccattgattagtccatgtttttcttnttctctctctaaagttcaaagttnttnctgttttccccccgtgtctttctctctcttgtggtggacttgangaatgctggggncagaggcttctgagccatgttctagaagactnttngngaattgggtcactgtggantcngtcatnggtggtagagaatcngagtcctcagagatctaancctntctgtctggtgnctnntgcancacagac

SEQ ID NO: 1576 - DNA, 222 bp, Glycine max
  unsure at all n locations
  Clone ID: 700996778H1
gggatttaatggctntnaagatcncaaaacccattttcttttctcgtgtcattggtttatatattcatacaggtcaatggcatggttgtgtaactagtacccaatgttttgctggttgctttaactatttttcctagttttgttaagtaaaccctagaagatttagagttttgtaagctgccacatatttgtatgtaaatagaatatgcatgactttcgact

SEQ ID NO: 1577 - DNA, 255 bp, Glycine max
  unsure at all n locations
  Clone ID: 700996779H1
agaagatagacggagacaccttgaagtcttacacgcnacattggncgncctcaacgatgggcaagagtatgaacctattntgngctactgtcacgnnaatggaattcgtcttgttgttgtggtacaccactgaagatcttaagaactgtccaagcagaaggaattcgtgggcctacaaaggntgaacgtaaantntatntanctccagctggttcangcttcatatctggcttangtctatctcacgcagatctt

SEQ ID NO: 1578 - DNA, 273 bp, Glycine max
  unsure at all n locations
  Clone ID: 700996780H1
acggctctagntttncttcanttatggcnttctcttctccncttttcccattctccattggcattgaagattgatcgcttggggcagactataaaaccttgtggtacagttgagaaggggcaaaagttttctttccctatccagaagtantggtggtgagcttgaactttgttaccagagtcaacttaatcagagaagtagagtcaacctaatcagagattggagtttcataggaggatcaagaattgttgttaaaccaaatttcgtgagatt

SEQ ID NO: 1579 - DNA, 266 bp, Glycine max
  unsure at all n locations
  Clone ID: 700996781H1
tcaatcatgaatggaaggggaggaatggcatctcttgcgcgagatcaagttatgaatcatcaacaggatctgtcaagccaactacttagtgggctangangagtaaatggctttagtaatcttcaatttgattggaaaccgtctccatgagagcctttgnaatctatttcttgagccgctgctgtgcagcatgagaaatgctagaattgcctttggccccctggagatggcagaatgcnatcggttagtgatangtctttgtacta

SEQ ID NO: 1580 - DNA, 266 bp, Glycine max
  unsure at all n locations
  Clone ID: 700996782H1
ggttccaaatatttnnattggnantgnaagacatgnagaaacgtcgtattntcccnaggagttccatgtaaaggtgtcngnagcagtcaaggaccttgtgtgccanccaggntatnagccaacatatggtgnncgccctctgagaagggcaattacatcactaatagaagatccattgagtgaggcattnctttntggagagtgcagcnaggngacactgtcctcattgattggatgnnatggaaaccccgttgttacnnatcaac

SEQ ID NO: 1581 - DNA, 253 bp, Glycine max
  unsure at all n locations
  Clone ID: 700996783H1
gcangangganatatggtgttatggtgaagtcttctatgactatnacttttgnnaanattgaggnnatacaggcngccanaacacttgcaatctgtaattcgtgggtggctggttcggaggcannctagtggattgcataagtcaaaggnatctcctggaaatgnaanatcnaggcgaaggtcacgtgngaagatgcccgccgtanaggntgtgtccagngnagcngagcnagantncgtctcagttnacnng

SEQ ID NO: 1582 - DNA, 261 bp, Glycine max
  unsure at all n locations
  Clone ID: 700996784H1
acaagcctgctcctaccaagcgcctcatgtattatttcgagattcatgtcaaggatgccggcgttaagggccagatagcaattggattcacctgcgagaccttcaagatgcgaagacaaccagggtgggaggccaatagctgcggctatcacggcgatgatggtctgctctaccgtggacattgcaagggggaggcgtttggcccaacctatacttccggagacgtattggtgccggaattaatatgctgcacagncattt

SEQ ID NO: 1583 - DNA, 97 bp, Glycine max
  Clone ID: 700996785H1
ttacactcacactctttgtgaaaaaggggagtttcttattctttctagacgcttccattgatgcggcgatttcttagacatggcggagcatcacgac

SEQ ID NO: 1584 - DNA, 69 bp, Glycine max
  unsure at all n locations
  Clone ID: 700996787H1
tatggctttgaatttgccttctnccgcccaagtgaagncctnatttttntcttccaantaagttnnaga

SEQ ID NO: 1585 - DNA, 260 bp, Glycine max
  unsure at all n locations
  Clone ID: 700996788H1
atcacgcttagttggagtctgcaaagccccaatcnttcancactttgntgaaacaatttctggtactacaactattagaagctttgatnagcagtcaagatttcaggaaacaaatatgaaactgactganggctattctcggccaatnntcagtattgntgntgccgtggaanngntgnnnctccgnttggatatgtngtctncnatcacatntgntnctncnttaatattntaatatctntnccacagggattcacncc

SEQ ID NO: 1586 - DNA, 81 bp, Glycine max
  unsure at all n locations
  Clone ID: 700996790H1
taaaanacaaattaaaagaaaaagggcnaagnatantacgcagatgnaggtggttcaaagttcaatggctgancanaaang

SEQ ID NO: 1587 - DNA, 258 bp, Glycine max
  unsure at all n locations
  Clone ID: 700996791H1
gttagcttcagctggaatcaaagtgttgctcacagcaaganatgagaagaagggtctccaagcactggaaacactcaaagactcaggtctatcccaccttgtactgtttcatcaggtggatgtggctgatgcaacaaatgtagcttctttggcagattttgtcaaatccaaatttgggaaacttgatattctgattaacaatgcagggattggnggagttgtaattgatgacctgatttaatcatacagccatcatga

SEQ ID NO: 1588 - DNA, 268 bp, Glycine max
  unsure at all n locations
  Clone ID: 700996792H1
ctcctccanaatgctgtcaggggaactgnantattgatgatccaaggancccatggaccaangctgcntgaacacannncagtttttacnaattcaatgcnaaggcttaagganttggcctgggttctagtgggataatgcaagtgagtnntaaancagtaagntgaagacngtttagtcctgaaaaagtangcttntaacttnccgtcttaatcantagacaatnggggcggaccatagattcagtatgccgcatcnnttncnatnc

SEQ ID NO: 1589 - DNA, 257 bp, Glycine max
  unsure at all n locations
  Clone ID: 700996793H1
cacgtagctacttcacgtgaccacttgtcgtactcatntnnagcatgatatgaatctgaatttttatcttgtgccttatcattaagtaaggnatataattgtgttccngttaaattgaatgtcaaatcaatgaaaggagggggaaancattgtcttcaaaaangatggcaacaaagnggngntnntcagtgatgnaatcgnaacgggncagttcagatcctttcggcccggtncgggggcnagatcttccccntcgc

SEQ ID NO: 1590 - DNA, 260 bp, Glycine max
  unsure at all n locations
  Clone ID: 700996795H1
gnggaacgggaagcccctccactanaaggggtcgtccttccaacgngtgatcccgagtttcatgtgtcatggtggcgattcancgncggaaacggaaccggcgccgagtcgatttatggcgncaagttcgctgnngagaacttcgtnaanaagcataccngtnccgngatcttctccattgcntncnccggtccnngnatnaanggatctnagtttcttnatttgcacggagaatnagagtcgctcnncggaaagcatgt

SEQ ID NO: 1591 - DNA, 121 bp, Glycine max
  unsure at all n locations
  Clone ID: 700996801H1
ctttcaacagagattgaaganactagatggtggcaaaangtgttaagtccaccgcctcgaggtgaggnctatactatacttcaagccctattcagcttagatatgatactgctattcttcg

SEQ ID NO: 1592 - DNA, 154 bp, Glycine max
  Clone ID: 700996802H1
attttcctttcgtttcctttcattttccctcactttctcgctccccaaacgcccctctctctcctccaatggccgaccagctcaccgacgaccagatcgccgagttcaaggaggccttcagcctcttcgacaaggacggcgatggttgcattat

SEQ ID NO: 1593 - DNA, 107 bp, Glycine max
  Clone ID: 700996803H1
ctcaacctcaacctcaacccccacttaccagttttcccaaattttcgttcttttttcctttccatgagttgatgcatctttttcaagctaattaagcttgaattagt

SEQ ID NO: 1594 - DNA, 154 bp, Glycine max
  Clone ID: 700996804H1
cccaattcccaaaccaaaccctctctcttccggcgttctgggggtggcgtcgccgggcgattcccccctccggttccctctccacccttcaattcaaccctctcgtcttcgcttcactgattccctctttcaaaatgcttccgatcggttgcta

SEQ ID NO: 1595 - DNA, 160 bp, Glycine max
  unsure at all n locations
  Clone ID: 700996805H1
ggntacttcacaactctgaccatatatttgtgaggnacagcggcttatgccagagagntactctaggacaatactatggccttggatctgaaacacgaggaacagctacggatgttcctgatcctttgggatagttgtaggtgatcctgcagaaattccc

SEQ ID NO: 1596 - DNA, 141 bp, Glycine max
  unsure at all n locations
  Clone ID: 700996806H1
gtttcgaacgcgctgatcgaaccagatggagggaagctcgtggagctcgtggtgacggattttgagagggatttgaagangggtgaggctctttcgttgccgaggatcaagctctcaaggattgaccctgagtgggtccat

SEQ ID NO: 1597 - DNA, 155 bp, Glycine max
  unsure at all n locations
  Clone ID: 700996807H1
gcgaattgggttgttttgannaatgggctctcttttggctgccattttttcccattttggtcaaaagttcgcccaaagggatggcaggctgggaagttngccagggaaaatgttcttntggctttttgggggttggttttgttgtcctccccatc

SEQ ID NO: 1598 - DNA, 148 bp, Glycine max
  Clone ID: 700996808H1
ctgcgttcaattctcagagctacgttggtctcagagcgccactgaggaccttcaacttttcttctcctcaagctgccaaaattcctcgctcccaacgccttttcgtcgtcagagcctccgattcggagttcgaagccgccgttgtcgc

SEQ ID NO: 1599 - DNA, 115 bp, Glycine max
  unsure at all n locations
  Clone ID: 700996809H1
cttttgggaaatcgacttactggttcaattccctcagaaattggtgacatggctagtctgcaaganctgaacttggaagntaatcaacttgagggacctcttcctccgagccttg

SEQ ID NO: 1600 - DNA, 87 bp, Glycine max
  unsure at all n locations
  Clone ID: 700996810H1
aactggaccttctgattntnacaaaaattcttcanttacttcccacctattcactttaccactgatntnttccactncttagacngc

SEQ ID NO: 1601 - DNA, 126 bp, Glycine max
  unsure at all n locations
  Clone ID: 700996811H1
gattcttaagtcaatggttttgatttgagggttgcttcaaagcacacaaagtaagcttnctggaaccctagttttcttggttctctcagcctaggttgattttctcgagaaaagaaaatttcttnc

SEQ ID NO: 1602 - DNA, 99 bp, Glycine max
  Clone ID: 700996812H1
gttcgtagatatctctttttgccgcgacaaatgctaccatcatccactgtcctatctcctcgccggaacccgcgccggcgttccggtgagcttttccgg

SEQ ID NO: 1603 - DNA, 115 bp, Glycine max
  unsure at all n locations
  Clone ID: 700996813H1
cccttgggacatcaaagggaaatttgttaagnctttcgcnatgcatgtcaatgtgcaaagcaacagaaaactctgctggangaaagcatgctaaaactctttccacacaacatag

SEQ ID NO: 1604 - DNA, 160 bp, Glycine max
  unsure at all n locations
  Clone ID: 700996814H1
cagcaaatcattcatgcgtttggttaactttaagaagtttgtgctgtgggtcctaaaccatcgcgattcttctcatgtcaaacttcttgtttactaccgttttggggtagattatacgacagatcaaggtctattgaataaggtattgagtatgcngcaa

SEQ ID NO: 1605 - DNA, 144 bp, Glycine max
  unsure at all n locations
  Clone ID: 700996815H1
caaaagtccttctgagaaggaattgaagcatatcaaccgaaaactgaagtcttgttggggtcatcactctcatgacgagggcaagaagcgggagaagaaatcaaagcacaagtccaaaaagagctcaaattgaagctcnaaatt

SEQ ID NO: 1606 - DNA, 119 bp, Glycine max
  Clone ID: 700996817H1
caaccaggttctgtaaagataattgatggtgaaactataactctagagtctaactacagcagcagccgtggccacactggagtaatggggcttttctacctattggtggcagaacagct

SEQ ID NO: 1607 - DNA, 201 bp, Glycine max
  unsure at all n locations
  Clone ID: 700996819H1
caaaggaggagtagatgcagcagctgctttatcattgtattggtctgatttgaaagataaagttgctgggttggcattagcacaaagtccctatggtggaactcctatagcttcagatcttctacgagaaggacnacttggtgattatgtnaattttacgggaacttaccgaggtttcntaatccggaaaggaattaaggg

SEQ ID NO: 1608 - DNA, 163 bp, Glycine max
  unsure at all n locations
  Clone ID: 700996820H1
gaatctcttatcttcttctatttccctttgtctcaacctcgatttcccccctattttcngattaactctttacacgatcttatctacgaataataaaaaattaattcctcaattgantctttgtggcggtgttcgatcggtacctgcatctcntcttttccag

SEQ ID NO: 1609 - DNA, 194 bp, Glycine max
  unsure at all n locations
  Clone ID: 700996821H1
cggtggaggaatcagatattggtaggcttccttatttgcaagcagtgatcaaagaaacctttcgattgcaccctgcagtcccatttttgattcccaggaaagccaatgcagatgtggaaatcagtggtggctacacaatcccanacgatgcacaagtgttgtccatgtgtggggnaattggaggaaantcaagc

SEQ ID NO: 1610 - DNA, 174 bp, Glycine max
  unsure at all n locations
  Clone ID: 700996822H1
ggctcatcctgagggagaatatgcaacagcaagagctgcatctgctgctggaacaatcatgactttgtcttcatgggctacttcaagtgttgaagaggtagcttcaacaggacctggcattcgctttttccagctatatgtgtacnaggacaggaatgtggttgcncnagcttg

SEQ ID NO: 1611 - DNA, 147 bp, Glycine max
  unsure at all n locations
  Clone ID: 700996823H1
aaatgggaggatgttctagataaaaganaccatcatctatgctacagtgtgaaatgctgcaagcctaagaatggtcccctgaaatatttgagcaagactgtgttcaatgacatttcatctgagatgctaaganacttctacatggac

SEQ ID NO: 1612 - DNA, 139 bp, Glycine max
  unsure at all n locations
  Clone ID: 700996824H1
gaaaaacaaagtaagtttgaagaaactaaagaangaagggaaatggggctttcctccaaatggatctccctccccccaggctgtttaaccaacccgtccaaacccgttggccgggtggcccgggcattgggtttggctc

SEQ ID NO: 1613 - DNA, 147 bp, Glycine max
  Clone ID: 700996825H1
agctgatctgctacaagtggccaaggtaatggggcttgaagatgtaatagatgtgactgatgacattggaactgctgaagcaattctagcatccagttctgagatacgacaaaacccatggatccgtggtgtggccaagttccatca

SEQ ID NO: 1614 - DNA, 147 bp, Glycine max
  unsure at all n locations
  Clone ID: 700996827H1
caaacacgctgttcctacaatcattccaaatgtgcccttccggtcgcaccctcctcccttcctccgtctccgatttccgaccggcattcgacgtcctcgatgccgaccgcgacggcaaaatcagccgcgacgactccgcggccntta

SEQ ID NO: 1615 - DNA, 115 bp, Glycine max
  unsure at all n locations
  Clone ID: 700996828H1
gcttattgaggaacttgctgatttaagcatcaggcaagactgccacgggtaggagataagattttnttggaagctgtgtatctatccaaatatttctacttcttcaaatattctt

SEQ ID NO: 1616 - DNA, 116 bp, Glycine max
  unsure at all n locations
  Clone ID: 700996829H1
cttcacttgctcacccactcttctcttgaacggtttanctaccggtnccaaaggcatggtaggtcttgatcgatctcgcacttctttttcgtctcaggtttttcactcacttggaa

SEQ ID NO: 1617 - DNA, 116 bp, Glycine max
  unsure at all n locations
  Clone ID: 700996831H1
gcaacccatggatggatttatggcaccgtatggtaatccaatgcaaatnatgggttacggcctgggccccttggacatgccatttggtggtatgccacaagacccatttggcatgc

SEQ ID NO: 1618 - DNA, 108 bp, Glycine max
  unsure at all n locations
  Clone ID: 700996832H1
tgttgggttgcttgcaaggnagagaacagagaagaactatagatatgaacaccaataccttcccacatgttcgacactccctattacccaagagaatcgtcatcattc

SEQ ID NO: 1619 - DNA, 101 bp, Glycine max
  unsure at all n locations
  Clone ID: 700996833H1
gccatttacagagtccgagancngttgggtaactattgggttacaataaangacatggaaaccaggcactgaaatatgcatatcnattagttttgggccaa

SEQ ID NO: 1620 - DNA, 139 bp, Glycine max
  unsure at all n locations
  Clone ID: 700996834H1
caaaaatatctgttgctctctactctgcttagggttccaacttccaacccaacacttatcnttctcatgcaacaagggaaaatgaggcctattttctgtggaaattttgaatatgatgcccggcagtcagagctggagc

SEQ ID NO: 1621 - DNA, 139 bp, Glycine max
  unsure at all n locations
  Clone ID: 700996835H1
tcgaaatcggaagannggattagggtttgtggagatgcaagggcaaggcgttgatgaagtgagcatagaaganttggcgtcgaatcttccctctacaaagatcaactgaaccaggttagagaactcttaaacgatgacc

SEQ ID NO: 1622 - DNA, 160 bp, Glycine max
  unsure at all n locations
  Clone ID: 700996836H1
tcacgactatcacaggtttaagatcaaaggtcgcgtttatcccgctattctccccgtccaaaacaacaaagttantggcagggtgcttcttggtatctccggagtagaactagatatcttagatgagttcgaggatgttgaatatactagaactgatgtt

SEQ ID NO: 1623 - DNA, 158 bp, Glycine max
  unsure at all n locations
  Clone ID: 700996837H1
gctttcattcctactggttggggaattctgtcaattgctgctgcctggaagccggtgatgaagaggtttggactatggaaatctgttagatcaattgctcggctctatgatgctggtatgggaatgctcatctttgtacccattgccntcttttcgtg

SEQ ID NO: 1624 - DNA, 181 bp, Glycine max
  unsure at all n locations
  Clone ID: 700996838H1
actttgcaatttcgtaggagatgctcaggagcagcacgctaacacagagtgttacagtcacctgtgttcgtcacagtcacagacaatggttccaatcaattcccgtaaattatagattctttgacgctgctcggaatctctntcatcaacccaatcccgcgatcttcaacctggaaaagaa

SEQ ID NO: 1625 - DNA, 147 bp, Glycine max
  unsure at all n locations
  Clone ID: 700996839H1
cttttattgtcctgtaaaanaagcaatgcattaaagctgaaagtagcnagtacgttcatcttcaaaggagtgtaaaagagggtaatatatattttacagaatttctgaaagagcagaaaaaggaagtaaagacaagaatgatttgtg

SEQ ID NO: 1626 - DNA, 210 bp, Glycine max
  Clone ID: 700996840H1
atgacaccatcaattttgaggcttttccccacaagctggtgcagtttggagagattcaggaaaaagttgtattgaaattttcacaagaggaatttcttacagcttggtcaactcaggtgcgtcctgcaacaactctgttggctgatgggtgtccatatttgtatgctatggtgcatgatagttcagtgtctacaataaccagtgatttgt

SEQ ID NO: 1627 - DNA, 109 bp, Glycine max
  Clone ID: 700996841H1
cttctctctcttcgccgttggtttcactcagctctcactctcatcgccatcccaaaccctagcctcgctatttttcatgattctctcgatctcttccactgaactctct

SEQ ID NO: 1628 - DNA, 143 bp, Glycine max
  unsure at all n locations
  Clone ID: 700996844H1
ggtgacccggtgactganatgctttttatcattagaggtagactggatagttctactacaaatggcggccgtagtggtttcttcaactcaatcatattgagacctggagatttttgtggggaggaacttcttcttgggcttta

SEQ ID NO: 1629 - DNA, 115 bp, Glycine max
  Clone ID: 700996846H1
acacttgcaacacacatgggctacaatcaccaacactttcatattcaaaccccccatctctcatcacccaaagcagcttctttattcccaccgctcttctctacgctttctcacc

SEQ ID NO: 1630 - DNA, 182 bp, Glycine max
  unsure at all n locations
  Clone ID: 700996847H1
cncggattgtngtnttttggttttnnacttctggccgtgctaaagttgcaagctcttgaaggctttttntnttttaatctgggcatgtgtgatgttgaattgatgtgttctnaaatgtgagtatgctgttagaggagaggtttcanacttgcccaaaatttgncaaaggattaccagcccat

SEQ ID NO: 1631 - DNA, 146 bp, Glycine max
  Clone ID: 700996848H1
attctgctgggctgcttaaacttccaacagacaaggctttattggaggatgctgaatttcgctgttatgttgagctatatgcaaaggatgaggatgcattttttcgagattatgctgaatcacataagaaacttcagagctaggct

SEQ ID NO: 1632 - DNA, 88 bp, Glycine max
  unsure at all n locations
  Clone ID: 700996849H1
ggtggtctcacttgactcgattgancagtgatccacgacacantgttcgcttcanaaaagttcgaatccaattcctcagtaacatctg

SEQ ID NO: 1633 - DNA, 133 bp, Glycine max
  unsure at all n locations
  Clone ID: 700996853H1
gtaaatttaattagtaatactatagtaccatcatatctcttcactgtgaataanatcaaattgagtcttgataaagatttatatatgcatcaagacacaagaccaagttaattttgtaaataatcacatgact

SEQ ID NO: 1634 - DNA, 72 bp, Glycine max
  Clone ID: 700996854H1
gatatatatacgtggtaccctagagtgccattctgtagtttatttctgctcaccaaggcttaccacatcaca

SEQ ID NO: 1635 - DNA, 174 bp, Glycine max
  Clone ID: 700996855H1
ggcaattcccccaagcagtagcatttgctgtctctggaattagaagccaagctattgtttctataacaagcaacaaagaagttattactggtgggcatgctgataatagtattaggctaatatcctcagatggagctaaaacttagaaacagctttatgggcatgtgtcctgta

SEQ ID NO: 1636 - DNA, 173 bp, Glycine max
  Clone ID: 700996856H1
ctagctatatttagttcctgtgtagccggaataattaattatctctatgtctgtcttgttggtttaaaattcatagctttcgaactataatgatgatctgcggagaggagaacgctcttcgatttgaataacacaatggtaacttggcatggctgccatgctaaaaaataatt

SEQ ID NO: 1637 - DNA, 137 bp, Glycine max
  Clone ID: 700996858H1
aaggctgtttatggaggacccgccaagggaggggttggagccatacctggtgttgctagcttttacatacctttcaagaatgctaaaggagaggaagggttggttataccggtttgtttgccgtctgaggccatgga

SEQ ID NO: 1638 - DNA, 144 bp, Glycine max
  unsure at all n locations
  Clone ID: 700996859H1
gttctagcaagcctaaaacaagaaactgatgaagagcgtttggngtggaaagagctatctgccttgcttaaatcagaatatccaaagtacactccattacttgcaacgattttggaaggtttagtttcttggagtaatatccaa

SEQ ID NO: 1639 - DNA, 179 bp, Glycine max
  unsure at all n locations
  Clone ID: 700996860H1
cgattatgttgtcccatgtgaagcaacctggtattacctttgtttaccaccctggcttgtctggtattgataaggtcaatgctaagctnnnnnnnnnnnnnnnnnnnnncatggatcctttacttggggaggaggagaagtttgattccnttgccntggttcaaaagaaacntgtgcaa

SEQ ID NO: 1640 - DNA, 202 bp, Glycine max
  unsure at all n locations
  Clone ID: 700996861H1
attgaatagaaatagaatcgtcgattttctctttctctgactctagggtttcattattttcttctgtagatccatctatctagcttcggagctgcaaatggacgtcgcagtcactgccttccggtcaccgntgatcatcctcggaagaccggtcaaagggttctgccntcancttcggttcngnttccnattttgggntttt

SEQ ID NO: 1641 - DNA, 138 bp, Glycine max
  unsure at all n locations
  Clone ID: 700996862H1
tgcaaaatctggtgtatctgggattgtntcaggaattataatgacctgtgcacncttgttntctaacaccattatttgagtacatacctcagtgtacccttgctgccattgtgatctctgctgtgatagggctggtag

SEQ ID NO: 1642 - DNA, 66 bp, Glycine max
  unsure at all n locations
  Clone ID: 700996863H1
cccttcctaaataaccctcaaanaaaagccaccttaacatctcttctctgaaaattctctttagag

SEQ ID NO: 1643 - DNA, 114 bp, Glycine max
  unsure at all n locations
  Clone ID: 700996864H1
cgtgcattcaatggccaccacagcagctctatccgganccatggtgagcacctccttcatgaggaggcaacctatgaccaccacaagcctaaagacattccccaacgttggtga

SEQ ID NO: 1644 - DNA, 154 bp, Glycine max
  unsure at all n locations
  Clone ID: 700996868H1
gttgtgcagctctgggaaaattgttggaacctcaagattgtgtggcacntattcttcctgtcatagtcaatttttctcaggataagtcatggcgtgttcgttacatggttgctaatcaactatatgagctatgtgaagctgttggtcctgaccc

SEQ ID NO: 1645 - DNA, 154 bp, Glycine max
  unsure at all n locations
  Clone ID: 700996871H1
ctctgcattcaagttccataatggcagcaaccatagcaacaacaatggctatgatcaacttcaaagtgcatcaacacaacagggtcatcacacaagttgcacaaccccaagctcccaccctcaaaacccaccctctcccttttctccctntcag

SEQ ID NO: 1646 - DNA, 152 bp, Glycine max
  unsure at all n locations
  Clone ID: 700996872H1
ctttcttatgcggatgggaaggagacagtggccaaagcagctnacttgatttttgtggagcacttgaaacgacataaattgggtggagaactagatctaatcttgttagaanctcaattgaatgaagcattgcaattgttggtagcnaaggt

SEQ ID NO: 1647 - DNA, 175 bp, Glycine max
  Clone ID: 700996873H1
gaatctttgtatctcacctaagtttaaatgggttccttccttagatagtgcttcctattctttgagaccttcacttgggtcttgttttggtaacataaacattgctatcgtgagtctaagtactactagaagtttgagtttgaggagggagtgggagtgttagtgtaagatctag

SEQ ID NO: 1648 - DNA, 129 bp, Glycine max
  unsure at all n locations
  Clone ID: 700996874H1
cacgctatcatgccccgaggtgatgacggattacggcgcggcgttgttgccgtccatgacttgaagggagagggatcgtggaatgtcgcttggnacgcgcggccggcacggtggctccaccgccccgac

SEQ ID NO: 1649 - DNA, 149 bp, Glycine max
  Clone ID: 700996875H1
gccacttttaggcttgattacagattggtttattggaactcgagattggccacatgaacacaaaaggttagtctcaatgttccaagctggacagaccatttgtgacatgtttactggtataggccctttgccatcctgctgcaaaaaag

SEQ ID NO: 1650 - DNA, 109 bp, Glycine max
  unsure at all n locations
  Clone ID: 700996876H1
gacaatgtgaaagccaagattcaagataaggngggtatccccccagaccagcagaggcttatctttgctggtaaacagcttgaagatggacgaacccttggcagattaa

SEQ ID NO: 1651 - DNA, 155 bp, Glycine max
  unsure at all n locations
  Clone ID: 700996877H1
ggaagaaagaatggcagcttncgactgtctactcaacacaatctctgagcacaaattgctccatctcaaccccatcaaagacgcaactcagttttttccaccaaaagcaggtagttttctggaggaacagcaagaagggcagtgcagcagcagga

SEQ ID NO: 1652 - DNA, 133 bp, Glycine max
  unsure at all n locations
  Clone ID: 700996878H1
gccaagcgcaggagttatgcnaacaccattagctatctgactcctccagcagaanatgctgggctatacaaaggtcttaagcagttaagtgagctcatctcctcttatcagtccctcaaagacacaggnncgt

SEQ ID NO: 1653 - DNA, 108 bp, Glycine max
  Clone ID: 700996879H1
atgggcagtgcattttctgccctattcggccgcgggtccaccgtcgccgaagggtcgtcggagagtttacacgtgttgccgttccactcgtcggagcgctggcagcta

SEQ ID NO: 1654 - DNA, 112 bp, Glycine max
  unsure at all n locations
  Clone ID: 700996880H1
gnaaaatggtgagggtgttgagaagctgcattcaatcgattttgnaagctggtgaactcggtgattgggnatggcggggctagccatgattctgtactccgcatggatgatt

SEQ ID NO: 1655 - DNA, 145 bp, Glycine max
  unsure at all n locations
  Clone ID: 700996883H1
gggattctaaatggtacactcaattcagnnatgtatccaatccttggatggcaagatatgtgtatggcttgattntcctcctaattcaactaataagcataatcngcttcattaactggttgactgattgtcttggccatggaaa

SEQ ID NO: 1656 - DNA, 152 bp, Glycine max
  unsure at all n locations
  Clone ID: 700996886H1
ctggattagttaggangagcccttatctgacacactctatctttaacntgtaccaaactgagcatgagttgcttaggtacttgtataagctacaatcaaaagatctctcactatgccacagtatgattccacttngatcttgtanncatgaa

SEQ ID NO: 1657 - DNA, 171 bp, Glycine max
  unsure at all n locations
  Clone ID: 700996887H1
ggttccccagattttagatagcttttgaatgtattttgctggacgtgacgatgattgggaagttgggttgttgtttttatttgtggttgatacttttgttaaataacattgttcagcgataatgatagtgatctttccggacccaaaanncaaaaannaaaaaaaaggggg

SEQ ID NO: 1658 - DNA, 159 bp, Glycine max
  unsure at all n locations
  Clone ID: 700996889H1
gagaaggtaccaatcaggttgcacttcagtcatcttggctgtttggtaatggaatgtttgctttagttttgtcatttgntcttctttttactggtctacaaagtcgcaaggctagatcctngcgttatggctcaggttggctacgaggatttatagctg

SEQ ID NO: 1659 - DNA, 160 bp, Glycine max
  Clone ID: 700996890H1
gaatgtcccaaggatgagaaacttcctcgtcgcaaaatttttgacaaacctaagacgcgctgcttcactattctccctatggagtttaatcttgtggtccgtcaaaagtttttaaattttgtgaggttcattatgaagaaaaggggacaagcttagttgt

SEQ ID NO: 1660 - DNA, 117 bp, Glycine max
  unsure at all n locations
  Clone ID: 700996891H1
aaaaaatcaaaacaatgtttctgggactcggtttcatttcatncagatgatctgtttatctttacnntttttaattttaatttaaagtcttgnattttgtatgtaaagatgtaaaat

SEQ ID NO: 1661 - DNA, 105 bp, Glycine max
  unsure at all n locations
  Clone ID: 700996892H1
aagttaatgaaaaagggntcataattcctggccttggagatgctggggaccgtagctttggtacagatacatgaaaattatacgaaatacctcatcacctctccc

SEQ ID NO: 1662 - DNA, 141 bp, Glycine max
  Clone ID: 700996894H1
ctgttttgggaaacaaaagagggttctcagatgtcatgagtggattcgccgaggagaaattgcttgttagttccgaggtcaacacaatattgccaccaaggccttcttctaatgtggggttgaaaccaagctctatgcttt

SEQ ID NO: 1663 - DNA, 95 bp, Glycine max
  Clone ID: 700996895H1
gaagagagatggatccagacgcgttggcaaaggcattcgtggagcactactacagcaccttcgacaccaacaggaacggcttagcgaatctctac

SEQ ID NO: 1664 - DNA, 284 bp, Glycine max
  Clone ID: 700996903H1
gaaggggtttctaaactgagtcacttaagcaagctggctcgagaaaataatacggctagcaagtcagttgaagcagaccgcttgcatactatgttccttggcatggcagatgcaagagctgtcctcgttaaattggcagatcggttgcataatatgtgacactagatgcattgccaggggccaagcaacagaggtttgcaaaggagactttggagatttttgcacctttggccaatcgcttgggaatttctacttggaaggaacaattagaaaatttgtgtttt

SEQ ID NO: 1665 - DNA, 282 bp, Glycine max
  unsure at all n locations
  Clone ID: 700996905H1
ggtgcgtcctgcaacaactctgttggctgatgggtgtccatatttgtatgctatggtgcatgatagttcagtgtctacaataccaggtgattttgtcattggtgttaagttgacaaccataaacaatatgtgtgcatatgggctcaatcctggtattcaggttctcgtcttttgggcaccattcctcagtctatttcacagcaaactgtttggnatcaaatggcaacagtgagaacaccattgaattttgattctagcaagcagagcttttgtcaattttct

SEQ ID NO: 1666 - DNA, 252 bp, Glycine max
  unsure at all n locations
  Clone ID: 700996906H1
ctggtctaagaagatntgggtctacccttaanngatatagaaatacgtgcacntatggaagcggctgatgtggacaaaagtggaaccatagattatggggagtttattgctgctacatttcatctcacaaactagagcgtgaagaacatcttattgcagcattccaatattttgacaaggatggtagtggctacattacagttgatgaacttcaacaagcttgtgcagaacataacatgactgatgcttttc

SEQ ID NO: 1667 - DNA, 278 bp, Glycine max
  Clone ID: 700996908H1
cttcttcctgaagatatcaatatttatgcaaccactgcttccaatgcagaagaaagtagttggggaacatattgccccggggagtatcctagtcctcccccagaatatacaacctgtttgggtgacttgtacagtgttgcttggatggaagacgtgacagacacaatttgcgaacagaaactctgcaccaacaatataaattggttaaagagaggactatatctggagattcatactatggctctcacgtgatgcagtatggtgatgtagggcttagc

SEQ ID NO: 1668 - DNA, 281 bp, Glycine max
  unsure at all n locations
  Clone ID: 700996909H1
cacaacctcatcaatttgtgtggcaaagaatttagatagtctagctctcaaatcctcttcttctcttccatccaatcctctcagactgatcttagacgcaaacacatcctaatcanaaaagcggtgaccatggcaaacatgattatggcttccaaaaacctctggttccagtctgcaccagttcccgttcccccacaccaaaactcnccattctcnaaatttcactccccaaagcnccaaccttgaaactgaaactcccaatttcaaagccccagatgctg

SEQ ID NO: 1669 - DNA, 102 bp, Glycine max
  unsure at all n locations
  Clone ID: 700996910H1
ctacaaattaaatgggggataaagaagcaatgagacttctaagacttattgattgttcacttggttttatgacatttatagtttatggttnaaaacggtttt

SEQ ID NO: 1670 - DNA, 280 bp, Glycine max
  unsure at all n locations
  Clone ID: 700996913H1
ggtagctacggttcgtaaagggaaagaaaaaagaagaggaaatcgagaatcccttgcaataggccaaattcgagaatcaaaactgaagccaaagacgagaaatcaagaaaggagaccncgaaacacatattccttctccgaagccaattgaaccaaaagaaacttggagtgaagagccatgagttggagatcgagaaaaagaattgaaatcgaaaaanaaaaggaataaccaaccgatttgtgttttgattttcttgggagcgagaaagaaaaaaaaatt

SEQ ID NO: 1671 - DNA, 281 bp, Glycine max
  unsure at all n locations
  Clone ID: 700996914H1
gggatctggggatgtttttcgcagccaaaatgccgtagactttgctcgaaggaggcttcaagagcacaatgatgtgaagcagtgttgcaaggnggtgataggngangcnataaagagaggngcaanagncaanttgacagtggtgatgatatgtttcactcagaaccancagctccnatggttgtagnnaggnctagagtcagangaagcatatctgctgaggggcttcanaatcttaagtgcttgctagaaggataaaattttctacttctcggcaacac

SEQ ID NO: 1672 - DNA, 282 bp, Glycine max
  unsure at all n locations
  Clone ID: 700996915H1
gaaatgcaagcaattgatgagctactgaagaatagaaatgaaatacaggcatcatacaccagtgctcctttaaaacgaactacaagtaggagcagaagtaaaaattcttccaaggaggcaaaagaagatggccaagcaaaggaaaagaggagtacagagaacggccaaagaagaagaaatggtataaccttcacttaagagttgataagagaaaggcttgctaaggtgagaattggacaattaagttcttctgtcactcatgtattgatataagtnatgaat

SEQ ID NO: 1673 - DNA, 282 bp, Glycine max
  unsure at all n locations
  Clone ID: 700996916H1
gtcttctncctctgtttcgtcagggtttccttttctcacttggagctcccaattgaaacccaatttcgtaatccctccacactttctcgttcgncaaaactcgcgaattggaaagacatcgacggctccgcgtgatacgttctcttcctgtctggtatcaatgttggctattagtgcaattgcatctttgcccgtattaccaccagtcagaagaggtggccactgcattgaacagaatgttgtttccacattgagctttccaagacgatacagacaactaat

SEQ ID NO: 1674 - DNA, 282 bp, Glycine max
  unsure at all n locations
  Clone ID: 700996917H1
acaacctcancaatttgtgtggcaaagaatttagatagtctagctctcaaatcctcttcttctcttccatccaatcctctcagactgatcttagacgcaaacacatcctaatcacaaaagcggtgaccatggcaaacatgattatggcttccacaaacctctggttnccagtctgcaccagttcccgttcccccacaccaaaactccccattctccaaatttcactccccaaagccccaaccttgaaatgaaatcccaatttcaaagccccagatgtgtccc

SEQ ID NO: 1675 - DNA, 281 bp, Glycine max
  unsure at all n locations
  Clone ID: 700996918H1
aattctctcttatcatctttgttattacctctttccaaagtccaaattttctagttccaccaaaccaaaccaaaccaaaatggcagcagcntcagcctcatcnatgatatcaacaccagccttatctccaaccatccaaaagcaccatcatttgagccatccaacgtgtgcttccaaggtcttagacccctcgcaaggttcaccaaagcctcatcaacgangtagagcaccaccaccaaaagggttattccaaagggtggtgttagagctgaatcaactca

SEQ ID NO: 1676 - DNA, 279 bp, Glycine max
  unsure at all n locations
  Clone ID: 700996919H1
tcttggagaaggctagtaagctctatgagttgcatctttacactatgggaaacaagctatatgcgacaganatggcaaaggtgcttgatccaaagggagttttgtttgctggaagagttatctctagaggtgatgatactgattcagttgatgtgaggagagggttcccaaaagcaaagatttggaaggcgttttgggtatggaatcatctgttgtaattatagatgattctgtgagggtctggcctcataacaaactgaacttgatagtggtggaaag

SEQ ID NO: 1677 - DNA, 280 bp, Glycine max
  Clone ID: 700996920H1
aggaagaagcaagtgcagaggaaattaataggtgtaggtgggttcattatagatttagaccccctttgctgtccactgaaatttgtggggtttgtgattcatgttcatgccatagggattggcatagcgagtatccccaccaccccagttatgcgctcatatctcatttcatccaccttagccgtgactccaccaacatgctcctctgcataagactcctcgtactcctcggattcctccgaaaaatactcatggtgcccaccatggtttggaaaatgat

SEQ ID NO: 1678 - DNA, 280 bp, Glycine max
  unsure at all n locations
  Clone ID: 700996922H1
caagcttcagaaccacttcagaataaagcatttggcattcccagaccacctggtcctacaagatctgttagcatggacctctccaaggcaccactggaatcagcttcatctgttgatctttttcagttaccagcagcaccatctcaagctcnacattggatttgtttcaatcatctctttcatcggcagatccatctttcanngagaatcaacttagtcaaacatcccatcttgcatctattgattttttttccgatttttctccgcagccttctactgt

SEQ ID NO: 1679 - DNA, 277 bp, Glycine max
  unsure at all n locations
  Clone ID: 700996923H1
aaccatgttcacggctagtaagctagccttcacattaacaccacctcgtccatgcactgcacctttgacaccaatctcttccttgtnnnnnnnnnnnnnnnnnnnnnnnnnnnnnnnnnnnggtatcaacttcattcagttcaatggacgcacttatgcctccgacgcaggctgtttctactctctcctaaggccactgcagatcaacaagggaaggttgaagaatttgaagatgattcaaatgttgttgatagtaaaatcctcccatattgtagca

SEQ ID NO: 1680 - DNA, 276 bp, Glycine max
  unsure at all n locations
  Clone ID: 700996925H1
tttgtgaacaaaattgttatttgaacacaacatatatcccataattgatactccacatacaaaaaaaganaagaaatggattcactacttcatatccaaaagcctcatgttgtatgtgtaccatttccagcacaaggccatgtaaaccccttatgcaactagccaaactccttcattgtgtgggtttccacataacctttgtgaacactgagttcaaccacaaccgttttgtcaagtcccatggaccagactttgttaagggtctccctgatttca

SEQ ID NO: 1681 - DNA, 275 bp, Glycine max
  Clone ID: 700996926H1
taatattctcattcttctgtctctgcttcttctccttctgaactaagagatggggttgtctttcaccaagctttttagccggctctttgctaagaaagagatgcgtattctcatggtaggtcttgatgctgctggtaagactaccatctttacaagctcaagctgggagaaattgtcacaaccattcccacaattggattcaatgtggagactgtggaatataagaatattagctttactgtatgggatgtgggtggccaagataagatccgtcc

SEQ ID NO: 1682 - DNA, 196 bp, Glycine max
  Clone ID: 700996929H1
tctagctatatttagttcctgtgtagccggaataattaattatctctatgtctgttttgttggtttaaaattcatagctttcgaactataatgatgatctgcggagaggagaacgctcttcgatttgaataacacaatggtaacttggcatggctgccatgctaaaaaataatttcaacgtcttggtttttggttt

SEQ ID NO: 1683 - DNA, 278 bp, Glycine max
  Clone ID: 700996930H1
tgcaattgaagttgaagtcttgcccttctctcttcaactccaaacacaagacatcatcatccatggctgcctccgtctccactgtcggagctgtcaacagagctcttttgaacctgaatgggtctggacctggggtttcagctcccagttcaccttctttgggagcagcttgaagaaggttattggctcaagggtccccaacacaaagatttcctctggaagcttcaagattgttgctgtagaagagaagaaagagattgaagagacccagcagaccg

SEQ ID NO: 1684 - DNA, 278 bp, Glycine max
  unsure at all n locations
  Clone ID: 700996931H1
gggacgatcttgtnttttctgtttcgtgggacatagtctcagacatatacattatcaatgggccttgtgaatttgcgacaggaatagaacagacttgtacatcaattgttagtcatgtaatgttttcatccacttgtataggttaggcatgagnagctcttaatgaggagtttagagggtatattccagaaggaataaacagtagaggattatttataaacggttccagtggtagtaaaggaggttatttagtcaaacaggggaaactgtaatgggaa

SEQ ID NO: 1685 - DNA, 282 bp, Glycine max
  Clone ID: 700996932H1
ccagatctgtgactgtgttcgattgggtaccaactattattcagtgctgcagctactactgtggcacaacattaagcttttagttgaatcaggctgtcagtaacgtaaaagtaatccctgtgccccagccatggctgcaccgtttttctcaacgcctttcagccttatgtttatcagagtccgcaagatgcaattataccttttcagattttagggggtgaagctcaagtggttcagataatgttgaagccacaagaaaaaatcatcgcaaagcctgataat

SEQ ID NO: 1686 - DNA, 283 bp, Glycine max
  unsure at all n locations
  Clone ID: 700996933H1
ctggttcaactgaggtgatggctttgaatttgccttctcccgcccaagtgaagcccttatttttctcttcaaataactccacaaaacttccaggtngcttttctttgaagagaaaagatagtgacacaacagtagagagacgagtttattgctcgccgctgcttcaatcaccaccaccagcatggccaggaacagtattcccgagccttctgatttcaagacatgggatgggcaaaaacctatttctgtcttaggatctacgggttcaattggnactcagaca

SEQ ID NO: 1687 - DNA, 269 bp, Glycine max
  unsure at all n locations
  Clone ID: 700996935H1
ttcccaaattcattttaatcctaattctgcacttcttgatcattcgattttnctcctcaagatgcagatattcgtaaaaactttgaccggcaagaccatcacccttgaggtggaatcctccgacaccattgacaacgtanaantaagattcaagacaaggaagggatcccacctgaccagcagagacttatctttgcgggtaaacaacttgaggatggtcgcacccttgccgattacaacatccanaaggaatcaaccctccatctcgt

SEQ ID NO: 1688 - DNA, 273 bp, Glycine max
  Clone ID: 700996936H1
aagctttgcttgctaagaggttgggcaaaaaacgcattattgctgaaactggagcgggtcagcatggagttgccactgctactgtatgtgctcgatttggtttagaatgcattatttatatgggcgcacaggatatggaaaggcaggctccaatgttttcagaatgcgtcttcttggtgctgaggtgagacccgtccattctgggactgctacactgaaggatgcgacatcagaggctataagggactgggtaactaatgtggagacaatcat

SEQ ID NO: 1689 - DNA, 277 bp, Glycine max
  unsure at all n locations
  Clone ID: 700996937H1
cagtcaagnatatttctgctagcttaacaaaaggtgctagtcaaccatatgaagctatatttgtgtcatcaaaaactaagaaaagtgatgcacttgatccactaattgtagttcttcatgggggancacacactgtctcattntcaagctttcaaagccattggcttatctttctncccttggatatagcttgttaattgtgaactacagaggctcattaggatttggtgaggaagccttgcncatctcttccagggaaagctggatctcaggatgt

SEQ ID NO: 1690 - DNA, 275 bp, Glycine max
  unsure at all n locations
  Clone ID: 700996938H1
gaganaagaaagaaaggtaattgctaatttcattcatatccctttgccttattacatggaagctatatatatagcttattacagtaacaaaatttggnatttgcaggatatgctcataataaaatggattctgcactatggaattggcagcaagcaggggacaagattgtcaggtcagctctagccgttacaagtagtctttgaggtattctggccttgtgctctttctgttggaccttgccattggcaccccttctttctccttcttcatatca

SEQ ID NO: 1691 - DNA, 273 bp, Glycine max
  Clone ID: 700996940H1
gttgcaagttggtgagttcagttattaagctcttttgggcatgcttcttgctggtcttagggtgaacttttgatgccataaaaaaccatcccatattagttctatttctctctctgcctctccctttgtttcaagttccctctgcttatctgcacaggaacgatgtctgagaaaaccacagctgagaaccttattgaaaaccttgtggacacatttgttgataagaaaaaatctgtatcattctttgaggatgataagtcagactcagtgagt

SEQ ID NO: 1692 - DNA, 272 bp, Glycine max
  Clone ID: 700996942H1
ccttcttccacttccaccctcctctcaggtttttgtggataagagtgagctataatggctgccaggagaccgggtttaattgctttgtttgatgttgacgggactcttacagctcccaggaaggtggtcacaccggaaatgttgacatcatgcaagaactacgaaaggttgtaacggttggagttgttgggggttctgaccttataaagatatcagagcaacttggcagcacagttaccaatgagtatgattacgtattttctgagaatggt

SEQ ID NO: 1693 - DNA, 272 bp, Glycine max
  unsure at all n locations
  Clone ID: 700996943H1
ggagcttttctgctgagtgcagggacaaaaggaaaganatacagcttgccaaattcaaggataatgattcatcaaccgcttggtggtgctcaaggagggcaaactgacatagatattcaggctaatgaaatgctgcatcacaaggcaatctgaatggatatctcgcctatcataccggccaaagtttagataagatcaaccaggatacagaccgtgactttttcatgagtgcaaaagaagccaaggaatatggactcatagatggagtcatt

SEQ ID NO: 1694 - DNA, 272 bp, Glycine max
  Clone ID: 700996944H1
ccaaaactttgtccaccccatcatttgtcttctcaattctcatcactaacacacaagtgtgcgttgtagatttctcagtttgcaacatatggcttccatcatcatgtcatttgctccagcaactggtagagtctttgcagccacagcacaaagggtgctggtggaagcaaagagaagggtcttcttgattggataattggaggattgcagaaggaagaccagctggtagagactgatcctatcctcaagaaggtggaggagaagaatggagg

SEQ ID NO: 1695 - DNA, 275 bp, Glycine max
  unsure at all n locations
  Clone ID: 700996945H1
catggcttcatgtaccgcacctccctncctcatnctcgtccactctcaagacctttctccctctcttcgctccttctctcacaggcccatttctagaaccaccttctctctctatcctctccttttgaagccctccaaatggctccacaagagcccaaattccaggacttgccatgccctcgtcgccgctttgtctgcagaggtccaagtgcccgaaactttcgacgacacggaggaggacgacggtgctgatggctccaccgccaccaacaccg

SEQ ID NO: 1696 - DNA, 144 bp, Glycine max
  unsure at all n locations
  Clone ID: 700996947H1
gatgcaacaaaccggcttctnccgggcaggcctttaaccagcagacaccgcaattcactggacaaactccaatcgcatcaacaatcaccccagcagcaatcttttcaagggccgcagggcaccagcagccaccccaacaacagt

SEQ ID NO: 1697 - DNA, 276 bp, Glycine max
  Clone ID: 700996948H1
ccccatcgccactccactacgtccgcaaccacggtccagttcccaagatcaaatgggatgaatggaccgtggaagtgactgggttggtcaaacgatcaacccacttcaccatggagaaacttatgagggaattccctcaccgcgagtttccgccacactagtgtgtgcgggaaatcggcgcaaagagcataacatggtgaagcagagcatcggcttcaactggggtgccgccggggcctccacctccgtgtggcggggggtccgctgcgtcatgtg

SEQ ID NO: 1698 - DNA, 254 bp, Glycine max
  unsure at all n locations
  Clone ID: 700996949H1
gtggagatctgtcggagaagaaaanngcgaaaattatcctanttccattcgtcgttcaccntcacttctggtgagcgcaacagagnnagagaganagngagnncagngcagangggtagaanctgatnaaggagtcgttngatgaatatntaatataaattggnttgtttgatgggcaacanatgccgcggntctttganagggaaatatattcagggttcagccagcccgnagaccattccaagcgctccacc

SEQ ID NO: 1699 - DNA, 211 bp, Glycine max
  unsure at all n locations
  Clone ID: 700996950H1
ggatcgaatagatctcattactaatactatactattactaaattaagaatagaatagaaagaatttgtaaatttctatcggaacatattaatattcgatagaataatactaatagtagtatattcagatactagtctaaaaanatttatctttattnatttaaactttagactantaattaatactaatccggtatattttccacacaaca

SEQ ID NO: 1700 - DNA, 278 bp, Glycine max
  unsure at all n locations
  Clone ID: 700996951H1
atcggnncncctgaacaatagntcatttaagcataatagtaagtttagtctcaattgagaaaaactaaaacagtccgttttctttccattttaaaccattantctaaaacctancttcaggtataaggagaggttaataatcacatanagtnaaaccttttccattgtgcatatgtggngacggattcagtagttggtcgtaaatctgacaggcaacccttgaagatgtttgccttctggccatctgttctacagcagcctgattgnganttgttaag

SEQ ID NO: 1701 - DNA, 273 bp, Glycine max
  unsure at all n locations
  Clone ID: 700996953H1
ctctaatatttttctcactgtcttgtctctccagagaactgtatagagagagatggcagctgcaacatctggtgctgtgttaaatgggttgggatcttccttcttgagtggaggaaacaggagccaaacccttctggccactgctatggaggcaaannnnnnnnnnnnnnnnnnnnnnnnagtcctagaagactcattgtggtagctgctgctgcaccaaagaagtcatggctccctggtgtcagaggtggtggcaacctcgtcgacccagaa

SEQ ID NO: 1702 - DNA, 237 bp, Glycine max
  unsure at all n locations
  Clone ID: 700996954H1
tcttagatctcttctttctctacgccgcacgccganncccatggccggaaaaggagagggtcctgctatcggaatcgatctcgganccacctactcttgcgtccgtgtgtgcaacatgaccgcgttgaaatcatcgccaacgaccaagggaacagaaccacgccgtcttacgtcggattcactgacaccgagcgtctcatcggtgatgcggccaagaatcaagtcgccatgaacccc

SEQ ID NO: 1703 - DNA, 270 bp, Glycine max
  Clone ID: 700996955H1
catagagctcaacatagaaactagaaactagaagtagcagtccttaagttttgtgcataaccataaaccatgtcattgcctaccaccactagtggtcactcatctctttactctgcatttacattgccaagaaccactcaaattccccaaccttgttttctcccaccaccaagttattttcttccagaagcccctcatattcaggtgtttcccattgtttctcaaacaccctttcgccaagaccgctgccttttgctgttaaggcttcat

SEQ ID NO: 1704 - DNA, 114 bp, Glycine max
  unsure at all n locations
  Clone ID: 700996956H1
gaagatgccaagtttgagatgattntactatatttttcatattggactgtcttcctctataattttgagttaaagtgtccacttaaattgaatttggtgccttttccttttgtc

SEQ ID NO: 1705 - DNA, 271 bp, Glycine max
  Clone ID: 700996957H1
gggatagtggaaattttcaggaagctttcatgaagcaagttaaatatctagtcaccccattattgttgatggggctatttcttacatccttttcgtttggtcctcctgaacagaaccagattagctttcaggagtttaaaaacaagttttggaaccaggattagtagaccatattgttgtctcaaataaatcagttgccaaagtatatgtaaggaacactcccctcaaccaaacagataatgaagtagcccaagggacccaacctgcaatt

SEQ ID NO: 1706 - DNA, 269 bp, Glycine max
  Clone ID: 700996958H1
ctggaagaatatggcttcatttgtttctacccactgtatccttcctagcggggttggatttgtgcatgaccaagatcgttcttgtggtagaactaacactttgcatcttcaaaatgctcctaaaagccctagctctctctccttttgctctccgtgcgagaaagtagatcagatgccgttgttgttcagagcaagggtcgatcgtctttttctcaaacagctgctgtgaggcatcttacaggttctgttaccagagcccatggacttcg

SEQ ID NO: 1707 - DNA, 269 bp, Glycine max
  Clone ID: 700996960H1
tggttccagcacaggtcaagctcctggtgaagacagtgaagtgattttatacccacaagccattttcagggatccattcagaaggggtaacaatatcttggttatctgtgatgcctacactcctgctggagaacctattcccactacaagaggcacgctgctgccaaggttttcagccatcctgatgttgttgctgaagtgccatggtacggtattgaacaagaatacaccttgttgcagaaagatatccaatggcctcttgggtggcc

SEQ ID NO: 1708 - DNA, 272 bp, Glycine max
  Clone ID: 700996962H1
ccaaaactttgtccaccccatcatttgtcttctcaattctcatcactaacacacaagtgtgcgttgtagatttctcagtttgcaacatatggcttccatcatcatgtcatttgctccagcaactggtagagtctttgcagccacagcgcaaagggtgctggtggaagcaaagagaagggtcttcttgattggataattggaggattgcagaaggaagaccagctggtagagactgatcctatcctcaagaaggtggaggagaagaatggagg

SEQ ID NO: 1709 - DNA, 274 bp, Glycine max
  unsure at all n locations
  Clone ID: 700996963H1
cttcttcctgaagatatcaatatttatgcaaccactgcttccaatgncagaagaaagtagttggggaacatattgccccggggagtatcctagtcctcccccagaatatacaacctgtttgggtgacttgtacagtgttgcttggatgaagacagtgacagacacaatttgcgaacagaaactctgcaccaacaatataaattggttaaagagaggactatatctggagattcatactatggctctcacgtgatgcagtatggtgatgtagggc

SEQ ID NO: 1710 - DNA, 276 bp, Glycine max
  unsure at all n locations
  Clone ID: 700996964H1
ctgaagcagtatctgcatgattaaatgaatcggggtattgcctggcatcaagtcataccctggaatgaaataagacagataaaccttcgtcttaaattccttggtagttacataatacaattttagatattcattgaaaaaaatgttgnttgaaccttttctgaatgccaggaggattgcacaagtaaaagagaaccaatgtcaaattgctgtagaagatgttatgtacttgctgattttttacaagttttctgagatcagggtccctatggttcc

SEQ ID NO: 1711 - DNA, 275 bp, Glycine max
  Clone ID: 700996965H1
gttgagattggtatgggtgaaatgggtcaatatgaacaggattttgaggtacatatgcttgaggatactgccgattattacaaaagtaaggctgcaaactggattgagattgactcctgcccagattatatgcttaaggctgaggatgcttgagaagggagagagatagagtgtctcattacttacactgtagcactgagcagaaattggtagagaaagtgcactagagctgctggtgactcatgcaaatcaattactcgagaaagagaactctg

SEQ ID NO: 1712 - DNA, 273 bp, Glycine max
  Clone ID: 700996966H1
cttatgactaatgatatctcgggtgtcaaccttgaagaagcagtcccttgcattgcactctcaaaaaatgactcttatgttatgtctgcctgtggtggaaaggtttctctatttaacatgatgacattcaaggtaatgacaacattctgccaccgcctcctgcttctaccttcctagctttccatccccaggataacaacattattgccattgggatggacgattcaaccattcacatctataatgtcagagtggatgaggtgaaatcaaaat

SEQ ID NO: 1713 - DNA, 271 bp, Glycine max
  Clone ID: 700996967H1
ctcgaagctattgactgtggaaaaccgctcgatgaagccgcctgggacatcgacgatgttgctggttgctttgagttctatgctgaccttgctgaaaaattggacgcacagcaaaaggctcatgtgtctcttcccatggacacatcaagagttatgttcttaaggagccgattggagtcgttgctttaataactccttggaattatcctctgttgatggctacgtggaaggttgctcctgctctggcggccggctgtgctgcaatattgaa

SEQ ID NO: 1714 - DNA, 269 bp, Glycine max
  unsure at all n locations
  Clone ID: 700996968H1
ttagtatgggtgacaggggaacataattgtgtctcacgtccttcaaatggctacataattaatgtntgttaggataggcgacacgggaacataatcntgtctcncttccttcaagtggntacataattaagaagttattagctacagctacgtgctgtagttgtnagcttgtcctnttgtgncanttncttgccattgtattttnganaaaggggggtaaacaccattaagtgctactgcttattcantaagnctgattcatagaacct

SEQ ID NO: 1715 - DNA, 271 bp, Glycine max
  unsure at all n locations
  Clone ID: 700996969H1
ggccaggactatctgaagcagataaaatgtggagggttttcagtgcnttgggaaacattgcacttgcttgctcttatgctactgttgtgtatgatataatggacacgttgaagtcatatccaccagaatgcaagcagatgaaaaagccaatgtgttaggaatcacaacaatgacaatacttttcctgctatgtggtagccttggctatgctgctttcggagatgacaccccgggaaacatcctcactggctttggattttacgagccattc

SEQ ID NO: 1716 - DNA, 271 bp, Glycine max
  unsure at all n locations
  Clone ID: 700996970H1
atcctctgcatatgggaaccttacaaatacatattcttctatgtcaatgctaccacaggctcagtcaggagttcttatgcgacagcctctgctttctcgctatgaagcatctcttggtgttatgaatccngtgagcaagtctgtgacttagttaagcctcttacaatgactccccaggaaaaaattgaacaaattgangnggcggcaacaaatgcnagcaatgcttgctattcagnnacaacngcnagaattcggccatnaagttcctagc

SEQ ID NO: 1717 - DNA, 265 bp, Glycine max
  unsure at all n locations
  Clone ID: 700996972H1
aaccccatcatgatgagtgctggagagttggaaagtggaaatgcaggagagccagcaaaactgatcaggcagagataccgtgaagccgcagacttgatcaagaagggaaagatgtgtgctctcttcatcaacgatcttgatnaggagctggtcgtcttggtggaaccacccaatacactgtcaacaaccagatggtgaatgccaccctcatgaacattgctgataaccccaccaatgtgcagcttctggtatgtataacaaggaa

SEQ ID NO: 1718 - DNA, 191 bp, Glycine max
  Clone ID: 700996973H1
gggaactatgagacgttagaaagctgaaacatgtctctgacattggttagcactggtcattgacaaccttggtggcaattggcattggaattttgtacataaaaagttgcttttgtgtgataactttgtattatgttttcggtgtgaaccatgcatgaatttgttaatggaagtaattatattttttatgg

SEQ ID NO: 1719 - DNA, 267 bp, Glycine max
  Clone ID: 700996974H1
ctttgagtctggggaagaccagcgtatggaatcagttcttccaggatacagagatcatagatcaaattgaccgagatgtaaagcgcactcatcctgatatgcactttttctctggtgattcccaatttgcaaaatctaatcagaggctttgaagaatatattaattatttttgcaaagttaaacccgggtgtaagatatgtgcaaggaatgaatgagatattggctcctctattctacgtgttcaaaaatgacccagatgaggaaat

SEQ ID NO: 1720 - DNA, 265 bp, Glycine max
  Clone ID: 700996975H1
caaacttatcgggacacacggcctagcacgaaaactggcagacggtgtccaagcgttgggaggcaaatttgtctatcctacagagaccaacatggtctgggtcgaccttgcaagcctggggatcccgctaaaagatctccaagagccggcgaggctctcgaacagccgctcgtaattcgcggcgcacggttcgtggtgcatcaccaaataaccgagcaggccatcgacgacttctcattctcttcaaagattgcaagacaaacac

SEQ ID NO: 1721 - DNA, 267 bp, Glycine max
  Clone ID: 700996976H1
tccttccttaccatggcttctcaatctcacaacatcaaaatccacgaccactttagcgtttcccctccctcagcaacagcgacatccctctctctcaaattcttcgaccttttctggctcaggttccaccccgtggaacgcatctcttctacacgcttccaacaccccaatcagacccatccattttctattccaaaatcgttccaaagctcaaaacctctctctctcacaccctccaacactttccccctctcgccggcaagtggt

SEQ ID NO: 1722 - DNA, 267 bp, Glycine max
  unsure at all n locations
  Clone ID: 700996977H1
gttctgatcccaattgctgcttccttgggaggtgctctttttatttctatgtngtgtgttgggattgttttcttttgctacaagagaaagtcaagaactcgaagacagaaaagttcaattaaaagaccaaatccattttcaattggtactttaatgggagagttgtgtatggagacataatcgaagctaccaagaactttgacaaccagtattgcantggggaaggagcgttgggaaaagtttataaagcagagatgaaaggaggtc

SEQ ID NO: 1723 - DNA, 270 bp, Glycine max
  unsure at all n locations
  Clone ID: 700996978H1
aatatatattcagggatattatcaagcctcggcganggaattgataaggatcaatggaaccacaaaagctccagtcatgaattttgctgctgagacatcacttggggtggttnctgtaagagcattcaacacggtgaacagnntcctcaacaactacntaaagcttgtggacatggatgcaacattgttctttcattctatcgtgaccatggaatggtcaattttaaggtttgaagtacttcaaaatttgacagtcttcactgcagnttt

SEQ ID NO: 1724 - DNA, 262 bp, Glycine max
  Clone ID: 700996979H1
ctaaatcacattcggaattaacgagaaagtatttcggactagaggctgtatttatgcgcatagcaacagccagcaaggctttgtttggttttgtaaatcagattcggaaccaatggctgccaccgaacacagactagcttggaacctgagaaaaagaaccttctcagacaccacaccgagaagcacttcacagccggcgaaatcgtccgcgacatcatcatcggcgtttccgacggcctcaccgtccccttcgccctcgctg

SEQ ID NO: 1725 - DNA, 273 bp, Glycine max
  unsure at all n locations
  Clone ID: 700996980H1
aaggattctaaccgccgctcgatnngaattgcgcttcaaggagtcncgnagggctaatnngcctcacgagggtnaccaacggcacgtgcctttagngggcagaagncccctaactgcctggtcggcaaacggacggngggcncacgcgcgcttctagctcggattctgactnanaggnntncantcatantccaacgcacggtannnncgcgcnactggcttttgaactcagcgcgatgaccaattgtgcgaatcanggnncctctcgtacta

SEQ ID NO: 1726 - DNA, 246 bp, Glycine max
  unsure at all n locations
  Clone ID: 700996983H1
gcgcagacatgggaacttacaaagnnagaaacgcgaattgangatggaggtcaccaaagacnnagctgcaacgccaggatcaggaggtgctcaacctcccaatccaatttctaacggtaactaatccaaatccaaaccctaacccgaacatgcctcacacccccagaggatccaaaggaaaatcgtgtaagggatgcacctactacacatcgcttcataaggccaagtccaaaaaccccacatgcg

SEQ ID NO: 1727 - DNA, 268 bp, Glycine max
  Clone ID: 700996984H1
ggcagctgcttccccaatggcaagccaactcaagtccaccttcactaggactcttgtagctcccaagggctctctgcctcttcaccacttcacctcgtgccttctagaaggcaatttagcttcactgttaaggccatccaatagagaagccaacctatcaagtgattcagccaatcaacggtgacccattcattggaagcctggaaaccccagttacatccagccctttgatcgcatggtacttgtccaacctgcccgcatacagaac

SEQ ID NO: 1728 - DNA, 269 bp, Glycine max
  unsure at all n locations
  Clone ID: 700996985H1
agaatcaccaagagagctggggaagcaagtagattacagttagtggaagctataatccaagttttggaagacaacaccgcgagtnagactcatgaatgggaactagtgaaattgaaatcatatgccttgatttctccatatttccaaagaaataatagaatggaatagaaaggccttcaagaggatgtaaaacctcaaacacttaatattagaaatggcaaattttccaaaggtcccagataccttccaaatagtttgagaatattgga

SEQ ID NO: 1729 - DNA, 266 bp, Glycine max
  unsure at all n locations
  Clone ID: 700996986H1
caggttcaaaccggagcaaaaaaacttgttacgatggtttcttccgacaaggatccacgagaggaagtccttcaagcatggtacatggatgatagtgatgaagatcaaagactcnccnnccacaaagaacccaaggagtttgctcgttggaccaacttgctgaacttggagtccttagctggaaattagatgctgataaccatgaaaatgatccagagtgaaaaagattcgtgaagagcgtggctacacctacatggatgtttgtg

SEQ ID NO: 1730 - DNA, 265 bp, Glycine max
  Clone ID: 700996987H1
gaaaaggaaataatcttaagtggaaccttctgcgaaattagccttccttcgtcccttgattgaagtataaattaggggtgttgaaattcaaagccatatccgtcattaaccaaatttgtgtttctccgattgcaagcaatgactccttcaattccttcttcgattcaacaaaccgatggaattacgatactctcaaaaacttccgtcaaatttctccggtcgttcagaatcacctcaagcaggtttattttactctgtgtttcgc

SEQ ID NO: 1731 - DNA, 268 bp, Glycine max
  unsure at all n locations
  Clone ID: 700996988H1
ctcgtgaagaagacagtagtggagattttcactacgacaagagtanaaaggtcgtggttctctctgacctattctattctcatctgtctacaaccatgtcccgtccactaacagctaaaaancagtcaagagacatcccgtatgataatgaaagaactccgctactcaacagaccagaagatagacctttaccaatgggtcagatgtatctcttatgctttgcgcgtatggtcgagccatgggccttcttttcgatcttcccgtttat

SEQ ID NO: 1732 - DNA, 265 bp, Glycine max
  Clone ID: 700996989H1
atgatcctgttcgtcatgcagaaacgttccccatacctcctgctatctgcagtggaaggcgtgaaaagtgtggaattgagaaggagaacaactttaagcagcccggagagagataccgatcttgggcacctgacaggcaagtagatttaatcgccgatgggttgatgctttatctgacccacgggtcacccatgaaatccgcagtgtctggatatcttactggtctcaggctgaccgttctctaggccaaaagatagcatctcgt

SEQ ID NO: 1733 - DNA, 192 bp, Glycine max
  unsure at all n locations
  Clone ID: 700996992H1
gttcattggtagtccaattaacttttagncangtttnctttagtgtgtttngtatattggggagtaattggcacacatggcttgaantgctataaaagttcattggtagtccaattagcgggagtttgcagcctcgaatatccaaacacactaaagaaaacatgtctaaaggaggaaaanaaacnaaanngg

SEQ ID NO: 1734 - DNA, 266 bp, Glycine max
  Clone ID: 700996993H1
gttgcgtctttcatttcatttcacactgatcccttccctttcttcattcttctatcgtctctgccaaaacgatgccgtttgctatggagaataacggaggaggagttacgatcggacggtcctccttcgcccactgtgtcggatctgtgatcgggattttccggcggatgattccgactccagctccgactcctccatcggaaggaacagcacctcgtcggaagattcctccgaccgggaagacgccggcgaagttgaggttcaga

SEQ ID NO: 1735 - DNA, 267 bp, Glycine max
  Clone ID: 700996994H1
ctcggaacttcaagggactaaaagacaagatcaatttggtccctataaaccttcaagacaggccagcttggtataaggagaaagtctaccctgaaaataaggtgccatccttggagcacaatggcaaggtgttgggagaaagcttgatttgatcaaatatgtagatgaaaactttgaagggacacctttgtttcccagagatcctgccaagaaagagttcggagagcaattgatatcccatgttgatacattcagcagagacctgtt

SEQ ID NO: 1736 - DNA, 273 bp, Glycine max
  unsure at all n locations
  Clone ID: 700996996H1
ctaagatggcttcctttgtatccttcctagtgctgcttcttgcagcccttatcctcatgcctcaagggcttgctacttactacaaaccaattaagaagccaccagtgtacaagcctccagtgtacaagccaccagtgtancnaacaccggtttataagccaaaaccaccggtttacaagccgaaaccaccggtttacaagccaccatataagaagccaccatacaagaaaccaccttatggaaagtaccctccagtagaggacaacacccatg

SEQ ID NO: 1737 - DNA, 211 bp, Glycine max
  unsure at all n locations
  Clone ID: 700997001H1
tgacttttctcctgattgggcatatactggngttagaaaccaggttttaatagttggcacatttctggggagtaaaaagccctctagtgagaccaaatggggatgtatgtttggtgaaattgaggtttcagctgaagttttggcggatnatgtcataaggtgtcagactctttgcattcactggacgtgtaccattctatattnaccgcnt

SEQ ID NO: 1738 - DNA, 245 bp, Glycine max
  unsure at all n locations
  Clone ID: 700997002H1
catagggctctctctctagggtttgatcagactcaagggtttaagccatgggaaaaaggaaggcaaaggcaaagcctcctccaaagaagcgantggataagctcgataccgtcttcagctgccctttctgcaatcatggcagcagcgtcgaatgccgncttgacatgaagaacttgataggggaagctatttgcgggatatgccaagnnnnctttagcactancatcacagctttatcagagcca

SEQ ID NO: 1739 - DNA, 242 bp, Glycine max
  unsure at all n locations
  Clone ID: 700997003H1
gtcgtttctattgatgactacgaagntgttcctgcctatgatgagttagccttgaaaaangccgttgcaaatcagcccgtgagcgttgctattgaaggagggggcagggaatttcaattatatgtatctggtgtattcacggggagatgtggcacagcactagatcatggtgtcgtggctgttgggtatggaacagctaaaggtcatgattattggatcgtaaggnattcatggggttctag

SEQ ID NO: 1740 - DNA, 239 bp, Glycine max
  unsure at all n locations
  Clone ID: 700997004H1
gnccaagccgccacgtgctagggaacatgagagtgataatggaagtggaccagatgagtctaataagaaaacatttgctgtgccttgtgcgatgccaganaagccaacatgcttggaattgagtggtggtactagtactaattgtactaccccactttggggttgttcatcggtttgtggaaggagagaggngatggaagatgctattgctgttaanctcatctttttcaagtcattca

SEQ ID NO: 1741 - DNA, 243 bp, Glycine max
  unsure at all n locations
  Clone ID: 700997005H1
ggngccagagtaaganaggagtgtcattcatggcgattgaggcatggttgatggacgntagcaatgaagatccaaggctttctcaccgtcgcaatcccaacgaatcagtttcattggaccaattagcagaattgggtgtgttatactggaagctcaatccaactatctatgagaacgatcaagagttgaccaagattagacaagataggggntncaactacatggacctgcttgatttntgcc

SEQ ID NO: 1742 - DNA, 244 bp, Glycine max
  unsure at all n locations
  Clone ID: 700997006H1
gaggccttcaatttcacccttcacacgtggtggtggtgttgtncttcttctcttcccctttctntttcttcttctgagcttgtttaagctctttctatttgattccattaacatatatnatcacaatgtgtggtattctngctgttcttggttgtnctgatgactctcgagccaaaagggtccgcgtgcttgaggctctctcgcagattgaggcacggtgggcccctgactggnatgggntcca

SEQ ID NO: 1743 - DNA, 237 bp, Glycine max
  unsure at all n locations
  Clone ID: 700997007H1
gnaagctaggggttttcccctttcttctggttttgtatatattaaacttttggctatttgaagccattgttgaagcgttcctgccatttgtttaaacatttataatgccatgtattctatttttnttttaattttaattttagtaatatacaagtntagaagttctgatctcggacaagtactcgaatataaaatatctttacccganaaaaaaanaaaanaaaaaaangggggggg

SEQ ID NO: 1744 - DNA, 244 bp, Glycine max
  unsure at all n locations
  Clone ID: 700997008H1
gggtttgtatcatcatatgacattgctaatcaatacagtgacagttatgcagatnctcacaagtgggttagtcaccgaaatcataggggaaatatctgtggtgttgacttcatttggctttgcaatcccaaccaagcagtaaacctttaaagacaagttgggctgaagctgnatttagtatactaaaaatttccagttacgaaaagcatcgttatctgaagatgatggcattggccttncctnc

SEQ ID NO: 1745 - DNA, 244 bp, Glycine max
  unsure at all n locations
  Clone ID: 700997009H1
acaaacactacgagtctggnataaatccttggaatcagcatcgcggtttacttgctgtttaaaacgacaacaagatctagaggaatcgaaagagaatacgcagccatgctatacacctccctcgccgtcctcgctaccagcgcgctcattggccaccggcgcggctctgcccgtcgcgaagggcagacctcgtcttcggccaacccgccgaccaccttgaactcggcaagccctccaccgtcgt

SEQ ID NO: 1746 - DNA, 250 bp, Glycine max
  unsure at all n locations
  Clone ID: 700997010H1
gaaaacaaacgaaacctcatccatgggcttctcttctccgttgcaacggagtcttcctctgcccccttaccttccccaacccagacgcgaccccatccttcccaaattctttctcccccaatccccaaatcctaaaccgtcacgcntcctgacggtgcgcgcggaggtgaaagagacctccttccgccgccggcaccaccaccaaccaccatttcctccggacgacnagatccgcgaaatcctccggcaa

SEQ ID NO: 1747 - DNA, 242 bp, Glycine max
  unsure at all n locations
  Clone ID: 700997011H1
ggtacaaggctcacgatcattcaacgaggcattcgcattgcatttgaaaaaaccttgtggaggaggcaaccactcttcttggttcatgactctaatacttgtntttgctatccttaaaatttgttttgccanaaaccaatccttctgcaccattttgggctttggtcccaatctgagtcccagattaaattccaacaaacgggctaaggatccagaattttattcatnatccaagtnanaga

SEQ ID NO: 1748 - DNA, 241 bp, Glycine max
  unsure at all n locations
  Clone ID: 700997012H1
catggtcttactggcaagcaattcaacaagatcagttttcctgatccatggtagaggacgacaacatattttaaaaacaatgtcaaaagcctttatatgtaagantccagaaaatcttgatcgttatgttgaaatgtatagatgcatatgtaatanaggcttcaaataccanatttcttaatcagatgattgtngaacctatccccctataatggggttacnatcgatcgtcngtggttgt

SEQ ID NO: 1749 - DNA, 241 bp, Glycine max
  unsure at all n locations
  Clone ID: 700997014H1
gnatggtgcaaccattganatggatggtgctactgaaactgattatactgcagatgagactccaatggttagttatgtaaatgtccatgctgtgctagatggaagaagaagtcgtgctaaagcctcatcaccagatgattctggttcttctcagggccctagggtcattgttgtaggacctactgattctggaaagagtaccttgtcgnggatgcttcttagttggggcagcnaaaacang

SEQ ID NO: 1750 - DNA, 242 bp, Glycine max
  unsure at all n locations
  Clone ID: 700997015H1
gtccgctgagagtnccgcagagacgtatgaggacagtgaggtgcaaattgcaggtcaattgcaacttcttgggagtcctgagagattgaggaggacggtttgctctgcggagaaagtaggacaggtccgatccttgcgtctccaagaacttccacgactatcatggcgncacgcggcggcngacttagaagatgccggagggtccgcggtcatcaaggatgtcttcgccggcgcggtcggcg

SEQ ID NO: 1751 - DNA, 243 bp, Glycine max
  unsure at all n locations
  Clone ID: 700997017H1
gngagctagactgcaggctcagtttgctcaaatgcgacctgttggaatgccaccatctgttggtcctcgtgtgccaatgtatcccccaggtggtccaggtattggtcaacaattattttatagccaaggccctcctgntatcattccttcccagcctggatttggctatcaacaacaacttatgcctggtatgaggccaggtgcagctcctgtgccgaatttttcgtgccaatggttcagcag

SEQ ID NO: 1752 - DNA, 245 bp, Glycine max
  Clone ID: 700997018H1
cttctctctttcaattccttcacactctcccctctccattcaccattactcccctcttcttccacttttgctcttcccaccacctctgcttcaagagcaaacgtgattctgcccccgaagcccttgaatggagttcgaatctcgacacccaaaaggcggactgagtcggtgattgtctccgccgccgcggaggacgcgagttcggctgtggagggtgggtcgccgccgccttcctccggcggaga

SEQ ID NO: 1753 - DNA, 246 bp, Glycine max
  unsure at all n locations
  Clone ID: 700997019H1
caaagattctgtactatataanatcaaaggnagaaaagaggcctaattaagtagctttcagttgtggaatcatcatattgcagcgttgatggggcatttttcatctgcgttcaataggttggcaaagtcttttgcaacgaagaaagggaggagttctgatgaatgtaatggaagagaagcggcggtagcaatgggcaaaggaagcccaaaaganatcacttcatgttgcatagcntccggcacagt

SEQ ID NO: 1754 - DNA, 242 bp, Glycine max
  unsure at all n locations
  Clone ID: 700997020H1
atactttcacagcctgcattactntttcctcctcttagacaagttgatggagttgaagttcaacatgaacctctgggtggttatatttcttcctataaaaagcagatagaagttcctgcagctgaagcctcaattgaagctactgcccaaggcattgcatcaatgctttgtgcccatggtccagaggttgaatggagaatttgccncnnnttnngcagctgcttatggcctgattccttncc

SEQ ID NO: 1755 - DNA, 247 bp, Glycine max
  unsure at all n locations
  Clone ID: 700997022H1
ccttgccctcgtcaaaganaaaagaagcaaaanactctcacacagagaaagagncttaanaanaaacgggatttgttttgctgggttnggttgtgtgaattgtgnaatgcnggtgcacgganttgtcnacgtgccacggcggtgtaagancntccggcggcaacgagcatttcttcggcgngangggttcgggggcgattggcggcggcggaaaccgtngtngttgttcntaacggcgggaattgtt

SEQ ID NO: 1756 - DNA, 246 bp, Glycine max
  unsure at all n locations
  Clone ID: 700997023H1
ctatactatacaanaagttctcagtgacagagtagagtaacggaggcatgccgatgacgatggcgatgacggcgtcgcagttgcggtgggggtggagaccgacgccgaagcagcagcaacgacgccgtatggttccggtggtgtgttccatcgcnataaagaacgctcagaacaaagagagagcgaanactgaagaagctcttcgaagaaagcgtacnatangtgccggcactggctcccancgna

SEQ ID NO: 1757 - DNA, 245 bp, Glycine max
  unsure at all n locations
  Clone ID: 700997024H1
gnatnatcgtgatggncttnatgncnnggaatgatgtggatnctanngattttgataccctgatcaagaatcttgaggntttgactaaaggcnatgatacatcaatcccagagtttgactatcagnaaaagaggcgtgtnggctataaagcaataaagagnccttcatctgtggtgggtcntagttgtgggcacatatgcattgcatgcaaaanctgcggtcntntactggatattcgagttgcg

SEQ ID NO: 1758 - DNA, 91 bp, Glycine max
  unsure at all n locations
  Clone ID: 700997025H1
ctttgtattactgggtgacttcatttgtnttcaaaattggatatncncataaaanccngcagggtggttgccatagaagttttttcttttt

SEQ ID NO: 1759 - DNA, 240 bp, Glycine max
  unsure at all n locations
  Clone ID: 700997026H1
gagaacccccgtgttcccatcattgtcaccggtaacgatttctcaacactctatgcacctctcatccgtgatgggcgtatggagaagttctactgggcaccaacaagggaagaccgcattggtgtttgcaccggaattttccgcactgatggtattcctgaacaggacattgtcaagcttgttgacacttncctgggccaatccttgattttctttggtgcctgaggggccagagtatat

SEQ ID NO: 1760 - DNA, 242 bp, Glycine max
  unsure at all n locations
  Clone ID: 700997027H1
gggcaganataccgtgaagctgcagacatgatcaagaagggaaagatgtgcgctctcttcatcaacgatcttgatgcaggagctggtcgtcttggtggaaccacacaatacactgtgaacaaccagatggtgaatgccactctcatgaacattgctgataaccccaccaatgtgcagctttccaggtatgtncnaacaagggngagaaccccgtgttcccatcattggtcacgggtaaggat

SEQ ID NO: 1761 - DNA, 151 bp, Glycine max
  unsure at all n locations
  Clone ID: 700997028H1
gtttganncnttgattcgttgtttcctctggcaaaattaaantcctcattgtgattgttgatgaacaattgaantgtctctccgatttgnngattccgncgacagcnagcgatgancaccggcggcgacggtgncacttccngacaaaaga

SEQ ID NO: 1762 - DNA, 240 bp, Glycine max
  unsure at all n locations
  Clone ID: 700997029H1
ttcgcgancttcttacctcctacgnattccccggtgacgatanccccatcgtctccggctccgcactacttagccctagaagcccttatggcgaaccctgancatcaaacgcggcgacaacgagtgggtcgacaaaatctacaaactcatggacgaagtcgnacgantacattcncatngcccagcgnnagaccgaccttccattctcctcggcgtcgaaganttttctccntcacggcg

SEQ ID NO: 1763 - DNA, 242 bp, Glycine max
  unsure at all n locations
  Clone ID: 700997030H1
cttgttgtgttgtgttctctgcaaccatgcttctcagaacagcttcatctttctctctcctcaaagccaacgccgaccatatactccctctccccaactcttcttcttctggtattattcgctactctcagtctctggggaaaaacttggttccatgcgctaccaaggacaccaacaaccgccccttaaccggcgtcgtttttgaaccctttgaagaggtcangagggagctcgaccttgtt

SEQ ID NO: 1764 - DNA, 246 bp, Glycine max
  unsure at all n locations
  Clone ID: 700997031H1
caattgangttgaagtcttgcccttctctcttcaactccaaacacaagacatcatcatccatggctgcctccgtctccactgtcggagctgtcaacagagctcttttgaacctgaatgggtctggacctggggtttcagctcccagttcatccttctttgggagcagcttgaagaaggttattgggctcaagggtccccaaacacaaagatttcctctgggaagcttcnagattgtngctgtagna

SEQ ID NO: 1765 - DNA, 150 bp, Glycine max
  unsure at all n locations
  Clone ID: 700997032H1
ccacaanngnnaacaanagattaggttttgtnatgtcgggcntggagaggcttcagaggatgttcgcgggtgcaggnggagcgctgggccatnccccaccggattcccccancctncgattcctccgancangtctanatctcctccctc

SEQ ID NO: 1766 - DNA, 248 bp, Glycine max
  unsure at all n locations
  Clone ID: 700997033H1
ctggtttttgaatttgcaactaataatactaattaagtgatcacctaaatgacttgatgcagaggctccccagaagtcaaatctaatgaagaaactccaacctcatgtcgncctaaaaccattcttccccctttgatgcctcttcctacaaatgantagaaggctattcttgttaaatacgaataccacttgtnccaaaggctagctatatacattcatcagagggcatttgacggtggactatnccc

SEQ ID NO: 1767 - DNA, 242 bp, Glycine max
  unsure at all n locations
  Clone ID: 700997035H1
gcgctnattctctcgcattccgtggagatctagtgcttctgctgccagacntcgcngaaaattagggttncgattcggaggtagacgacgatgttcggangggctccgaagaaaagcgacagtaccnggtactacgacatcctcggcgtttcnaagaacgcttcgccggatgacttanaganggcttacnngaaagccgncatnaagaaccatcctgacaaagngcggggatcccgcacaag

SEQ ID NO: 1768 - DNA, 220 bp, Glycine max
  unsure at all n locations
  Clone ID: 700997036H1
ctcgaattcctgaagatgccaatnntagangcatactatgnctgggccaggatcagtgcttgacgatcatggtgccaaaacttcgtgtgggatcagaagagcatgaagttcgtgtttgccttcgccctcatcttggagggaatgatcttatgttgacttgagttttaggctcttattaaaattgttggggtngcnagcatggtccgaaaatcattgtttt

SEQ ID NO: 1769 - DNA, 60 bp, Glycine max
  unsure at all n locations
  Clone ID: 700997038H1
gngctaagtgtgagaganagnaaatgccacagtctcaanttcgaaccccantctcntgnt

SEQ ID NO: 1770 - DNA, 243 bp, Glycine max
  unsure at all n locations
  Clone ID: 700997039H1
gagaaacttgggcggggtggtatatgatggatacttgaatggccagttatctgtttcccgtgccttaggagactggcacatgaagggtcacaagggttctgcctaccccttgagtgctgagccagngctgcaggaaatcaacctgactgaggatgatgagttcttgattatgggctgcgacggcctatgggatgtnatgagtaaccaatgtgctgtaaaccatgggcaagganaagaattgat

SEQ ID NO: 1771 - DNA, 236 bp, Glycine max
  unsure at all n locations
  Clone ID: 700997040H1
caaganncacatccaagagaattggaggatccttgggattgggtttaagaccatgaaccatatcccaagaaccacatccaagagaattggaggatcctgacttcttctctcactttcccagaaagccttcacatgtncactttttattgatgatttgggtgttccncaagattacaggcatcatggatggtttggagttaacactntacgctgatcaacaaggctgggaaagcngt

SEQ ID NO: 1772 - DNA, 242 bp, Glycine max
  unsure at all n locations
  Clone ID: 700997041H1
tacctgtcaattcccacgcctcaatnttnnnggcttcattgtcaaccatacccatcactatggctaccgctgcagagggtgtcttgcccaagggtgatcgccattcaganaagtctgtgccgcattcgtcaaacgatgtcgcaaagcagagcggtgttcctgaggagggcctgcaaaggaacnctctcgagcnggcacnnncanttcgttgnaatcggtgggnactgtcggtactggtgtct

SEQ ID NO: 1773 - DNA, 237 bp, Glycine max
  Clone ID: 700997042H1
ctcaggaaaaatacagctcagaaacaagttttggaagcaatgtctcacagaatgcatgtagacaacagtgtaaaactgattgggaagcttttatttggcattgaaaagggtccagaagtactcaacgctgttagaccggctggatcggcacttgttgatgactggcactgcctgaaaaccatggtgaggacttttgagacacattgtggatccttgtctcaatacgggatgaaacac

SEQ ID NO: 1774 - DNA, 237 bp, Glycine max
  unsure at all n locations
  Clone ID: 700997044H1
cgagtccttacgcgttgtttgtgtttgcgtcggaaggnagagaagatgagtgagantttgatggaganngtnagcgcactgggagagcgcctganaatcggaggccgtggaagtggggnganagatgagcgaggggatgagctccatgagtttcaagctcaaggagttcttccaccctgggcccaatcaggccgacnngttntggangacgctacttccgaggccctggacgagccc

SEQ ID NO: 1775 - DNA, 241 bp, Glycine max
  unsure at all n locations
  Clone ID: 700997047H1
gctatatagcataaacatttgantcttcattgcacaatgtcaacctcttccataaacgggtggtgcctctcttccatctccccagccaaaacctctctcaggaaggccacattacgcccttccgtcttcgcaacccttaacactccttcttctccttcctcttcatcttccttcccctctctcattcaagacaggcctgttnttgctggccctgnncccatcaatcaccccaantgtgaga

SEQ ID NO: 1776 - DNA, 239 bp, Glycine max
  unsure at all n locations
  Clone ID: 700997048H1
gtgtgangttggtgaaggtttttnagaagaaagatggaacgaagtgncggaatggtaactgggtcgcatganaggnacgaacttgttagagttagacacggctctgatagtaggtctaaacccttgaagaatttgaatggtcagagttgtcaaatatgtggtgataccattggattaacggctactggtgatgtctttgtcgcttgtcatgagtgtggcttcccactttgtcattcttg

SEQ ID NO: 1777 - DNA, 240 bp, Glycine max
  unsure at all n locations
  Clone ID: 700997049H1
cacgctgatagcgtgacacttcgtgatgacggagtctccgctcgcccaagagtcgttggngccacttccggcggaactcgcggcggagatgatgccgaagcatgtggcggtgataatggacgggaacgggaggtgggcgaatgtnaaggggctgtcaccatcggcggggcaccaggcgtgggtgcaatcgctgaggaaaatggtgangctgtgttncaactggggatnaangttctaacg

SEQ ID NO: 1778 - DNA, 102 bp, Glycine max
  unsure at all n locations
  Clone ID: 700997050H1
gttacggattagcatcaaagcaacntnacaaaatttgggtgngtcctggattganactttngacncnctactacccttcaangctccacctaantcnntncc

SEQ ID NO: 1779 - DNA, 237 bp, Glycine max
  unsure at all n locations
  Clone ID: 700997051H1
tttgcttcagattctggtatgtttttcacaatgagactaattgtgtntgccctaaattcttgaaatgaaatgagtaatctctgnacatnttccccctctcanaattatgtttcctccaacttnggtttggccaattttnaagtattatgtttgnttgcntgattagnctaagtnnaattgngattgattganggggcacaaaatggaatgngaatggttgtaattttnaaanttaat

SEQ ID NO: 1780 - DNA, 161 bp, Glycine max
  unsure at all n locations
  Clone ID: 700997053H1
cgacagcatgtttgactctcatgcttcatattcataantganccacaaaggcaacattatgtcaaatttcatatatgaattgaaaaagcaactttggttcctcgtgttattatttnngccatngctctttggttcctcgtgttaaaaancanaaaaaaaag

SEQ ID NO: 1781 - DNA, 232 bp, Glycine max
  unsure at all n locations
  Clone ID: 700997054H1
gtaganggcgatggccgcgcgagtnctgttgaccagaaaaaccctagccaccgtgctccgcaacgacgcgaanccataancggagttggcataacagcagcggctactcattcacgcgggttgcacgtgtacacgctacccgatctggattacgactatgggcgcanggagccagccatcagcggcgacatcatgcagctgcaaccacagaagcacaaccagactnacatca

SEQ ID NO: 1782 - DNA, 240 bp, Glycine max
  unsure at all n locations
  Clone ID: 700997055H1
cacaaggcagaaagcaagctcatcctagagttttaaaaatggcagcagcctcctccatggctctctcttccccatccttggctggcnaggccgtgaagctgggcccatcagcccccgaagtcgggagggtcagcatgaggaagaccgtcaccaagcaggcntcctccggaagcccatggtacggcccagaccgcgtcangtantgggcccattctctggcgagcccccgtcctaccttaa

SEQ ID NO: 1783 - DNA, 241 bp, Glycine max
  unsure at all n locations
  Clone ID: 700997056H1
gggaaagtactagccatgtagagaaacatttccaaacagaaattactacaatagggaaagtacaacatgttaatctcgttaggctccgtggattctgctccgaaggtagcaaaaagctgctagtttatgattatatgccaaatggctccttggatttccatctgttccagaacaagaatcaaaggtgttggactggaaaaccaagataccaaattgcgttgggaacagcaagagggntagc

SEQ ID NO: 1784 - DNA, 239 bp, Glycine max
  Clone ID: 700997057H1
ccgaaacatacccttgatgttacggaggaagacttctcatttctgataaatacaaatcttgaatctgcttaccacctaagccagcttgcacatcctctcctgaaagcttcagaggctgcaaacatcatttttatatcctccattgctggtgtgctatcaataggtataggatccacttatggtgcaacaaaaggagcaatgaaccaactgactaaaaatttgggcatgtgagtggggcc

SEQ ID NO: 1785 - DNA, 237 bp, Glycine max
  unsure at all n locations
  Clone ID: 700997062H1
gggatgtttggtgatgatatgtttgcatcttttggggaaggaggaggaatacatatgagtcaaggtgcacctcggaaagctgctcccattgagaacaaattgccctgcactcttgaggagatatataaagggactacaaagaagatgaagatctctagagaaattgcagatgccagtggaaaaaccatgccagtagagggaatcttgaccattaatgtcaggcctggctggnagaag

SEQ ID NO: 1786 - DNA, 175 bp, Glycine max
  Clone ID: 700997064H1
ggagtgccatctagcctgtcactgaatcttttggactcaaatacaaaaggctctgctcaaggtggtgatacaacttaccaagttcgagggaatttgaggtatagtagtgcatttggtgagtaccccatgcttcatggacataaagttgagccattcacatggaaactttttgatg

SEQ ID NO: 1787 - DNA, 123 bp, Glycine max
  unsure at all n locations
  Clone ID: 700997066H1
gcgaaatctggttgcnctagtaggttacagatgcattacgttagcnattctgataangtactgtnntnttatgttagtcacaanatgtatttgcacccattcatatttttaaccgtaggtgng

SEQ ID NO: 1788 - DNA, 241 bp, Glycine max
  unsure at all n locations
  Clone ID: 700997071H1
gacactcatctcactcgcgccatcttagggtttctccttttgtttcgcaacatggttgccgctaagaaaactaagaagacccatgagagcatcaacaacaggctcgctcttgtcatgaagagtggcaaattcaccctcggttacaagaccgttctcaaatctcttaggaactccnanagaanaattgattatcattgctaaacaactggccccctttgagaaagtccagagattgaatact

SEQ ID NO: 1789 - DNA, 239 bp, Glycine max
  unsure at all n locations
  Clone ID: 700997072H1
ctcactaggngctcttctccattggttctncatctgcatgcacacacttgcatagttttggaaaccaagaatttttgaagggtagcatcaacaagaagttctggaaatggagatcaccaatgtcagcgagtatgnagctattgcaaagcagangttgccaaagntggtgtttgactactacggcatctggtgcagagggaccagtngactctgcagggagnacagacatgcttttccag

SEQ ID NO: 1790 - DNA, 240 bp, Glycine max
  unsure at all n locations
  Clone ID: 700997073H1
gaagaacaacctgctggatatgggcatctgtgcaagatgattctgcaaaaactctttctgaggagcttgcagacattgaatcccagctgaagttctttgagaccccttcttttcttgatgaagcctgggctgatgctggcattggcgtctttgctcngtgaagatgcatctcaggatgctgctggaaaaccctatgaacctttggagcttcgacgacctgccttccatgggcaggagtct

SEQ ID NO: 1791 - DNA, 235 bp, Glycine max
  unsure at all n locations
  Clone ID: 700997074H1
ttcaatcatgaaatgtgatgtcgatattaggaaggncttgtatggaaacatcgttctcagtggtggttctaccatgttcccaggtattgctgacagaatgagcaaggnaatctcagctttggccccaagcagcatgaagattaaggtggttgctccacctgagagaaagtacagtgtctggattggtggctctatcttggcttctctcagcactttcccaacagatgtggattgc

SEQ ID NO: 1792 - DNA, 233 bp, Glycine max
  unsure at all n locations
  Clone ID: 700997076H1
gnacgatggtgcaaaggttgatatttggtcttgtggggttgttttgtntgttctgatggcgggttatttgcccttccatgaccgtaacgntatggctatgtataagaagatttacaagggtgagtttcggtgtcccaggtggttttcttctgaacttacaagactntctctaggctctcgatanctaaccctcagacaaggatttcatncccgaaatcatggagnaatcgccg

SEQ ID NO: 1793 - DNA, 234 bp, Glycine max
  unsure at all n locations
  Clone ID: 700997077H1
attgttactgtgccaacgcattgtgaggccacaagtacctaacacccagctaagcttttggaacttagagttaagcagttaccttcctccaactataatatctcaaccaatcaaaatccnttttctcaatnnnnnnnnnnnnnnnnnnnnnnnnnnnncacaataagtgttgattttttcctaaataagtgaaagtgtagttacacctttttttagtgtttnaccactttngtg

SEQ ID NO: 1794 - DNA, 236 bp, Glycine max
  Clone ID: 700997078H1
gcagaatgtgccgtggtcgcttttggatgcaacgacgacgggcagttaggcacgggtgcgaatcgccgaaagacgctggctatcgacgatgtgtcggcttccaatttccccaagctggtcgacggcctgctggacgaggaaatcgtcgctgtctcttgtggctctcgccatacaatggcgctcaactgcaaacggtgccgtgtactcatggggatggggatcgatgggacaattgg

SEQ ID NO: 1795 - DNA, 237 bp, Glycine max
  unsure at all n locations
  Clone ID: 700997079H1
cactcttcttctcttgcggctngggttttagcgcagtttcttctagatttaaggnngatgggtaaggaaaaggttcacatcngtattgtggtcattggccatgtcgactctggganatccactaccactggtcacctgatttacaagcttggaggcattgacaagcgtgttattgagaggtttnagaaggaagctgctgagatgnacnagcggtctttcangtatgctgggtgctgg

SEQ ID NO: 1796 - DNA, 239 bp, Glycine max
  unsure at all n locations
  Clone ID: 700997080H1
aaganggttcagtaatcaaganccacaccctttgtggtggagaagaaacaaaaaatgatgaagcaaagttagcaagagaaaaaaagattgaaaaggttatggaggaagaagttgatccatcgataaagagggagaagcacaaganaagcggagtgacgaatgtgggctgcaaagacgattttcttgataacccaattacagatttgatcaagaaggaagtcgaagctggtgattccacc

SEQ ID NO: 1797 - DNA, 243 bp, Glycine max
  unsure at all n locations
  Clone ID: 700997081H1
cgcagatccagccgcttccgcttgtncgatcgctacagacgcttgtatcggattattcatgattgattcataagcngcatgtcttcctccggctatagttgttgcagatctcggatgttgtaaaattagtgtatgatgtgaagctatgggctngaaaatgtggatgtaggngatttcgggacgaaaggccttcaaaaacgctttcgtcgtttgtggttactgagtncctgagtgctcnnntcc

SEQ ID NO: 1798 - DNA, 239 bp, Glycine max
  unsure at all n locations
  Clone ID: 700997082H1
gccattcttgaaaatgaaggncntgtntccctcaattcgtaattatactcttcgtcgagcacatttacgaattgagggaaacacttaaaaagtacagcaactggcccacattccctcagatttttgtggatggtgaactggttgggggttgncatatattgacctccatgcatgagaaaggtgaactggctagcttgttcaaaaaataattgtgcaagttacctgcatttgagcattct

SEQ ID NO: 1799 - DNA, 239 bp, Glycine max
  unsure at all n locations
  Clone ID: 700997083H1
ggcttgtctgcgtagactcaatcatcagcagagaagcaaggagtaggaggtggagtgcgggcgagggtaacttaccaaccctaaggagttgttgagtttggtacatgggcggagaagtgttgacgatggcggacgtcacggccaacttgcaagcngcaaccaccgcatccaccccttacgcgcttcccaccaatctccctctcctcttccgcttttctctccttcgctctcgctcagtt

SEQ ID NO: 1800 - DNA, 239 bp, Glycine max
  Clone ID: 700997085H1
acgaaatatcacgatgaaggctactaccaccgctaccatccttgcgaccgccgctgtggcgtcagctcaggtcgctttgcctgacactatccccatcttgggctaccccttcgggcagcagtgccagcagaccgtccttggtctcttcaccaatggctctttctcacagtgctttcccgctacggcttctcttgcctctgctaacctcgacgaacggattcgattgtcccgtcctggac

SEQ ID NO: 1801 - DNA, 240 bp, Glycine max
  unsure at all n locations
  Clone ID: 700997086H1
ggatctccccgttatagatctttctccctccctctccggcgagtgggacccacttctctgcgccgaggtcagccgcagcctcagggaaaccggcgcgctcctcgtcaaggaccctcgctgcaccgtcgaggacaacgatcgcttcatcgacatgatggagcgctacttctcaaaaccccgcgacttcaaacaaccgccatgagagaccccacttgcnttaccaggttggggttnanccag

SEQ ID NO: 1802 - DNA, 242 bp, Glycine max
  unsure at all n locations
  Clone ID: 700997087H1
gcacgggattgcnaagctggggattggnagaataagtgttaccgctgtggggagagaggncatataganaggnactgcangaacagcnccaaaaaattgagcacaaggcgaggacggagttattcacggtccccagttcaggtcacattcacctcgtcgtggcagaagccgtgatcgcagttacagccgagatcgcngctacagtcgatcacgatccccctgttcagnagagnnganagccc

SEQ ID NO: 1803 - DNA, 239 bp, Glycine max
  unsure at all n locations
  Clone ID: 700997088H1
ggtagggcttgtgttgtgatagantcttacagagaagagtgtgtgtgtgtgataattgggataagctctaatcaatcaatttcaatggcatcatccaattcgactcagcaagaagggaacaaacccgcaaagagaaaacccgtgttcaccaaagtggatcagctcaaacctggnaccaacggtcacacgttggtggctaaggtcttgtcctccggacaccgtcgtacacaaaccgagac

SEQ ID NO: 1804 - DNA, 176 bp, Glycine max
  unsure at all n locations
  Clone ID: 700997091H1
tttcttcttctctttccccaccctttgccataacataacgccaaanctccttcatttcattctcttcttcctctctttccacccccactttgctcattcttcacctctcttctctctctcacttccactccactcttctctctctcacatcatgaactcttcttatatgctgccag

SEQ ID NO: 1805 - DNA, 234 bp, Glycine max
  unsure at all n locations
  Clone ID: 700997093H1
ggngatcccacatcaancagtgatactaccaaaataatatatatangcnaggnacancattcgtctagtgagctagcttgtgaggttgagttaggttcaaagacgaatgttaggnattctactatcactaatattggtgatggggttgttgcgtcggagagaaactttcgaggtcgaactccgacggggcattcccttgtggaggagcagggcagggtgtggagaggtacnncc

SEQ ID NO: 1806 - DNA, 235 bp, Glycine max
  unsure at all n locations
  Clone ID: 700997094H1
cnttggttgtcttaactcctgatcagaacaaagaagctacttcaaatcttttacctgtnaattttagtggactttcaaaggctgtgaagaatggtgatactatttttnttggtcaatacctgtttactggaagtgaaacaacctcagtgtggctagaggtcagcgaagtgaatggtgatgatgtcacttgtgtcatananaattctgctactcttgctgggtcangtatacttna

SEQ ID NO: 1807 - DNA, 240 bp, Glycine max
  unsure at all n locations
  Clone ID: 700997095H1
gctaatatttctttgataccctctgtaaccccagatctttctggtaaggttgatttgtggccaaatgaagatggtaaacttgagcngcttcactcacacgaagcatatgagatgattcaaaaccacctggctctcattctcggtaacagagctggagatttaacatcaatagctgaaattcagcaaattcagggtagggcaggtctacgcaggcatcagtgatgtatggttattttctta

SEQ ID NO: 1808 - DNA, 242 bp, Glycine max
  unsure at all n locations
  Clone ID: 700997096H1
cttagatccggagcaaattaaagatgtatttaacaagatctatgacttcccaaagcctaatatgaatccacttgtcaagttactagcgactggactagcaggctatgaaggagaaaagtggagtaagcacagaaggataatcaaccctgcttttaatttagaaaaattgaagattatgttaccattgttcttcaaaagttgcaacgattctggttagcnaatgggaaggcatgttgtcttcc

SEQ ID NO: 1809 - DNA, 270 bp, Glycine max
  unsure at all n locations
  Clone ID: 700997101H1
ctgcttatcaaacattctcttgagaatgagtgccgtgaagaatccaggttctacatgtgacatggcacccttgtgggatctaaagcctcaaaactgtgatgaagaagcagatttttgggatccatatgggcatctgtttggaatttgggaagagggatattggtccatacaggcaattatgtgcaattgatggccaaatctttcaatccaaaacgaactgcaaatacttgattttnactacatcggttganacnactttttagggaaagc

SEQ ID NO: 1810 - DNA, 191 bp, Glycine max
  unsure at all n locations
  Clone ID: 700997104H1
gnaaaggacgngagacaacttggtaggcanaacgctatatggntcaanggcattgttccttcctaacccgcgaaggcnnattgagacctctggctattgagctgactcggcccacnantggacggnaaancgcaatggaaggaagtcttcangccttgctggcnntcaactggtgtcggctttggaggcta

SEQ ID NO: 1811 - DNA, 251 bp, Glycine max
  unsure at all n locations
  Clone ID: 700997110H1
ttcagacgaccagcaagaccatcacaananggaagggtttggntgantccctcttccaagctccacaggcatactggaactcactacgcaatcatgagctcttatgagtaccttagcactggacttaaacagtacaacttggataacaacatggacggtttntacattgctccngcttttatngacaagnttgttgttcacatcagcnagaacttcatgaccntgcccaacatcanggttccnctcnntct

SEQ ID NO: 1812 - DNA, 255 bp, Glycine max
  unsure at all n locations
  Clone ID: 700997112H1
cacanagtcaaggccacccttnaaagggtccatganactcaggtttgagggaagtnatgatcctttggacaggatcactacagcggaagctatcanaactcttattgacttctaccgcacttctcagcactcttatgctgcaagacaaaaagtggacgagatatccagagttaaaggaactgtaccttgaagctggaggaagtgaggctagttttctgatgcagtcgtacaccttaaccaaacgttccttcatca

SEQ ID NO: 1813 - DNA, 252 bp, Glycine max
  unsure at all n locations
  Clone ID: 700997113H1
gaganacggaggttccgatcctgcgatgtganatatngnagntcngtgaggaanttgaactggaaaaaaaaaatggcgacgtnggaggtntccatcaagggaaatncggngaacggnaaaggagataatagttcgggtggctanaccaangatgttaggaanggttctggtggaggcnaggctcggaattcttnttcttcgtnttnntccgngatngangnggtaattttcgtttannggganctttggcac

SEQ ID NO: 1814 - DNA, 255 bp, Glycine max
  unsure at all n locations
  Clone ID: 700997114H1
cccagtccacccttttcacgcggcctgcccctcccctcgcttgcaccattggtgctttgctcgcaacaacacactcgtcggtcaacatactacgagcacagcatagcattgctggacatccttcaccgcccgctccttatcgcacagagaaaccgacgatcggccgccaagatctgcgcctgcnccccctgaaatcacctcgagccaagttagctacacccctaccccaccaacccaagcaccatggtcgtcgcg

SEQ ID NO: 1815 - DNA, 260 bp, Glycine max
  unsure at all n locations
  Clone ID: 700997116H1
accngatgcatcctctgacaatgatgagaagaaaggtcaatattctaagttctggaatgagtttggtaaatccattaaacttggtntcatcgaggatgccaccaacagaaatcgtttggcaaaactgctcagatttgagagcaccaagtctgagggtaaattgacatctctggatcagtacatatctagaatgaaaactgggcagaaggatatcntttacntaactggaaccnncaaagaacaactggngaactctccct

SEQ ID NO: 1816 - DNA, 256 bp, Glycine max
  unsure at all n locations
  Clone ID: 700997122H1
cgnagcgagangcgagangcgacatggatccagacgcgttggcaaaggcattcgtggagcactactactccaccttcgacaccaaccgcaacantctcgccaatctctaccaggaaggttccatgctctctttcgagggtcagaagatccagggctcccacancatcgtcgccaaactcacctcccttcccttccaacagtgccagcactccatcaccaccgtcgattctcagccctcaggcgtcaacgccgccat

SEQ ID NO: 1817 - DNA, 248 bp, Glycine max
  unsure at all n locations
  Clone ID: 700997124H1
tggtgnacttgacttttcaggtgctcatattcttatgatgatcatcaaactgcaaatatagtgagcccattaagctattactgaaatttgttgcagatttgaaattcttctaagatggatacttcttataggactggtggagtcaagtacgagtgcttgcnttntgatatggatgacactctttacccattgagcttaggtctcaatttgttttgtcgcaagannatacaggagtatatgttaganct

SEQ ID NO: 1818 - DNA, 251 bp, Glycine max
  unsure at all n locations
  Clone ID: 700997126H1
cgcacgaatatcttgttgtttggngcgatccgaganaaactctgtaaacatgttggtttaccaggacctccttacaggtgatgagcttctctctgactccttccgttacaaggaaattgagaatggaatgctgtgggaagttgaggggaagtgggttgttaaaggagcagttgatgtagacattggtgcaaacccttctgctgagggtggaggagaagatgagggagttgatgatgcagctgttaaggttg

SEQ ID NO: 1819 - DNA, 253 bp, Glycine max
  unsure at all n locations
  Clone ID: 700997129H1
gcatgtcttcctccggctanagttgtncgcagatcncggatgtgngtaaaattagtgnntgangtgaagctatgggctggaaaatgtggatgtaggagatttcgggacganaggcctcaaaacnnttcgtcgtttgtngttactgagtcctgagtgatcttgncatccgacctttgccatgacaggtgcgcttgcttggcaggtcaaaatatgttaataaaaaaagttttattggtttagggagagatcgcac

SEQ ID NO: 1820 - DNA, 258 bp, Glycine max
  Clone ID: 700997131H1
tccaagccagtccaattggcaagcctgatcttgataaatttggctagttgtattgtatgcaccaatctactacttactgcctttccttttccttgaggccatttcacctgggcttgatgcaggcagcaggctcaactaattatctttactactgtttgggaacgtgcgatcttataaaggagaggtttattccttatacaggatttgtccttgttgttttgtgagatgtcaatattatgttcagagctaaaatgagaa

SEQ ID NO: 1821 - DNA, 264 bp, Glycine max
  unsure at all n locations
  Clone ID: 700997133H1
gngtgatctttcaactttagttcgtnttcnnanagatcatnggccgagcttggcctacattgatgattatttagaagctttgtatctgtcataagagctttcgtttcacctaccattgatgactgcagaaagatgacgttacgtttcgttttcgttttttcatgggaaacgacattatagagttttagntnatgtggantccttagctgtacgtgtacatgatcctgttgaggctaccagtattttgggaatgcaaaggattgt

SEQ ID NO: 1822 - DNA, 263 bp, Glycine max
  unsure at all n locations
  Clone ID: 700997134H1
ctaaactgcagtagaggacctgttattgatgaagctgcacntgtggagcatttaaaacagancccgatgtttcgagtaggccttgacgtgtttgaggaagagccctacatgaaacccgggcttgcagagttgaagaatgccattgtggtaccccacattgcatctgcctccaagtggactcgtgagggaatggctacactagcagctctaaacgtggtggggaagatcaaagggtncccagtttggttcgatgccaatagggt

SEQ ID NO: 1823 - DNA, 257 bp, Glycine max
  Clone ID: 700997135H1
actatcaatgctacgattgtgctcgccgctggcactttcgccgtcaccaaacttctcacgattgatagcgattactggcatggatggacgctatacgagatactaagatatgcgcctcagcacaactggtctgcttatgaggaagctcttaagacaaatccagttcttgccaagatgatgattagtgggattgtttactctataggggactggattgcacagtgctttgaaggaaaacctctgtttgagtttgaccg

SEQ ID NO: 1824 - DNA, 252 bp, Glycine max
  Clone ID: 700997137H1
ttgactctcacaaaccttgcatccatccacacatggctggcatgaactctagcgtattggcctgtagctatgccatatctggtgcagcatgctccgagctcaatgggaaggtcacttccgtggcctctgttgcatcctctggctacaagttgccattgatcaaatgtgaggccagagttcccaaagccaaagaatctgaaggaaggagaggtgcccttgttctcttggcagctacccttttcatctctgcag

SEQ ID NO: 1825 - DNA, 253 bp, Glycine max
  unsure at all n locations
  Clone ID: 700997138H1
cgttgggacccgaatacgaagtcgacgctgacacagatccctctgctggggacgaaggctggtccacgagacggggcggcatggacgcagaggctgaaggaagagtacaaggctctgatagcgtacacgcaaatgaacaagtccaacgacaacgattggntccgcatctccgccgccaatccggaaggcactcgctggaccggtaaatgctggtacgtctacaacctcctcaagtacgaattcgacctccaat

SEQ ID NO: 1826 - DNA, 251 bp, Glycine max
  unsure at all n locations
  Clone ID: 700997139H1
cgaganatggcgatggcaatggcgcttcgcaggcctttcatcttcaattgacaagcctctgcgccctctcttcaatgccggttccctctactacaagtcgncttngcctgatgaagctgtttacgacaaggagcgacccggagttacatggccgaagcagttgaatgctccacttgaggtcgtggatcctgagattgctgatattattgagcttgataaagctaggcaatggaaggggctagnattgatat

SEQ ID NO: 1827 - DNA, 247 bp, Glycine max
  unsure at all n locations
  Clone ID: 700997140H1
ctgttgcaacagaacaagatcttnaaggtcatncctaagancctggtcaagaagtgccttgagctctcgctttgaaattgcanagaacaaggaggattacnncaagttctatgaggctttctctaagaacttanngcttggtatccatgaggattcccagaacaagggaaagattgctgaattgctcaggtancactccaccaagagtggtgatgngctgacaagcctcaaggattatgtgaccagg

SEQ ID NO: 1828 - DNA, 251 bp, Glycine max
  unsure at all n locations
  Clone ID: 700997143H1
gntataagcnaaaattagaactagaganattttgtnatataagccacgatttactctggtgttactaaatgatgcangccacagcaagcaccactgagcagnagttcagcacctaaaacatacaaaatagcaaggtcattatagactctacaaccttggttttgagttacatatcgcccttaaggaataaagaggttatcagattggagaggaaactcgtttcacgtgtatagagttatttttttgccttg

SEQ ID NO: 1829 - DNA, 252 bp, Glycine max
  unsure at all n locations
  Clone ID: 700997146H1
cngaggngttgattcctgagtatttggnctttgtcaagggtattgttgattctgaagatctcccactcaacatttcaagngaaatgttgcaacagaacaagatcttgaaggtcatccgtaagancttggtcaagaagtgccttgagctcttctttgaaattgcacagaacaaggaggattacaacaagttctatgaggctttctctnngaacttaaagcttggtatccatgaggattcccagaacaagggaa

SEQ ID NO: 1830 - DNA, 226 bp, Glycine max
  unsure at all n locations
  Clone ID: 700997150H1
caaacacagatagaaaganaagaaatttcaccgtaccagagancnaggaaggatagaagaaagtgaaaganaatggcgttgtacatggncgaagaagagatttggaagtgtccgaagcatccatcaaagagaagaagaagcggaatttgccctacttgccttcgagaccgtctcgtaactctttgccctgactgtgctaacgtgcgcccctgttcctgctacgcaa

SEQ ID NO: 1831 - DNA, 257 bp, Glycine max
  unsure at all n locations
  Clone ID: 700997151H1
cttgagaccaccaagacacccaaatagagtcttattcttgagaancagttttcttcttctgggtcattgagattttcttcattctccaaaaaaatcatgtctggaattgtggttgtnttcgactttgacaagaccattgtcgatgtcgacagtgacaactgggtcatcgacgaattgggtttcaccgatttgntcaaccagcttcttcccaccatgccttggaactctctcatggacaagatgatgatggagcttca

SEQ ID NO: 1832 - DNA, 120 bp, Glycine max
  unsure at all n locations
  Clone ID: 700997152H1
cctttcgtcgcnccgnaattcgcaanctctngcatgtaatgaaatccggccaagcgcgncgggncgaganggcggtgtcgcgctattngtgtgcgctcttcccggcttccctgcnctcca

SEQ ID NO: 1833 - DNA, 90 bp, Glycine max
  unsure at all n locations
  Clone ID: 700997155H1
cacaattcgaaggatgtagatgggtttgtnttgccaactctggtgtatatggcncgtgagangagacctcaatctcnacacaacntncgt

SEQ ID NO: 1834 - DNA, 246 bp, Glycine max
  unsure at all n locations
  Clone ID: 700997156H1
gaaaatcatggttggncttggtgtgagtgtaagtctcaaggttggacatgtgtgtagttgcagcaatggttttggcacggtgactatggaagcncaaaaacaaaaactctctccctccaaaacccgnaggaaatcctcctacggaacttctagaaggtccgttctgaagaaatccttcagccaagagcaagtcaccttcacctctcctctctccgccgaccccctcgtcgccctcatnggcggcgg

SEQ ID NO: 1835 - DNA, 246 bp, Glycine max
  unsure at all n locations
  Clone ID: 700997157H1
cttttttcttaatttattatttattcatcttcgtttcttctccantgtgctttcttcgattttntcgctgcgtccctcttagatccctctctggatcacagggtcatgagggaaaattctctgtttatgtacattcatcaaaggaaaaaccaatacatgtcagccccttctttgttggccgagacattcacagtgaaccggctggggaaaaatttctatggttgaggcagaaaggagacttttggc

SEQ ID NO: 1836 - DNA, 132 bp, Glycine max
  unsure at all n locations
  Clone ID: 700997162H1
ctctctctactccaagtngtttttggtntgatctttcaagttcaatggctggtgacgtaggaagagccttgcctcctcctgattcagaagaattctcaaccttgttcagccaactcctccacaattctcccc

SEQ ID NO: 1837 - DNA, 255 bp, Glycine max
  unsure at all n locations
  Clone ID: 700997163H1
acttgatcaaagaactcgacgttggattattaggcttaaaaacgcttttgccttctccaaaattctcttacgccaacgaggctcacggtctttggattctcaaaggttacncgccagtcatgaccatgaaactggcgcgaaccaacacagttcaaaaaactcaattctctggcatcgatgccaaggagtcgattctccgttactcactcgcgcaccaccaacttgaggcacacgtgcagctagactacaccgttg

SEQ ID NO: 1838 - DNA, 257 bp, Glycine max
  unsure at all n locations
  Clone ID: 700997164H1
catgggtgttgatccaaaaccctttgatcctaaaacatatgtggaagaggatacttttgtaactgatgaatctggaaccagaaancgcatacgtttggagaacaatattgtacgctggaggactactagaaatcctgatggcacaacatcttgtgaaagcaacgctcgctttgtgagatggtctgatggcagcctgcagctattaattgggaatgaagttcttgacatatcagtacaagatgcacagcatgatcaag

SEQ ID NO: 1839 - DNA, 259 bp, Glycine max
  unsure at all n locations
  Clone ID: 700997166H1
ctttacacttcgcctcactctcttttatttcgttcctctattcncnacgtcgtcgttagggtcgtcttcggatcggtggaacttgactgcgccggcgtgaattccgacgctgcgagtngcaccgaattgcgatanggtgacgaatatgaaggttttcgttaagactctcaaaggcactcacttngaaatcgaagtgacgcccgcaagacacggttnctgaagtgaagaaaaatatngaaactgttcagggngcagatgt

SEQ ID NO: 1840 - DNA, 257 bp, Glycine max
  unsure at all n locations
  Clone ID: 700997167H1
ctttganttcacgtcaatcaagagtntcctctataggnaaacttggagttnattacacaggtactatttctgcatgtgcgcctgtgagattttatgagatgggtactagggtgcagctaannagctcaaaaagnttcaatttcaaggtttgtagtggaagttatgatgatggttangtgattggtgaannggaagccngggatatttcagggttagatgagcctgtaacaaccaaggttctgattccaggtctgcct

SEQ ID NO: 1841 - DNA, 250 bp, Glycine max
  unsure at all n locations
  Clone ID: 700997170H1
ggaatatgcagccttcccagctccttggngtatggntttgtccatngcatcagccatgagcagtgatggtggatgcatggacaaaaccatactccagggaatatgcagccttcccagctccttggctccgtactgcaaagttctggcctaccanaggacgtgttgataatgtgtaacnngaccgcaacctcatttgcacccttctcccagnatcacaggctgttgaagaacaagcagctgccacagcata

SEQ ID NO: 1842 - DNA, 245 bp, Glycine max
  unsure at all n locations
  Clone ID: 700997172H1
cttccaactccatttacgatttcactgtcaaggttcgtttttnacnctcatacccaactgttgtttctctctaattacttgaaaagattgtngcttgctcatgcccaactgtgtttgcactcgaattgtttgatgagtgtgtgaagataatctaagaagtatcagggtacactatgatgacaaaattatatttagtaggntctgattttatatttnttgtatttcaactttnatggagatcaatg

SEQ ID NO: 1843 - DNA, 246 bp, Glycine max
  unsure at all n locations
  Clone ID: 700997173H1
ctcaggtggttctaactatccaacagcaccatgctggattccngccactccccatgacaaaatcaccacagcagcttctggcttcgtacttgaggatgttcctcatctatctccttacatccctcacctccaaacatatcctgacccgttgcaagacaatccntcctattctgttgttgcgcaatattacgtgaatgtggatgatacaattgcacaacagatagttgtacacaaaaatagtccaag

SEQ ID NO: 1844 - DNA, 246 bp, Glycine max
  unsure at all n locations
  Clone ID: 700997174H1
ccctcgtctctttttgaaaacactttagtttcgcaaagttgattctttctctctttatctttctttccccaatttgtgagtnttactgttgaatcgattggattggcattaggttgatctgaaatacgcaattgacatggcgagcgcgatggtagaggacgcgaacttcgaagatgaccaactagccaatatgaccaccgacgacatcgtcagagcttctcgtcttctcgacaacgagattcgcat

SEQ ID NO: 1845 - DNA, 246 bp, Glycine max
  unsure at all n locations
  Clone ID: 700997175H1
cctttcttcctcttcctcagtagtgcgattttcgattctcttctctgcaactatgcctaaccctaaggtcttcttcgacatgaccatcggcggtcaacctgccggccgcatcgtgatggagctctacgccgacgtgactccgagcaccgccgagaacttccgcgcgctctgcaccggcgagaagggcgccgggcggagggcaagcccctccactacaaaggctcgtccttccancgcgtgatcccg

SEQ ID NO: 1846 - DNA, 248 bp, Glycine max
  unsure at all n locations
  Clone ID: 700997176H1
cnctaggtaacatagaattgagaagtaatggaaatgaagaagccgtgttgtgaagagtcagagacaattgttggatcctgggaatgttggttcgacgatgcatgcatcgttgacatggattactttgtgaagaccctttcaagcatcaaacagaaaggtgttcgtgcagacttgattggttccatcatcactcattatgcctccatatggctccctgacctctcttcctctgctgaaaatggtgtcac

SEQ ID NO: 1847 - DNA, 251 bp, Glycine max
  unsure at all n locations
  Clone ID: 700997178H1
cgnccctttcttctcttctnttgtnctttccatcatctcccacaactttctggttgccctggaatttccaacactaattcacataacccgaagttgaatgttaaggatctgacacttttttgagatagaatgagatgcatgtcctaagagtatttgccagactttgtcggaattccattgtaaatnttcaagtgaaatctgtnctggaaatttcctttgttcattgagatttttagaggtgcataagattt

SEQ ID NO: 1848 - DNA, 158 bp, Glycine max
  unsure at all n locations
  Clone ID: 700997179H1
canattnttaggcaacccaagactttgcaggagcgatgacatgaaaactaggactatcgcctctcattgctgatcataaattctacagtgatttgtaaaaggtaactgaacctgtaactattttttggtacaagtnctagtttatnatttatctttac

SEQ ID NO: 1849 - DNA, 253 bp, Glycine max
  unsure at all n locations
  Clone ID: 700997180H1
cacgttgatgccgaacttgccaatgctcaagcttggtggtacaagccggactatattatcaacgancttaacataaactccgtgataaccacgccttgccacgaggagntcttgcccatcaactcatggacnactcagatgccttatttcatcagaggctatgcgnattccggtggtgggaganaggtgacacgtnttgaggtaaccctggacggaggtgaaacgtggcaagtgtgcacatggactgtccgga

SEQ ID NO: 1850 - DNA, 251 bp, Glycine max
  unsure at all n locations
  Clone ID: 700997184H1
cntccactttgaaagggttcacgaagaaacaccaatccgctccgagttgtatgttttgcagagctagaagaaatcaacgatgcctcgctatgatgataaatctggtaatacccgcctctatgttggacgcttgtcttcgaggactcgttcccgtgacctggagcgtgtcttnagcagatattnnagagttcgaggcgtagatatgaagaatgatttcgcctttgttgaatttagtgatcctcgagatgctg

SEQ ID NO: 1851 - DNA, 251 bp, Glycine max
  unsure at all n locations
  Clone ID: 700997185H1
ctactctatcatcctctgtntcaaccctcantgttcccccactcccatcatcaaccttcacaaatcgcgatttctatcgattcaaagcatcccccacccgttccnnnnnnnnnnnnnnnnnnnntgttttctccactnccacacccaattttctccccaaaaccaaaactttctcccacaaatntnccccttntntncnattcngccccncanccctcananccaaaccgtcttctcnaactttccatcca

SEQ ID NO: 1852 - DNA, 248 bp, Glycine max
  unsure at all n locations
  Clone ID: 700997186H1
ctggagcttgcaggcatttctttaacttatttgtagtatattggatgatttatttaatttgcttatgcactcttcagggtaggcacgaatgcaagccccccttatctcttcaacttcaatgttgacgtaatttnaagaattgttttactgaccacagataactcattaaagctttcaatcatgttagaaaaactgaagtcatatcttcaaaacgatgcttctgaatttcatacacgtttaccaatttt

SEQ ID NO: 1853 - DNA, 246 bp, Glycine max
  unsure at all n locations
  Clone ID: 700997187H1
cgcaggnatgggagacgtgtcagtagaagccctgtgaganccangnatgggagaagtgtcagtagaagctcagtaagagtcaggaatggnaggaagtgtcagtagaagcccagtaagagtcaggaatgggagaagtgtcantngaagcccagtgagaggcaggaattggagaagtgtcagtagaagcccagtgannggcaggaatggtagaagtgtcagtagaagccctgcgagaactcgttctct

SEQ ID NO: 1854 - DNA, 245 bp, Glycine max
  unsure at all n locations
  Clone ID: 700997190H1
cnantcatcagcnaagcttaacttcacttgtnctgctttanaggcactcttcaagctattgctgttacttttgtagttgaacacaatccttctgtatggagaattggctgggatgtgagcttacttgctgctgcatatgctgggattgtgacatcaagcatatcatactatgtacaaggactggtaattaagatgaaaggacctgtctttgcaactgcctttagccctttaangatgatcattgt

SEQ ID NO: 1855 - DNA, 250 bp, Glycine max
  unsure at all n locations
  Clone ID: 700997193H1
ctcgttcagctggtggagatgggtttagtggcaccttactctgctggaacatgtcttccttcccttcaacgccttccaaccctgcaagcccaaaaatggaacaacttctcagcacctcttagttgccaccgccaagtgaaatgtgctgtccaagncnanccacaagtagcaccacgaattacacctgatgagagcctgcaggtgaagagaagaactctcataggcctnctagcatttgatgctgtccttg

SEQ ID NO: 1856 - DNA, 251 bp, Glycine max
  unsure at all n locations
  Clone ID: 700997195H1
cccccaancccaacctcaaccttaacctctcctcactttctnttcaaccaggttctttctttctcacaaatctgattcgntttccctataatttcccacttctantattttctctatntcttttattccctntatctntgatttcccgacgatccctttgcgttagggtttttcgctcgcttcttttnaattagtgatttaactatacctttgattgagatattggattggattctgtattgtgtanaaca

SEQ ID NO: 1857 - DNA, 253 bp, Glycine max
  unsure at all n locations
  Clone ID: 700997196H1
cggggtcagagtgagacagagaaagagagaattcgtaaaccctaatttcggaaagatcggcgatgactgcctccaaggatcgcgagancttcgtctacatcgccaaactcgccgagcaggccgagcgttacgaagagatggtggaatcaatgaagaacgttgcgaatctcgacgttgaactgacggtggaggagcggaatttgtttctgttgggtacaagaatgtgattggtgctcgcagangtcctggaggt

SEQ ID NO: 1858 - DNA, 263 bp, Glycine max
  unsure at all n locations
  Clone ID: 700997201H1
aacacacacttcaatttatcagcatggnnnccgttcagngccacnaaacctgcaaagtgagctgccaacaggaaaaccagcacgcctcgtttgggcagaaagtttctgacttgttcaaagggcatcaacataatgaccacagctccaattatgccacccaaaccaaagtgctttcccagtcagggtcagggttaggccccttcaccaccaaaactcaaacacaatgcggttgcccccaaacacatctcagtaccatcatggct

SEQ ID NO: 1859 - DNA, 133 bp, Glycine max
  unsure at all n locations
  Clone ID: 700997203H1
cnnnaattactgcgccaggctaaagctccaagtatgtttttacaatccttcaaaaattttnttctctttgtgtgtgtatggtgatgatanccttaattagtgttcatgaatatgtcaagccttactttagtgg

SEQ ID NO: 1860 - DNA, 146 bp, Glycine max
  unsure at all n locations
  Clone ID: 700997204H1
cttcattctacantaacgatgtaanccaaatgattctttaccatganctttattcactcaagtaaaattttcttgcagctttaattatgttatgggcatggaaaattttgttgacagtgccactgtntattgtgattttgacgtgt

SEQ ID NO: 1861 - DNA, 149 bp, Glycine max
  unsure at all n locations
  Clone ID: 700997205H1
cggangantatgcaaaganaggngagcnacaganttgaccacactccaacattaaagtttcttgacaaggcatgtntganaacagattcgaacactngtccatggacgctatgcactgttactcaagtagaggagaccaaacanatgnt

SEQ ID NO: 1862 - DNA, 253 bp, Glycine max
  unsure at all n locations
  Clone ID: 700997206H1
cccacaacccccattctccctcgaggcatcccaatgggctctcccaagtgatgcctcggcgacaccccaataatattcaataatattcttcaaccttacaaccaccacacgatgcctccgcatctgcatccgcggtcncgtatgaccacctcgctctttaccaccactctcatggtctcattccttgtcgtcgcggcgccacatctgataccctgccccgtcgacccacgcacactcgccgatgctccagacc

SEQ ID NO: 1863 - DNA, 254 bp, Glycine max
  unsure at all n locations
  Clone ID: 700997207H1
cgnaggacgtgattctgtctgccgggtttnggatatacgaagtaaaatgcagattcatgctctttcangtcatgataacactgtctgttctgtgtttacgcggccaacggatccccaagttgttacaggttctcatgacactaccatcaagatgtgggaccttagatatggtaaaacaatgtcaactcttacaaaccataaaaaatctgttcgagcaatggcccagcatcccaaagagcaancttttgnctntt

SEQ ID NO: 1864 - DNA, 235 bp, Glycine max
  unsure at all n locations
  Clone ID: 700997209H1
ctcgaagagagaagattgatgaaaggagtccaagcaagccatgnnctacttactcaagcctctaacaagaaaaatccaaaaggaaaggttgttcctagtccatttgttgaaaccatacgagcngatatatcagagaagccggggattgtcgattacaagacacaaagtagtgatacctcgctaactgagtatatttcgctgacncatcaaaagagagtaactaganctctntcgt

SEQ ID NO: 1865 - DNA, 253 bp, Glycine max
  unsure at all n locations
  Clone ID: 700997213H1
ctcaatttaattcaattgtnaatcgcaacaaccactagattattgnttgcnttcctctaagccaattcaacttgnnnnnnnnnnnnnnnnnnnnnnnnnnnnnnnnntgtacatgaaatgtgtacggtaccaaagtatggctagtttgaatgaaaatcatcataacataggttctgtcaagggagaaagaaaaccagtgggggctgtgaaggcaactatcgctaccaccaaccacataaccacgtcaaaacca

SEQ ID NO: 1866 - DNA, 253 bp, Glycine max
  unsure at all n locations
  Clone ID: 700997214H1
cgcaccgcctagaaaatttcctataaganggatacatgcaaatggagaagacacgggcctgccttctaaatcattcaaccttgtttctattgcttttgtggttcatgaatgtcctgcaagagctatagtgaatttagtgagggaagcattccgtctccttcggcctggaggcacactagctttggtagattctacgacaaagtcaaaggtccttcaggaattgtctcctgtcctgtttacattgcttaagagc

SEQ ID NO: 1867 - DNA, 147 bp, Glycine max
  unsure at all n locations
  Clone ID: 700997216H1
cngcttggncgcagtgtagcactantggnaganttctagatcagggtcactgtggttcttgttgggcatttggcgctgttgaatcattgtcagatcgcttttgcattcattttgatgttaatatctctctctctgttaatgaccttc

SEQ ID NO: 1868 - DNA, 251 bp, Glycine max
  unsure at all n locations
  Clone ID: 700997218H1
ccaatcttcactacattcaccgagcatttgcattcacattgaatatggctganactacacaatctaatgctgagttgttggagtngcctaaganagataagcgccgcttcctgcatgtngtgtatcgtgttggtgatcttgatcgcaccattaagttttatactgaatgttttgggatgaagcttttgaggaaaagagatattccagaggagaaatatgccaatgcttttcttggatttggccctgaacat

SEQ ID NO: 1869 - DNA, 249 bp, Glycine max
  Clone ID: 700997221H1
cggatggattccttgcttggaattcgagttggagcacggtttcgtgtaccgtgagcacaacaggtcaccaggatactacgatggacgctactggaccatgtggaagctgcctatgtttggttgcactgatgcttctcaggtgttgaaggagcttcaagaggctaagactgcataccccaacggcttcatccgtatcatcggattcgacaacgttcgccaagtgcagtgcatcagcttcatcgcctacaa

SEQ ID NO: 1870 - DNA, 145 bp, Glycine max
  unsure at all n locations
  Clone ID: 700997224H1
tagacccaccgcaagancttcccaagaacagcccncagcgtctcnttaaggagctcgccgagcgcaagtnnccctccccgcgaaccccacgcgctcccccgcgaagattcatcctcacgcgnccgctaganganaaaagagtcgc

SEQ ID NO: 1871 - DNA, 249 bp, Glycine max
  unsure at all n locations
  Clone ID: 700997227H1
ctgctttctgatctcagcaaatctcaantagcagttccagcatcaatagagttcgtagatattgctgggcttgtcaagggtgcaagtcaaggagagggtttgggcaataagtttttgtctcatattcgtgaggcggactctatacttcaggttgtacgatgttttgaagacaacgacattgttcatgtgaatgggaaagttgatcccaagtctgatattgatgttatcaatttggagcttgttttctca

SEQ ID NO: 1872 - DNA, 251 bp, Glycine max
  unsure at all n locations
  Clone ID: 700997230H1
ccggcagaaaacgaagattcctgcggaatccgcgtcaccggcatgcaattctcctacgacgtgcagcaaccgccgctcttcctcgacttcaacctcaacgtctctcccggatcccgctgcctcctcgtcggtgccaatggatccggaaagacgactttgctgaagattctggcggggaagcacatggtnggaggaagagacgttgtgcgcgtcttgagtggttccgcttttcacgacactcagctcgtttg

SEQ ID NO: 1873 - DNA, 252 bp, Glycine max
  unsure at all n locations
  Clone ID: 700997231H1
cncagactctatccattacgggtgtattcctgatgataagtttggtgggttcaaagatgtgggcaccaatgtgtcttgtgttgtttcaaggagggacatggcaacccagatgagcccacagggtagctcacgctcctctcctaattaggggccttctttctctgcctccacctcatcaaccttgcctgtcactgaattgcggaccattggttcctctaaagtggatatnagggatgtgcaggtagatgaaca

SEQ ID NO: 1874 - DNA, 254 bp, Glycine max
  unsure at all n locations
  Clone ID: 700997232H1
cgcaaggnagggagggtgtgtccganccaattttngtaacaatcctgctgtgagaattgaggggttcgattgccttgacagggacaggcgaaattgcagcatcccggctctggcttagaacaccctcctcacacgccacacgtctctttgatattaggattcagttcaacatataaacataaccacagaagatgagccttcatacaatataataccctacggagaagagtaattttggatgcttganagttgaa

SEQ ID NO: 1875 - DNA, 256 bp, Glycine max
  Clone ID: 700997233H1
cagaaacaacattggtcattaataaaatgaagataatatattttaatggaataacttgtcccactctgcccaaaccccaaacgaattagtagttttcttttttcgtgcatcgagtattcggtttgtacgtgtgccataattgaattgttttgtgttgttttcttgaacatgattggctaattaaaccaaagctttgtttctgatgagaaagactttggctgggttgtttataaattgtgaaacaggcagagctagt

SEQ ID NO: 1876 - DNA, 250 bp, Glycine max
  unsure at all n locations
  Clone ID: 700997234H1
ccatgaccctgcccaacatcaaggttcctctcattcttggtatctggggaggcaagggacaaggaaaatctttccaatgtgagcttgtctttgccaagatgggaatcaaccccatcatgatgagtgctggagagttggaaagtggaaatgcaggagagccagcaaaactgatcagggcagagataccgtgaagctgcagacatgatcaagangggaaagatgtgcgctctcttcatcaacgatcttgatg

SEQ ID NO: 1877 - DNA, 140 bp, Glycine max
  unsure at all n locations
  Clone ID: 700997235H1
ttccctccagaaaatctgaagaagcgacttgaccagttagagaaggtgaagaccgagaaaaggaaaccagtngcagttcctgccaataagagaactagagcaagcaacggcaatggaggtccaatgccaccagccaaagc

SEQ ID NO: 1878 - DNA, 247 bp, Glycine max
  unsure at all n locations
  Clone ID: 700997237H1
cangngcatgtggaaccgttgtaaganatgcagagatgangattgtcgatcctgaaaccggtcattctttacccagaaaccaatccggtgaaatttgcataagaggcgaccagattatgaaaggttatctaaatgatggagaggctacagagagaaccatagacaangatggttggttgcacacaggtgacatcggttacatcgacgatgacgatgatttattcatcgttgacaggctcaaggtntt

SEQ ID NO: 1879 - DNA, 246 bp, Glycine max
  unsure at all n locations
  Clone ID: 700997238H1
gttgggacccgaatacgaagtcgacgctgacacagatccctctgctggggacgaaggctggtccacgagacggggcggcatggacgcagaggctgaaggaagagtacaaggcnctgatagcgtacacgcaaatgaacaagtccaacgacaacgattggttccgcatctccgccgccaatccggaaggcactcgctggaccggtaaatgctggtacgtctacaacctcctcaagtacgaattcgacc

SEQ ID NO: 1880 - DNA, 250 bp, Glycine max
  unsure at all n locations
  Clone ID: 700997239H1
cgagaagtgttcccttagaagaatagtgtaaaatggcatcactcaaagctgagaaacctgttgaaaaatcttgttgctctcaaccatctgcaggacaggtgaagaaagagtcttctgccaaacctagttcaggcacttccaaagccccggtctcgaaaccaaccccaaagaaaattccaagccagactaggaagaaggcaagcagcaataaataagctgangatgcaagagtaaaaagtacgaaagactt

SEQ ID NO: 1881 - DNA, 141 bp, Glycine max
  unsure at all n locations
  Clone ID: 700997241H1
cacggctcttctcttttcagcaccttaccttattccantccaatancaaggagtcaccaaaatagtgtgattcatggcngcaacgaatgcgtcaatctttgcatcttccacgcaatcatgctnggcngtgtctcctaccat

SEQ ID NO: 1882 - DNA, 246 bp, Glycine max
  unsure at all n locations
  Clone ID: 700997242H1
tcatgggcccaaaagtgattaacggaataatccataacttgtatgtatgtagttaacgtggaaggnttgggtgaagacgaagggtttggcttagacttagatggagtcgcgtggacactcaaacccgcttctgtcattttccagcttcatccatcaacactgcgtccgcttagggtccgacctcgcgactcgtttggatgacacgaagcgagccctagctcaatctcatcataatcttgtnttccc

SEQ ID NO: 1883 - DNA, 139 bp, Glycine max
  Clone ID: 700997244H1
acattaaagactctcctgttcgtaatttatatgtatcattattagcaatgtagtatttaaaatacaagtgatataaacttaattgtctgttatttacaggcaatctgtgcgaagttccatttaatcaaatataatgcat

SEQ ID NO: 1884 - DNA, 246 bp, Glycine max
  unsure at all n locations
  Clone ID: 700997245H1
cttcttcttcttctcttcttcttcaagattgcnacgacgatccaagnnatagacactcgttgcgatggaacttgtagctgaatccgagcnaactctgtacccatacgtgactggatcctctgtagtcgctatcaaatacaaagatgggattctaatggccgctgacatgggaggttcgtatggatctaccctgcggtataagagtgttgagcgtatcaagcctattggaaagcattctcttcttgg

SEQ ID NO: 1885 - DNA, 248 bp, Glycine max
  unsure at all n locations
  Clone ID: 700997247H1
ctcaaatttcccaattagtgcatctgaaggggtgctacctgtgcctgtnataaacacggttttctcagtggctttgttgangagcatgtttagatccatgctccaagtagtgtttggtggcagtgctgctagtagttcttcaaacattgaacangatgatgaaattagtnnnnnnnnnnnnnnncgggaaaggagggtgtcaataactcagtacaagtcattgtgccacagtcatgncataggaggag

SEQ ID NO: 1886 - DNA, 142 bp, Glycine max
  unsure at all n locations
  Clone ID: 700997249H1
ccancgcctagaaaatttcctataagngggatacatgcaaatggagaagacacgggcctgccttctaaatcattcaaccttgtttctattgcttttgtggttcatgaatgtcctgcaagagctatagtgaatttagtgaggg

SEQ ID NO: 1887 - DNA, 136 bp, Glycine max
  unsure at all n locations
  Clone ID: 700997250H1
attccgcaacanagagtaganaagatggcgcggttgatcacagtggtgtggtgcgcggtggcggtgctactgtgcgccgcggcgggcgcgtcgtgggtggaggaggcggcgaacccgatacgaatggtggcggggg

SEQ ID NO: 1888 - DNA, 242 bp, Glycine max
  unsure at all n locations
  Clone ID: 700997251H1
atcataactgcnattggtcctcgtgttggacttactttaaaggaaagtgtaagantaggattgcttctatcccaaggaggcgagtttggatttgttgttttctctttagcaaataggcttggggtgcttcctcttgagctcaacaagctgctcataattgtggttgtattgtcaatggcattaaccccatttctgaatgaagctggaagaagggctgctagctttattgaagacaaatttgt

SEQ ID NO: 1889 - DNA, 244 bp, Glycine max
  unsure at all n locations
  Clone ID: 700997252H1
cncctttctgttatcattttcgaaacaaaccaaattgaaactgtttganntnttgtttagaaggctgttatgaatganactttgaagcttagaaaagcggttaggtagctaggtttcagtntcagatctggtagagagcttcatccngaagccattaccggcggagcaaaccggtgaatcagcgccgacggagttgcagagatccattccgacgccttttctgaccaagacgtaccagtcgtcg

SEQ ID NO: 1890 - DNA, 137 bp, Glycine max
  unsure at all n locations
  Clone ID: 700997254H1
tttggttcttaagccatggcatccacatcctctctgcattgatctcaggcccttctggcacgtgctgtgtaccttcatggctcttcttctgaccgtgtctcactctccttcccatcattctctggccncaagtcaca

SEQ ID NO: 1891 - DNA, 243 bp, Glycine max
  unsure at all n locations
  Clone ID: 700997257H1
gcagatagaaaaaaagagcgacttttganttcaaaagatgactaacttcccattgatcaacttggagaagctcagtggtgaggaaagaaacgataccatggaaaaaattaaagatgcttgtgaaaactggggattctttgagctggtgaatcatggcattcctcatgacatattggacactgtggagaggttgaccaaagagcactacaggaaatgcatggaagagaggttcaaggaattagt

SEQ ID NO: 1892 - DNA, 244 bp, Glycine max
  unsure at all n locations
  Clone ID: 700997258H1
ctaaacataaacacagcatgttaatttataggtgatgcccatacccttgactacttgtagaacagatagaactatgctcattaagtcttgcaaactttcttttgaacctttttttttttacccttttaattttaagaggaataaaagaatatggttactatagtttgccatgtggactatgggtatcccngactacaatggngagaacttttgtttctnctttgagcatgaaactaatttctgt

SEQ ID NO: 1893 - DNA, 245 bp, Glycine max
  unsure at all n locations
  Clone ID: 700997261H1
ttggnaactgcaaaactgnnatatatagaatcccttagatattatggggcggcaaggttagaactgaatgccatcaatgaacatgatgattctgttacaagcagcttgaagaatgaggcacatacacagtttgctcatacttttctncggtttggaatgcttttggcaagagaaaatactactgcaatttatgaaactggatcactggaaggtacatgggtaagtcacaccacgccccatgacag

SEQ ID NO: 1894 - DNA, 249 bp, Glycine max
  unsure at all n locations
  Clone ID: 700997262H1
cgatatggcaaaggaatacgancaagctattgaagaantccagaaattgttgagggagaagagtgaactcaaagccacagctncctgagaaagtggagcagataacagcttctctgggaacatcatcatctgatggcatcccatcatcagaagcctcagacaggatcaaagctggtttcattcacttcaagnaggagaaatatgacaagaatccagctttgtatggtgaacttgccaaaggccagagcc

SEQ ID NO: 1895 - DNA, 246 bp, Glycine max
  unsure at all n locations
  Clone ID: 700997263H1
ccgaacaccctactgtggtggtggtggctggttcacaagaatgtgtggttctacagtaacaaggctcttgtattttgaacaaattcagaaaatctgcagtgttttaagaataattgctgaaatgtgtcaccgtttaagtcatactattgccttgtgcttgagccttatggtcgtgtgtgttgaatgtatatgcttttatctgcctttatgacactttcatgtgaaagtacgntataataacgcncg

SEQ ID NO: 1896 - DNA, 250 bp, Glycine max
  Clone ID: 700997264H1
cgtcgatcttgtccgttccgtcaccaacacagcgttgttccatttcgatttctcggcttcccattgccattgccattgccgtttcaattgcaagtaagaagaagagcaaaagggggaaaagtggtaatgagcatggaggcaggtattggagtgatgggcaccaagttgggtatgatgagctatttcgaatccgacggagaggttgttcctgtcactgtcgtgggtttcaaagaaggcaacatcgtcaccc

SEQ ID NO: 1897 - DNA, 137 bp, Glycine max
  unsure at all n locations
  Clone ID: 700997266H1
cgatggtataatggcacattatgatgagatatttaggctgaaggccgatgcagctaangctgatgtcttccatttgttgtctggaatgtggaagacaccagcagagaggtgttttctatggcttggtggttttcggt

SEQ ID NO: 1898 - DNA, 136 bp, Glycine max
  unsure at all n locations
  Clone ID: 700997267H1
ttccttcatttttaaacctagctccatctccctccactcaccataacatgncatcagaagcaaatgctgccaacaccaacttctgtgtaaatgttagcaacaatggctacattagtgctaatgaccccttgaactg

SEQ ID NO: 1899 - DNA, 242 bp, Glycine max
  unsure at all n locations
  Clone ID: 700997268H1
ganaataaatccactaagaccatacaanattcggatactatagaaactgattcagaaaatcctgattgtactcctcagaggccaataactcgttctttgagcagaaagagaacgtctntccaaaaagcaactggganaagataaaagtggcccatcttcaaaaaacacagagaagcntggagagnaaactatattcncttttgnagaaaaatggcctggaaggcaagatgcttttccaaatg

SEQ ID NO: 1900 - DNA, 242 bp, Glycine max
  unsure at all n locations
  Clone ID: 700997269H1
cngatgagccacgaagtcagccattacaactaaatgagcaaggcccaattcttgaggtagccattgaagctgctgcaaatgcaattataaatctgaaggacaatttaaatgaatgggatggtaaagttggtgatggtgactgtggatcaactatgtatagaggtgcaaaagcaattcttgaggacatcaaaaattaccctctaaatgatgctgcagaanctgtcggtgaaattggttcatca

SEQ ID NO: 1901 - DNA, 243 bp, Glycine max
  unsure at all n locations
  Clone ID: 700997272H1
cccaaagtgcatactttttccttctcagatgctatcttcagaagangatatacctgagggctcatcatttgctgctggaganaaaatgcatgaactagtgaaggtatttgtagttctgcaccagcttcaaatattcactctaggtacacctttgcctgagaaacctcttatttatcctcctggtgatctcccagcaaattctcgtgcccaaacttctggacttgatgtttcaggcccaaaacc

SEQ ID NO: 1902 - DNA, 242 bp, Glycine max
  Clone ID: 700997273H1
ctgatgagccacgaagtcagccattacaactaaatgagcaaggccaaattcttgaggtagccattgaagctgctgcaaatgcaattataaatctgaaggacaatttaaatgaatgggatggtaaagttggtgatggtgactgtggatcaactatgtatagaggtgcaaaagcaattcttgaggacatcaaaaattaccctctaaatgatgctgcagaaactgtcggtgaaattggttcatca

SEQ ID NO: 1903 - DNA, 136 bp, Glycine max
  unsure at all n locations
  Clone ID: 700997274H1
cggttttaagaagaaaaagaagatttgggaggnaaatagtgaaganaaagcgcatacggcgtttgcgaaattgcgatttcatgtcatagagaggaaaagaggagaggcggggcggagcagagacgaatggcagatc

SEQ ID NO: 1904 - DNA, 244 bp, Glycine max
  unsure at all n locations
  Clone ID: 700997276H1
cncacagcagaactctgcttcttcggattccgatcgcacgcgccgtcaccatggtgaacgttccgaaaacnaagaagccatacctgcaagagtaaggcgtgcaggaagcacacgctgcacaaggttacccaatacaagaagggtaaggatagcattgctgcccaaggaaaacgccgttatgatcgcaaacaatccggttatggtggacaaactaagcccgtcttccacaagaaggctaaaacca

SEQ ID NO: 1905 - DNA, 246 bp, Glycine max
  unsure at all n locations
  Clone ID: 700997277H1
cgcgtgtactttcttgcgaaacagaagggcgaaggggcanacacaacttttttgtttttttgtagagcgagagaaaaaaaaatgttggggatcttcagcagttccgtggtgtcgccgccggaggagctggtggctgccggcagcagaacgccgtcgccgaagacgacggcggggaagctgctgaaccggttcgtgcgagaacaaggcgtcggcggtgtcgctgcaggtgggagaacacgtgcagtt

SEQ ID NO: 1906 - DNA, 225 bp, Glycine max
  unsure at all n locations
  Clone ID: 700997279H1
aganaatgttggtttgtctctctcaccatggcttgtcattaactgccgtgatgttctgggacatatacatgagctgtttcattgaaaacaaaatggtatctgttgagaggatcaaacagttcacaaatattccatcggaagcttcatggaacattaaggatcgcctgcctcctgcaaattggcccggggaaggccatgttgatatcaaagacttgcaggtcagat

SEQ ID NO: 1907 - DNA, 139 bp, Glycine max
  unsure at all n locations
  Clone ID: 700997280H1
ctgtcgttgatcattcagcgcaagtctgcaaatcccatcatcatggcggccataacccgcctcgcgaangcgacgttcgtcgtctcttccctggcgaggaggtgcctgagctcctccgtagtcaactgccacgcgccgt

SEQ ID NO: 1908 - DNA, 153 bp, Glycine max
  unsure at all n locations
  Clone ID: 700997281H1
ggnggnggngcgnnnnggcgattcagntgctcnctgttgtgtacaanaataagctctttgcaaaccttgagataccgtgggaggcacttggaagtaaactnctgtaatgcagattctgagctactttnttgtncggaaagatgctacatccag

SEQ ID NO: 1909 - DNA, 134 bp, Glycine max
  Clone ID: 700997282H1
cttgactctcacaaaccttgcatccatccacacatggctggcatgaactctagcgtattggcctgtagctatgccatatctggtgcagcatgctccgagctcaatgggaaggtcacttccgtggcctctgttgc

SEQ ID NO: 1910 - DNA, 237 bp, Glycine max
  Clone ID: 700997283H1
aattctggaggtgtacctcctccatcctggattggatctagttcaaatgttcactctccccctaaccctagctggatttttaatcatgaagtcccagcagaaaatatgcagagtgtgtcagagttcagtccctggtccctttttccatcaattagctctgcatctggtgttcataatggccattcagccccatcttcttctggtcctccttcatttacccagggttctagcagcaac

SEQ ID NO: 1911 - DNA, 241 bp, Glycine max
  Clone ID: 700997284H1
caccgccacacgctgcaggccctttaccttgtgcttcctgcgttcctgtgagaacccacgttctctaacgcgcttctccttcaaagttcaaattcctatacatttgcgtaatcgcttctcaaatctcaacaaaagtattcccaaaaaaccctaattattattattaaacatgaggccgattctgatgaaaggccacgagaggccactgacgttcctcaagtacaacagggacggcgatctt

SEQ ID NO: 1912 - DNA, 242 bp, Glycine max
  unsure at all n locations
  Clone ID: 700997286H1
cggaagagtcctccaaggcggttgaggttgagcaggaagcaagtnaagcaaaggctcctcacgaggctttgtttcttgtcttgtcatatcttcctgtgtacgaggttgtggtcatgtctcaagtctgcacatcactaagggatgcagtgaacaatgacatattactatggttgaatgnnattgttcaaaggcccctcagttggcnactcaacgatgagattctaatcaaaatcacctcaaag

SEQ ID NO: 1913 - DNA, 241 bp, Glycine max
  unsure at all n locations
  Clone ID: 700997287H1
cggttttcggttttcttcactgctctctcaccaggggcgagtngtgaatggaagcacaaggcataaagtataaagcataaagcatagttagttgagtcaatggaaggtgttgatcaaagaaatagttctgcatttggtgttccagtttcaagaccaccaaaccagaaatctcgtatgccaccatctcaccctagtatcaatgtttcaccttcagcaactccttattcccaataccctcagg

SEQ ID NO: 1914 - DNA, 241 bp, Glycine max
  unsure at all n locations
  Clone ID: 700997288H1
cnttcatccaatttctttccctctcttttcattggtgtgcactttcacttgnggagctgcatcaactgcagtggaaattgtgctttgttcttgagatgtctggngttcttctttgggtgagttgtggacccaaagagaacatcaactccttggtgagtttntcatgcaggagtagtagtggtggtgaaagaacacaaaagagattttctggaatcagttttgctagtggtacttctgcttt

SEQ ID NO: 1915 - DNA, 237 bp, Glycine max
  unsure at all n locations
  Clone ID: 700997289H1
tccttgctctactcagcgtgtcttcntctatcacgtgaagtcaattctgaaaccagaaaggatagcttataaagtcctatactaactgatcataagtccaagagttatttatctttgcngttggatctgaaatgattacagatgttcattgaggaggttatggagctggtagagttgaacttactgagggaagctttggttggtttacctggtgtgagtngtctctccactgaacag

SEQ ID NO: 1916 - DNA, 241 bp, Glycine max
  unsure at all n locations
  Clone ID: 700997291H1
ctctatagcgagcttnaaccatcttcagcttcagctactttgcactaacaaagcgccccacgttctgagacaaacccagtatgctatctgccatgggggatcagaaagtttcgatttttcattgattgtgtataactgcacaaagaaggtagtgaagcaatgcgtagagcgatcgcgtttctcgttcacccacgattcctccttctcttccttgttctctcaattttcctcatcttcacat

SEQ ID NO: 1917 - DNA, 241 bp, Glycine max
  Clone ID: 700997293H1
cgcagctacgagatacaaggcttctgggcaagacaccattgtgctagctggagctgaatatggcagtggaagttctagagattgggctgccaagggtccaatgctactgggagtcaaagctgtgatagccaagagtttcgagagaattcatcgcagtaacttggtagggatgggtatcattcctctttgcttcaaacccggtgaggatgcggacacattgggattaactggtcatgaacgt

SEQ ID NO: 1918 - DNA, 241 bp, Glycine max
  unsure at all n locations
  Clone ID: 700997294H1
cactttgactcctggtcatgatgctgtgcaaaaggtaacactagtncctcgtggtcaagctcggggtcttacatggttcattcctaatgatgatccaactctgatctccaaacaacaactctttgcaaganttgttggaggactaggtggaagggctgcagaaganattatttttggtgagcctgaagttacaactggagcagctggtgatttgcagcaaatcaccggtttggcaaaacag

SEQ ID NO: 1919 - DNA, 243 bp, Glycine max
  unsure at all n locations
  Clone ID: 700997295H1
cngagtttccagaagtgcggcggttattacggcgtatttgatgagaaccgaacgtctatctgtagaagatgcccttgaatcgttgaggcagagctgtgaatttgtttgtcccaatgatggttttttagagcagttgaaaatgttcgaggggatgggttttaaggttgatcactccagccctatatacaagcgctttcgtctaaaattactatatgagaatcattcctcagggttgaggataga

SEQ ID NO: 1920 - DNA, 155 bp, Glycine max
  unsure at all n locations
  Clone ID: 700997301H1
ggcagaaagcaagctcatcctagagttttanaaatggcagcagcctcctccatggntctctcttccccatccttggctggcaaggccgtgaagctgggcccatcagcccccgaagtcgggagggtcagcatgaggaagaccgtcaccaagcaggc

SEQ ID NO: 1921 - DNA, 149 bp, Glycine max
  unsure at all n locations
  Clone ID: 700997305H1
tcagccttcaaatganggatttgaagaangcaaagaacataggaaatcctggaaaggagnttgttggcctcatgaaatctggtgaaactcgnactcttgctgantttatggaaaatggatggtctattttggagaatctttggttgttt

SEQ ID NO: 1922 - DNA, 148 bp, Glycine max
  unsure at all n locations
  Clone ID: 700997306H1
cgtggcaccgtcaaagtaggggaaactgttgaccttgtaggattganaganacaagaaacacaacggtcacaggtgtggaaatgttccagaagattctagacgaagccctcgccggggacaacgtggggctgttgctganaggggttc

SEQ ID NO: 1923 - DNA, 266 bp, Glycine max
  unsure at all n locations
  Clone ID: 700997308H1
taagcttngcttncaatcntctccttaaaaaaaaaatcctttcactctcttgtcccaataattagcaaaagaagccaacagaaaactattccatatagttttcaattcaaacttgttttgattttcatnttaactcaatggagaacagaacaagctctgtactcccacctggcttcaggtttcatcccactgatgaagaactaattgtttactatctttgcaaccaagccacatcaagaccatgccctgcatcaatcatcccagaa

SEQ ID NO: 1924 - DNA, 102 bp, Glycine max
  unsure at all n locations
  Clone ID: 700997310H1
atccaatcctcacatgcatgctgtcctctggccaaagtgccaagtgcacataacatttccattgttaccattctttgctttgccancancaaccatagcgag

SEQ ID NO: 1925 - DNA, 264 bp, Glycine max
  Clone ID: 700997311H1
aaagaaccatttctctcgcgccagtcaaaaaccctctcagagaaagcacacaacaaagatgaccgacgaagacaaacccaaagccttctccggcggccatcacaaccaccctccgccgcagccacaacccttccccgccgcccagtatggcaccttccaaggcgtcgccaactaccctccgccgcagccgcaccccgccatcggcttccctcacccggttccgccgcccggcgccgtcgactcctccgcccctcctccgcccta

SEQ ID NO: 1926 - DNA, 234 bp, Glycine max
  unsure at all n locations
  Clone ID: 700997314H1
ttggattcgaaaatcgtagcgtannntnggtgcgattgaacgatacgatgggaagaggaaaattcaagagcaagcccactggtcgccgccagttctccaccccggaagatatgcttgctggaacctctaaccgtcctcgaacttttagacagaaagaagctgagcatgaagaggaagaacccgaggaagtatctggagatgaatctggagaagaatctgaagaagaaacttctt

SEQ ID NO: 1927 - DNA, 262 bp, Glycine max
  unsure at all n locations
  Clone ID: 700997315H1
agcaacactgcactgtgtggaaacgaaanatggcaagagtggtggcactccaacagaaccaactatctttgctctaccntagcttcctctcttttctgacttcantggaaccagacttcaaactcaacttcagttcaagagaaagcaatgccatccaaaagggtctttctacgtctccgcatcgaacaccaagaaaatccnantaatgggaggcaccaggtttantggtgtgtttttgtctaggctccttgtcaaagagggt

SEQ ID NO: 1928 - DNA, 262 bp, Glycine max
  unsure at all n locations
  Clone ID: 700997316H1
ggatcatcaaacatgaagagtttctgactcataggctggcccttctgcacgcggccgacaagtatgacatatctgatttgaganatgtatgccatgagagtcttctagaagatattgacacaaagaatgtacttgataggctccaaaatgcatctctatatcagttgatgaaactgaagatgagttgcatccgatatcttgtgaagtttggtaaaatatatgaaattcgtgaagatttcaataccttcctgcaaaatgcaga

SEQ ID NO: 1929 - DNA, 274 bp, Glycine max
  unsure at all n locations
  Clone ID: 700997317H1
cagagataccgtgaagccgcagacttgatcaancaagggaaagatgtgtgctctcttcatcaacgatcttgatgcaggagctggtcgtcttggtggaaccacccaatacactgtcaacaaccagatggtgaatgccaccctcatgaacattgctgataaccccaccaatgtgcagcttcctggtatntataacaaggaagagaatccccgtgtgcccatcatcgtcaccggtaacgatttctccacactctatgcgntctcatccgtgatgggg

SEQ ID NO: 1930 - DNA, 271 bp, Glycine max
  unsure at all n locations
  Clone ID: 700997318H1
tgaaaganacagagatagagtaaaccanaacgaaaggcaaagtgagtagnaggaggagtacggaaatggcatgtggctctgttctttcatctngtcttcacataacgaactccanggccatcaagggtgtcctctccttcgcaccaaatcctcctntgcttcttcgtctccccaaagctgtcacctttcnttccttttctgcttccactaaatcncccactaagtcttttcaagtgagatcaattgctggtactacagaagctgcatcggg

SEQ ID NO: 1931 - DNA, 146 bp, Glycine max
  unsure at all n locations
  Clone ID: 700997323H1
gttacnacttgttctatgtcttactctccttgtgcttctcttgttcttcatncgcantctcagaaccttcaagaagccacncccttcctccaggtcctaaaggccttccaataatagganatttacatcnatttgatagttccatt

SEQ ID NO: 1932 - DNA, 262 bp, Glycine max
  unsure at all n locations
  Clone ID: 700997324H1
ttgaagctcgtcaagtcgcggctgctacaatattttatctttcttcggtgaaagaatttcgcaagtnaataggggaaaaccctgatgtcattccggctttggtggagtnagttaaagaaggaacaacctgtgggaganagaatgctgtggttgctantttcggattacttttgcntcctaggaatcatcaaagggttatcgctgctggtgctgttccggcgcttcttgacattatagcttcttcgaataangncgagcttgt

SEQ ID NO: 1933 - DNA, 258 bp, Glycine max
  unsure at all n locations
  Clone ID: 700997326H1
tgganccagggcctggtggtgacccaataagaaatccaaaagtcttgccaacaggaaagaatattcatgccctggacccacaagctattcctacaactgcagcgatncagagtgccaaaatagtggtagataggttgattganaggcagaaagctgagaatgggggaaaatatcctgngacaattgcacttgtattgtggggtactgataatattaaaacatatggtgaatccctggctcaagtgttgtggatgattg

SEQ ID NO: 1934 - DNA, 257 bp, Glycine max
  Clone ID: 700997330H1
tggaaacatgaaaaagacattgagggaggttatcgagaagtataatttgaatgtaagaatcactccaaatcagaatatcatcttgactgatgttcgtgctgcatggaagcgtcccattacaaccacgcttgctcaagctggtttgctgcaacctagatttgtagatcccctcaacataacagcagatggcatgccctgctttcccattatgtcctctggcaattactgaagctgaacgtgggatacctaacatactt

SEQ ID NO: 1935 - DNA, 143 bp, Glycine max
  unsure at all n locations
  Clone ID: 700997332H1
aaaaatatactgatanagatannnataagananacanagagagaatggaagggagagagagttgtcacccattgcnganaggaggtaggagaagagaggagaaaggttacaaccatggcttatccaccactcagatgcatgtc

SEQ ID NO: 1936 - DNA, 259 bp, Glycine max
  unsure at all n locations
  Clone ID: 700997338H1
actgggaagagcacttggctgtnaagcatttctctgtggagggccagcttgagttcaaggccatcctctttgtcccgaagagggcaccctttgatttgtttgataccaggaagaagatgaacaacatcaagctttatgtcaggagggtgtttataatggacaattgtgaggagctcattcctgagtaccttggatttgtgaaaggtgttgttgactccgatgacttgccgctcaacatctctcgtgagatgctgcaaca

SEQ ID NO: 1937 - DNA, 138 bp, Glycine max
  unsure at all n locations
  Clone ID: 700997342H1
tcatttcatggctaactattcccaccctcatatctgccaatgtctgagtcacttgctgaccctccggcaacattttccggtcanaattgccggaaaccgccgcaagaccggccaagagttggtggaggaagtgttgtc

SEQ ID NO: 1938 - DNA, 254 bp, Glycine max
  unsure at all n locations
  Clone ID: 700997343H1
ttgagaggaacaggaaggacaaggactccaagttcaggttgatncttgttgagagcagaatccaccgacttgctcgctattacaagaagactaagaagctcccaccagtctggaagtacgaatcaacaactgctagcactctggttgcttagagaatgtatcaactttcatgggttttgctaccgtgcagtcgccgntgagctagcaatttgcgatatcattttgatgtttatttgaaggctggataggttatg

SEQ ID NO: 1939 - DNA, 252 bp, Glycine max
  Clone ID: 700997345H1
tctgaatatgtggtggatacaattgaggatgcatcagattcgtggggtttgtctgtgagctttctcagcataatcttgctaccaatagttggaaatgcagctgaacatgcaggagcaatcatatttgctttcaagaacaagctggacatttcattgggtgttgcattgggttcagcaactcagattgccatgtttgtggtcccattatgtgtaatcgttgcttggataatgggtatcgatatggacctgaac

SEQ ID NO: 1940 - DNA, 254 bp, Glycine max
  unsure at all n locations
  Clone ID: 700997347H1
cctcaacccccacttaccagttttcccaaattttcgttcttttttcctttccatgagttgatgcatccttttcaagctaattaagcttgaattagctggtggggctttttaaattcgtcgataaaaaaacagtgttctgctttttttctcttgtgttttttggttgcagattcaggaactggtgtgtgaggagttgtttgcttgatgaatctgtgtgccgcttccacttcagttctcaatttcttancgncaat

SEQ ID NO: 1941 - DNA, 257 bp, Glycine max
  unsure at all n locations
  Clone ID: 700997348H1
aattctccagagagaagaagaaacttaatcgatcatcacttcacttcactaatacatcatggcagacgagacccagaacaagtatgagagctctgaggttgaggtccaggatcgtggtgtttttgactttctcggtaagaaaaaggatgaagaagacaagcctcatcctcaggaggaggtcatcgcnaccgagtttcaaaaagtcactgtctcagaccaaggagagaacaagcacagcctcttagaaaagcttcacc

SEQ ID NO: 1942 - DNA, 269 bp, Glycine max
  unsure at all n locations
  Clone ID: 700997349H1
ccaattgaagttaaaagccttagccttccctacaactccanacacaaagacatcntcatccatgggctgcctccgtctccactgtcggagctgtcaacagagctcttttgaacctgaatggttctggagctggagcttcagctcccagttcagccttctttgggaccagcttgaagaaggttattgcctcaagggtccccaacagcaaggtttccggtggaagcttcaagattgttgctgtagaagagaagaaagagnttgaagagacc

SEQ ID NO: 1943 - DNA, 262 bp, Glycine max
  unsure at all n locations
  Clone ID: 700997350H1
aaaacccagatgggtaatggaagacatgccgtttgggaggattatgggggatatggtgatgctgccaaacggcgacgttttgattattaatggagcgatgtcggggactcagggttttgagatggcgagtnatccgtgtttgaacccggttctgtaccggcccgaccaaccggtcgggttgcggttcatggttttgaaccccgggacggttccgaggatgtaccacgcgacaggaatctgttacctgatgcgagggttttgc

SEQ ID NO: 1944 - DNA, 128 bp, Glycine max
  Clone ID: 700997352H1
cataaaatagcgattccggaaatcatgtctgtagctgctctttttatttatgtgataaatgtaaaacgctttggtttggcttggccgttgtgcattacgttgaaaaaataaatgttataattactcag

SEQ ID NO: 1945 - DNA, 259 bp, Glycine max
  unsure at all n locations
  Clone ID: 700997353H1
agacatgctcataacttcagggaagttcagcagtgtactcttctgtctatcaaaacaggagggtgcagtgaagattgttcctattgtcctcaatcctctaagtatgatacaggagtcaaaggccaacgccttatgancaaggaagctgttctccaggctgcaaagaaggcaaaagaggctgggagnactcgcttttgtatgggtgctgcgtggagggatacactngggngaaagacnaacttnancnntgtcttngatt

SEQ ID NO: 1946 - DNA, 256 bp, Glycine max
  Clone ID: 700997354H1
gtacaataagctaagtcattgagaaaagcattcaacaccccatcaggtggcactacataaatgcccaaagtgttatttgctcctaaagctgcaagttgatcagttacggtattcctttcacgcggtgcatgatagatggtaagctcccaaggcctcctcatctgctccttgatttacattcagcttgacatagggtgtatcaggctaagaagcacggacgcggctcatcaccggcgtgttccgcgtcggactcgca

SEQ ID NO: 1947 - DNA, 219 bp, Glycine max
  unsure at all n locations
  Clone ID: 700997356H1
ttaaganaaaatggcagcctgcactgtctactcaacacaatctctgancccaaattgctccatctcaaccccatcaaagacacagctgagtttcttccaccaaaagcaggtanncttctggaggaacagcnnnnnnnnnnnnnnnnnnnnnnnnnnnnnntatgtgataacatgtgcagcaggtgactcacagncagtggtgattggtcttgctgcaga

SEQ ID NO: 1948 - DNA, 251 bp, Glycine max
  unsure at all n locations
  Clone ID: 700997358H1
acccaatanaggaagcaggctttggttgggtaccttctcttctgcccaggaagctgctcttgcctatgatnaagctgctagagctatgtatggtccttgtgcacgcctcaattttcccaaaatcacagattatccttctgttaaggnatcgttgaaggactcttcgatggctgcatcgtcgtcttgttcttcggcagcaactgcagcatctgacactactactacaacatcgaaccaatcggnggtttgng

SEQ ID NO: 1949 - DNA, 251 bp, Glycine max
  unsure at all n locations
  Clone ID: 700997361H1
ctcatttcttcatcgttcgattcttctcctcctaaagatgcagatcttcgtgaaaactttgaccggtaagaccatcacccttgaggtggagtcctccgacaccatcgataacgtgaaagctaagattcaagacaaggaagggatcccacctgaccagcagagncttatctttgcgggtaaacagcttgaggatggtcgaacccttgccgactacaacatccanaaggaatccactctccacctcgtgcttc

SEQ ID NO: 1950 - DNA, 252 bp, Glycine max
  unsure at all n locations
  Clone ID: 700997362H1
tgcagtcacatcatctttacttgantcggtggaaagtgctgatnttatnnccatatggtctcatacccgaatttataggacgatttccaatcttaattagcttgtcagctctaaccgaagaccaacttatgcaggtcctcacagaaccaaaaaatgctcttgctaagcagtacaaganattatttaacatgaataatgtaaagctacacttcacagagaaagctctgagattgattgcaaagaaagcaatgg

SEQ ID NO: 1951 - DNA, 252 bp, Glycine max
  Clone ID: 700997363H1
ataaaccagtaataacaggaacttattgttagcattccagaatcaaaaagggaatgtccaagtgaaatgttcctctaaataaagggaatgtcttagactgtcttctagtctgtgtttgatgagttaaagttgcacttattttttaattgttgaaattgatactctgatttttgaagtctgtagatatggacatttatttgctaacatgctcctgttggggttcacaaatatgttatatacatattttcatat

SEQ ID NO: 1952 - DNA, 245 bp, Glycine max
  unsure at all n locations
  Clone ID: 700997364H1
gccaagagctgccccaatgcaattgtcaacttgattagtaatccagtgaattccanagttgctattgctgcagaggttttcaagaaagccggtacatatgatccaaagcgactactgggtgttacgacccttgatgttgtgagggcaaatacttttgtggcagaggtacttggagttganncaagagaggttgatgttccagtggttggaggtcatgctggtgtcacaattttgcctcttttgtc

SEQ ID NO: 1953 - DNA, 268 bp, Glycine max
  unsure at all n locations
  Clone ID: 700997365H1
aaaaaatgcacgaaattagagaccctgcaattaggcttttcggtcagaagatccctttccctgaagatgttgttgttgacaaagaagaaaaagaaatagaaagtggcgaggaaagagaacaagagatggaaaaatatgaagaccaaggacacaaggatgctgganttgaaaatgttactgaggaagagctagaagttgatcctcctccaaatgctgaagagactaagaattcaggctcatcccctgaggctattgtgaaccccaaaac

SEQ ID NO: 1954 - DNA, 264 bp, Glycine max
  unsure at all n locations
  Clone ID: 700997366H1
gttcactcttcttctcttgcagctagngttntancgcacttncttctagatttaaggancnatgggtaangaaaaggttcacatcagtattgtggttattggccatgntgactctgggaagtccactaccactggccacctgatctacaagcttngacggcattgacaagcgtgttattgaganatttgagaaggaagctgctgagatgaacaanaggtctttcaagtatgcctgggtgcntgataagcttaaggctgagcgtg

SEQ ID NO: 1955 - DNA, 139 bp, Glycine max
  unsure at all n locations
  Clone ID: 700997367H1
actgctaaatcaacctcttctaaganaaaagcaagtggctctgatgaagaccacacttcacctactcacagtcaaattgacgagaaagaggaggctccagatgaagatgatgacgacgacgtgcaatggctgacagata

SEQ ID NO: 1956 - DNA, 140 bp, Glycine max
  unsure at all n locations
  Clone ID: 700997368H1
gccaccatgtcgaggccaaccgtcaccgtcgtctccgccaagggcgaggccaccaaggacaccgtccccgtncccaatgtcttcaaggcacccattcgccctgacatcgtccacgcggtgcacactggcatgaacaagat

SEQ ID NO: 1957 - DNA, 138 bp, Glycine max
  unsure at all n locations
  Clone ID: 700997369H1
cgnntctatcggntcgntgtgctctcatgncaacgtnctactatgtnancagctcagaacaantctccatttcttcgcagatgnccggtcnttcaancctcaccgttcccggtttcgctggttgnttgaccaaatctc

SEQ ID NO: 1958 - DNA, 255 bp, Glycine max
  Clone ID: 700997370H1
aaccgcgcgcgtttcacacctccataactcggagtagcatacgcagcgtcgttgactcgcaactcgtaacttggcctcgcgcgccgatggcgtcggtccccagcaccgtcgctccccgcaccttcctgccgtcgattcccaagccgagagctcctcttcacgccgcgaaatccgtcgccagcgccgcgcgcaacttcccgagactttcgcacaacctcattctctccggaaacaaacgcgcggtggcggtgaact

SEQ ID NO: 1959 - DNA, 252 bp, Glycine max
  unsure at all n locations
  Clone ID: 700997371H1
ttgctttttgcacttctcattggaaatanacagaactttctgcangctcttggacgcaggaggctagaaatgcaacttagaggtcgtgatgttgagcaatggatgagccaccgtcgcttacccgaagatctaagaaggagagtacgtcatgctgaacggtatagttgggcagcaacaagaggagtgaatgaagaaatacttctggagaatatgcaggaagatctccagacagacataagacgtcatctcttc

SEQ ID NO: 1960 - DNA, 253 bp, Glycine max
  unsure at all n locations
  Clone ID: 700997372H1
aggtcctggggtgctcgggatgcctgctggtccttacttatacgcggatgatctgattgaagtcttgaagaaaaagcatgnttctggaacatataaaaacctagtattttatctggaggcntgtgaatctgggagtatctttgaaggtcttctncctgaagatatcaatatttatgcaaccantgcttccaatgcagaagaaagtagttggggaacatattgccccggggagtatcctagtcctcccccagaa

SEQ ID NO: 1961 - DNA, 134 bp, Glycine max
  unsure at all n locations
  Clone ID: 700997373H1
gcaganataccgtgaagccgcagacttgatcaagaagggaaagangtgtnctctcttcatcaacgatcttgatgcaggagctggtcgtcttggtggaaccacccaatacactgtcaacaaccagatggtgaatg

SEQ ID NO: 1962 - DNA, 247 bp, Glycine max
  unsure at all n locations
  Clone ID: 700997375H1
cnccgctttcgccgttcaacaaatagccgacatagcagaaggcgacaaccgcggtctggcactgttgctgcccataattcctgcaatagggtgggttctgttcaacattctgcagccggcgctgaaccaactgaaccgcatgcgcacaccaaaggcgtgatcattgggntggggcttggcggcttggctggcttggtggctgcgccgcatgcatcggcggcggcggcttctgaagtggcggcgatgg

SEQ ID NO: 1963 - DNA, 249 bp, Glycine max
  unsure at all n locations
  Clone ID: 700997376H1
ccttaatttctctcttcacttatcatcatacttatatattatataacncaataattaaattaaatacatgttagcactttaacattcctttctctaacctcgttcccactctcatattttcccttctgctgatattcagctaaactaagtcaataagatgactcagggaaagatagttgnagctgcagaagctcataaaacacttgaggntttcgatcctccaaagaagcgcaaaaggaacaagtatgc

SEQ ID NO: 1964 - DNA, 248 bp, Glycine max
  Clone ID: 700997378H1
gaaaaacagttgagcagtatgattaacaaagtggaaaagtgaacaagacatgaatgttgtcatgatttgactgatattgaacaacacccgacagatgttcagatacaacacccgacagatgttcagtggtaatattcaatgatggtttgagacatacttgagggatgggaacggctcattgcgacgtacactaatctttgatatgctattccttgagttacatgtaaaatgtaatttattgagataat

SEQ ID NO: 1965 - DNA, 133 bp, Glycine max
  unsure at all n locations
  Clone ID: 700997379H1
cncactttgtttcttgtgcaattgaacctcttgacaatgttggtntngcttgatggccaaactaagctgattcataggtttgtcgttctgtgctattgtgtgggtttcgattaatgaaatttactgctcataa

SEQ ID NO: 1966 - DNA, 261 bp, Glycine max
  unsure at all n locations
  Clone ID: 700997381H1
aagaaanacgaggccaaaaatgcattggaaaattatgcctataacatgaggnacacaatcaaggatgacaagattgcttcnaaactgtcttctgatgataagaagaaaattgaagatgcgattgagcaggctatccaatggctagatggaaaccaacttgctgaggctgagnaatttgaggataagatgaaggagttggagagcatttgtaatcccatcatagcaaagatgtaccagggtctggtggtgatgcgggtggag

SEQ ID NO: 1967 - DNA, 258 bp, Glycine max
  unsure at all n locations
  Clone ID: 700997382H1
aaganaggttgaaatgaaggtagctcccatcgtggttttcttgttcaganacacagagggtttcgcctccgccatctcacaagctctccatgncaacccttcctcctccttcacccgccagtnanttcttctcattcactttttggtcactcaactcaacggtctcgttcattgttcattgatgccttttggcgttgcagagaggacttcttcgagctctcattggaggcttatggaatcaaacatctcaaaacatct

SEQ ID NO: 1968 - DNA, 256 bp, Glycine max
  unsure at all n locations
  Clone ID: 700997383H1
atcttcagggatctattgaagctgtcagaaaagctctggagnttctaccacaagacaatgtcactctgaagtttttgtnggaggcaacangtgatgtaagcacaagtnatntggaccttgcagttgcaagcaaggccatcattttgggatttaatgtgaaagcaccaggctctgtgaaaagctatgctgagaacaaagctgttgagattagattatataaagtnatttatgaattgattgangatgtacganatgc

SEQ ID NO: 1969 - DNA, 136 bp, Glycine max
  unsure at all n locations
  Clone ID: 700997384H1
aaaatgnccactttttttcttccaacgctcctcctccttctcatagccttcgccacctctgtctccggccgccgtgacctcgtcggagactttctccggctgccctccgaaactgataacgacgacaacttcaagg

SEQ ID NO: 1970 - DNA, 136 bp, Glycine max
  unsure at all n locations
  Clone ID: 700997385H1
ctagtgccttataccttgcaacttactgttatgcaggaattgnatccnattaaacctaggcactcacgtcttctcaggagtgctgtgcaacgagaaactcctacatctcagttgtctgaactatggtcacctctgg

SEQ ID NO: 1971 - DNA, 253 bp, Glycine max
  Clone ID: 700997386H1
cccaattctttctttttaaagaccaaccaaaaacacatcaaacaatggcgcccaagaccgcagacacgaagcagaccgcctccaaggcccccgccaaggccccggcctcgaaggccccggccaaggcccccgcgaagaagccggccagcggcgacaagaagaagtccaagaagcgtgtcgagtcttacacctcgtacatcttcaaggtcctgaagcaggtgcacccggacactggtgtctcgaacaaggccat

SEQ ID NO: 1972 - DNA, 251 bp, Glycine max
  unsure at all n locations
  Clone ID: 700997387H1
tcacagccccagctggtgccatttccgttattgatgaatgggaattacacagcaagcaccattccttngaggctcccttccgacgatccaagcattcccacacccatcgagctnaccttggcttaatctcttcctcaacacaatccccaccttcaagaagcatgctgagagtgatacttctgttcctgatgctgtgaataaagctgaagaatttgctcaaaggtttgctagnataattgaagatttcaaga

SEQ ID NO: 1973 - DNA, 251 bp, Glycine max
  Clone ID: 700997388H1
atttaaacctcttttttgcaggtttccattaattggaaatctgttacaaattttttcggcactccgttgatgagatgccacttttaaaatatggctgtttatctctgcgagcatagttaccgagttctggagttaggtatctttttttctagtgttggcacctgatgtttttagctctgctttgtatcggttttgccaccatgtgtttccttgtcctcgtttctttgcagcagtacatttatcgagtctgt

SEQ ID NO: 1974 - DNA, 78 bp, Glycine max
  unsure at all n locations
  Clone ID: 700997390H1
aaaaagtaatgtaaaatttntccttaccgccctcagtacccannncnnaacgagtatngttccttncnctttgattat

SEQ ID NO: 1975 - DNA, 246 bp, Glycine max
  Clone ID: 700997392H1
tcaacaacctcaacgcctctgatgtagctttcaccaccaccctgacagagcatcccgcggtgccaccactgccatcattctcgcagtgtctttggcatcaagttcgccgccccatcggagacaccaccaaccgtcggaacccattgttgttgcaagctaatattacggatctataaaggattttaagaatgcaattacagaacaaaataaatatggcaaaataaggttttcctcgtggtggggtca

SEQ ID NO: 1976 - DNA, 217 bp, Glycine max
  unsure at all n locations
  Clone ID: 700997393H1
aagcaatacagcttgcccccacatgagtgtggataacctggncantgtgttcaaccccttgaactttgcacctactttggaggccaaggagaaggaacttgccaatgggagattggctatgttggcattcttgggattcatagttcaacacaacgtgacaggcaaaggaccatttgagaacctcttgcagcacctctctgacccgtggcacaacacc

SEQ ID NO: 1977 - DNA, 248 bp, Glycine max
  unsure at all n locations
  Clone ID: 700997394H1
ctgcaaaggtgcatcagaaatagtattaaaattgtgtaacaaagtnattgatccaaatggaacagctgttgatctttctgatgagcaggcaaagaaagtctctgacattataaatggatttgccaatgaagctttgagaactctttgtttagctctcaaagatgtaaatggaacccaaggagaaagcagcatccctgaagatagctatactctgatagccattgtgggaatcaaggatcctgtgcgcc

SEQ ID NO: 1978 - DNA, 251 bp, Glycine max
  unsure at all n locations
  Clone ID: 700997395H1
ccccaacaagtaagagtaaaggcaaagaacaaaacaaaacatggacgaatgncgcgccaccatcaaaatggatcacagaacccaacgaacttagaaaacctaaccgagtcctccatcagtcatattcccaacgaccgttcagantgattgatggtagcgatcatnnnnnnnnnnnnnnnnnnnnnnnnnnnnnagcagancccctctgcactggtgccacctcagctcaagaatccccaatcctccaccac

SEQ ID NO: 1979 - DNA, 252 bp, Glycine max
  unsure at all n locations
  Clone ID: 700997396H1
atggatgcctctccctccaagtatgaaacttcttaaattccttttactttgcttgctatgtacaatgttgttctactctgtcatgtgcagttccaagattcattgcaatgagaaggacatgaacacactcctacgcttcaaaacaggagtcacagatccttcaggtgtggtctcctcatggtttccnaaattagattgttgtcaatgggactggagtcaagtgtgataacatcactggaagagttacacatc

SEQ ID NO: 1980 - DNA, 266 bp, Glycine max
  unsure at all n locations
  Clone ID: 700997401H1
cacaagtnttgaaggtgatcatcaagatagtggacgtgagacgttgaagaggcatagagtggaagtngctggaagggtttggattcctgacatatggggacaagaggagatcttgaaggattggattgattgcacagcatttgatgctcctttggttccaagcagaatcgttatggcacgaacggctttggttgaagaaggtagaagagcccacatcgggtggattgagaatcgagaacaggtgttgaattttttccaccatgttt

SEQ ID NO: 1981 - DNA, 260 bp, Glycine max
  unsure at all n locations
  Clone ID: 700997405H1
acgaaaggnagcttccaattctgctgtttganatcatggccacccttgttcgtgaccctttttaccnagatgtccctgccttcttcggaatgtctctgaaggagctcatagattgcangcaccccactgcttggattgantttgaaaagggtctcattgatgagatggagctagcnagnaaattttttaaggacggaagggatttctgatttataagggcttaaaacttgttatgagangtgggatattcatancatagc

SEQ ID NO: 1982 - DNA, 255 bp, Glycine max
  unsure at all n locations
  Clone ID: 700997406H1
gaaattggtgttcttnaatgtgaaagggttggnacggtttttgattntaaccctgcaaagagccttcctttgcggttntncttcttgagaagaagaaggctctttgttgttgttgattttgaagaaggaaagaaggaaggnagaaaatnatgaggctatggatttcttatctgcaattggtggaactntttgtgagttcattggttcatatgctttatggggtttacatatttagctccgctgtggctggggatt

SEQ ID NO: 1983 - DNA, 257 bp, Glycine max
  unsure at all n locations
  Clone ID: 700997407H1
cgcacacgacacaagtctttgaattttaaactcctcatccttttctttcttctgttttattattgcaaganttaagaactcgactcaagaagacagcaaaagtactgagccatgggtaccgtcatcgagtcccatttcttagccttcactgcccttgtcactattgcctatcagtttctgtttttcgtcgtcactgcgctcctcaaattcgacaaagtcactgattttgctggaagtacgaatttcatcataatgct

SEQ ID NO: 1984 - DNA, 252 bp, Glycine max
  unsure at all n locations
  Clone ID: 700997409H1
tgatttctacaattatcacagtgaggacaaagaatttatccaacttttcatcaaatttactcagaatatggctctcttcggggcattgtngtttttcattgggatgaaaaactctattcctagaaggcaacccaagaagaaggctgccaaaacaaaaacatattagttgaaaggacttctcggattgttcctggttgctcattatacccattttccatttctccaggatttggctttggtctctgtctggtc

SEQ ID NO: 1985 - DNA, 208 bp, Glycine max
  unsure at all n locations
  Clone ID: 700997410H1
cctganaacaaagcagtgtctgcngtgggcaaagctgctggagcaaaatggaagaccatgtctgangctgaaaaagcaccttatgtggcaaagtctgaganaaggaaagtggagtacgagaagaacatgagagcctataacaagaaacaggcggaaggtcctactggtggggatgaagaagaatctgagaagtctgtatctgaggtga

SEQ ID NO: 1986 - DNA, 224 bp, Glycine max
  unsure at all n locations
  Clone ID: 700997412H1
actctacaaccacnaanctaagtggttggttttggttagtttcatttttttgaagctcttaaacttaaggcttaagccatggcatcctcatcctctctgcatctatctcaggcccttctggcacgtgctgtgtaccttcatggctcttctncttctgaccgngtctcactctccttcccatcattctctggcctcaagtcacattctacatgcaaagcagcnnc

SEQ ID NO: 1987 - DNA, 249 bp, Glycine max
  unsure at all n locations
  Clone ID: 700997413H1
acagaggcaaatcgcaggttcgtnccgtgaatctaatcaaagtttctcattaacttctgcgttagattcacgcacaaacttgtcatttcccttttcttaaccttttttttttccttttccgtcaaaactttgtttgttacattcgacttcgaattcagattcngatttctctgtttagtgctcctcaaaccgatgacgccgcggcttgttagcttctggctccgctacggtatggcatcttccatattg

SEQ ID NO: 1988 - DNA, 250 bp, Glycine max
  unsure at all n locations
  Clone ID: 700997414H1
tctcctcggagctttgctcgttattcttctntttcttttctttttntcgtttcgttcggaaaacgcgtaggctgtgccgttcgtttttagtnggtggatgggaacgacgtcgtgtgagtacgtgagcngggaggaggtgtttatgtcgaacgacaaggggaggagngaggttcattacttgcttaaacgacgaggcggtgggctcggatctggccgtttttggaaaagagaagagcctcaaacacatgtc

SEQ ID NO: 1989 - DNA, 221 bp, Glycine max
  unsure at all n locations
  Clone ID: 700997417H1
ccttcattgggctacataccgtgagacagttacctgccctcagtgtaaacatccatttganttcctcaatgtccatcgctcacttgatggcagcattcaagattacatgtttgangagagtgtgtgcctgctacttcgggcctcatggttcacacctttatctgttgaagaacatgtggttcatgaagatgcatatgaagacctagaagattattatcagt

SEQ ID NO: 1990 - DNA, 261 bp, Glycine max
  Clone ID: 700997418H1
cacacggtgtcaaaacacttcaactttaggctccatctcaaaaaaatgggtggtttagctagcaatcttcctctaattgttatggtgggtctgcaaattcattatgcagcacttgctatattcacaagagccgctttgttagatggattgagtacgacggtctttgtagtgtacaggcaaggcatagccactttgggctttggcgcctatgtttttctctcctaagcggagacaatcagtgaaagattctttgggttcagg

SEQ ID NO: 1991 - DNA, 261 bp, Glycine max
  unsure at all n locations
  Clone ID: 700997419H1
ctcactttccagaaagccttcacatgttcacctttttatttgatgatttgggtgttccngcaagattacaggcatatggatggntttggagttaacacatacacactgatcaacaaggctgggaaagcagtgtatgtganatttcactggaagaccactagtggtataaagtgtctattggaggaagaggccattaaggtgggaggagccaacccacngccatgcccatccagacctttcatgantccattgctgctggnt

SEQ ID NO: 1992 - DNA, 255 bp, Glycine max
  Clone ID: 700997420H1
gagaaagagggggtgccaatggcaaggcccaacagaaagagcacaaggccaaaatacctcaaagactacttgtaatggctagagctgatctggcaatcttgtcccctgcttgcttgccaatttcatagtgcagaatccattctattatgagcatatcctacaaattccaaattctattactgtaataagctatatatacagcttccatgtaataagggcaaggggatatgaatgaaattagcaattaccttcaaa

SEQ ID NO: 1993 - DNA, 255 bp, Glycine max
  unsure at all n locations
  Clone ID: 700997421H1
gnaagatgaaagctgggttccgtttcttacagagcgagcagctgaagcagttgtcaacattcagattgctacccaatcagataaagtagtgaatcctgtagattcaagttctcaaaatgggcatctagatggtgattcacaagatgacattaaatggatggaaacgctactctacttcatcatctcatcattgaagtctgggagatcctcatatctgctcgacgtgcttgtgggacttctatatcctgtgatttg

SEQ ID NO: 1994 - DNA, 227 bp, Glycine max
  unsure at all n locations
  Clone ID: 700997422H1
aataacaaaagcaccttccaacaacaaccatngccccaaaaccatggtttccttcctcaagttccatncattcctggtgttccttggccctatacatggaattctccagttcctccacctgctttgtgtccttcaggatttcccctaccattctatcctgctacattttggaattgtggcatgcctgggaattggaatgttccatggttttcctcaagttcaacctg

SEQ ID NO: 1995 - DNA, 256 bp, Glycine max
  unsure at all n locations
  Clone ID: 700997423H1
gttcatagatttagggaatcgattactatactagtaataaattgtacaaaanataaaaatataaataatataaatataaaaagaacaaacacaaattttatgtgattagtcgcggtatttannataaaanatgaaagtagacaaataaaanaggaaaggngatgtttgantaanaataattccccttcaagttcttattttttgagaggaccggnccatatgaatgttttattatgctctanccaacacattaaaa

SEQ ID NO: 1996 - DNA, 254 bp, Glycine max
  unsure at all n locations
  Clone ID: 700997424H1
cgganaaganaattctctcaattcgagacagaggtattggtatgacgaaggaggatttgataaagaatttggggacaatagcaaaatctggaacttctgcatttgttgagaagatgcaaacaagtggagatctcaatctgattgggcagtttggagtcggcttctactctgtttatctcgtggctgactatgtcgaagtcattagcaagaataatgatgataaacagtatgtatgggaatcaaaagctgatgga

SEQ ID NO: 1997 - DNA, 246 bp, Glycine max
  unsure at all n locations
  Clone ID: 700997426H1
gaacagactattaaccagcttctgacggagatggatggcttttctggcaattctggtgttattgttttggctgccactaacagaccggatgttcttgattcggcgctgttgaggcctggccggttcgacaggcaagttactgtggatagacctgatgttgccggcagagttaaaattcttcaggtgcattctagaggaaaagcacttgcaaaggatgttgactttgaaaaaattgcnaggagaacc

SEQ ID NO: 1998 - DNA, 247 bp, Glycine max
  unsure at all n locations
  Clone ID: 700997427H1
tttcctttggctgtatggttaagaaatgttaatgaaacgaaaagaattgtggtgatgctaagcctaagggtgggtcccatgttgagatgtgaatagaaggaaatatgggattgggttcacatcaccatttttgtaccacttgaaagatttgtcgtcaaacttgggtggggctcatcaaagcactactccttcccacgtaacttcacttcacatttctctcctgcaacatttttctttttttgnaaaa

SEQ ID NO: 1999 - DNA, 245 bp, Glycine max
  unsure at all n locations
  Clone ID: 700997428H1
gatccgaagttgaagatattctccacctgggtgtctgcngtgtgctgttactgtagctcctattcaatctctcttagttcaaccttcctgttgcatggctacggttttggttgggaaagttattcggagttaaattcgttgtcattagcatattgctgatttagcttagcgaatgaccttgggtgggaganaggtcttctagattcgtctttcgtattaaggatttttctctgaaggctgtgatc

SEQ ID NO: 2000 - DNA, 245 bp, Glycine max
  Clone ID: 700997429H1
ttttaggtaaaaaggaaaatcatttttatgaagtggctgaaaacaagaggataagtggtgatggaaaatgagttcatgaaatgtttttagcgctgattttttcttgtgaagtgcttctcgagtaccactacttatcttctacattgtcctcgcttctcactgaatcaggctgaagagtgtgatctataacttcagaggaaatagagaatttcctaggctgagaattgggattgggagtcctcctg

SEQ ID NO: 2001 - DNA, 190 bp, Glycine max
  unsure at all n locations
  Clone ID: 700997430H1
cttcctcnaaactcatactattccnccatgcatcatcatcctcttcccttaattccacacnnttcngnncntngacnacnaacacccacaaactaacccctctctcctcctccttccnccaccccaccaccgtcctccgcngcaccccttcttccacnaccaccccgcgtngcaccttcaccgtccgcgc

SEQ ID NO: 2002 - DNA, 189 bp, Glycine max
  unsure at all n locations
  Clone ID: 700997431H1
aagactctaatcttggaggaggaaagggtggatgcttgatttgctagttttggttttatggatgttttagagacattgttatttacctttgttggttctgtgctttacttttggttttgatagacggtggtatgtctctgncatggattttgattgtttcaagttttaatttaattgactgtagttttg

SEQ ID NO: 2003 - DNA, 252 bp, Glycine max
  unsure at all n locations
  Clone ID: 700997433H1
ttcagatggccctagtccaagtgatgaatggtttaagcaagggaaaaaggttnaagcctattcaatacctggcactggtgaaaaggcaaaagatccgatttttggacttgctatgggttccggttctcaagtactgggcgatcgtttcagatggttttgtgttgaaagcggaagtgctgataatccttcagtgatattaatccatggtttccttcacagggcatattcttaccgcaaagttcttccagtant

SEQ ID NO: 2004 - DNA, 256 bp, Glycine max
  unsure at all n locations
  Clone ID: 700997434H1
ctcctttcgtcttggagactcaacctcttcctcttctctctctctctatccgctggtgttattcttcagctgtagctgnaaggtctcaaggaagcttataaaaagagagcacatctgttttattcagttccgatggcagggttaaattttgaagccacacntantgataancgtgatattctgaagatattgcagcttaaggtgttgagttnccnntatnttgtgaagggaangganccgnggtcaaaatgcnatg

SEQ ID NO: 2005 - DNA, 254 bp, Glycine max
  unsure at all n locations
  Clone ID: 700997435H1
caaganatgctcttggggccatcctggttcagaatatggcatccaacaggatggtccttgcaattcatttgcaagggggaaaacaggtctgtgtgcacttcatagtgggctagtgcatgacaagagggttcatngnggcatctcactgggatctgttgttcaggatcctcattccagtaaagcagatnnactaaagcaggtactcattgaccaaaacatggatgtaaatatgatgaaaatagggagtagcctag

SEQ ID NO: 2006 - DNA, 253 bp, Glycine max
  Clone ID: 700997436H1
gtttttctactagagatctcttttctctagctagtgtaatatcattaatcaatggctggcactatctttggataccctttcagacacttcatctggggtcacccaccaattttcaaagaatggtccggctcaacagccctcttagattggctcgaatcacccactgcccacatcttaaaaattaacgttccaggattcagcaaggaagacataaaggtgcagattgaggatgggaatattcttcacatcaaag

SEQ ID NO: 2007 - DNA, 256 bp, Glycine max
  unsure at all n locations
  Clone ID: 700997437H1
cgnaaaaaaaaaccctaacgcactcgagaccctgagatttttcatcttcgtttctcattctctttttgatcatggacgtcgaggnncggcagatcttcaacaagttcgacaagaacggcgacggaaaaatctcggtaacggagctgaaggacatgctcgcggccctcggatccaaaacgacggacgaggagttgaaacgcatgatggaggagctcgaccagaacggcgacgggtttcatcgacctcnaggngttcg

SEQ ID NO: 2008 - DNA, 255 bp, Glycine max
  unsure at all n locations
  Clone ID: 700997438H1
ggctgctctgcaatacttggaatcgctgcgcaacgcgcatncctgagctctccgattggtacaattcgctggcggatctataccagaacaagctctggcaccagcttaccctcaagcttgagcagttcgtggctctcgccgtcttccaggccggtgatgcattaatacaattatatcacaatttcatcacagactttgagaccaaaaatcaaccttctcaagcttgcgcatttcgctgttatagtttctcggcag

SEQ ID NO: 2009 - DNA, 254 bp, Glycine max
  unsure at all n locations
  Clone ID: 700997439H1
ganagtgcccactatcctaaaataatggagaaaacaaggtcctcagaccaagttgttgtcttcctcgaccagcataaccctaaaccaccctccatggaatccgaaaaccatcaggacaaacccaaacatcccttaanagtcagagctcttaaccgtctcagcttctcaaaacccaaatcccgaatcctagaatacgactataatgtcccccgcaacaaagttgctgaagagagtgacctnattcaaccccactt

SEQ ID NO: 2010 - DNA, 252 bp, Glycine max
  Clone ID: 700997440H1
agaattctcagatttgcggggcgagatgatgcagcagccaggacccggcatggcacctcccaccatgggccagcagccgcagcaacagtaccagcagcagcctccgccgcagcagcaacaaccctacgtcatgatgccgccgcagcatcaggcgccgcagcctatgtgggccccatccgcccagcctccgctggccgcagcagcctgctagcgccgacgaggtccgaaccctctggatcggggatctgcagt

SEQ ID NO: 2011 - DNA, 249 bp, Glycine max
  unsure at all n locations
  Clone ID: 700997441H1
cnttactgctaaacttcaggaggtagaagactggctatatgaggatggtgaagatgaaactaaaggtgtatacattgccaagctagaagaactcaagaagcaaggtgatccaattgaagagcgttacaaagaatacatggagaggggtacagtaatagatcaacttgtctattgtataaatagttatagagaagctgcaatgtcaaatgatcccaaattcgatcacattgacatcaatgagaaaccaaa

SEQ ID NO: 2012 - DNA, 245 bp, Glycine max
  Clone ID: 700997445H1
cccctctgcagatgaagaaggtggatcaatgacttgcatggagttattcttcatcaacccagatttaattgattcaccctctgcagatgaagaagacgaagaacctctgcctcaagagtttgttcttgtggaaaagacagaacccgatggtacaattgagcacataatattctcttcaggtggagatgttgatgtttatgatcttcaagccctctgtgacaaggtagggtggccacgtagaccat

SEQ ID NO: 2013 - DNA, 246 bp, Glycine max
  unsure at all n locations
  Clone ID: 700997446H1
aaaaccctgaagaaagacacagccattgtttacntttcattgattgagccaaagctttgtattttctgcgataattttccattgggtggaagaaagtctcaacctttattcgaaagagcaaggatctgagttgagttgagtgatcatgtgtggtggtgcgattatctccgacttcataccggcaggtcccgccagcggggnnccnnccgtgaccgccgnnngnncggctggccgagtttgaggaag

SEQ ID NO: 2014 - DNA, 244 bp, Glycine max
  Clone ID: 700997447H1
atcataactgcaattggtcctcgtgttggacttactttaaaggaaagtgtaagaataggattgcttctatcccaaggaggcgagtttggatttgttgttttctctttagcaaataggcttggggtgcttcctcttgagctcaacaagctgctcataattgtggttgtattgtcaatggcattaaccccatttctgaatgaagctggaagaagggctgctagctttattgaagacaaatttgatg

SEQ ID NO: 2015 - DNA, 260 bp, Glycine max
  unsure at all n locations
  Clone ID: 700997449H1
gttgatgaggnggattcctttgaggaagtttctttaagtgcagcacttaatggtgttgagggtttggactatatggaaagaattcctcttgccacatctganggntttcctcatgtgctttcacgcaaaaatggtnntgcnaggcaaaagaagatttgtttctggggatggtgaagagatgacattgattccgggaaccantgtttaagagggcttacnanaagntaatattggaacttgagaaaagtgttcctaacntt

SEQ ID NO: 2016 - DNA, 59 bp, Glycine max
  unsure at all n locations
  Clone ID: 700997451H1
cacctttctcctaaaacatctccagcngggtncttctncttaccacacaacanacgggt

SEQ ID NO: 2017 - DNA, 252 bp, Glycine max
  unsure at all n locations
  Clone ID: 700997452H1
ggcagatagaaaaaagagcgacttttgagttcaaaagatgactaacttcccattgatcaacttggagaagctcagtggtgaggaaagaaacgataccatggaaaaaattaaagatgcttgtgaaaactggggattctttgagctggtgaatcatggcattcctcatgacatattggacactgtggagaggttgaccaaagagcactacaggaaatgcatggcagagagggtcnaggaattagtggccaacaa

SEQ ID NO: 2018 - DNA, 251 bp, Glycine max
  unsure at all n locations
  Clone ID: 700997453H1
cttggttttgcttcaattatggctttctcttctttcttttcccatnctccattggcattgaagattgatcgcttggggcagactataaaaccttgtggtacagttgagaaggggcaaaagttttctttccctatcagaagtaatggtggtgagcttgaactttgttaccagagtcaacttaatcagagaagtagagtcaacctaatcagagattggagtttcataggaggatcaagaattgttgttnaaac

SEQ ID NO: 2019 - DNA, 250 bp, Glycine max
  unsure at all n locations
  Clone ID: 700997454H1
gcatttttngtgatgtcctataatcaaatcatctacccttggattctataactattatcattagattactgttatttnttcatttttgnataccagttanttgtgtaagatggaaaaatggatcacaaagaaatagagggataagatattttccttgcacaaagcagcatnaangaaaattttcaaacacggattctttaattattacnccaattagggtaggatnaccctggcttgtgaaactcggtat

SEQ ID NO: 2020 - DNA, 251 bp, Glycine max
  unsure at all n locations
  Clone ID: 700997455H1
cgcnaagtccaacagaactggaaaaggctgaagaagtagaaataagacacctgtgaaatagttgatggtgcagtgatcaaaagaatggcgtgtagcaaaataagcaaggctctttttcaaccttagttaaggtgatgatatttggtaaggacttatagggtttggtttctaaggtaaattattatacctaagttttggggtagagatatgtaaatagtggctaagtgagggttggagaagacgaccaatga

SEQ ID NO: 2021 - DNA, 101 bp, Glycine max
  unsure at all n locations
  Clone ID: 700997458H1
tttcatttgtngtctgtnacgttaacgtccctgcctccgattctttccaacttcttaactttctttcctagtttctcttttccctnccagcacaananang

SEQ ID NO: 2022 - DNA, 243 bp, Glycine max
  unsure at all n locations
  Clone ID: 700997461H1
ccctcttctctctccttctatttatccttccctccataacagtaacnaccacnancacctctgcaacacaacacacataatnngtaacanagagaatgagagcgctaaattngcacgtgctccncgnagatcttcactcncacnatcacgtgcccacctcaaccctctcctacctcagaaactcccgcttcatatcatccctccgtcgacgctccccaagaaccggaatccgatgtacggcgt

SEQ ID NO: 2023 - DNA, 241 bp, Glycine max
  unsure at all n locations
  Clone ID: 700997463H1
gcaattgaagtggaagtcttgcccttctctcttcaactccaaacacaagacatcancatccatngctgcctccgtctccactgtcggagctgtcaacagagctcttttgaacctgaatgggtctggactggggtttcagctcccagttcatccttctttgggagcagcttgaagaaggttattggctnaagggtccccaacacaaagatttcctctggaagcttcaagattgttgctgtag

SEQ ID NO: 2024 - DNA, 256 bp, Glycine max
  unsure at all n locations
  Clone ID: 700997465H1
caaaatctaaaaaagttgcaatgccttaatctttcccgcgatttgtatttatcattgttacccggatgcgcactgcccggtttgagcaatatgcaatatctggatctccggggttcgtcaggtataaaagtagaagatgtaaaagggatgactatgcttgaatgttttgcagtaagctttctcgatcaggatnancacnaccggtatgtgcaaganattcaggncactgggttatggacctcaatctatttttntt

SEQ ID NO: 2025 - DNA, 256 bp, Glycine max
  unsure at all n locations
  Clone ID: 700997466H1
cacanaacctggaaaaaattccgaccccagcccttcactcttctctctgcagcggnggacttctagcatactgttgtttgattaaccaagttcttccatattggttgaggaagcctcgagtcaatatttagtntttgctaccatctgtgggtttctgatggatgatgctgggcatcgtgagaatggnagncacaaagcngcngancaatataanatnctgctcagggtcagtggttgattgcaacatnagccttcc

SEQ ID NO: 2026 - DNA, 247 bp, Glycine max
  unsure at all n locations
  Clone ID: 700997469H1
cgcaaaaagggttaaaacctgatggttattgctatgaccctttgattgcngctttgtgcaaagagggtagagtggatttggctattgaggtattggatgtcatgatctccgacgggtgcgtgccggatattgtgaactataacaccatattggcttgtttatgtaagcnaaaaagagctgatgaggctccgagcatttttganaagttgggtgaagtggggtgtcaccgaatgctagttcctacaat

SEQ ID NO: 2027 - DNA, 247 bp, Glycine max
  Clone ID: 700997470H1
aaggttgacattaacaacaatgtacttaagggcgcccctcatccaccatcactgctcatggctgatgcatggacaaaaccatactccagggaatatgcagccttcccagctccttggctccgtactgcaaagttctggcctaccacaggacgtgttgataatgtgtacggtgaccgcaacctcatttgcacccttctcccagcatcacaggctgttgaagaacaagcagctgccacagcataatgtg

SEQ ID NO: 2028 - DNA, 245 bp, Glycine max
  unsure at all n locations
  Clone ID: 700997471H1
ttgtnttcacgacgaattatgtggagaaacttgaccctgctttgattaggagagggaggatggataagcacatagagatgtcttattgttgctatgatgcattcaaggtgctggccaagaactacttggatgttgagtctcatcatttgtttggtgcaattgggggattgttggaaganacagatatgtccccggctgatgttgctgagaatctgatgccaaagtctgtggatgaagatgtggag

SEQ ID NO: 2029 - DNA, 246 bp, Glycine max
  unsure at all n locations
  Clone ID: 700997472H1
cttcccccattttttcctctttcttcctcgcctagctagctccaganaattaggntctgcttcagatctagtgtttccctgtcccaaatcacgagtccattgagtttgattttgtggatgaaaagcatagatagggcttttgcaaaactctccaatgtttcttgaaattatatgaccatgcgtcgaattcgtatgctgcactccttctccgtcgngttcctctactggttctacgttttctcatga

SEQ ID NO: 2030 - DNA, 85 bp, Glycine max
  unsure at all n locations
  Clone ID: 700997477H1
gacttcttcttaacttccatcgtccatggcggttntcggggttgagaagcggtggtttgcctctcttccancaatcanncaacna

SEQ ID NO: 2031 - DNA, 240 bp, Glycine max
  unsure at all n locations
  Clone ID: 700997479H1
aagaagcagcctcagatttagaagatgatgtttctgtgaattccttcggttcaaggaacaacttggaagactttccaatcccattgaggcaaagatactcaaaaatgtgttctcttccaaacaacaaaagaanacgatctataaggacttatcttcctagtccttcagccaaaaaacattttcatgcaggtctagtacaaggtgtgattaaggtaaagccacaaatgcctctacctgttc

SEQ ID NO: 2032 - DNA, 241 bp, Glycine max
  unsure at all n locations
  Clone ID: 700997480H1
ccanaactctgaagaatattcctgngattatgctgtcatctcatgattctatgggnatagtctttaagtgtttgtcanaaggcgcagttgattttttagtgaaaccaattcggaggaatgaacttaaaaacctctggcagcacgtttggagaagatgccacagttctagtggtagtgggagtgaaagtgcgacccacaccagaaaatttgcaaagtcaagaagtaatgatgcatgtgaaaa

SEQ ID NO: 2033 - DNA, 249 bp, Glycine max
  unsure at all n locations
  Clone ID: 700997481H1
tttgttagtgcagaaacagagaaagatggatgaggagaatggttacagtgggagtatcagctctaacttggagactacaaaagcagagagatctgtgtggctgatgaagtgccctttggtggtggctangtcatggcagacccatcctccttctcnnactctcgccaaggttgtgctctcccttgatcctctcnaaccttgaagaagacgantcctctgctggtccagtttacaatggagatggcaggc

SEQ ID NO: 2034 - DNA, 253 bp, Glycine max
  Clone ID: 700997482H1
ggttgtgaaagcagagaagtgagatacactaagttatcctcataaatacactctaattaggtggcaagataagtgtctaaccttagtaacattgccacatattgtgttcattttggaattgtgccactaaaattctattcaattcatctatggctgcctcttcttatgctatgcaatcaatcctgggcaaaccctttgatccgcatttcccagcggggtctagggtgaacccaatttgggcgttcctgctttg

SEQ ID NO: 2035 - DNA, 247 bp, Glycine max
  unsure at all n locations
  Clone ID: 700997483H1
cctctctctcttctgcaccggnncccttcncgccggcggcctctactggttcgtctgtgttctgggccccgccgagcagaagggcaaacgcgccaccgatctatccggcggctccatctccgccgagaaagtccaagacaactacaagcagtactggtccttcttccgccgcnccaaggagatcgagaccgccgacaaagttcccgatntcgtcgacaacttctacaatctagtcaacgacattacg

SEQ ID NO: 2036 - DNA, 246 bp, Glycine max
  unsure at all n locations
  Clone ID: 700997484H1
ggaacattctttgtttttggcattgtttcatgttgtgccgttgcctttgttcattattgtgttccagaaacaagagggaagactttggaggaaattgaagtactctttaaagacgaggatgatttgcaaganagtgaggtagaaatgggagatgtagagcgtctgatgcagaagtcgtgagtnggtggcataccaaacgtttaaaactaaaattcctagatatttccaatctagtattatactcgt

SEQ ID NO: 2037 - DNA, 192 bp, Glycine max
  Clone ID: 700997485H1
caccctccaactgcaactgcaatggccgtcccttccttctccgcgcgttctttctctctccccgcccaaaaccactactgccacctctcttctctcccactaccctccttcactctctcatctcgccgcccaagatattcttcttccaacctcttcacacctcttcgctctcccacaacccccatttttgca

SEQ ID NO: 2038 - DNA, 243 bp, Glycine max
  unsure at all n locations
  Clone ID: 700997486H1
acctttcatccattaatcggtgactctatcagccccttatataccatctgtattgattattatgttcataattttatttgtatttatatttacactacaaatagtcttcgaagatagattatgttcaaaatacatggttataacattgtcttcaccttgataagtttcttcattttgttcattaaaaaaaaagnnggnggnaanannaaaaanggggggncngcnggtnngnggncccncccc

SEQ ID NO: 2039 - DNA, 244 bp, Glycine max
  unsure at all n locations
  Clone ID: 700997488H1
ggcagagagcaagctnatcntagagttttaaaaatggcagcagcctcctcnatggctctctcttccccatccttggctggcaaggccgtgaagctgggcccatnancccccgaagtcgnnagggtcagatgaggaagaccgtcaccaagcaggcctcctccggaagcccatggtacggcccagaccgcgtcaagtacttgggcccaattctntggngagcccccgtcctanctcactggngagt

SEQ ID NO: 2040 - DNA, 244 bp, Glycine max
  unsure at all n locations
  Clone ID: 700997489H1
gcatttagtgacaatgctctggcttaccttgccancttctgcagaaaactgaaagttctaaatctttgtggatgtgttagancctgcatccgatactgcattacagggctattggacaatactgcaatcagctacaattctttgaaccttggatggtgtgataatgttgggcgatgttgggagtgactactttagnatatgggtgtcctgatcttaggatagttgaacttgtgtggctgtgtcc

SEQ ID NO: 2041 - DNA, 237 bp, Glycine max
  unsure at all n locations
  Clone ID: 700997490H1
cagaaattactaaggataggatattaacagaagtagaagtttcagataaacttcttgantttcgctcaaaacaagctggtttcctagatactagcnnngacacaataagtngttctggtccaaatggcgctatcatacactacaaaccagaaccagagagttgtagttctgtggatgccaataaactgttcttattggatagtggtgctcaatatgttgatggcacaactgncatnc

SEQ ID NO: 2042 - DNA, 238 bp, Glycine max
  unsure at all n locations
  Clone ID: 700997491H1
ctcggtctcgctcttcttctcatcaagcacagagttacagactcaccgatcttccgattctctttcgtcttngtttatgagctcgaaggagagacccactcttggtggcacgcggattaagacccgcaaacgaaatattgctgcgccgctggaccctgcagcattctcggatgcagtggtccagatttatttggataatgctggtgatctggaacttattgctaagagtattgaatct

SEQ ID NO: 2043 - DNA, 232 bp, Glycine max
  unsure at all n locations
  Clone ID: 700997493H1
aagggttancnttcggnaganaaagcantccactcagngnnccagaagaattcaacgatgctcgctatgatgatanatacggcaatacccgcctctatgtggggcacttatcttcgaggatcgttcccgggatctggagcgtgccttcagcagatatggaaggtaattcccccttttcttatcattccatcgtcgagcatggtcttagttatttgctatgtgcaatcacagc

SEQ ID NO: 2044 - DNA, 238 bp, Glycine max
  unsure at all n locations
  Clone ID: 700997494H1
tccaattganattttaaaaatgactgggataaacttaaganttcaattattgaaattgaataagtaaacaatttaattggattggtcgaatggtatcaaaaaatggagtactaactcccatttcttatttattattgaattaaccgatcaacttgctttgttatcgaacatttctttttganttcaaaaattttccggaaaanaatttgaatctatttttatatgcgaatcaatccta

SEQ ID NO: 2045 - DNA, 242 bp, Glycine max
  unsure at all n locations
  Clone ID: 700997496H1
tgnnaacacagaatcgcgtttgtaactnaggaatgagtttctnncnggggataattgnttccttcaactccatcntcacanatganaacaacaacaattatcanaacaccaannnnnnnnnnnnnnnnnnnnnaacgnancgaatgncaagcttctcctcctccttcggtttcgaacgagcgcgttgcatacaagntcaaaggctanttcganttagcngcgnnanagatcgcgaagggcgt

SEQ ID NO: 2046 - DNA, 279 bp, Glycine max
  Clone ID: 700997502H1
tttacaaaatatgcagtgtgctaggtagtccaaccactgaatcttgggcagatggactcaaacttgccagggatatcaactatcagtttccacagcttgctggtgtacatctctctacactgatcccatccagaagcgatgatgcaatcagccttgtgacgtcactttgttcatgggatccctgcaagagaccaactgcagcagaggttcttcaacatccttttttttcagagttgcttttacatccctccatcccttcgcaccagagctgtaaccaga

SEQ ID NO: 2047 - DNA, 276 bp, Glycine max
  unsure at all n locations
  Clone ID: 700997503H1
tctctctgtctctgcgatggagtttcgcgtttccgtcatttggagccttctcctcattgtctctttattctctcctgaaatcaagggtgaggcttctggttccgtcttcttcgtcgatagctccagtaatcaattccttcgcgctagatcatccaacgatgagcaaccttcaatgttgcttcaagaagttggtgctgctgtgtcagttctgcttggttttgcacctccttccaccttttctgctgccagctcanccaagttgaatgaggttctaat

SEQ ID NO: 2048 - DNA, 275 bp, Glycine max
  unsure at all n locations
  Clone ID: 700997504H1
tgcggttttgttgcttctatagtattaatagcttgcaacaaattagcagagaaggttaagttcgacgatcctctggaggcggcgcagttgcacggtgggtgtggcacgtggggggtgatattcacggcgttgttcgcaaaaaaggagtatgtnaaggaggtttacgggttggggagggccgcacgggttgctcatggggggtggtgggaanttgctggcggcgcactgattcagattctggtgattgctgggtgggttagtgcgaccatggnncc

SEQ ID NO: 2049 - DNA, 275 bp, Glycine max
  Clone ID: 700997505H1
gaagggaatgagagtgaagcttcaaggcgtattaaaactgagcttctggtgcagatgcagggtgtgggacacaatgatcagaaagttcttgttcttgcagctacaaatacaccttatgctctagaccaggcaataaggcggcgtttcgataagcgtatatacatacccctacctgatttaaaggctcgccaacacatgttcaaggtgcacctaggagatactccccataacttggctgaaagtgattttgaacatttggctcgcaagacagaggg

SEQ ID NO: 2050 - DNA, 273 bp, Glycine max
  Clone ID: 700997506H1
gaaggctccaaatatgggatggatgaatatttagagatcaagtatgtgtgcttcggaaacatgaacaaagaatgaagtacgagacagtgccaagcaaaatagggaggagtcaccttgcgtttcttagttgaagaatatgcatatagctgcacacgtgttgtatacaaataagtgctggcttgcaaagggcctcctcatttttctgtttggttctttttgctttcctttttcattctctttatttttcacagatttttagaatattaaaaaatg

SEQ ID NO: 2051 - DNA, 273 bp, Glycine max
  Clone ID: 700997507H1
atcatcttggtactcttattccacttttttaaagtgggttcatgatattagctttataatttatgtatgcatggtttaaaactatttttcaggatggtagcacaacacggtgaagagttgatgtagttaagaggagcttactatcatagaatctgaatatccaatgactgaaagaagcatcctgtctctgccccctcttctctctgccaacatgttatgtgctaggtgaagaaacaacctttccttcagctcttgcatttcacatacatctgg

SEQ ID NO: 2052 - DNA, 275 bp, Glycine max
  Clone ID: 700997508H1
tgcaatggagtgtgttgaagattcagggagctgacaggcccgcaatgagtgatgtggttaaagaaattgaagacatgttgcagtctgttggtatgcacctaacatctgaatcagtaacatccacaacatctagtcatagatatcaggaggtaagtatagtgagtttccatctggaccaaccttacagcaatgagtcctttggttcaagtgcagaacatattcaaaaattgaacctagttagttaagttagtccttttttctcaagattgaagtca

SEQ ID NO: 2053 - DNA, 272 bp, Glycine max
  unsure at all n locations
  Clone ID: 700997509H1
aattgttaaaaccacaccaattttggggttctggaagaagcttcatttgagagccaaattattgaaatctgtttccactggtggaatgaattcagtgtcttcctttatgcctntaaaactcaccaatntngttttatnaattnatgtatgtcngccttactagcantgtgtnactgtccaatatgagaatcggcttaatttggactccatngcnacagtnatatgctcatgccaacctaatccaattttccnggaaactatttcttacngat

SEQ ID NO: 2054 - DNA, 270 bp, Glycine max
  unsure at all n locations
  Clone ID: 700997511H1
ggcggaagttgcaactgaagtgaagctctttaacaagtggtcgtacgatgacatcagcgttgcagcggatatctcattggaagactacattgccgtgaagggtaaagccgccacgtttctgccgcatacggcgcaggctaccagaagaagcgctttcgtaaggcgcagtgccccattacagagcgtctggtgaatgcgttgatgcgcaaaggtcgtaactcgggcaaaaagctcaaggccacgcgtattgtcaagcacacgcngganatt

SEQ ID NO: 2055 - DNA, 271 bp, Glycine max
  Clone ID: 700997514H1
ttttcctctctgatctgcaaacacatttcaagagaacgtttttgttgttgcgcccaatcggtgttgcatttttcttttgcagagaggaggggaagtctttatttgtgagatttttcttaggaagatgaaaaacacggagaggattgcaaatttggccgtagcaggtttaactttagccccgcttattgtgaaagtagattcaaatgtaaatgttatcttgactgcttgcctcaccgtgtatgtgggatgttatcgttctgtcaaaccaaca

SEQ ID NO: 2056 - DNA, 271 bp, Glycine max
  unsure at all n locations
  Clone ID: 700997515H1
ggttgccaaaccgggatgacgtgaaggctggagttatagcctacaagatagcggctcatgctgctgatttagccaaaggtcatccatatgctcaagcctgggatgatgcattaagcaaggcaanatttgagttccgatggatggaccagtttgctttgtcattggatccgatgacagccatgtccttccatgacgaaaccctgccagcagatggtgcaaaagtggctcatttctgctcaatgtgtggccctaaatnctgctctatgaagat

SEQ ID NO: 2057 - DNA, 281 bp, Glycine max
  unsure at all n locations
  Clone ID: 700997517H1
gtaaatccttgatctagcttgtttcactttgtttcagtcaagaaactctcctctctataaatctactaagcaaacacaaaggacagtcacaattttatttntntnnataaaaaaatgtcaatggacatgatggcaaccgaacgtgtttgttatgttcactgcaattctgnaacaccactctagcggttagtgttccangcagcagttngctccaccatagttacggttagangtggacacngtgccaatttgnctgacagttaacatgggagcatcacttc

SEQ ID NO: 2058 - DNA, 278 bp, Glycine max
  Clone ID: 700997518H1
cgaaaccgtcgattttcagatatctgtggggataagagaaagagagagtagagctcaacgtaaacgacgtcaacaaaatccacaatccatatctcaagagagattaataaaaagaaaagaggttaaaacaaaacaaattcaatctagggtttccaaatcattcttccctccaaaccaaacacccgcattctttcctcccaagaaagcgggttcaccctttctccattcgtcaaccgcatttcttcaacttcaaggtttatgtctcattggatgattga

SEQ ID NO: 2059 - DNA, 221 bp, Glycine max
  Clone ID: 700997519H1
tgtcatcatcttcagacctggacaggcaaatagagcagttgaagaggtgtgagcctcttaaggagtctgaagtgaaggcgctttgcctcaaagccatggaaatccttgtcgaagagagcaacgttcaaagggtcgacgcccctgtcaccatatgtggtgatattcacggtcagttttatgacatgaaggagttttcaaagtaggaggggattgccccaaaa

SEQ ID NO: 2060 - DNA, 276 bp, Glycine max
  unsure at all n locations
  Clone ID: 700997520H1
aaacaacaatagaggggttgtggtgctctgtgtgctgcaatntccttttnagcttgtgtttgattcatcaaatcatccaaagatnactgtaggggcaggaatanctgttgcagatgggaacttgatggtgttggggaacaaagtgctgagccatgtccatgacaaggttcttgttacccctgcatgtggtggtgctttgctcaatggggcattcattggggttcaatccccatcacaagggtanccgcacantcctccccaatgngccaannnnna

SEQ ID NO: 2061 - DNA, 263 bp, Glycine max
  unsure at all n locations
  Clone ID: 700997521H1
ctttttcaaaattctntctnttatgtaaatcaattattcccccccccggatnaacatttatggaagttacaggnaaataataatgagtcataactaaattcttattactcctctatatataattnagtactttcttttataataaatagctgcagctgaaggactgtgaagatgttgganaaagttgaagaatttaacacggagaggatgatggaggaatttgagagggtgacaaaggatgctganaggattcaaagggaaac

SEQ ID NO: 2062 - DNA, 273 bp, Glycine max
  unsure at all n locations
  Clone ID: 700997522H1
gacagtgagcaaatcatgaggactgagtttgccgcgctgcaaagccagcttgtncctgcttaagcagaagcattcagccctcattgacaccttgcgtcaattagagacagaaaaggttgatctggaggatacagtagttgatgagagccaaagacagtggaatngtgaagaggcttcctcaagattagcacaaganaaatttagtgaaggaactgcaagtnaatctgaagatgacaatgagaganatgatgctgcagaggaagaaacagatga

SEQ ID NO: 2063 - DNA, 271 bp, Glycine max
  unsure at all n locations
  Clone ID: 700997524H1
gaagttaaaagcctnagccttcccnacaacnccaaacngggagacancggnatccanggctgcntccgtctccactgtcggagcngtcaacagagcnctnttgaacctgaatggttctggagctggagcttcagcncccagttcagccttcttngggaccagcttgaagaaggttattgcctcaagggnccccaacagcaaggtttccggtggaagcttcaagattgttgctgtagaagagaagaaagagattgaagagacccagcagacc

SEQ ID NO: 2064 - DNA, 76 bp, Glycine max
  unsure at all n locations
  Clone ID: 700997525H1
gtcaantgtttttctcattagaanaaaattgttttcggcggaatanccaaaanaanaagaanagaaaaacggatta

SEQ ID NO: 2065 - DNA, 270 bp, Glycine max
  unsure at all n locations
  Clone ID: 700997527H1
agagantctctncaccccattcaagtcanagaagaaagaatagagggaatttttnttcttnttnnaaaaaagaaaagaaggaaaagttggtatggaatgggatgagagagaggaagaaccacagctcatggcatatattccnccaacatnacnaccnanangtntcctgatatggagtgagatcatagaacaacacaacnaantccaagttataaagagaactatagctggcanatattgatgcatacataggntaaaaggatcaaaagg

SEQ ID NO: 2066 - DNA, 102 bp, Glycine max
  Clone ID: 700997528H1
ctacaaattaaatgggggataaagaagcaatgagactctaagacttattgattgttcacttggttttatgacatttatagtttatggtttaaaacggttttc

SEQ ID NO: 2067 - DNA, 271 bp, Glycine max
  unsure at all n locations
  Clone ID: 700997529H1
gccgtaaattggatagtagagcatgagaatgatcctgacatagatcagatgcccttggtacctaccaacaccaaaattgaggctcctaaaccttcgcttaccccagaagaattgaaggccaaacagcaggaactaagggagagagctcgtaagaagaaagaagaggaagagaagagaatggagaggnnaagagaaaaggagagaattcgcattggcaaggagttgctggaagcaaagaggattgaagctgacaatgagaggaaacggttgt

SEQ ID NO: 2068 - DNA, 271 bp, Glycine max
  Clone ID: 700997530H1
caacgaggagtacagggccaagtacttgggaaccaagatcgatcccaaccggaggcttcggcaagaccccgagcaaccgatacgcgccacgtgttcggcgacaaactacctgaatcggttgattggaggaaggaaggtgctgttcctccagtcaaagaccaaggaggctgtgggagctgttgggcattctcagcaatcggtgcagtggaaggaataaataagatagtgacaggtgaactgatttcgttatcagaacaagaattggtggatt

SEQ ID NO: 2069 - DNA, 264 bp, Glycine max
  unsure at all n locations
  Clone ID: 700997531H1
gatttggcaccagtggatctccaaggtgaaggatggccagcaccttctcgaagaggagcttcaacttctttgcgaatatgttaaagagatccttattgaggagtcaaatgtgcagcctgtcaacantccagtgacggtttgtggtgatattcatggtcagtttcangatccaangaanctttccaaactgggggnaatttccnggaaaaantcatttttngnggganctttgtgaaccggggttaaaaacnntnantttnccnc

SEQ ID NO: 2070 - DNA, 278 bp, Glycine max
  unsure at all n locations
  Clone ID: 700997533H1
tggacatcattgcagatttccatctcaaggacaaatatcttggcagattggtttcgagatatgatggagtgttgaaagagtcatatgcggaggtgaagaaatacggatatcgctggctatataaaggggatattgaacaaaggaagcacaaatttggggaaattgaagaaaatgtgagctgaagggagaaaagatgatgcaaggtcctcccaggaaaagatagtaaagttgaagcttaggccgtagaatcatcatttcttctctcattttattcanng

SEQ ID NO: 2071 - DNA, 271 bp, Glycine max
  unsure at all n locations
  Clone ID: 700997535H1
ccctggccaatccattgatttctttggtgcactgagggccagagtatatgatgacgaagtgaggaagtggatttctggtgttggtgttgacggcattgggaagaagcttgtgaactcaaaagatggacctccaacctttgagcagcccaagatgactctggagaagctcttgacgtatggtaacatgcttgtccaagaacaagagaatgtcaagagagtccaattggctgacaatacttgaacgaggctgcacttggaaatgctaacgang

SEQ ID NO: 2072 - DNA, 146 bp, Glycine max
  unsure at all n locations
  Clone ID: 700997536H1
aagaaagtgaccatatttcttaagttgtaaatatcgaaccattagcaatgtgatggactttatctgatggctgcattctcttcaaccgtttcanttcacattttgaatgagattttatatgtaacccaataatatnggatggaaat

SEQ ID NO: 2073 - DNA, 270 bp, Glycine max
  unsure at all n locations
  Clone ID: 700997538H1
cagagccttcctctcgccgcccacgccgcccacgccgcccacgccgccgagatcgccgaacaagttttccactgctccgtcgaaatcggnnnnnnnnnnnnnnnnnnnnnnnnnnnnnnnnnnnnnnnnnnnnnnnnattacagccctaccggctccggtgaatctggccggagatacagggctccggcgctggtgtcagactgctgcgtacatcagatgttcgcagccgccggcgtatccggtcggcatggagaaatcgaaatcctccg

SEQ ID NO: 2074 - DNA, 269 bp, Glycine max
  unsure at all n locations
  Clone ID: 700997539H1
ggcttccacagancaaagtgtnggcagacttggaaatggcaaacagaataggatggtgtgctttctcaanaatacagantctaggcactattgcagtgatgtgtcaggtggcatggcaagtatntgtcancttcattccagtaactgcagtctgcanatggnaccaagtatgtgatcctttttccttgatctatgacaggacagaaaaaagtgaganacantctagttncaaaatttatacaaganataatacgatttctcaagtntat

SEQ ID NO: 2075 - DNA, 266 bp, Glycine max
  unsure at all n locations
  Clone ID: 700997540H1
tgagaggcaccatggcgacactggattccgacgtgaccatggttccggccggcgaaccctccaccagcgccggtccttcttcgtccaccaagaagccgaagcgattcgagatcaagaagtggaatgccgtttctctctgggcttgggatattgttgtggataattgcgctatttgcagcaaccanatcatggatctctgtattgagtgccaggccaaccaggctagcgccactagcgaggaatgcactgtagttggggagtttnta

SEQ ID NO: 2076 - DNA, 277 bp, Glycine max
  unsure at all n locations
  Clone ID: 700997541H1
cagcagtacatattcctctctcacatccacgcctcanaagaaactgtagntccatcaccagaaccgtaanagcaatatcccgcgaccatgacccanatnaaagactcccccgaagtcaaggccatcaaagccctcatccaagccttcttcgacgccatnaatggcncgccgatatcgaaggtctcggtacnttagttcggctccagaagccaacntgaccnataanccnanaagnacctcctcgaggaacgtgcttccgaatcganttcntcttact

SEQ ID NO: 2077 - DNA, 266 bp, Glycine max
  unsure at all n locations
  Clone ID: 700997542H1
ggttaaagttaatgtagcatgtgctgctgttggcttgacatcaagttacactccaactccattgttggaatctggtttgcaaaaagacagagggttaattgtggagtattttggaaggatgtcttacgttgctcacaacgttaatcancccccaagagaaagatttgttggagggaaatttntcctntgatatnaaatctcgctctagannggaaaaagnttcctctacaaaagcacaatttgttagtggaaaaacctcaaatang

SEQ ID NO: 2078 - DNA, 225 bp, Glycine max
  unsure at all n locations
  Clone ID: 700997543H1
caaactctctctgactagtgatatctatccatggaggccaagaacttgtggcgcttcctggttctttcaatcggtgtggtactagttttacttgtcacttggctgcccaacaaggaggctctagactgcaacctttactctggatggtgcacctcaaagaaccggttctactcttcagcacatcctantaatccgattaagaaaccatcatttnccacacaacat

SEQ ID NO: 2079 - DNA, 267 bp, Glycine max
  Clone ID: 700997544H1
atcgtgtgcattttggaattgtgccactaaaattctattcatcctatggctgcctcatcttatgctatgcaatcaatccttgcaaaccctatgatccgcatttccagcgggtctagggagaaccattttggtgttcctgcttatcacatgagaaggaatgttggcctgagagttaggtccatggctgaggaagagcaaccaagtcagcctgcgaccccagttacaccaccaccagcagaacccaaaccacagccagtctctactcct

SEQ ID NO: 2080 - DNA, 267 bp, Glycine max
  unsure at all n locations
  Clone ID: 700997545H1
cttttcaganaaataatccttatccagatgttaagtacactttcnntccaatattaatcaaatcactatctatggccctcagtaagtacccctttatgaacagttgcttcaaagaggatgcattggaggtcatcctcaaaggttcacacaatgttggaattgccatggcgacatcacatggtttagttgtgccaaacattaaaaatgttcagtctctttccataatggagataaccaaagagctggcaaggttacaacaattggctt

SEQ ID NO: 2081 - DNA, 265 bp, Glycine max
  unsure at all n locations
  Clone ID: 700997546H1
gcaataagctttgggtggccgcaacaatcaaggctagtaatgaattatagcggggagatacaatttctcgagtttaatggaacggaatgggttaagaaatggtggaagccagaccacaagtncgatatacgtgactattgcgggagtttgccatctgcaacaaaaataaccggattcactgcaagtntttgcctggattcattcccgggcatgaaggagaattcccgctccaagggtgtaaaagaaaatcaacattatcgtgtgt

SEQ ID NO: 2082 - DNA, 265 bp, Glycine max
  unsure at all n locations
  Clone ID: 700997547H1
gnagcaccaaagggtcctcaactgagagacattgatcgtggagcagatattgtggtagccactcctggtcgcttgaatgatattcttganatgagaagaattagtcttaatcaggtttcttacctggtgctagatgaggcagacaggatgctggatatgggttttgaacctcaaattaggaaaattgtgaatgaggtgcccaatcgcaggcaaactctaatgnttactgcaacatggccaanggagttaggaaaatcncacctgt

SEQ ID NO: 2083 - DNA, 267 bp, Glycine max
  unsure at all n locations
  Clone ID: 700997548H1
cttatcttgccgtttctcattctgtcagaggtctgatcgatggcnctttgtagaactgggccgaacccaattccggggagttattcagctcaaaatttgtcgacaaaacttattntacctgctcccctgcgttttaccagacaattctctaatttagtcaggagaaagcgcaagggagtgtgctgctcttcattaaggaatgctgcatctgcatcttctaaggagtcactggaagatgctccaactaccttgtcagtttgcttggag

SEQ ID NO: 2084 - DNA, 274 bp, Glycine max
  unsure at all n locations
  Clone ID: 700997550H1
ctacgcacgccaaacccggttctccaccttccgaatcccactcagacncagttacaccatgctccatgcatcgtcaatgcaagcagcaactggctacatggcacgtcaacaggggcaacaagtctttcttgagggctangattccgacatggtacaccccccctacagaggaggctacaaccaagaacccattcaagctgttggggatggttggacctatgggatgggctttgttcttctcgggatggttcgcgtggacatgtgacgggtacgt

SEQ ID NO: 2085 - DNA, 269 bp, Glycine max
  unsure at all n locations
  Clone ID: 700997551H1
ggcgcccgagattcttgcnaagagaggctacgatggcgccaaggtggatctttggtcgtgcggcgtcgttttgttcgcgctcattgctgnctatttacccttcaatgattacaatccctccgttctgtataggaagatttaccgcggtcaattccggttcccgaggtggatatcanatgatctgagattcctcttancacgacttttggacacgaatcccaagacaaggataaccgncgatgagatctataaggacacgtggttcaatg

SEQ ID NO: 2086 - DNA, 269 bp, Glycine max
  Clone ID: 700997552H1
ggagaagttctactgggcaccaacaagggaagaccgcattggtgtttgcaccggaattttccgcactgatggtattcctgaacaggacattgtcaagcttgttgacaccttccctggccaatccattgatttctttggtgcactgagggccagagtatatgatgatgaagtgaggaagtggatttctggtgttggtgttgacagtgttgggaagaagcttgtgaactcaaaagatggacctccaacctttgagcagcccaagatgactc

SEQ ID NO: 2087 - DNA, 266 bp, Glycine max
  unsure at all n locations
  Clone ID: 700997553H1
agaaaaagttagaggatgctgctaacagtttgaatgagaagcttgctgagaaagaaaacctattggaaattttgagggatgatttaaatctcacacaagataaatngcaaagcactgaaagtnagctccgggctgctgaattgagagagagtgaaataattgagaaacttaaatctctgaagaaaatcttgtcgtaagaggaagagatatagaggagactgctacaagacactcagaacttcaattgttgcacgagtctctgacga

SEQ ID NO: 2088 - DNA, 264 bp, Glycine max
  unsure at all n locations
  Clone ID: 700997554H1
caaatatacttctcgatgtgaatttcaatgcaaaaatatcagattttggcttggcaaaattggggcctctggaggacaatcacatgtaactaccagggtcatgggcacgtatggttatgctgctccagaatacatagcaacaggtcacttgtatgtgaanagtgatgtctacggatttggcgtagtgcttcttgaaatactgacaggcatgcgggcacttgacacaaaacggccaacagggcagcagaacctagttgaatggac

SEQ ID NO: 2089 - DNA, 265 bp, Glycine max
  unsure at all n locations
  Clone ID: 700997555H1
ccggcatgaacaattatcgaangaacgaaacattnatggaagattttggttgnagaaatttnnncnnagatggaacataagatttttggttgacaagtggctcaccgcttttaggngngcncgaatgacattcatagagaatnatangcagggatatngtagcgaanntttgancgagcagcttcggcanattagtgcanactgtatntnanttgagaangnagnaacactcntngacacactcnttgaaaatacacngncctca

SEQ ID NO: 2090 - DNA, 265 bp, Glycine max
  Clone ID: 700997556H1
gcgaattcagcgagagttgcggctgggaatggacggtgacggcgaggagttgacggcgcaggagaccgctttgtatgaccgtcaaattagggtttggggagctgatgctcaaagaagattaagcaaatctcatgtcttagtctatggaatgaaaggaactgtagctgagttttgcaagaatattgttctggctggagtaggtagtctgactttagtagatgaccgggctgccacggaggaaatgctttcctccaactttctcatc

SEQ ID NO: 2091 - DNA, 263 bp, Glycine max
  unsure at all n locations
  Clone ID: 700997557H1
tccggttcangntcagtcatctgaaccggaaaanaagatcatggaccacaggcttcttgaattggagaagcagcttctggaagataacgacgaacgaaggagaagcagatgctgcgtctgngataaccacgagcgagtggtccgagacttatcagaatttaatcagtcccggtcccggttcagaaaccggttttnacgaccacgtcgccgacttcgtcgacgacgtcatccacgtcatcttcttcctccgtagcttcgctgnt

SEQ ID NO: 2092 - DNA, 254 bp, Glycine max
  unsure at all n locations
  Clone ID: 700997558H1
agacagtgcttccaagattatttggagtttgaaaattccaccaagagcaactncgtttgcttggagaatcttcaagaacagattatctaccaaggataatctaaggaggagacatgtggagttgccttcttataattgtcctctctgcgatatggaagaggaatctgttggtcatgtcatgtattcatgtataaaaactaggaatctttggtgggagattttgagttgggtcaatagagtgggncctttcccac

SEQ ID NO: 2093 - DNA, 267 bp, Glycine max
  Clone ID: 700997559H1
cacaaacccgtccctcacactctccaaaccctagcggcactacacactagttctatcgctatctccccaagatgttcgagcgccgatcccgagcacagagaagaggaggaggcacccgccgttggcgacgacgaggacaccggagctcacgtccgctccaatcgtcaagcttcgaggaggttgctgtcaccaccggcgaggaggacgaagatgcaatcctggatctcaaatcgaagctttaccggttcgacaaggacgggaaccagt

SEQ ID NO: 2094 - DNA, 177 bp, Glycine max
  unsure at all n locations
  Clone ID: 700997561H1
tgaaattcgaacaatgattttntcattttctttttaatacttttttggtttagactccctaagaatctgtcgatatttccaattaaatcttcttgttcctgtgaaggtcctataaaaaaaagggctatgccctttctttactcagaagggccttattccaagttccacacaacatac

SEQ ID NO: 2095 - DNA, 263 bp, Glycine max
  unsure at all n locations
  Clone ID: 700997562H1
gggccaaccacaacatatgttaaacaaggaacaacctccaaaacataacatcctacgccaaacaaaactttgactccttcagatctataccctnnnnnnnnnnnnnnntctattntcaaattctacatcatgggcacggaggttctacggccacaagattgtttcacccaacgcatcggtgttccaccgcctggcttttcccggcgaagaacctatggtacccaccacaacaacaaaaacaataacgtnaacaattatttcag

SEQ ID NO: 2096 - DNA, 187 bp, Glycine max
  unsure at all n locations
  Clone ID: 700997566H1
ttnaatntccatgncaaacaaacaganttgtgccatnttgaaattttctncaatcagaacttcttttgtatttcttgaggttttgaacagaattnagttgagtatttaggcattattgtcagagattgttgaaagttttacatgttgcttcgtggcttggaaagaattggaatacttgatagaaaaa

SEQ ID NO: 2097 - DNA, 269 bp, Glycine max
  unsure at all n locations
  Clone ID: 700997568H1
ttttggaagaacaagggcatgtgaganaaaacatactaatcaaattaaacagcgaagaagagtttcaaatttattgcttccgaatctccagcttcgtcagggaaggaaaacagcataacgtgtggtctcgggggaaccaaaaactgngaaattctgangccactaggccttttaaaaaccaaactaangaagacggtttagacagagagnacttcaagctcaagaanntggaaagtggggttgnggctgtgaacaacannatcancnnc

SEQ ID NO: 2098 - DNA, 268 bp, Glycine max
  unsure at all n locations
  Clone ID: 700997569H1
gaaaactttttacttggtcaaccagctacagcgcaaganaagaaactgtttcttgttgaccttggattagcaacaaaatggagagacacctccagtggacagcatgtggactatgatcaacgtcgcgatatgtttagaggaactgttcganatgctagtgttcatgctcatttggggagaactgctagtagaagagatgatcttgaatcgcttgcatacancactagtcttccncccataagggcccatnnncatggccagggttacc

SEQ ID NO: 2099 - DNA, 243 bp, Glycine max
  Clone ID: 700997570H1
cgcgccttctgtctcaatctcaatccaccagaaatggcaacaatagttagccaccaccaccgcctattctccgccgccacgcgcttcaattccactggcagagactcgcggcggcaaaggagcggcgcaaactcggtccggtgcgctgacgtaagcacggtcacgagcgagaatcagcgagtgacggtgagtaacaggagcgattcgctggagatatgccgcgtgctgaacggaatgtggcag

SEQ ID NO: 2100 - DNA, 264 bp, Glycine max
  unsure at all n locations
  Clone ID: 700997571H1
gcagaatcatcaacctatcgtgcagataataattgatggaaganacactaatgctgtagatgaagacggatttcaactgccaagagtcgtatacatggcacgcgaaaaacgacacaactaccctcaccacttcaaagctggagcggttaatgcattgatacgagtgtcttccgagataagcaacgccccttcattctcaacttggattgtgatatgtactccaataatgcaaatacaattcaagaagtattatgcttcttcttg

SEQ ID NO: 2101 - DNA, 266 bp, Glycine max
  unsure at all n locations
  Clone ID: 700997572H1
gacaagactagtaccattctggnaangtnatcaatataacaaagctgattttccagaagaatanactgangccaaattntttntcatcaagtcttacagcgaggatgatatccataagagnannaagnataatgtgtggnctagtacacaaaanggcaacaagaagcttgatgctgcatatcaggaggnacagcagaaacctgggcggcacccctgtttttctctnttnctcagnaagtatctgtgaatgatggcagtcattgctt

SEQ ID NO: 2102 - DNA, 262 bp, Glycine max
  unsure at all n locations
  Clone ID: 700997574H1
ctcaacgaacacagtaccccatagaaaccgaagaaagtgccattcttgttccaccgccaaaagattcacnncnntatcctctaatgcgagacccatttgaataaatccccaaatatagaaaaaggggttttacatttttccatgatcaataaatagcgnnnnnnnnnnnnnnnnnnnnnnnnnnnnnnnnnnnnngatatgctgaggttgtggaaatggtacnagaattgcttggcggtgcacccggttaagacacaggtct

SEQ ID NO: 2103 - DNA, 260 bp, Glycine max
  unsure at all n locations
  Clone ID: 700997575H1
cacagttgctattgctgcggaggttttcaagaaagccggtacatatgatccaaagcgactactgggtgttacaacccttgatgttgtgagggcaaatacttttgtggcagagatacttggagttgatccaagagaggttgatgttccagtggttggaggtcatgctggagtcacaattttgcctcttttgtcacaggttaagcctcccagtagcttcactgcagaanaaactgaatacctgacaaatcgcatccaaaatg

SEQ ID NO: 2104 - DNA, 260 bp, Glycine max
  Clone ID: 700997576H1
aaaatccagtctctcagcagagggatttgatgttgtttatgacataaatggacgcgaggcagatgaagttgaacccatactggatgctctgcctaatctggagcagtttatttactgctcttctgccggtgtctatctcaaatctgatctattacctcacgcagagactgatgcagttgatcctaagagcagacacaagggaaagcttgagacagagagtttgctacaagcaaggggtgttaattggacatctataaggc

SEQ ID NO: 2105 - DNA, 260 bp, Glycine max
  unsure at all n locations
  Clone ID: 700997578H1
gcnaatttgggtgtgcctggggagaatgctactgcttcaagatatccacctgattttctggatagcaatcattcaacttctcttccatcttttgggggatcaagaatatctgctcactataatccttatgcatcaacctttgagaaaccactaactttcaaattcagttcaagtatttttagacaggaaaatgaaataatccanggnaacaattangcttcttcaatattgaaccanactcctgtgaatggggaagatgg

SEQ ID NO: 2106 - DNA, 261 bp, Glycine max
  unsure at all n locations
  Clone ID: 700997579H1
gagctccgagtaaagacccttgacattgttgagtttggccaaaatgccggatgttcataccctcgttaatgattttctgaatcagcttaaaaaacgtaaaattgaaggttctcaggccacagcaaagctcacagcagagttgctccggtctgtgatttcacagcagcgagtgccacacacgaaccaagctacaatctgattaatgcantgagggntttgggggancancttanggcggctaatcctatggagccnacctgt

SEQ ID NO: 2107 - DNA, 262 bp, Glycine max
  Clone ID: 700997580H1
ttacgtgttccccggttacattttccaaatgctaacctccctctcttggatttgctggttatatcccaacaatgttctggcccaacaacttgggtcgggcctaaacgggcttggcataggagcaattgggcttgactggtccaccatttcgtcctacctcggaagcccactcgcaagcccatggtttgccactgccaatgtcgcggtgggtttcgtgtttgtgatgtacgttctgactccgctgtgctattggctcgacttg

SEQ ID NO: 2108 - DNA, 267 bp, Glycine max
  unsure at all n locations
  Clone ID: 700997582H1
aggtctaaggggactcaaaaacattttgcggatgcatatcaaaagggccaatagctcagagtgggagcagattgcaattcctacaagtgtaagggcaatagntgctttgaatcttcatagctatggaagtggaagaaatccanggggtaaaccaaaaccagaatatttggaaaanagangctttnttgaagctgatgttgccgatgggctcttgggaagtatttggtttaaaacaaggatggcacgcatcgtttgtcatggtggact

SEQ ID NO: 2109 - DNA, 261 bp, Glycine max
  unsure at all n locations
  Clone ID: 700997583H1
tcgagggtgaganatttgtttgagaaggcgaaggggaaggcgccgtgcattgttttcattgatganattnacgccgttgggaggcagagaggggcggggctcggaggtgggaatnacgagagggaacagactattaaccagcttctgacggagatggatggcttttctggcaattctggtgttattgttttggctgccactaacagaccggatgttcttgattcggcgttgttgangctggccggttcgacaggcaagtta

SEQ ID NO: 2110 - DNA, 261 bp, Glycine max
  unsure at all n locations
  Clone ID: 700997585H1
agtntagttatctactcttttctgcatgtttgtnctctcaacgactcctccgcgaaanagtattattcaatattttggttgggttgaatcccggggttgaagcgttgcagacatcacggctattctaagagtgtctcgctccctcattcatgtccgatctgtacgacggaggacgggtagttgcgtaactgccgttaacccttcgccgcacggtgggcgtggtgctttgccttctgaaggtggtagcccttcagacttgct

SEQ ID NO: 2111 - DNA, 261 bp, Glycine max
  unsure at all n locations
  Clone ID: 700997586H1
caagtatgactggagaggagtgcttccaagggaaanatatntatcaaagctcttgaaggatctggaaatagcattgaaggattctactgccaagtggaagattgttgtggggcatcatcctgtaagaagcataggacatcacggtgacaccaaagagctcataagacagctcctgccaattcttgaggtcattcatttaggccaatatanatttnattgtatactatataaganaancctagtgataaaattaaacttgca

SEQ ID NO: 2112 - DNA, 261 bp, Glycine max
  unsure at all n locations
  Clone ID: 700997587H1
acgtgacttactacatctaanttcatttgcctcnttnagtagccatggttttccaaacaaacaataatcctcactttatcttgttnccctnaatggctcaaggccatatcatccccatganggacatagcaagactattggctcaccgtggtgtgattgtnacaatatncaccacccccaaaaaatgcatcacgtttnaattctgtnctttctcgtgctanntcatcaggcctccaaatccgcctagnacaatccactttc

SEQ ID NO: 2113 - DNA, 231 bp, Glycine max
  unsure at all n locations
  Clone ID: 700997588H1
acagaactctggaggacggagaatttgcnttcancatgttcacgtgccagcaactangatccccttgatgggtgccaaatttcctgcnagtgcgctgagagaggagnaagttcaagattaccacgaaacaganaggcnaaaantgtacaagactctggatgcctanctttctanctgtcaagggatggggggcgtgcagggaaactacaaattgaaatggattgcatagaa

SEQ ID NO: 2114 - DNA, 266 bp, Glycine max
  unsure at all n locations
  Clone ID: 700997589H1
tccggttcatntncgcacancctgcccaannnnngngatcagaacaaaagtgagtatattgagattgaggagctgcgtacgccttatctgatgatcttgacacaaacagtgaagaagttatcagtgcaattatgcatgatgtggacacagacaaggatggaaggataagttacgacgaatttgctanaatgatgaaggctggcacagattggagaaaagcatcaaggcagtattccgcgagagaggtttgccagtctgagcctaac

SEQ ID NO: 2115 - DNA, 256 bp, Glycine max
  unsure at all n locations
  Clone ID: 700997590H1
attttttaatccgtatacaatcacatggtttatganctttcattgcttctcgatcctcgatagaatctctattttaacaacattgaggagtgtcgaaaaaagtgttaaaatgctagtgtttcttgtgcatagaaataaccaaaaattaagagacaagaggtataaatggaaacattcttgtgtcaagttgctgtaagacaacctagcngcattnacagatttaatgggnatngcttgactcncccctaatagngtc

SEQ ID NO: 2116 - DNA, 258 bp, Glycine max
  Clone ID: 700997591H1
caactggacaagcaactctgcgtctctttttccatgattgctttgttgagggctgtgatgcctccgtgataatctcctcgccaaatggggacacagagaaggatgccgaggaaaatatttcactgccaggagatgggtttgacactgtgatcaaggcaaagcaagcagtggaagcttcgtgccctggagtggtttcctgtgcagacattttggcacttgctaccagagacgttataggcttgcttggaggtccttcat

SEQ ID NO: 2117 - DNA, 259 bp, Glycine max
  unsure at all n locations
  Clone ID: 700997592H1
cagccttgaacttgaacnatcgtgtcttcttggctttctctgttcaggatcaacatggatattgtatcacgagctttgctatttccgttggcnanacttgtgctcanatnaagcacaccttgctcaggtgcttttgggaagagtggaactaatgngaaaacagctatntttctgtcccccatctttgaacttggaccaggatcggtagccaataaanatgattatgacgctgagtttccaagaggtcatatagcactta

SEQ ID NO: 2118 - DNA, 261 bp, Glycine max
  unsure at all n locations
  Clone ID: 700997593H1
tcatttaacaacaatcaatctnttccctctttctcttaattcccaatattcttcacatncacttctcttctgccatgtgaacaaacatcaaacanagcaagcacaaaacaaaatcgcagttccatccanagcactgcctcaatncttcccccaaaaaaatgagccagtgtgttcccagtcgggatgtcgaagaaacccancaccctcaagagtctcacttcgctccaactctaattcaactgcccctgatgttcccatgtt

SEQ ID NO: 2119 - DNA, 259 bp, Glycine max
  unsure at all n locations
  Clone ID: 700997594H1
tggaatgcaagtnanagttgtagttgtacaacaagagaactggtggtgcaactgcaatgcaaggcatcggcggttgaattaatgaatcagttccanntgaatacgtaactagccaganattcccctgtanaancctctantnactannnnnnnnnnnnnnnnnnnntctcccacttcaaaattcatgtctccctcttccctccacgcgctcctcatcatnctcttcctaggttccgcacacgcgctcaagncccccttc

SEQ ID NO: 2120 - DNA, 193 bp, Glycine max
  unsure at all n locations
  Clone ID: 700997595H1
ggtcgaagctcaccgttctgaantccccgangggncgcgagatcgaggcccgtacgagtnngccgcgagctgggtcgcggtgagttcgggataacctacctctgtacggacaangagacgggggangagtgggcntgcaagtcgatctcgaagaagaagcttcngacggcgatagacatcgacgactgangag

SEQ ID NO: 2121 - DNA, 261 bp, Glycine max
  unsure at all n locations
  Clone ID: 700997596H1
gcgaagactgataaaagtgaggacacatcaaaggaccggacctcaaagaagagtaagaagaaggaaaaggaacatgtggaaaagcctccgagcaagtcactaattaagaaaaggcttttggttttacctctggaaacatccatcattgctattatcttgcttgtgttgctaggtgccttctatgtggttcacagtgtatgggcagcagcagaagcatatncagccccttctattgttctaacatcgcatncacatgatgga

SEQ ID NO: 2122 - DNA, 252 bp, Glycine max
  unsure at all n locations
  Clone ID: 700997601H1
gagagagacaagaaacacaacggtcacaggtgtggaaatgttccagaagattctagacgaagccctcgccggggacaacgtggggctgttgctgagaggggttcaaaagacggacatccagagagggatggtgttggcgaactggcacgattacgccgcacaccaagttctcagcgattgtgnatgttttgaagaagggaaganggtgggagacattcacctttcnttgcaggtatagggcctcagttttac

SEQ ID NO: 2123 - DNA, 249 bp, Glycine max
  Clone ID: 700997602H1
gaagtgtggagcggaaaatggaagggaggccttgaaattgtcagagccctcatcaaacctttaacttaattgcatgcaactcatcatacctatatcgttttcttcatttgccaactttgacaagtggattaattgtttgtggtttaattattattattactttgtatttggcgttgagtaccactgtatgatatatagatgataatatgtgtccatggctctggcactagctgagacctgggattatcc

SEQ ID NO: 2124 - DNA, 226 bp, Glycine max
  unsure at all n locations
  Clone ID: 700997604H1
gtcatcacggncactncatgananatctgctgcaagatcatgacggggaactgcgacgatcctgncagcaccacaagtggtcaacattcgcaaaggaggcaggccaagaattcaactggcggagnngcggcgaaagtcgcagganngtgaccaagggatcaagggtggctttgtcggaatgagatcgggcagggccagtacacatggatgcatgcaccacgcnaaa

SEQ ID NO: 2125 - DNA, 243 bp, Glycine max
  unsure at all n locations
  Clone ID: 700997605H1
ctagttataaattatgatctcccaacacagcccgagaactatctccatcgtattggtcgtagtggaaggtttggtaggaaaggtgttgccattaactttgtcacaagggatgatgaaaaaatgctgtttgacatccagaagttttacaatgtgattattgaggagctgccttcaaatgttgctgaactcctttgatgagtttttttgnttccatcatattagaggaaagttggtttctgaggt

SEQ ID NO: 2126 - DNA, 237 bp, Glycine max
  unsure at all n locations
  Clone ID: 700997607H1
attgttacacattcaacaaatgatgtgaatcccttcttgttgccgtagcctcacacactcacttcttccgttgtaactaactttacttttccttccaaacggcttctaacaaactctcgccgcgatgttggatctcaacctcaacgccgnttctgcctccgacgcgcaaatggagagctccggcagcttcaattcctccgtcgtcaatgccgcgacaccgacgatctgctcctacgg

SEQ ID NO: 2127 - DNA, 243 bp, Glycine max
  unsure at all n locations
  Clone ID: 700997608H1
acgaagtcgcacgactacattcccatcccccagcgncagaccgacctcccattcctcctcgccgtcgaagacttttctnccatcaccggccgtgggaccgtcgccaccggccgcgtagagcgtggcaccgtcaaagtagggganactgttgaccttgtaggattgagagagacaagaaacacaacggtcacaggtgtggaaatgttccagaagattctagacgaagccctncgccggggacaa

SEQ ID NO: 2128 - DNA, 244 bp, Glycine max
  unsure at all n locations
  Clone ID: 700997609H1
aattgcttggggaaacaaacgagggacaaatagaaagaaggaaaaaagccttcaccatttgttgttctgcttcctgagaccgtgttccatggcatgctctccttctacaactcttgtgtcaaattctcttctccttaacaaaacgactagtcagtgtcggcttcatgttcatcccaccctttcacttaatcaaaaccttccaatatnttctaataacctactcaaacttctcnacaattcaatt

SEQ ID NO: 2129 - DNA, 242 bp, Glycine max
  unsure at all n locations
  Clone ID: 700997610H1
ttnttatgtatgatgncattgcattcaatggggaaaacccaagcgcctggagtcatcattaacaaaccagatggaggtgatgtttatgaaggagttccaaaggattacaccggcgaagatgttactgttggtaacttttttgctgctttacttggaaacaagtcggcacttactggtggcagtgggaaggttgtggacagtggacctgatgatcatatatttgtatactatactgaccatgg

SEQ ID NO: 2130 - DNA, 218 bp, Glycine max
  unsure at all n locations
  Clone ID: 700997611H1
gaagcatgtgggttccatgcttttgcctctggaggaaatgtaaaacatcaccctgctgctgagtttttgttttttgatctccgngcctgactttttgagatgtggtttctgagcctcagaacaacaacacactgcagcagagcatgtctagnttagttctctgtttcatgtnagcatatccatncnnnnnattgattcctgtttcnttcaatgcttcc

SEQ ID NO: 2131 - DNA, 235 bp, Glycine max
  unsure at all n locations
  Clone ID: 700997612H1
gccgttttacaanacaaaaccaccacctcaacgcgtgcgtaccgttctgcatagattttcgctntggtcgaanaatactggctcggacattgcagtttaaggaaacctggcatgggagttgtnactgtttctagctcagcttgctaaggannccnttnagcattgaatncaagggttgatcagtcatcagcaggagaaaatnctgctcacccctagaaaacagcggaagaaanac

SEQ ID NO: 2132 - DNA, 248 bp, Glycine max
  unsure at all n locations
  Clone ID: 700997613H1
catgaactgtngcgccctgcggcaanacctgtgccaaaggcccggcaaactcactggcaacatgcagcgccggcgtctgtggcttctcatgcaatgagttctacggtgtttcgactgacaagacggcgctgtgtctatctgctgaccagcttcttgaactgtggatctgttggcaacgtctgcacgccntccgaccagtggacagtctgcatgcaacaacggtgaatgcgagtatgtntgccngangg

SEQ ID NO: 2133 - DNA, 173 bp, Glycine max
  unsure at all n locations
  Clone ID: 700997615H1
cgttacatatatgtcacctgagaggattcgaactgaaagctattcttatccagctgatatttggagcctggtctgcactttttgagtggggaaggagattcccgtaatgcaagaggcttcactagtgaaccgagtctactaataaaattccgacgctgtngtgtaaagcattg

SEQ ID NO: 2134 - DNA, 248 bp, Glycine max
  unsure at all n locations
  Clone ID: 700997616H1
tagatatctcccacccgaccttcaggtttgcttgatttctgctacccttcctcatgaaatactggagatgacaaacaaattcatgacagatccagtaaggatccttgtaaaacgtgatgaattgacattggagggcatcaaacaattttttgttgccgttgaaagggaggaatggaagtttgataccctgtgtgatcttatgataaccncactaacatcnagngttatatctgtaaacactnagcaaa

SEQ ID NO: 2135 - DNA, 253 bp, Glycine max
  unsure at all n locations
  Clone ID: 700997617H1
acttcccctatggctcgtcactccttgctcttagccctcctcctcttcgccgnngtnnccaccgccgcgatggcggtggcgcgtccgaacgccgacgacatcctgatccgtcaggtggtgccagatgttggcgaangaagaggaggacaacctgntgaacgccgagcaccactttcggcgaggttcaangcnacnttcgncaagacctaagggcancaangaggagcacgatncatcgnttnggggtttcaat

SEQ ID NO: 2136 - DNA, 246 bp, Glycine max
  unsure at all n locations
  Clone ID: 700997618H1
ccattgtgtaaggcacatggtggggggaagcgctgccttttcaatggaggtggcatttgcccaaaaagtgtgcatggaggcactaacttctgtgttgctcatggtggtggaaagangtgtgctgttgcaggttgcaccaagagtgcacgtggccgtactgactgttgtgtcaggcatggtggggggaagcgatgcnagtatgnaagcngtgggaagatgcnccaagggagcacagattctgcaaag

SEQ ID NO: 2137 - DNA, 109 bp, Glycine max
  unsure at all n locations
  Clone ID: 700997620H1
tcntctncaaaatntggctctaagacttngttcttnaantnnttttattaatcagaaggaaaggagagtccttaaaattntgntgntatccctgagagagtnngttttt

SEQ ID NO: 2138 - DNA, 245 bp, Glycine max
  unsure at all n locations
  Clone ID: 700997621H1
gngtntatggtcanaacttcattatgtttcgtgtaataatctggaaatgcaagaagcttatcttgtccaatctcgnaaacntgttacgagaattgtatttgcncagtccagaggaagctcgccaattgagaaggaaagctctctctcgtattgaatggctggcaaaaagcngatgtgcctaccatagcacagattgangagttcncatttcnatgcagnggntgatgaatgctnctgattccaat

SEQ ID NO: 2139 - DNA, 227 bp, Glycine max
  unsure at all n locations
  Clone ID: 700997623H1
gatcnacacagaaganttgttttcatattgttgggggttnggcttttacggtcacctgcgcacattgacaaaggcaaganacaggtattacaagttaataaatgaccttagggcctcttcattgttgnttgaagaccctgaatgcattcgaatgcatgatgttgtgtgtgacgtggctaaatcaattgcatctaggtttcttccgacttatgtggtccaaggtacag

SEQ ID NO: 2140 - DNA, 240 bp, Glycine max
  unsure at all n locations
  Clone ID: 700997625H1
cttgaacttgaantatcgtgtctncntgggctttctctgttcangatcaacanggattntgtatcacgagctttgcaatttccgttggctatacttgngctcatatnantnacaccttgntcaggtgcttttgggaagantgnaactaatgtganaacagctattnnccgtncccnaagtttgaacttggancagggatcggtaggccagtanaatatgattatgangcgatttnccaga

SEQ ID NO: 2141 - DNA, 241 bp, Glycine max
  Clone ID: 700997626H1
ccggccatgttgagatacttaagagggctagggagcttggtgactttcttctagttggtatccactccagatgagacagtgagtgagcatagaggaaatcactatccaattatgcatctgcatgagcgtagccttagtgtgttagcttgccgttatgttgatgaagttattattggttcaccttgggaaattacaaatgacatgatcaccactttcaatatctcagtagttgtgcatggta

SEQ ID NO: 2142 - DNA, 242 bp, Glycine max
  unsure at all n locations
  Clone ID: 700997627H1
gcttctgaattatcgtgttttgatcagaatctgaggagaaaatcacataatttcgaatttgagttttcgtgtaganaaaggaagagaagaaaatggaatcggaggatttggtcaaacaggaattggaggaattgcagaaacaattggggaagaagcaaaagtttgaagcttctgtttcgtctcttaaaaccctctccaacgcacttncccatcagcttccccggcgcttcgtaaatctttta

SEQ ID NO: 2143 - DNA, 194 bp, Glycine max
  unsure at all n locations
  Clone ID: 700997628H1
gatcttgcaaaanaanaaaancccaatggnancgancgctccnantcnangcgaananttcgtgtacatggcgaactggcggacaggccgaccgtngaggagtggtggntcatgnaggttcgcctccgccacacnagactgcctgagacnaactcttcgtgtaagantatgngtgcggtctggatacntcatna

SEQ ID NO: 2144 - DNA, 249 bp, Glycine max
  unsure at all n locations
  Clone ID: 700997629H1
gnagaagaggtcgagtttcacagcagcaatggtgtacgtcaaggctcagaaatcaaaagcctacttcaagagatatcaagtcaagttcaagagaagaagagagggaaaaaccgattaccgtggccaggattcggttgattaatcaggacaagaacaaatataacactccgaaataccgatttgttgttcgctttagcaacaaggacattgttgcacaaataatntctgctagcattgctggcgatattg

SEQ ID NO: 2145 - DNA, 251 bp, Glycine max
  unsure at all n locations
  Clone ID: 700997630H1
attttacaatctatnactatgtaccanttggaaacagtttncatattcaacccatgatgaagatggataacacgatgaggaagagggagagaagcaaagccatggagaaagagaggcttcaagtgatggacttgagtggcatgtcttggagtttcttcccaaaccttcgcttgtttagccaccattttgcaagttngacctatcnaataacaatctccangnaatttcgggatncttaacgggtangattc

SEQ ID NO: 2146 - DNA, 204 bp, Glycine max
  unsure at all n locations
  Clone ID: 700997632H1
ccgataagattaaagattcaacaatggcctctgcttctgctacntcttctcaagtcatctcctgttcttgacaagtgcgagtgggtcaaggcagacccttcgccaacctctcgtgagatgtaaccttctcagcatcagttcancatcaagtgttctatgtgagagtcncaaacgcaaacagtgctcacggggtgtatttgcgng

SEQ ID NO: 2147 - DNA, 247 bp, Glycine max
  unsure at all n locations
  Clone ID: 700997634H1
aaggcttatcacatcacaatttgtgcattgcctcgtgtcctttttcttctttgcttgccaaaaatcttacacacacaggtatctaacnaaatgggttctcaccagcaagaaccatggctattggagaatgggaaaccgagggtgttgaccaaggagaataggcatggccgtttctgcacacagcatgttcctccacgtctttgcgcaagaagtctagccgaactcttgttctccnagtttcatgtgc

SEQ ID NO: 2148 - DNA, 245 bp, Glycine max
  unsure at all n locations
  Clone ID: 700997635H1
aaaatgcccacttttnttcttccaacgctcntcctcntncctcatagccttcgccacctctgtctccggccgccgtganctngtnggagantttctccggctgccctccgaaactgataacnacgacaacttcaagggcacccggtgggccgtnctnccttcgncggttccaatggttactggaancacagacatcagggntgatgtttgtcacgcctatcaaatattgangnaaggtggtctga

SEQ ID NO: 2149 - DNA, 242 bp, Glycine max
  unsure at all n locations
  Clone ID: 700997636H1
gcatggggcgctatcctantttctgtnacattaantcttntgtntggtganattataccccaatcagtttgttctncggtatggtncggctattggtcgcatcagtggctccctttntccgtgtgcttgtatgcatatgttttccagttgcctatccaatnngtaagttcatnanattttttgctgggccatcgacatgaagccctattccgtagagcngagntgnanaacactngtnaatt

SEQ ID NO: 2150 - DNA, 136 bp, Glycine max
  unsure at all n locations
  Clone ID: 700997637H1
ggagaattgttgagatgctaatgtggaanngnatngttgagaagntgagattggtaangaaatggatgcanctgatgtagctgggnttantacataantttgatgtagtaanaatattgtggttnatnngtnntga

SEQ ID NO: 2151 - DNA, 238 bp, Glycine max
  unsure at all n locations
  Clone ID: 700997638H1
ctggnactggaatctcttgatgagtatcttggcaaactaaatcgtgnagcaaaccaagaacctcatgtgccatcgtatgtcgagaatcgtagtgaagaaaatttagcaccaaaacgatctcttaccaaagacattgaaagatcaaactttaggaaacgaaatgcttatgtggatataggaagactaaaaggtgtgcatggtccaaggtctgctatagatttcacagcagcatgttgaa

SEQ ID NO: 2152 - DNA, 235 bp, Glycine max
  unsure at all n locations
  Clone ID: 700997639H1
gtttgtntgttcgtttgcnacggttctctcactttctgggtgcaacattttttctttctgtttctccgagattccatcgcaaagagtcaanaatgtctaaagaagttattgctactcaatcacctactccttttgagtatgagatcttggatagtgatgctgaagtccttagaactgttagagcctcatccaattgtgctaatccatggattgaacctgaaagttgaaacttaga

SEQ ID NO: 2153 - DNA, 236 bp, Glycine max
  Clone ID: 700997640H1
aggtgatggtgtcaaaaattgtgaagacattgacgaatgcaaagagaagaaagcttgtccagtgccctgaatgtagctgcaagaatacttggggaagctatgactgcacttgcagtggggatcttttgtatataagggaccacgacacttgcataagtaaaactgccagtcaggagggaagatcagcttgggctgctttttgggttattttaattggctagttgtggctgctgcag

SEQ ID NO: 2154 - DNA, 236 bp, Glycine max
  unsure at all n locations
  Clone ID: 700997641H1
gggctctgaagtggaaactccaagggccactgggaagagagggttctctgagaccgttgatctgaagcttaatcttcagaccaaggaagatctgaatgagaatctgaagaatgtctcaaaggagaagactctccttaaagatcctgctaagccgccggtaaggctcaagtggttggttggccaccagtgagatcatacaggaagaacatgatgggcagtacagaaggttagcnatg

SEQ ID NO: 2155 - DNA, 241 bp, Glycine max
  unsure at all n locations
  Clone ID: 700997645H1
tgatctctgtaacattactgttaacaagaacgctgtttttggtgatagcagtgccttggcccctggtggagtgcgaattggtgcccctgccatgacttctaggggtttggttganaaagactttgagcagattggtgagttccttcaccgtgctgtgactctcacactggagatccagaaaggagcatggcaaacttctcaagggatttcaacaagggctcgtcaacaacaaggtaatgaa

SEQ ID NO: 2156 - DNA, 247 bp, Glycine max
  unsure at all n locations
  Clone ID: 700997647H1
ggcgaagactgataaaagtgaggacacatcaaaggaccggacctcaaagaagagtaagaagaaggaaaaggaacatgtggaaaagcctccgagcaagtcactaattaagaaaaggcttttggttttacctctggaaacatccatcattgctattatctgcttgtnttgctaggtgccttctatgtggttcacagtgtatggggcagcaacagaagcntnnttcagccccttcnnatggtctaacatc

SEQ ID NO: 2157 - DNA, 250 bp, Glycine max
  unsure at all n locations
  Clone ID: 700997650H1
gangagttatcttgcttcntgatgcagagntacagacttcangtgcaaaaggntgctgcatgtngtnacttatncatcattgtctgcagtttctgataaagnttacagtgatcaggganngcctgctcttttccgagntcctctggggcagttttaccatttgngntccatgngaattggagctngagaagagcattccgacttggaagccttcaagtcctnncctgggaaaagnatagaacagnccanc

SEQ ID NO: 2158 - DNA, 198 bp, Glycine max
  unsure at all n locations
  Clone ID: 700997653H1
cttagatgagtgcttgttggaggtggatgggtaacttgatangcgatganaaaggcgaaacccaaattcctgataaggactctcagcagagtttcggaggatggggttcccatcctcaaaggcataaatcttgagatcccagagggtgtgatcgtgggagtgataggccccagtggtagcggcaagtcaacgttcttg

SEQ ID NO: 2159 - DNA, 237 bp, Glycine max
  Clone ID: 700997654H1
caaggcagaaagcaagctcatcctagagttttaaaaatggcagcagcctcctccatggctctctcttccccatccttggctggcaaggccgtgaagctgggcccatcagcccccgaagtcgggagggtcagcatgaggaagaccgtcaccaagcaggcctcctccggaagcccatggtacggcccagaccgcgtcaagtacttgggcccattctctggcgagcccccgtcctacctt

SEQ ID NO: 2160 - DNA, 235 bp, Glycine max
  unsure at all n locations
  Clone ID: 700997655H1
gccctagcagatgaagctgaacctgccctagcagatgcaactgaaccagagccagttgatcttgatgacaagcttctgggatgaatgttacgagtgcacaaaggcatggatgcagtaaacccctagtcanactagccaaccagcgtctgatggtntaaccgccactggaacatcaaagaagcagaattttgaagtggaataagtgaagcgctagttcatcttagtgaggcaggag

SEQ ID NO: 2161 - DNA, 219 bp, Glycine max
  unsure at all n locations
  Clone ID: 700997656H1
ctggacaaatgctcacttccgcanacatcaagttacaacttcntccaattaatgaaggaacnccggataggacttgaaaaggatgggcataatccttatttagaactnacacttagaggtcgaaaganaatatgttcaatactaaaacaccttggaaagaagtggggaagttcaagtatagccaaaggggagcttatgctcnntcccatataatataat

SEQ ID NO: 2162 - DNA, 237 bp, Glycine max
  unsure at all n locations
  Clone ID: 700997657H1
gagantccaaaagtctctcaaaaaataaccatgatgatgcatgtcccttgcttctcagtgttcctagcagcagcaatgcaaggaacactggcggttgaatacagtgtcaccaacaacgccctctcaacccctggtggtgttngtttccgtgntgcaataggggacgaatacgccaaacaaacacttgactcagccacccaattcacctggggggtcttccagcaaaacgctcctgct

SEQ ID NO: 2163 - DNA, 237 bp, Glycine max
  unsure at all n locations
  Clone ID: 700997658H1
tcaaatctgtatgagtacgcaaagcagaattctgggcctttgagatccgtcgtaggaacggttganaacactgtaaccaccatnctcggtcctgtctgcaacannttcaaggacgtccctgatgatgtccttgtttttgttgacaaaaaggtggatgaagcttcccacaagttcgatgagcacgctcctccttttgctaaacacattgcggatcaagccaagggtgtgattcagaaa

SEQ ID NO: 2164 - DNA, 240 bp, Glycine max
  unsure at all n locations
  Clone ID: 700997659H1
caataattgantttgaatcatttgggtctctagacacaaacactaccccctctttccccctcctcaacattgttatgatcccttgttggtaaccattccatttgcacttgtctttgcaaccaaaaaacaagctctatgaccaacgaaatgaaagangcaagtgccttaggagctagaacagcacgagcatgcgagagtgcctaaaagtaagagcacggtggtattgtgcagctgatgatg

SEQ ID NO: 2165 - DNA, 238 bp, Glycine max
  unsure at all n locations
  Clone ID: 700997660H1
catgatttccgaaaacttgcctctgcaatctatcttcaagtgagcactattagtcaggccctaatatttgtgactcggtcacggggttggtcttatgttgaacgtcctggtattttgcttgtnacagctttcgtgattgctcagctaattgccactttgattgcggtatatgccaantggagtttgtgccatcgaaggcataggttggggatgggctggagtgatatggtatacaaca

SEQ ID NO: 2166 - DNA, 246 bp, Glycine max
  unsure at all n locations
  Clone ID: 700997662H1
cgaaccttggctgattacaacatccaanaagaatctaccctccacttggtgctccgtctgcgcggtggtatggcaaatctttgtgaagacccttactgggaagaccattactttggaggtagagagctcagacacaattgacaatgtgaaggcnaagntccaagacaaggagggtatcccaccagaccaacagaggctcatttttgctgggcaaacagttgnagatggccgnaccttggctgatta

SEQ ID NO: 2167 - DNA, 256 bp, Glycine max
  unsure at all n locations
  Clone ID: 700997663H1
tttatttcgttcctctattcgctacgtcgtcgttaaggntcgtcntcggatnngtggnacttgactgcnagcgnggtgaaattccgacgctccgagtggcnccggattgcgatagnggtgncgaatatgaangttnntcgttnaagactctcaaagggcaatcanttcggaaatcgangtganggacgcaaagacacggtttcngnaanttgaggaaaattntcgnaantgttcaggntgaagatgnctatgctgt

SEQ ID NO: 2168 - DNA, 151 bp, Glycine max
  unsure at all n locations
  Clone ID: 700997665H1
cncgancatgngtgnaatcctagtgntaannagaacgccgttttctggtagatancagtgcctttgcncctgngngacagtgcgaattggtgccccttgaatgacctttctagnnggttnggttgaacaaagactttgannagnttncgtg

SEQ ID NO: 2169 - DNA, 239 bp, Glycine max
  unsure at all n locations
  Clone ID: 700997666H1
ccngaacccgtcggctgtcggtggactgctcgagctgcttccgcggcgagaggggtcntcgcgtgccggtcgggggacggnttgggaacgangcccttcngggcctcttcccngggcgtcgaacagtcaactcagaactggtacggacaaggggaatccgactgtttaattanaacaaagcattncnatgtcctgcggatgnttgnnngaatgtgatttctgcccagtgctctgnatgt

SEQ ID NO: 2170 - DNA, 239 bp, Glycine max
  unsure at all n locations
  Clone ID: 700997667H1
cnagaagcacaacggcggtctagtcgatagagcagtcgatgccgtaggtatcaagctgtcggaacttctggaaataaagaagaacccaatatcgtccttgccaacttgatcagagttgttcgacctactggaggtcttggtattccaggactctacgtcccttctganccaggagcgcccgattccgcngctgcccaaggaaatttggtcattccnttcggaaaactctttgagaaggg

SEQ ID NO: 2171 - DNA, 238 bp, Glycine max
  unsure at all n locations
  Clone ID: 700997669H1
aaatggattacactaggntacagaagtaatctgttatcgttattnccttncancctgcccggtgganccaaacgaagaagnngttccgttttccctctggcttttccaagttttcatcgantcaaccatgnntattcttacataactagggttangagttagggcgtcttatcgttttcgctncgttanttacaacaacggncaacatggttgttctntcggcnttcacctcccaggc

SEQ ID NO: 2172 - DNA, 232 bp, Glycine max
  unsure at all n locations
  Clone ID: 700997670H1
cttctataaggccagtctatatctatggacccttgaactacaacccngttgaagagtggttcttccatagattgaaagccggacgcccaattcctatccccagctcaggactacagataacccaacttggtcatgttaaggatttggcgacagttttatccaagttcttggtaatgagaaggccagcaaggaagtattcaacatctcgggagagaagtatgtcacgtttgac

SEQ ID NO: 2173 - DNA, 234 bp, Glycine max
  unsure at all n locations
  Clone ID: 700997672H1
agaaatcagtgcttagttcggtggatattattgggcttggaactggacctgaattggagaagaaacttaagtatgcagctgacatttcttctggaatcattctcggaagggagcttgtgaattctccggctaatgtgctcacgccaggggtattggctgaagaggcatcaaagattgcttcaacatataatgntgtttttactgccaaaatatnncnccccngagcagtgtaaa

SEQ ID NO: 2174 - DNA, 236 bp, Glycine max
  unsure at all n locations
  Clone ID: 700997673H1
cactgtttcaatttcattttcaattttnacattatctatatgtctggnctgaattttctaacaaccagaattttccatgaaggtaactagantttggtctttaccattaancatttcataactctcanccaatgaccatatgnnaaaaaaatactatggctacctgtttcagcttttctgaaaagatgaagcagaactgaagtttgtagtganattnttttgagtactgaacaatt

SEQ ID NO: 2175 - DNA, 240 bp, Glycine max
  unsure at all n locations
  Clone ID: 700997675H1
cagcgttcttgttctcactntggcaaanaanaaaagaaagagggaaagacattcgagaatcanttaacacantccaaatatanttaattanttaattaattatnagataaataacatagagaaaggaggagatgagtgaggctgcagctacgacgacttcgtcttccatgatgcgcaattaccctctcatttccgccancgttgnnttcgcattcgccacaattcngcaagtttttcacc

SEQ ID NO: 2176 - DNA, 233 bp, Glycine max
  unsure at all n locations
  Clone ID: 700997677H1
tgccaagttaaatacttcatcaaaggttactgatcatgagacgaacaanacaatntctgagcaccttgattccaacaaaacaaagggangaaaaccggttgaccgttcctcatgtggttccaacacgggcctctagcagcgatgtggaaactgatgcactagagaagggtgagaaagggaaggaagagcctgaaattacctgatgctaaccaattagccattgagtttagtaa

SEQ ID NO: 2177 - DNA, 244 bp, Glycine max
  unsure at all n locations
  Clone ID: 700997681H1
ggcnctagtatccgcacaagctctacttcccactgctttnctccaganaacttgagcaaatatggnacgntattggggagaccnaagtggagaaagatcgaatgctgatggaattngagagggaatgcttagaagtatacaggagaaaggttgatgacngcngttaacaccaaagtacgctttcatccaaacagttgccgccaaggaagcngagcttggcaacactaatcgcngcgctggcaac

SEQ ID NO: 2178 - DNA, 242 bp, Glycine max
  unsure at all n locations
  Clone ID: 700997682H1
ctggaganaatatagggacaaacaacatggatttgttggtatctctatttacacgtttggnatttttcctcaaacaaatacagaaaaagacanggtagcatctcaacnagcccgtgatttttntgttggttggattatggaacccctgcaatatggagactatcccatttccatgaagacaaatgcaggtgnaagaattccggccttcaanaaatcatgantctaaaacaagttnagggttc

SEQ ID NO: 2179 - DNA, 236 bp, Glycine max
  unsure at all n locations
  Clone ID: 700997683H1
aagtggaaaagaggttaaatatgaccccctcatggtgatggaaaatcttacctacaatagaaatattacacgccagtatgatcttaaaggtgctctttatgcccggtacaattctgctgccgatggtgctggagatgttcttttggatcagaactttgtgaatgacatgaattcttncccattatatgtcagccataaagcaaaacgtgttcttcaacgtgctgtttggaatgaca

SEQ ID NO: 2180 - DNA, 235 bp, Glycine max
  unsure at all n locations
  Clone ID: 700997684H1
cgccaagttgcacacatgatgaaatacaaatatatccccttcaacttggggaagcagaagtatagcggtaagangtcttctgcaagtagcagtggctctcgtgcagactgaaacttgattcttatgatttgaagatctactaagttaggttttgtgaacattcaggctagttaattttcccccttttttaatganaganattgtattctgggcattatgacngcaaatctgcnct

SEQ ID NO: 2181 - DNA, 229 bp, Glycine max
  unsure at all n locations
  Clone ID: 700997686H1
agaaaaggagactgacctcttgtgttcttttctgcactgggtaaaatacactgggagtattgcattntcttcctcttctgtttaatttcttaactagcatgttttttatgttaaattttgttcttggctaaggctagagtatctgtatttatcaanaacaaatcagccattgagangatgccactgtattttctacattacctatagttgtttctttcttaaaatnata

SEQ ID NO: 2182 - DNA, 237 bp, Glycine max
  unsure at all n locations
  Clone ID: 700997687H1
agcagagagaaganaaggtgtagacaaacacaatctctaatggcactgcaggatgtgggcttcttccactgccaatgcactcaaagtctcttctacctccagacctcatctcttgcatcctttttctttctccagatgcttgtcttccgtcttggatggacttaagtatggcagattcacacgaatgggtcaagcacgaaggcttcagtcgccaccattggtatcactgancatgcc

SEQ ID NO: 2183 - DNA, 234 bp, Glycine max
  unsure at all n locations
  Clone ID: 700997688H1
cttcggtcattttattttgtataataaaaganagataataaanagantaatcatattaaatattaantaganaanatggcccgatcatttatcaaaggccaatcttcggtagaaganaaggttcctttggaanacttatttctatttcagnatnccgggtctctntctttcntttcaanaaatttatagnatttcgnttttcaaatganagaaaagtgtggggataaatatnaa

SEQ ID NO: 2184 - DNA, 237 bp, Glycine max
  unsure at all n locations
  Clone ID: 700997689H1
ggccagacaccaatgtgaatgcattaactagagaccacaaaacagctcttgacattgctgaagatcttcccctctccgaagaggcatcagatataaaggactgtctttctcgatatggagcacttagagctaacgagctcaaccaaccaagggacgaantgaggaaaactgttanttcaaatcaagaaagntgttcacacccaacttgnacaaaccaagagaaccaacaaaaatgtt

SEQ ID NO: 2185 - DNA, 237 bp, Glycine max
  unsure at all n locations
  Clone ID: 700997690H1
atttcatttgtngtntgttacgttaacgtccntgcntccgattntttncanttcttactttnttncctagtttctnttttncntntcacacaacacaagagagcaacgaataaaacgcantgcacgtgaatcgcaattattagggtttacacancctcgcagatggtttgagattgcgaattcgacgacgatgatggaaggagcgagcaatggagggatgtgtaccacgaggtgcag

SEQ ID NO: 2186 - DNA, 240 bp, Glycine max
  unsure at all n locations
  Clone ID: 700997691H1
gggaacataaaataaacatattcattnttttgaggctctaataaatttaccatcatcatccaccaattcctgggcatggccgtgctacctttctcatactcaagatctcccactttatctctaccatcatctcaacaaataaggcctaaaacaaaaccaaattccnagaccaacacatgctctctaatccactgctgccacagccaaacagaaccaatcgaactaaatggccaagccaga

SEQ ID NO: 2187 - DNA, 239 bp, Glycine max
  unsure at all n locations
  Clone ID: 700997692H1
aggattcgctgacagctatatgctgttgaatcctgaagacgctcatttcttcgatcttgttcatgtgctgtattcccgtaacttgggaaaccgaaaatttgtggacagcaatgctgagggatcttatgagggaagcttccgccaaagatggcttatattcgtctctgtgggtgctccagaagcttctgttgctcatcgctaagccactttcgntctttgggctcttgcgttgagttcnt

SEQ ID NO: 2188 - DNA, 233 bp, Glycine max
  unsure at all n locations
  Clone ID: 700997693H1
gtanctcgtgcttatctcctgcaccttgtctgttgcactcttttttctaacaagagtgtaacaaatgttcatgtggtgcatctggaggcttttcgcgacctgggtcagagtgggggctatgcctggggagctgccgcgctggttcatatgtatgaccagttagatgaagctctaggaccacaacatgacaaattgggggtactcatttattacagtgtggatctatgagcact

SEQ ID NO: 2189 - DNA, 243 bp, Glycine max
  unsure at all n locations
  Clone ID: 700997695H1
gaaaagaaagtatgctgccttggtttaacctcattactggcactcccagctgatcaattgccagcagaggctttaggtcgggtgttccgggccaatcttgatcttctagttgcctacaaggaacaagttgcagaagctgcaaaagaggaggaagctgaagatgatgntgatatggatggttttcaaaccgatgntgaagatgaagatggcagtgggtttgacaaggaaatnggagttgatgcc

SEQ ID NO: 2190 - DNA, 252 bp, Glycine max
  unsure at all n locations
  Clone ID: 700997696H1
cggattcgttccgtttcctttcgatttgaggagcatggaccttcagaacactgtgaaggaagccctaaatgcactgtaccatcaccccgatgatgcggtgcgcatgcaannngatcgctatntccaggatttccagcgaactttgggatgcgtggcaggtggctgataatttcactttcatggatcccagtagcaatcnaganacttttganatttggtcccagaccttngagagccaggtacnaagggant

SEQ ID NO: 2191 - DNA, 285 bp, Glycine max
  unsure at all n locations
  Clone ID: 700997701H1
cggtccagctttccaacaatgcagctcactaccttcatttccgtcgcctcggccgtngtcgcaaaccgcttctgctgacagcttgaggagcgccgtcaccctgaacaaggactgcgacacgaaccagccccacgctcgcatcgtcaaccgttgcgactacgatgtcaatctttggtccgtctacaagggcgacggttgcccttcatccggcatggtcactttgaagaccggcgagagctacgccgagaactacgctaccgctgaggacggcaagactggngtgtt

SEQ ID NO: 2192 - DNA, 283 bp, Glycine max
  unsure at all n locations
  Clone ID: 700997702H1
tgcaattgaagttgaagtcttgcccttctctcttcaactccaaacacaagacatcatcatccatgggctgcctccgtctgccactgtcggagctgtcaacagagctcttttgaacctgaatgggtctggacctggggtttcagctcccagttcatccttctttgggagcagcttgaagaaggttattggctcaagggtccccaacacaaagatttcctcnggaagcttcaagattgttgctgtagaagagaagaaagagattgaagagacccagcagaccgac

SEQ ID NO: 2193 - DNA, 279 bp, Glycine max
  Clone ID: 700997703H1
cggggatgtcagtgataagccttgtgtcactggctaatgctggcttctcagagattagagggaagcatttgaactattcaaagttttggaatgctaatccctctgcagaaaagcaggtcaagttgtctagcaaagctggcatgcttttgctgtacactcctgcttttcttgctggccttgcatccttctggatctttcctcatcaaggcctcagatccaccctccttcagtctgcagttaccctgcatttcttcaagagggtctttgaggttgtgttta

SEQ ID NO: 2194 - DNA, 282 bp, Glycine max
  unsure at all n locations
  Clone ID: 700997704H1
atccgatccaccngattagtatgtggggaganggcttcaaaagtaatggaaatttncagtggcagcnatgcctctanattgatgagacagacatgaagtttgatagtcagtcagaggntgcttctcatggtatactgggagagcctaataagtatgaccaagangctaacaaacctactgataagatacaangacgtcttgcacaaaatcgagaggctgctcgtaagagtcggttgaggnaaaaggcctatgtgcagcagttagaatcaagtcgtttgaagt

SEQ ID NO: 2195 - DNA, 278 bp, Glycine max
  unsure at all n locations
  Clone ID: 700997705H1
ccgcttcctcgacccctctctacaatcatcctcaccagacacaattctctctagacgttttctatcagaagacggtgatggtgatgttcctgcacctgctcctgcacctaataactcacagaagaagaaatccaatnnnnnnnnnnnnnnnnnnnnnnnnnnnnnnnnnnnnnnacctaaccataccaataagcacaagcacagtccnagaaaactcttggggtggattctggggtttgtagcaggggcactggggggaaccttatcaggattcgtgt

SEQ ID NO: 2196 - DNA, 281 bp, Glycine max
  Clone ID: 700997706H1
gttcgtacatcaacaccactttccgcgtgctcgcccgttgaagtttgcccctcccactcccgagccggaagtccgcctagctcctcgcgtcattctattcggcgtccagacctagttgaacaggtgccttgcctgcagcctgtcctgtatccgagggtacctatcgtttggtgtaagtctgcgcaaacaaatgtcgctccgtcgcccccaattaactctgcccttcagatccgccattccctccacgtctgtcacgtactacgcgccgacactattcctgc

SEQ ID NO: 2197 - DNA, 278 bp, Glycine max
  Clone ID: 700997707H1
tccgatccaccagattagtatgtggggagaaggcttcaaaagtaatggaaatttaagtgcagccatgcctctaattgatgagacagacatgaagtttgatagtcagtcagaggatgcttctcatggtatactgggagagcctaataagtatgaccaagaagctaacaaacctactgataagatacaaagacgtcttgcacaaaatcgagaggctgctcgtaagagtcggttgaggaaaaaggcctatgtgcagcagttagaatcaagtcgtttgaagt

SEQ ID NO: 2198 - DNA, 277 bp, Glycine max
  unsure at all n locations
  Clone ID: 700997708H1
aggagaggctgtgcttggaggtggagcggctcgggctcagcgccgtcattatggggagccgcggcttcgnggcgtcgaagcgagccgcgaaggggaggctcgggagtgttagtgattactgcgttcatcattgcgtgtgtcccgttgtggttntgcgttaccccgaggagaacgataacggtaaaggtgacggtaacggtgctggtggtcttgttgtgcaggttggggaaccggtggagcttccgcctgtgccggaggaagagcatgaggtgtatca

SEQ ID NO: 2199 - DNA, 278 bp, Glycine max
  Clone ID: 700997709H1
caatgatcaccattatcatttgggatacttcctttatggaattgcggtccttgcaaagattgatcctgagtggggacaaaaatacaatccacaagtttattcacttgtcacagattttatgaacttgggccaaaaatataactctcgttatccacgtctaaggtgttttgacctttacaacttacactcttgggcttcaggagtgactgaattcgcagatggaaggaatcaagaaagtacaagtgaggctgtgaatgcgtactattcagcggcattgg

SEQ ID NO: 2200 - DNA, 281 bp, Glycine max
  Clone ID: 700997710H1
ccggaaagacaatcacccttgaggtggagagctctgacaccattgacaatgttaaggctaagattcaggacaaagagggtatcccaccagaccaacagaggctcatctttgctggaaagcagctagaagatggccgaaccttggctgattacaacatccaaaaagaatctaccctgccacttggttctccgccttcgtggtgggatgcaaatctttgttcaagacttctcactggaaagaccatcacccttgaggtggagagctctgacactattgacaat

SEQ ID NO: 2201 - DNA, 274 bp, Glycine max
  Clone ID: 700997714H1
gggaaggtggtggtgaacactacgcgcggtcctttggacattgagctgtggccgaaagaggctccgaaggccgcgaggaacttcgttcagctctgcctcgaaaactattacgacaacaccatcttccaccgcatcatcaaggacttcctcgtccaaagcggcgaccccaccggcaccggcaccggtggtgaaagcatttatggtggtgtttttgctgatgagtttcattcacgtctgaaattcaagcacagaggaatagttgcaatggccaatg

SEQ ID NO: 2202 - DNA, 275 bp, Glycine max
  unsure at all n locations
  Clone ID: 700997715H1
ctttctcctaaaacatctccagtgggttcttcttcttctattacaacaacgtcntcccaagaccatgancatggccatggncacgatcctgctcctgttcacggtcttcgcggtttcatcggccctagacatgtcgataatctcgtacgacaacgcccacgccgccacgtcgcgcagggacggagctgatgtccatgtacgagcagtggctagtaaagcacggcaaggtgtacaacgcgctcggagagaaggagaagaggttccagatcttcaag

SEQ ID NO: 2203 - DNA, 280 bp, Glycine max
  unsure at all n locations
  Clone ID: 700997716H1
attattgttggcgatgatgactcataaatcacaatcatgatgagtagttgaaatcgaaaagagaaaaaaagttcnnnnnnnnnnnnnnnnnnnnnnncgctataccagcagcagcattttcttttccatttccaacatcaacagcgagcgaaaggatcatcgatcatcatgtcgttttcgtttttcaaggctttgaggcctaaaacgccgcaagaggtggccaagtccatcaaggnnagtctcatgggcccncgntaccaaaaaccgttgttgaagttna

SEQ ID NO: 2204 - DNA, 281 bp, Glycine max
  unsure at all n locations
  Clone ID: 700997717H1
ccggcatgaaaaattatcgaatgaacgaaacattgatggaagattttggttggngaaattttttgtagatggaacataagatttttggttgacaagtggctcaccgcttttaggtgtgcacgaatgacattcatagagaattatatgcagggatatggtagcgaacgcttgagcgagcagcttcggcaaattagtgcatactgtatttnatttgagaaatgctagcaacactcttagacacactcttttaaatacactttctcatattggttgaaatttat

SEQ ID NO: 2205 - DNA, 279 bp, Glycine max
  unsure at all n locations
  Clone ID: 700997718H1
aacaccatatttttttgacatcatattttcattcaatctctgaatgaaatattataagaattgacaaaaccacccttaattattcataggatgggacttctcactacatgaaaggccttgttctcctgctgtgctacnntgttattggggcatgcttcttcgtacaaagaacaccctttaatagtaagtaaaatatatcaaatttttccaatggttacataaatagtcaaaatctatgatgccattataaatttgtaattcatgcctaaaatttgatct

SEQ ID NO: 2206 - DNA, 279 bp, Glycine max
  unsure at all n locations
  Clone ID: 700997719H1
ctgttatgtgctggtcgatttcgnttttccggtttggatatggattcggaggatttccgatccattctggagagcgcgggcgtggacgtttgggccctcatggacgcggccatcgcggtggcctccgccgaccacgctcacgagttgaagcgccggagagatggaatcgttgagcgcctttacgcggccagttcaccgccgccgctgtgtcggaactgcgacgccggcgacgncgggagncatcaggacgcagagcagtccctccgcggaggaggaaaa

SEQ ID NO: 2207 - DNA, 279 bp, Glycine max
  unsure at all n locations
  Clone ID: 700997720H1
ttcacctcacaacttcatcaaaccaaaaaacacaacaaaaganagacaganagaaacaaagagttccttgctttgtagtaagatatatcatcaaaaatggttttntcttggactagaagaaacgttttccgccgtgcaaagaaggagaaggaacaaagtcaactattagaagttgaggttgtgattcccaaccactttcgctgtccggtgagtttggagctgatgacagatccggtgactttatcaaccggcattacctacgaccgtgtgagcatcgag

SEQ ID NO: 2208 - DNA, 277 bp, Glycine max
  Clone ID: 700997721H1
aaagaaagtggctagtgcctaaaaatgcttgatttgatgacttgatgagtctgtaggtttggctagactatttttatttgattggaaatgtgttacttggtgataatggttatccatcagtttttaagtgaaatcaatggggtaaagtgtaatttttctttataattaaataacaataatagtggtaatggtaatacaatattgatggcactctgctctaccttccaaacattttatagagaagacatggtttctgattttcaagttttgttccccc

SEQ ID NO: 2209 - DNA, 279 bp, Glycine max
  Clone ID: 700997722H1
cggcgcggcacccacacacacagttcgtcggaatgggaagggtgattcgcgctcagcgtaagggtgctgggtcggtgttcaagtctcacactcaccaccgcaagggtccggcgaggttccgcagcctcgacttcggcgagcgcaacggctacctcaagggcgtcgtcaccgacatcatccacgaccccggtcgcggcgcccctctcgccaaggtggcattccgccaccccttccgctacaagaagcaaacggagctcttcgtcgccgccgagggcctct

SEQ ID NO: 2210 - DNA, 279 bp, Glycine max
  unsure at all n locations
  Clone ID: 700997723H1
cnttcgttcaattatttctccccttttcttaaaatcgaattgaatcgnatccttcacaagtcaagagttagcacacccaaaagaacgcgtttcagctggccacactgttgatttggctgacacatagtaaagaatcatattaatgtcgtcaagaacattgaggagaagactctatcatggggatgttgatggcaaaaggcaggagcatttggagacttcgggattggattctttgagtgagcccttgctggcagacgatgattatattgagaataagaa

SEQ ID NO: 2211 - DNA, 278 bp, Glycine max
  Clone ID: 700997724H1
cttcaatcctttcgttattctcttattcatccttctcttctgaataatccagatctctttctgcccttttctccgtcacgcttttcgtgaccggatctgtatggatttgatccagatctacacgccgatggtggttttggccgggtctttcatagatctggtgcgtagaggctcagatctacggtaccgaggtacaacagagaatcgatgacaagaacgcagatccgacggtagatccagccgattccgcttgttcgatcgctacagacccctgtatc

SEQ ID NO: 2212 - DNA, 281 bp, Glycine max
  unsure at all n locations
  Clone ID: 700997725H1
ggtagctcaaaatgttacatacctagcttcaccaatgaattatgggaaagttctgcattcaatgccccaaaaacagagaatgaagatgaaattcatgttttccacttcaaatattttggaatctcaggaagcagatttcagctttcaaaatctgggtttgactcaccatttgagtctacctagctcttctactaagatgtcnncccatagaaaagtttcttcagattcaaggttctgttccttgtaaaattcgagccaaaagaggctttgccactcaccca

SEQ ID NO: 2213 - DNA, 278 bp, Glycine max
  unsure at all n locations
  Clone ID: 700997727H1
aattttggnngcacgcagttttatttgaactgcatgcagagaatcatggatcctgttccgcgtgacgggtgttgcttcatgtacacaggtacctgtagcttccctagtgggnaaaacaattggactctacttctcagcggaatggtgcgtcccatgcgccaagttcactcccaagctgatttccgtttacgagaagataaagcacgagctagccgaaaagggagaggaggacttcgaagttgtgctaatatccagcgaccgcgaccaagcatcctttg

SEQ ID NO: 2214 - DNA, 273 bp, Glycine max
  unsure at all n locations
  Clone ID: 700997729H1
aggaatctgcttgtctagggacgngaaaacgggtcanaactattccgtgtgttgatgacactgaagggattgataataacatgagtgatgatcagaaaaatgacaggagtattctttcaaaaactccacggtttttgaataatttacagaaactagagtcagcatnctttttgacacgatgcaaatcagcctattcctcagggaaacttgcggttcaacattcacctattggtactgatgaaaggacagtgtcaataaagtagcattaaaaga

SEQ ID NO: 2215 - DNA, 253 bp, Glycine max
  unsure at all n locations
  Clone ID: 700997730H1
gaagtttccagatatggttcatgctcttaaacccaatcccaagaaccacatccaggagaattggaggatccttgacttcttctctcactttccagaaagcctcacatgttcacctttttatttgatgatttgggtgttccacaagattacaggctaggatggttttggagttaacacatacacatgatcaacaaggctgggaaagagtgtatgtgaattcatggagacatagtggataatgcatngagagagc

SEQ ID NO: 2216 - DNA, 276 bp, Glycine max
  Clone ID: 700997731H1
gaggagttgtaaattaagagcatggctgcacaagctcttgtatcatcatcttctcttaccttctcagcggaggctgcaagacaaagtcttggaccaagatcactccaatctccatttggcttctccagaaaagcctcctttcttgttaaggcagctgctaccccccctgtcaagcaaggatcagacagacctttgtggtttgcatcaaagcaaagtctttcttacttggatggcagccttccgggtgactatggatttgaccctctgggactttca

SEQ ID NO: 2217 - DNA, 279 bp, Glycine max
  Clone ID: 700997732H1
agcaacttagaacacaagtgaactcaaagtggaacaacccaagcttgtttcacagctcaacaacaatggcttctatctcatggcatcacccaccaccccatcacttccaagctcaataatgccttctcttcaccccacgtctctgcctcaaacttggcctcacggtttctgggcaccagaaaaagagttgggttgcatagcctcacctctagaataattggaccctctaatggctccaaagccacatgctggttcaggttcggcaagaacggtgttgat

SEQ ID NO: 2218 - DNA, 281 bp, Glycine max
  Clone ID: 700997733H1
gaaacttcaaaatgcatatgagattctaatggattcgttgaagcgaaaagcttatgatgatgagctaaggagagaggagattttgagtgtatttcgtagatttcatgatgcttctcgtaagaatggtaggcatggattctttccttcaggatttgcacgatctgatgcagatggcaaggatccatttggtgattcaaggcgaatagcctgcaaaagatgtggctggctttccagtctgggatacacaccaagaaaacaaaagtctcgggcaagatggtgcc

SEQ ID NO: 2219 - DNA, 276 bp, Glycine max
  unsure at all n locations
  Clone ID: 700997734H1
gttatttctaaggaaattacttgttcaactcatttattctccaatgagatcttggaggagcttgagcctgctgagctatcagcaccattgttaagtgggcctcctgcacctttaccaatgaagaagccgcttatcaggttgaacttcacctccttaggcaaagctgctgacaaaagtgcttaagctgcaactagctgatttatgtaaaattgncatttctagttccttgtttatttatgtaataattatgatgcagtaaataaacctgagctagaa

SEQ ID NO: 2220 - DNA, 276 bp, Glycine max
  unsure at all n locations
  Clone ID: 700997735H1
ggaaagggaagagcaacgtattaagctttccttatagtaccctcttattggcttttcttcaaagcagtttcccttttacaggtataatgtacctgtttctgttgctggatgaccttgcatgagaagaaagataagggagctgaaatttttnatatttctactgcattgttaattctccacaagcctgtgtgttaacctatatgagcttcaagactttgggagaaacactatccngtagaaatatctagtgcttntnttctttttaattctaattgt

SEQ ID NO: 2221 - DNA, 274 bp, Glycine max
  unsure at all n locations
  Clone ID: 700997736H1
ggggataatcctaccgaggctgatctttctgcaaatgccatgctagatgagtatgcngcactcgctgatgatgatatttacaagtatatatcttttgattctcctcagattcaagagagtgaaaactttattcccaaccaaggatcacctttcacccagcagaatgtggagggagaaaccgctgatagagctgtggttagtaatgagggttcttcagtgcagaatacacaggaggcaatgcttgcatcaggaagtacaaatccacttgttaagc

SEQ ID NO: 2222 - DNA, 245 bp, Glycine max
  unsure at all n locations
  Clone ID: 700997737H1
tcgttcattgctttgtagtaagatcagatcatcaaaaatggttttgtcttggtcaagaaggaacgttttccgccgtgccaagaaggagaagtcacaaactcaattggaagtggaggttgtgattcccaaccactttcactgcccggtgagtctggagctgatgacagacccagtgactttatcaaccggcatcacctacgaccgtgtgagcattgagaagtggatcgagggagggaacanaacct

SEQ ID NO: 2223 - DNA, 276 bp, Glycine max
  unsure at all n locations
  Clone ID: 700997739H1
cgatcagagaaagaggggagatggaagttgaagggtcatcgaagaagatgatagcgactcaggaggagatggtggaggccagggttcctctggcctacagggaccagtgcgcccacttgctcatccctctcaacaagtgcaggcaggccgagttctacctcccatggaagtgccaggaccagcgtcactcctacgaaaagtgccagtacgagctcgttatggagagaatgcnccagatgcaaaagatccgcgagcaccaacaaaaccccaacgcca

SEQ ID NO: 2224 - DNA, 276 bp, Glycine max
  unsure at all n locations
  Clone ID: 700997740H1
cctcatcctccaattcccacacccactcgttcnacantnccantaagctagcaganttncatcgagaaattttgtanttnnttggcatattatcctgctganaatatattagatggctatngcacctnttggnaatacatcagcnactcaatgggggattcatcntcagattttcgcagggtcaactgggttgggaaagattgcatcatccaggaacaatgctacaagcaggataaggtttatggctgccccatgttcgagctttttttctcgaga

SEQ ID NO: 2225 - DNA, 275 bp, Glycine max
  Clone ID: 700997741H1
cagaagatcgatctggtagaaacgatgaaggaactatgggcacaaatggggtcactaatggccactattgtgttcatgtacacaatctttgagcgcttcttccctccacacttgcgtgaaaaacttcaagcctatactcaaaaactcaccaaccatttcaacccttacatccaaataagcttccctgagttctcaggggaacgactgaagaagagtgaagcatacacagccatccaaacctacctgagtgcaaatcatcccagagagccaaaagg

SEQ ID NO: 2226 - DNA, 242 bp, Glycine max
  unsure at all n locations
  Clone ID: 700997742H1
agcacatgagangactgttcacactgatgtcttgatgggcttgcnaaaaaatgtacaacttgcncggtcaagttctgtaagtngtggtcagggccttattttnggaaacaagantatgaataagttgttggagaaagaaaatgatcaaagtggcagttttcttaaaaagcncacatgagaagttgtccntgagtattacatgctgnagctnatccgtctcttggattgggtgcaactgtcna

SEQ ID NO: 2227 - DNA, 274 bp, Glycine max
  Clone ID: 700997744H1
gtccgaagctgctacgacgagggaaagccgtacggccgagacgttgaccatggactaccaccgaggtgccggcgttgaggttagaattgctagaatctttaacacctacgggcctagaatgtgcttagatgatggccgtgttgttagtaacttcgttgctcaggcactaaggaaggagcctttgaccgtttatggagatgggaaacagacaagaagtttccaatatgtctctgatttggtggagggtctaatccgccttatggaaggagaacac

SEQ ID NO: 2228 - DNA, 272 bp, Glycine max
  unsure at all n locations
  Clone ID: 700997745H1
aagaatcagagaatggcaactatgactggtgtgagcctttcatgccccagggttttcttcaacgcatcagcctcaccgcaaaacgcgcatgctgtaaagttctcacttccacccagccaagcagtncgaccgggtagtatcaagttgggtcgcgtgatgaggatccgacccgttcgcgctgcgcctgagcgcatatcggagaaggtggaggagagcataaagaacgcgcaggaggcgtgcgccggcgatccgacgagcggcgagtgcgtggc

SEQ ID NO: 2229 - DNA, 276 bp, Glycine max
  unsure at all n locations
  Clone ID: 700997746H1
ctcatctgcttcccctagcaagcttcttcttacttctctccgcttcttatgctccagattgctcggggctcnagcacaaccgttgactagtcctcaagcttaanctctcatattcttcaggagtctantgctaaagagattaatgaaaatcccgaggcaggatgggaggctgctataaatcctcgtttctccaattatacagttgaacaatttaagcgccttcttggagtcaaaccaatgcctaagaaggaacttagaagtacacctgctatatct

SEQ ID NO: 2230 - DNA, 272 bp, Glycine max
  unsure at all n locations
  Clone ID: 700997747H1
gccaattaagggtgattggnatggtgctggtgctcacacaaactacagcaccaagtccatgagagaagatggtggctatgaagtgatcaaagcagcaattgacaagttggggaagaagcacaaggagcacattgctncttatggagaaggcaacgaacgtcgtttgacaggacgccacgaaaccgctgacatcaacaccttcttatggggagttgcaaaccgtggagcttctgttagggttgggagagacacagagaaagcagggaagggat

SEQ ID NO: 2231 - DNA, 279 bp, Glycine max
  unsure at all n locations
  Clone ID: 700997749H1
caaaattnactgccatggaagcggaggaggctgaggagtgtacctctaccactgcaagatgcttcttccgtggtctgctgcagctgtgtcagatgcagatgcaaaggttgaatttgatttaaatgaagggctcaatgcagatgatgagaaatgcggtgagttcaacagcagtgcacctgctggtcgtttggtcagtcctgtgccatttcctgcttcatctatgtcttgtggnattcctgctcctgtcactgtggctgctgctgcaaaggggtgctttgt

SEQ ID NO: 2232 - DNA, 277 bp, Glycine max
  Clone ID: 700997750H1
agagttttaaaaatggcagcagcctcctccatggctctctcttccccatccttggctggcaaggccgtgaagctgggcccatcagcccccgaagtcgggagggtcagcatgaggaagaccgtcaccaagcaggcctcctccggaagcccatggtacggcccagaccgcgtcaagtacttgggcccattctctggcgagcccccgtcctacctcactggcgagttcccaggtgactacggctgggacactgctgggctttcggccgacccagaaacct

SEQ ID NO: 2233 - DNA, 84 bp, Glycine max
  unsure at all n locations
  Clone ID: 700997751H1
cntncactcaaagttgaagngggagacantgctantagnagtactaantcagcgtgcaagaatcagnggntaatcanaagagtt

SEQ ID NO: 2234 - DNA, 274 bp, Glycine max
  unsure at all n locations
  Clone ID: 700997752H1
gtgttttcatgctgactaggaatgtaagcctatgcatactatatgtctcacattttgagcactggtacttggattgtaaattatactccttatttctgtggttggaatcatctctgttgtaacaggttcacatttgtaattggttttctcctgttgctgactggcgccgcgctgaatgatcaacgcggtgaagagagtgtnncctttggctactactactgctatgttgtgaaacctggagtgttcgcggggggtgcgattttatcggttgcaa

SEQ ID NO: 2235 - DNA, 276 bp, Glycine max
  Clone ID: 700997754H1
cgagttactgagctttatgtgtatgacaaattcaatagggtccctgcaaataaggtggaggcaggagatatatgtgcagtatgtggaattactgatattcagatcggggagacaattgctgataaagtatctgggaaaccactaccttcaatcaaggtggaagaaccaacagtgaaaatgtctttctccataaacacttcaccttttgttggccgtgagggaaagtatgttactagtaggaatttaagggacaggctttatcgtgaacttgagcgg

SEQ ID NO: 2236 - DNA, 219 bp, Glycine max
  unsure at all n locations
  Clone ID: 700997755H1
tcagcttctgtatctgatgtcacttctggtaggggcctggttgagtcttctactaataccaatagggtagaagtagaacanagaaggagccagtggtaggacaggcaaacaatagggggtatattcgggccgtagttgccgaagtctatttncaggacntgtagtntcaanttgtctgttggtcatgagtcgatcatcacctgatcanagataatcacc

SEQ ID NO: 2237 - DNA, 277 bp, Glycine max
  Clone ID: 700997756H1
gcatccaccactctatcccctacaaccccttctcagctatgctcaggaaagagtgggattttcagtccctcacaggcacttcttgtgaagccagtgaagaggcagatgatggggaagagcaagggaatgagaattgcatgccaagccaccagcattcctgctgatagagtccctgacatgggcaaaagacagctcatgaatctgcttcttcttggtgccatttcactcccctctgctggaatgcttattccctacacctacttttttgtccctccag

SEQ ID NO: 2238 - DNA, 275 bp, Glycine max
  unsure at all n locations
  Clone ID: 700997757H1
aaaacatggctctaacacttcgttcttcaacttcttttattaatcagaaggaaaccaaagtccttcaaaacttctgacaatgcccctgcaatagttagtttttcaaaattcaagccatcatcatcattgttccggctccgggcaaaaaattccatgcaagaagctcatcacactcgtgaganatgggagaaggtgctggctccgtcggtcgcacatagccacaatgattcaaagagagtacctgtgtatgtgatgttgccattagacacagtaac

SEQ ID NO: 2239 - DNA, 277 bp, Glycine max
  unsure at all n locations
  Clone ID: 700997758H1
gtctcctctcttgtngccgtataaaagactcgccctctgcacaatcccaaacccgaagccgaactaaaacctcactggcaactgcaaaacaggaaccaacagtttcctttgcaatattttcttctttctctcaccgccgcgcgaatcctccttcttcgttgcttcattctctgcttctcttcactcgcattcttccttcctaccgctatgtttctatcaaagttggaattctagttgattagttttcctgactctagttggaaagatgggaagcaca

SEQ ID NO: 2240 - DNA, 278 bp, Glycine max
  unsure at all n locations
  Clone ID: 700997759H1
gngacatgaantcgcgaggngagtgaagcaatgnancatcgagaatacagagcttagtntacatatngggttacctgcccgganctctnccgnagaggacgcatctggtngangccgcttcttgttagcgttccgccctctggttacttntggaaggatgtctgcngcggtngttgtngattcgccatggctatctctgaacctggaaagctcataacatggggttcaacagatnatttaggccaaagctatgttacatctggcaaacatggggaaat

SEQ ID NO: 2241 - DNA, 273 bp, Glycine max
  unsure at all n locations
  Clone ID: 700997761H1
attcacaanacacaattaanncnaacagtactatgncatgtttggtcatggatatgtgagctncccaantcggtggagtggacagagtcngactcgccanccatgaagttcgaactcgcgagtgagaagaaggagaactcaactcgttccattcacctgaaagccgagcgaacntccngctcagactcggaagctgcggtgacnttcaccgtatgcttgcaaggctttcacccacacaacntanacnngaaacanngggtgtnngannagtnc

SEQ ID NO: 2242 - DNA, 272 bp, Glycine max
  unsure at all n locations
  Clone ID: 700997762H1
aagagacccagcagaccgacaaggacagatggaagggtcttgcctatgatatctcagacgaccaacaagacatcacaagaggaaagggtttggttgactcccttttccaagctccacaggatgctggaactcactatgcagtcatgagctcctacgagtacctcagcactggacttcgccagtacttggacaacaaaatggatggattctanattgctccagcttttatggacaagcttgttgttcacatctccaagaacttcatgacctgc

SEQ ID NO: 2243 - DNA, 278 bp, Glycine max
  unsure at all n locations
  Clone ID: 700997764H1
aagccttagccttccctacaactccaaacncccnagacatcatcatccatggctgcctccgtctccactgtcggagcngtcaacagagctcttttgaacctgaatggttctggagctggagcttcagctcccagttcagccttctttgggaccagcttgaagaaggttattgcctcaagggtccccaacagcaaggtttcnggtggaanctncaannttttcccngaaaagggnaagaaaggggtttnaaggaacccagnaanccnacnaaggccnnt

SEQ ID NO: 2244 - DNA, 275 bp, Glycine max
  unsure at all n locations
  Clone ID: 700997765H1
tgacgtcgatgatgaaaatgaaattggtgaaaacattactgcttctcctttgtgtgaaactcttctgttatgcagtgattggtgctcctcaaacttgtcntgctaacaatgaggataaatgcggcgattcagatgaatggaaaggggagtttttccctgacattcccaaaattaaatatgagggtccgtcaagtaagaatgtgctttcatttaaatggtataatgcagaggaggaaattccttgggaagaagatgaaggatnggttaagatttag

SEQ ID NO: 2245 - DNA, 274 bp, Glycine max
  unsure at all n locations
  Clone ID: 700997766H1
gtgttatgttactgttactaaaggaaagaagaaaaagggaggaagtggatgacgagtgcacacgtgggagccatgtctagttctacatgcttcccttcacttcctcgacttcttcgaccntctttcaccaaaaccaaatcatcacctaagttcagcatgagcatgagcaaggatccggttcgtgagtggattctttctgatggganagncatggngataaccaaaattagccctgttggtgggggttgtatcaatcttgctagtcgctacgaca

SEQ ID NO: 2246 - DNA, 273 bp, Glycine max
  Clone ID: 700997767H1
taaaaccagccaaggagggcataagccgaaagtgcggactgctctgttcgctttaaaatcacctgataggccatcattatgaggatctatgatgaatttaaagagatagtgaagattcagaagttccgaagattggtgtcgtacagtgggttctactgcttcgctacgctcataagctacttttacgtcaacaacacgactagggctggtttctctagagccgatcaattctacgcctcctaccctgctggtaccgagcttctaaccgacact

SEQ ID NO: 2247 - DNA, 307 bp, Glycine max
  unsure at all n locations
  Clone ID: 700997769H1
gtaattttgtntgttcatcttgtgttgttcactgttctttcccagacccacctcaaagttgaaagcagccatgggttttttcttgaaatgggtcaacttgtttgtcttttttcatttccttggctgcaaacacccattcttctcagattccttcctnccaggctcaaatggcaatcgccaaccaaccaagttnccttggatttaggccaagggatncctcggggtttttngatttgggatggtntggtnattcagggagggaaagatttcatggagaaattccaagaaactgggggtttatgnaggg

SEQ ID NO: 2248 - DNA, 275 bp, Glycine max
  unsure at all n locations
  Clone ID: 700997770H1
attgaagttaaaagccttagccttccctacaactccaaacaccnaagacatcntcatccatgggctgcctccgtctccactgtccggagctgtcaacagagctcttttgaacctgaatggttctggagctggagcttcagctcccagttcagccttctttgggaccagcttgaagaaggttattgcctcaagggtccccaacagcaaggtttccggtggaagcttcaagattgttgctgtagaagagaagaaagagattgaagagacccagcaga

SEQ ID NO: 2249 - DNA, 313 bp, Glycine max
  unsure at all n locations
  Clone ID: 700997772H1
gcactttctgagtacaatacaacactgccatggctgcctcagtctccactattggagctgtcaacagagctccactgagcttgaacagctctgaagctggagattcggttcccagttncaggccttctttgggcacaagcttgaagaaggttactggccttcaagggttccctaaacgttcaagatttncttcctcggaaagtttncaaanattcgtttggcgggcgggagcaaagnagattgatcgaggcanacaaacangaacaanaacaanggaacaggattgggaaaagggtctttggcctatngatnc

SEQ ID NO: 2250 - DNA, 272 bp, Glycine max
  unsure at all n locations
  Clone ID: 700997774H1
caaacaccataaaccattgtatctttnttctttgttctttgtctaggtcttggcactgaacattattttccatcaaaaataaaaattcagagcagaataacaacaattcaggaaaacaaaaaaactcagccacataatttccttcaactcatggcttgtactgagcatggccatggctctgtgttgttgggtttggtgttgttgagtttagctgcttcacaaagttgttgttatggtttgagcacatttgggtttgacatacaccacaggtt

SEQ ID NO: 2251 - DNA, 271 bp, Glycine max
  Clone ID: 700997775H1
cgtcggagctgtgtctggggaaatttgcgttgtttttcgcggtacagctcacacacactgaacggtaagtatggcggacaaggctgttacaatccgaacccgaaagttcatgaccaacaggcttctttccaggaagcagtttgtcgttgatgttcttcatccagggagggcaaatgtttccaaggctgaacttaaggagaagctagctaggatgtatgatgtgaaagaccctaatactgtatttgtcttcaaattccgaacacattttgga

SEQ ID NO: 2252 - DNA, 269 bp, Glycine max
  unsure at all n locations
  Clone ID: 700997776H1
ctcgtcttcactgagaaanatcctnctttgtgcatgctcctcgtntccatctaaaggggagagggngtgagtnaganaaagtgagtgaggtttctagcttctactgttgagtaaacatgactatggaagagggcagggtagagaacgaggactacacacaagatggaactgtgaacattaaagggaaacctattcttagatccaaaagtggtggttggaaagctgctcctttgttgttgtatatgaggtattcgaaagaatggcttatt

SEQ ID NO: 2253 - DNA, 270 bp, Glycine max
  unsure at all n locations
  Clone ID: 700997779H1
acaggttcaaaccggagcaaaaaaanttgttacgatngtttcttccgacaaggatccacgngaggaagtccttgcaagcatggtacatggatgatagtnatgaagatcaaagactcccccaccacaaagaacccaaggagtttgtctcgttggaccaacttgctgaacttggagtccttagctggaaattagatgctgataaccatgaaaatgatccagagctgaaaaagattcgtgaagagcgtggctacacctacatggatgtttgtg

SEQ ID NO: 2254 - DNA, 209 bp, Glycine max
  unsure at all n locations
  Clone ID: 700997780H1
aatttgtaaataatatataactaaaaatgtgtgatttgagaatttttacaacagttatgttagtaatccctccttttgtgataagttgaggaatggaagtgagaattcctagtttgttaatgtcttgtgatttgcantagatggtttattatcctggcaaaacaattttttcatggcattcatnaagtgagaagacctatacctccagc

SEQ ID NO: 2255 - DNA, 183 bp, Glycine max
  unsure at all n locations
  Clone ID: 700997781H1
ctcatcaagggttgtgaaagcagagaagtgagatacactaagttatcctcataaatacatctaataggggcaagataagtgtctaacctagaacttcccantntgtattcgatggccaatcttcatcacagcgcctcttnagacatcggaacttacgatcaggtgtacatngcgttaagggag

SEQ ID NO: 2256 - DNA, 277 bp, Glycine max
  unsure at all n locations
  Clone ID: 700997782H1
cnactagactgggattcacgcttgaatataatcatgggagctgcnaaagggcttgncnacttgcaccatgnattgntccccccaggatcatacaccgagacataaaatctagcaacattttacttgacggaaacttggatgctcgggtctctgattttggacttgccanacttctggaggatgaagaanctcacatcaccactattgttgctggaacgtttggttatctagctccagagtatatgcaaagtggcagagcaactgagaagtctgatgt

SEQ ID NO: 2257 - DNA, 276 bp, Glycine max
  unsure at all n locations
  Clone ID: 700997783H1
gtcaattacttcccttcanggtatgatcctgttcgtcatgcagaaaggttccccanaacctcntgtatctgcagtggaaggcgtgaaaagtgtggaattgagaaggagaacaacttcaagcagcccggagagagataccggtcttgggcacctgacaggcaagatagatttgctcgccgatgggttgatgctttatctgacccacgggtcacccatgagatccgcagtgngctggncatcatactggtctcaggctgaccgttctctaggccaaaa

SEQ ID NO: 2258 - DNA, 199 bp, Glycine max
  unsure at all n locations
  Clone ID: 700997786H1
gttttcattctcctaatcttcgtctggctaaggaagaagaaganaannaaaaaacaggagngctcantangnggcaatnccactttncgcagttatgtccaaatatccattccgttcctcaaancgtagngnncanccgcaanganaaaacgggatcgnaatccgtttcgggnananccaaggtgagncntgcaaggna

SEQ ID NO: 2259 - DNA, 275 bp, Glycine max
  unsure at all n locations
  Clone ID: 700997787H1
ctgttctctgttttgttctgtttcgcgtacaggaacttaaacaatgnagactgcaaagggcaagggagcagcgaggccctcaaaagaatcactgaagcctgttgatgaccgaaaggttggaaagcggaaggcttctggtaagcctgagaaaagcagagcaccaaagaaggagaagaaggccaagaaagaccccaacaagcctaaaagaccaccgagtgctttcttcgtgttccttgaggagttcaggaagacctttaaggctgagaatcctctcg

SEQ ID NO: 2260 - DNA, 274 bp, Glycine max
  Clone ID: 700997789H1
cagcaacatgtacaggaccctggatatttgttgcaacaacaatttgaacagcaccagcagttgcagtcacaacaaccgcaacagcaatttgaacagcaacatcaccagcaccagcagacactaccgcaacagcagcaacagtttattcatggcacacactttattcaccataaccctgctattcctgcatattatcctgtatatccttcccagcaacatccccagcatccacaggtttactatgtgactgcgagacaggcgcaggcttacaacc

SEQ ID NO: 2261 - DNA, 270 bp, Glycine max
  Clone ID: 700997792H1
tcttgcccttctctcttcaactccaaacacaagacatcatcatccatggctgcctccgtctccactgtcggagctgtcaacagagctcttttgaacctgaatgggtctggacctggggtttcagctcccagttcatccttctttgggagcagcttgaagaaggttattggctcaagggtccccaacacaaagatttcctctggaagcttcaagattgttgctgtagaagagaagaaagagattgaagagacccagcagaccgacaaggac

SEQ ID NO: 2262 - DNA, 365 bp, Glycine max
  unsure at all n locations
  Clone ID: 700997793H1
tccccttcttctgaaatagtaaacnagtaaataagtaaatatnaacattaaacatnaaancccaaatngggaaagccaacgttngcaagggagncccaaattcaaaacgtaatttggcanaggaaatnctnctggctncattctttcaaggccctttcaaanatttncccaggnanagngngagttgatgttncttncttaaagnagcaggtcgagttggcagaaggcaaaacagcgtcgggggncaccctgggattcaanagttggcaaattttggggggctggctggaggaaattgggttcaattccccctttcctttggctgatngaaagatnnaacccattggttttcagttctttcattc

SEQ ID NO: 2263 - DNA, 269 bp, Glycine max
  Clone ID: 700997795H1
tgggtctaagcatgtaggggtgaagaaggctttggttttttacaagggtaagccaccaaagggtctcaagacagattggattatgcatgagtatagattaattggatcaagaagacaagccaatagacaagttggatccatgaggctagatgactgggtcttgtgtaggatttacaagaagaagaatattggaaaatcaatggaggcaaaagaggactacccaatagcccaaatcaaccttacaccagcaaacaataacagtgaacaag

SEQ ID NO: 2264 - DNA, 214 bp, Glycine max
  unsure at all n locations
  Clone ID: 700997796H1
gngctcactaggtagcaatgccaatttcncagttatnnccaaatatccattccgttcctcaaatcgtagcgtgcacccgcaangacaaaacgggatcgaaatccgtttcggggagacccaaggngagccctnaantnanccgttggtccaaagcccganccgtaggttcggtcagaaattggncgggtccattttgngannncngncacgggac

SEQ ID NO: 2265 - DNA, 280 bp, Glycine max
  unsure at all n locations
  Clone ID: 700997801H1
caaaaagaaagaatcccaggcgaggagaaagatggaggggaaggagcaggatgtgtcgttgggagcgaacaagttccccgagagacagccgattgggacggcggcgcagagccaagacgacggcaaggactaccaggagccggcgccggcgccgctggttgacccgacggagtttacgtcatggtcgttttacagagcagggatagcagagtttgtggccacttttctgtttctctanatcaccgtcttaaccgttatgggagtcgccggggtaagtcta

SEQ ID NO: 2266 - DNA, 279 bp, Glycine max
  unsure at all n locations
  Clone ID: 700997802H1
ttcccccaattcccaaaccaaaccctctctcttccggcgttctgggggtggcgtcgccggcgattcccccctccggttccctctccanccttcaattcaaccctctcgtcttcgcttcactgattccctctttcaaaatgcttccgatcgcttgctagggttttccctctcccaaatctcctcctcggaaagcaccctgtaccttttattcctccgactaatcaacttctttgctatggctattcgtgtaaccttttccttttcgggctatgtcgccca

SEQ ID NO: 2267 - DNA, 278 bp, Glycine max
  unsure at all n locations
  Clone ID: 700997803H1
gcanaggcaatttctgatgggtctgaagaagtatggtaaaggagactggaganacatctctcgcaattttgtgaccacaagaanaccaactcaggtcgcaagtcatgctcagaagtatttcatcaggcaactaagtggaggaaaggacaagaagagatccagtatccatgacatcacaatggtgaatctcccagaagcaaaatctccttcatcagagagtaacaacagaccctattcaccagatcactcagtgaaggatgtgaatccaccatcccaga

SEQ ID NO: 2268 - DNA, 277 bp, Glycine max
  unsure at all n locations
  Clone ID: 700997804H1
ggangagggtaaagtgaagtatatagggttatctgaagcgagtccagatacaataagaagagcacatgcagttcatcccatcactgctttanaaatagagtggtccctatggactcgtgacattgaagaggagataattcctctctgcagagagcttggcattggaattgtaccatatagccctcttggtcgaggcttttttggtggcaaaggagttctggaaaatatgcctgcaagtacagtcctgacttnacatcatcctcggttccaagcagag

SEQ ID NO: 2269 - DNA, 279 bp, Glycine max
  unsure at all n locations
  Clone ID: 700997805H1
cttagatacaagttcattgggtattgtttgtnttgtccctccaattagaaatggagtttcaccttggtaattngtntaatcctttaatatagacctttattacacggattacttggtaaaatttcaattctaattggagagcaacctaaggnactatcttggtttggtcctttttcaaaaccctggttctgttctgtgatagatatgtttgcnagttagctatttatctttcanatttttcttaccacagtttcatttgcnattcttcatgcttcatgg

SEQ ID NO: 2270 - DNA, 276 bp, Glycine max
  unsure at all n locations
  Clone ID: 700997806H1
ggactggctgtttatgccaactgtcaatatctgtnaagaatgtttaacaggccaagangtgcttcgtgcttttaatgtattgaattggaaacatcaaggtgaatcatctgtgacaacaggtttacttcaggatgttccaccagagattganttgtcggattatagaaggatcccaagtccaggtagtgagagcccttcagaccttcttaatggtgagagcctaaatgtagagcccattgctgnttggatttcttcttcgaaaggnttcacngcnac

SEQ ID NO: 2271 - DNA, 280 bp, Glycine max
  unsure at all n locations
  Clone ID: 700997807H1
ctgaacttgacatcatcaaatagaatcacatctaacattgcatctgaatatcaaaagtctgttaagaagggatcantctcttttgcttcagttgatctaagccgatttacgcagantgaccaaataaactgttttcctgtatcatggtttaatcgttctaagactaaattgctttgccgtaaatgtggggttcatattggttatggttatggtggagaatcacatgttctttgtggatttgagtctcccacttcanctanctctcaaaggaaattcacca

SEQ ID NO: 2272 - DNA, 278 bp, Glycine max
  Clone ID: 700997809H1
gctttgccacagcaacatacggttgactatcccagtttcaagcttgtcatcgtaggcgacggaggaactgggaaaaccacttttgtcaagagacacataacgggagagtttgagaagaaatatgaaccaaccattggtgtggaggttcatccactagacttccataccaattgtggaagaattcgcttttactgctgggacactgctggccaagaaaaattcggtggtcttagagatggttattatattcatggacactgtgctatcattatgtttga

SEQ ID NO: 2273 - DNA, 278 bp, Glycine max
  unsure at all n locations
  Clone ID: 700997810H1
ttgaaagcnagatgcatgangacaccgaggaaatcaatgcattgctttactctgagantnatggttattccactgaggatgatgatcatgatgaagttactagcanaggacattcacccagtacaatgaccacacacgatgataaccaggaagaaccggataggggaaccgccaaagaagttgctagctccgttggagananaaagangcgaaaactatgggacggtgcttatgacgacggcgatatgcagttccttggncactnctaattctctgaa

SEQ ID NO: 2274 - DNA, 277 bp, Glycine max
  unsure at all n locations
  Clone ID: 700997811H1
cattaatgtgtgtntgtcacgagacccatagtgctgccaaattatagtaactctctttctctatctgangaagaagaagttctgaagaagcatgtgtggaggtgctatcatctcanacttcattggtgtgaagcgtggccgcaacctcgccgcgcaggaactgtggtccgagcttgaccctttctctgacctccttggcttcgataccancancancaccancaaccaaccaccccttccagacaaaaaagtggtntcatcatgtgagaagaagaag

SEQ ID NO: 2275 - DNA, 279 bp, Glycine max
  unsure at all n locations
  Clone ID: 700997812H1
ctcctgantcatatgcagtgcagattttcnngtgaattggcgaatcgccaaaatgggtganagcagancagangcancgtcgtgtgcaagactcgccgtcttcctcatcctcttcgtgctcggantccgacgaancttcnnnnnnnnnnnnnnnnnnnnnnnncgaganggagatnctcaganagagcgaggaaaaggaggagcgaaggaggaagaagagagacagagagaggaaanagaaganaaanaggctccacgattcngatgactcctgntctt

SEQ ID NO: 2276 - DNA, 278 bp, Glycine max
  unsure at all n locations
  Clone ID: 700997813H1
gntggacatgggtanccacctggngcttacccaccaccacctggggcataccctccanaanaaggntatcctccagctgggtatcctccacaacaagggtatcctccagctgggtaccctccacatcaaggctatcctcctgctggttaccccccagctggttatcctggttcatcacatgcaccaggttctcatgggcacggcggtatgggagnnatgctcgctgggggtcctgctgcggctncctgctgcttatggngctcancatgtctctcatg

SEQ ID NO: 2277 - DNA, 274 bp, Glycine max
  unsure at all n locations
  Clone ID: 700997814H1
tngntatcactgagttccagaccaaccttntgccctaccctaggatccacttcatgctttcntcctangctccggttatctctgccgccaaggcctaccacgagcagttgtcggtgccggagatcaccaatgccgtgttcgagcccgccagcatgatggccaagtgtgatccaaggcacggcaagtacatggcttgctgcttgatgtaccgtggtgatgttgtccctaaggatgtcaatgcngctgttgccaccatcaagactaagaggactgt

SEQ ID NO: 2278 - DNA, 277 bp, Glycine max
  unsure at all n locations
  Clone ID: 700997815H1
acngacgncnnnggcnacggtttcggtcactgcgccgatgccgttgactgcgataccgatcatatcgccgtcgaactccggcgaggagcaggtgacgtcgtcgaactnatcgccggcggagntctcgacgagaacgagcgactgaggaaagagaacgttnagttaangaaaganctcgcggagatgagatcgctcttgtanaatatttattctctcatgtcaaattatgcaaangccaacggaaaaggaaanagcaanggcagttanaaaantaaag

SEQ ID NO: 2279 - DNA, 279 bp, Glycine max
  unsure at all n locations
  Clone ID: 700997816H1
acgaaggggctatatagcataaacatttgantcttcattgcanaatgtcgacctcttccattaacgggtggtgcctctcttccatctccccagccaaancctctctcaaganggccacattaggcccttctgtcttcgcaaccgttagcannnnnnnnnnnnnnnnnnnnnnnnnnnnnnnnnnnnnnnnnnnnctcattcaagacaggcctgtctttgctgcccctgcccccatcatcancccaactgtgagagaggatatggcaaaggaatacgagc

SEQ ID NO: 2280 - DNA, 279 bp, Glycine max
  unsure at all n locations
  Clone ID: 700997817H1
cggagggcaagatttctacgacgtgagccacgtggatggcttcaacgtgcccatgtccgtaaccccacaaggtgggagtgcgcgattgcnaaacctcaagttgccctaagaacattaactctgtgtgccctgcggagcttcaagtcaaagggtccgatggcaacgtcatcgcttgcnagagtgcttgcnaggcttttaaggaagatagatattgctgcactggacctaacaacaccgcagaaacatgtccacctacgaactactctcagatttcggggg

SEQ ID NO: 2281 - DNA, 278 bp, Glycine max
  unsure at all n locations
  Clone ID: 700997819H1
antcantcanccctttacactggttgatgcaaaacaacatggtaccctctattgtnggttgtngctganactcttcanagtcgcaaagtaggtgactagcagtagcatgtnatggtatcatggtaagctgaccaaagtgacggatttnttccatcactgccttcagggaaagangttaactcatagcaggtccatanaaacatgatgactccaaacttgancttggaacctganaatcattcagaaggcagcagccaagtggcttcanatgtntcctt

SEQ ID NO: 2282 - DNA, 127 bp, Glycine max
  unsure at all n locations
  Clone ID: 700997821H1
annccttnnttatgctcaanatagtctatatcctggngttgctgctgaanantangggnaganagctgctgangtcccaagcngtaanatatatggagaaattgctatgccanctgcacagatctac

SEQ ID NO: 2283 - DNA, 280 bp, Glycine max
  unsure at all n locations
  Clone ID: 700997823H1
acttttcttgatcagctgtctacaaaanttgtngaaactncacatnggtgtctccaggacgtttgacgcgaattactctgcagtatgtaatttcaaaagcngcatggattgacgcacagtatgctgcatggnagangcagcaganagacattgagcagacaagagacttgataagtagattaggtgctggagcaaattctggccgtccttctnctgccgagangaagctggaganacttcaggnagaggaactagtggaganaccttttgnncggnaaca

SEQ ID NO: 2284 - DNA, 278 bp, Glycine max
  unsure at all n locations
  Clone ID: 700997824H1
gcctgcnaccccagtnacaccgccaccatcagtagaacccaagccacagccagtctctgctccttcaccaaaggtgagcactaagttttctgatgtgttggcattcagtgggccagcacctgagaggatcaatggaaggttggccatgattggntttgtggctgcaatggcagtggaagtagccaaagggcaaggtgtgttagaacaaatatccaatggtggcatcccatggttcttggggacaagtgtggtccttacccttgcttccttgattccac

SEQ ID NO: 2285 - DNA, 278 bp, Glycine max
  unsure at all n locations
  Clone ID: 700997825H1
gaggctttgaagaacatatggcagcacgtggttcggaagangaagaatgagtggnaagatgccgagcaatcaggcagtgccgaagaaggagatcgccatccaaaggcttctnatgaagcagattactcttcatcggcgaatgaaggcagttggaganactccaagaagagaagggatgaggaagaggaggcagaggatagggatgacacatccacgttaaagaagccgcgggttgtttggtctgtggagcnccatcaacagtttgtngctgctgtgga

SEQ ID NO: 2286 - DNA, 276 bp, Glycine max
  unsure at all n locations
  Clone ID: 700997826H1
tgatcacaaacccagtaatggttttnnctgctgtgttcactnccantctcaaccttgccatttnatccagcanatantcntgtagaagaagaacatcatctaccanaagangagttgttacagtgagagctagctccacagagaaggatgantccaaggncaaagatgcttcagcattcaacccttttnggtttgtnactgacaacccttctagccganatgccattcaactgcctganaaccctgctgaggatggcaacgttggccaaatgctat

SEQ ID NO: 2287 - DNA, 277 bp, Glycine max
  unsure at all n locations
  Clone ID: 700997831H1
aanaagggcagtctgattgcnnccggactttnccgtggtcttgtaccttctgcttccacggcctgtngcagtnttnanaacaattcttcctcaggcgtcagtnttctgtccgactcctacgattccgtggaaactccagcaaaaagacagcacttgatacccaaggnggtgttagttccgctctcgatganatcaccgtcttattcaaacttcttggctgccaagangccagaccaaganaganactgncaaagctcggctgctggctgcagcagtg

SEQ ID NO: 2288 - DNA, 131 bp, Glycine max
  unsure at all n locations
  Clone ID: 700997832H1
tcagcnaatgtngggaaanctgctttcatcaatgcttnacnaagtaagtcatatttccatgcaatcctaaataggaaggactnggcttgtctgtcnncnatgattganaanngcngtgagtgcnaaatana

SEQ ID NO: 2289 - DNA, 267 bp, Glycine max
  unsure at all n locations
  Clone ID: 700997833H1
cgcttctcagggatgttaaccataccacttttgccaagctancccttcatagcattgttgtcaggcttggcactatacatagtgataagtattgcttcaattctgaagantattatgtccatcaccantataactagtttgtnccttctgcaaaaccgagcagtggancaacaccaaaggggggcagntaatggcattnnnnngncagccaggtctctttcnaaagnnatgggcctgctanaggggggccgtatnacttgggccnna

SEQ ID NO: 2290 - DNA, 277 bp, Glycine max
  unsure at all n locations
  Clone ID: 700997834H1
antagaggctaagtacacatctagagctgcaganttgtataggcnaattctttnanaggnagttgcaaanngtatggctgangatggaggcttgcnttcatcanctgttgcttctnantcttcccagggggttnatgggctaccagangtnaagancaatgangtgccanaagataanattctggagangcnagatnagcctganagcncttcttcccctagagcttcanatanagtaatttcnagtaccgttnaganaccnattggtgcnaagana

SEQ ID NO: 2291 - DNA, 183 bp, Glycine max
  unsure at all n locations
  Clone ID: 700997838H1
gcctatnggntcgtnaaggnnaggnggcaaataanananctgcaaaangngaagctgctnttnatntgtngaaggatcttgagangcagggaatttcacatggtagtttcatgtccaagggaaaaagagataancctgaccatgtctatggtncanctcatctcanaatggattctngtattc

SEQ ID NO: 2292 - DNA, 281 bp, Glycine max
  unsure at all n locations
  Clone ID: 700997840H1
gtnattgtagaaaaggggntgcagaatgcgnccagaagataanattccctgngcgaantgatgaacgcgcngcgacanaacnactggggatatcgtctttcctccttcagnagaaggaagatcccaaattcaaaaganaggctgaagatctttttgtagagcacactttgtcccttaccgaggccttgtgtggcttccaatttgtgctgactcacttggatagccgtcagcttcttattaaatcaaatcccggggaagttgtgnagcctgattcatacaag

SEQ ID NO: 2293 - DNA, 246 bp, Glycine max
  unsure at all n locations
  Clone ID: 700997842H1
gntcaactgangtgatggctttnantttncnttctnccgcccaantnaagcncttatttttntctncaaataactccacaaaacttccaggtngcttntntttgaagagaaangatagtnacacaacagtagaganacgagtntntngctctgccgctgctcaatcaccaccaccagcatggccaggnacagctattcccganccttctgangtcnagacatgggatgggcaanancctatgnntg

SEQ ID NO: 2294 - DNA, 243 bp, Glycine max
  unsure at all n locations
  Clone ID: 700997847H1
gnangttnaggnactaaaactnancatagaaanagcnacttctnatgttaacagattganggtggcttctgtnncantaanatcaaaactagaagangagaagtcggttctcgcatcccttaagcnaagtnaggaanaggcttcggctgcngttgtnaatctccaagctgaactggagangtctaggtcagcnatagcttgnattcanatganaganaatgangcnaganagatgatgactga

SEQ ID NO: 2295 - DNA, 277 bp, Glycine max
  unsure at all n locations
  Clone ID: 700997849H1
tcncctttttctcaatagactaaatcattccatcattcggtgcaagacggactgacaatagangcacgcggcaccagattatttccaaattgaagcgtccaagantccaaattcctcattctctatgagcngaaggnagtttgcagcaaaanagattgangcaagcactgcgagacgcagataaagtgagggtgaagagaagagaggaatggnaganaaagatttcattgaagagggtaagantatgantcgaaaggngaagaggaaggcaatgaag

SEQ ID NO: 2296 - DNA, 277 bp, Glycine max
  unsure at all n locations
  Clone ID: 700997850H1
cttggntaacaanatggacggtttttacattgctcctgcttttntgganaagcttgttgtncacatcancaagaacttnangaccctgcctaagnnncaaggttcctctnattcttggtatttggggaggcaaaggtcaaggnaaatccttccaatgcnagctcgtntttnccaagatgggaancaaccccatcatgangagtgctggagagttggaaagtggaaatgcaggagagccagcaaagntgataaggcaaaggtaccgtgaagctgctga

SEQ ID NO: 2297 - DNA, 277 bp, Glycine max
  unsure at all n locations
  Clone ID: 700997856H1
catatatctctcagctggctgaggcataattcttcttatccgtcaacatacccacattgtcactncacgacatcgagcagcgctcattcacactctttaaccctaccttacccatttagccgagatccgcaatgccttccatcanatctttcgctgccgtcactttggtcgctttgttacctgctgtgcggggacatatggccatctggnatccatgcntatatggngtcaacgatggggacagtaacgtccctcccctcgctggaatgtnttttga

SEQ ID NO: 2298 - DNA, 275 bp, Glycine max
  unsure at all n locations
  Clone ID: 700997857H1
ttggatcatgctcttcgcttcaattttccttttcaaatccccctgaattttttttctttctgaatcacatcagattcaattgaattataccccctcaatgcaatggtggtctgcaaatntcgcaaggctactaagttatattgcttcgtgcacaaagttcctgtctgtngggaatgtatctgcttcccggagcaccaaatctgcgtggtccggacttattccgaatgggttatagatggggagtatgattggcctccganatgctgccaatgcca

SEQ ID NO: 2299 - DNA, 274 bp, Glycine max
  unsure at all n locations
  Clone ID: 700997858H1
tttcaaagctgatgctgttcttcattttgggacacatggttcccttganttcatgcctggnnagnaggtggggatgagtgatgtatgttatccagacagtctgattggnaacattcctaatatctantactatgctgcaaacaanccttctnaggctaccatcgccaaacgaagganctatgcgaatancatcagctatctgantcctccagcagannatgcaggactgtanaaaggtcttaagcagttaagtnagctcatctcctcataccag

SEQ ID NO: 2300 - DNA, 280 bp, Glycine max
  unsure at all n locations
  Clone ID: 700997864H1
ggaatatgatgaataagaaaatggttaatggggggacagttaacaactggttctgcataaacttttcaaggccatgttcaagatagtgttgcccgtcgtttttgctatgaacttgctcagatgtgttatatatctggnatggcatttacacctgagccagtagtccccccagtcagtgctcgccctgatcaagtggaaaaggttcttaaaactcggtatcatgatgccaagaacaaactgcaaggnagagagcttgatttgctcatcgttatctngcccg

SEQ ID NO: 2301 - DNA, 277 bp, Glycine max
  unsure at all n locations
  Clone ID: 700997865H1
cgnaggatcagatgcaatgaatgttcgtnttgctgggtcctggagacagaatgatcaagaaaatgaatcagtnaatcagaagattctttcttctggcttgangcaagaaagccaggcaggtgaaagtnattgccctactaacaatgaggcttcaggatcctggtcctcctttaatgttaacagcacaagtagtnccagcagctgtggnagtcctggcagtggtgctgtcaataataaaggggatgnggncactgntccctggnnttatgaaattnng

SEQ ID NO: 2302 - DNA, 271 bp, Glycine max
  unsure at all n locations
  Clone ID: 700997866H1
gagtcananantggtgggtgctctatctgtngtnggctcatcagtnatggactctcacactggcccttgtttgtctgttgatgctctcccaacaantagtgttaatctcaagagtggtggagatgttttgtacaagantttgatgggaaggaagcataatttggtgaagcatggtggtgggaccatgaagttgagcagttcatttgttgatcctggaagagagtggaggctctttgttagcaaaagttgcaagangcagcgcaaggntagg

SEQ ID NO: 2303 - DNA, 275 bp, Glycine max
  unsure at all n locations
  Clone ID: 700997867H1
cgtctcaaacaaacgacgactttcctttcctgctgcnttcattccaaattccaaacccancataatanctagcttcttgtgaaggctgttagtttgatttagaagttgatattgataatttgctgtnatgggtggccaaaggngtggttatngtaagcttccccactctcaatctgaccatgataatgggccaaataanaggnggaatcatggtgatgacagatagcagtntgtnattgatttggaggatactgtgtatcgttacgtgtgcccgg

SEQ ID NO: 2304 - DNA, 274 bp, Glycine max
  unsure at all n locations
  Clone ID: 700997868H1
antctatagaggggtttacaagcagaaggatgtggcaattaagctgattagtcaacctgaggaggatgaggacttggctgcttttnttgagaagcaattcgcttctnacgtgtccttgctcctcagattaggccacccaaatatcattacttttattgcngcttgcnagatacctcctgtnttttgcataattactgaatatttggctggnggttctctgggaannttcctgcatcaccaacaaccanntatacttccactcanacttgttctg

SEQ ID NO: 2305 - DNA, 277 bp, Glycine max
  unsure at all n locations
  Clone ID: 700997870H1
gnaaaccttctcttacccttctctcaagtttcaaganatttcatcatggctccanaganggacaagngctccaccaccttcctccaagcncgcnanatctngcggtggcaagcagaagangaagaagtggagcnaggganagcnaaaggngaaggtgaacaatatggtgctgtttgatcagggcacctatnanaagctccttnntgangctcccaaatacaagntcatnantcctttccattctntctgatngtttgangnttaatggancacttgc

SEQ ID NO: 2306 - DNA, 275 bp, Glycine max
  unsure at all n locations
  Clone ID: 700997872H1
cggcttcttgagtggcatactctgagcagaatganaagcaatgaggaagcgtctaagtctttgattntcttnatnattattnangancgatggaaatcagctgtntgattgtagatagtatcaaagtcagancttgtagttcaacttgctggtggtggagcagcctntttaaaattgagtgtagatgactgggaaatgatgatttgacaaaaaagactnatcacataataaatgatccaagatttaagggacaggnggnacaactttgtttataa

SEQ ID NO: 2307 - DNA, 274 bp, Glycine max
  unsure at all n locations
  Clone ID: 700997873H1
aaagggaancacaaatactaccaccagctagcagaagttcagcaacgaaggtcatatattagatggcaataacaccttttagtagtacatctgctgcacaatggggaattcatcctcagctgtnactaagatccagtatcacgggcaaggttgcatcatccagccacaattctactggcagggtaagtttnatggctgcaacaagttcaagctttttttctcaagattccacactactcaatganngangcaccccaaacttttaatcatcgca

SEQ ID NO: 2308 - DNA, 274 bp, Glycine max
  unsure at all n locations
  Clone ID: 700997877H1
cantgccataactcactcantagcttcttctctgttctcaccaatggcatcaacaatatcagcaatggccatgatcaacgccaaatgcgtcaacccaaagttccccaatcccaccaagctcgcaccatcaaaaccctcccttcagatcaaccttccaaagggcctcatagcctcacccganagcactaaactttcccccgcgacagcaatcgcaggagcaatattcacaaccctcggnacctgcnacgccgcattcgctgttcaacaaatagcc

SEQ ID NO: 2309 - DNA, 272 bp, Glycine max
  unsure at all n locations
  Clone ID: 700997878H1
cgttgatgtcaatggaccatttacaactccagtgtaccagtttctgaaatcgagtgctggaggctttttgggtgatcttataaagtggaattttgagaaattcttggttgacaaaaatggtaaagttattganagatacccancaacaacgtctccttttcaaattgaggtatgttaagcttcccccaatagtaaatccagtttttaattgttaccatgacagtgaaatattaactaatgaagtatgtcaatgtctttcctactcaagattg

SEQ ID NO: 2310 - DNA, 276 bp, Glycine max
  unsure at all n locations
  Clone ID: 700997880H1
ctcaaaaacaattcgtcaggctgtgggtgttgtgggttgtntcattatgcctcacaatgtattcctgcattctgctttggttcagtcaaggaaggttgatcctaaaaagataggtcgggtacaggaggctctcaactactattcaattgagtcatcggctgcacttgcagtctccttcatgatcaatctttttgtcaccacagtttttgccaagggtttttatggaaccaagcaggcagatagcataggattggtcaatgcaggggcagtatcttg

SEQ ID NO: 2311 - DNA, 214 bp, Glycine max
  unsure at all n locations
  Clone ID: 700997881H1
cttagncttctctatcgctcgctntcctttgacgcttctgacccttnctttntctgcntcttccttctntctntctttctnnctctgtgtgtcgtaatggctctccnagactcttcttcccgtcgcaactccctgatcccctccttcatctantcctcttcctcnaaaaggcnccctctccagnagangctcaanancgcctcggctggcgccg

SEQ ID NO: 2312 - DNA, 276 bp, Glycine max
  unsure at all n locations
  Clone ID: 700997883H1
cggaagagaacccccgtgttcccatcattgtcaccggtaacgatttctcaacactctatgcacctnctcatccgtgatgggcgtatggagaagttctactgggcaccaacaagggaagaccgcattggtgtttgcaccggaattttccgcactgatggtattcctgaacaggacattgtcaagcttgttgacaccttccctggccaatccattgatttctttggtgcactgagggccagagtatatgatgatgaagtgaggnagtggatttctggt

SEQ ID NO: 2313 - DNA, 274 bp, Glycine max
  unsure at all n locations
  Clone ID: 700997884H1
ttgangcctgcnggatttacagagaaacttaacaacaacaggctaaagactttagctgacgctgaagatgggtgtnatatatttaatgacctgaaagataggtttttaagttttaaaaagaataaatacatganaaatattgaacagtttganaatcttgcaaaggttcaaacaccaaagttcatggttattgcttgtncncattctagagtatgcccttctaatgttttgggatttcaaccaggagangcattcatgattcgcaatgttgcta

SEQ ID NO: 2314 - DNA, 274 bp, Glycine max
  unsure at all n locations
  Clone ID: 700997885H1
tagttattctctttcttcttttttagctatccctctcttgaaaaatctagatctcgttcttccttgatctacgttacgcttttagtgaccggatctgtatggatctgaaccagatctacacgccgatggtggttttngcctggtctttcatagatctgatgcatggaggctcagatctactgnacagagatactgtagataatcgatgagaagaacgcagatccagccgcttccgcttgtncgatcgctacagacgcttgtatcggattattca

SEQ ID NO: 2315 - DNA, 274 bp, Glycine max
  unsure at all n locations
  Clone ID: 700997887H1
cggagggcaagatttctacgacgtgagccacgtggatggcttcaacgtgcccatgtccgtaaccccacaaggtgggagtngcgattgcaaaacctcaagttgccctaagaacattaactctgtgtgccctgcggagttcaagtcaaagggtccgatggcaacgtcatcgcttgcnagagtgcttgcgaggcttttaaggaagatagatattgctgcactggacctaacaacaccgcagaaacatgtccacctacgaactactctcagattttcg

SEQ ID NO: 2316 - DNA, 275 bp, Glycine max
  unsure at all n locations
  Clone ID: 700997889H1
gctgagaacacggtgagaggatccttgtatctgccaaaggaatatttganacaactggggtgaaactatcagggaaagttgcaggaatccactggcattacagagcaagatctcacgcagctgaactaaccgctggctactanaacacacgaaataacgatggatatctgcctatagcaaggatgctcgcaaaacatggagttgtcttcaatttcacctgcatggaaatgaaggacagagagcagccagactttgcaaactgctcacctgaaggg

SEQ ID NO: 2317 - DNA, 273 bp, Glycine max
  unsure at all n locations
  Clone ID: 700997890H1
gatcagcacgacactgagcatcagcaatggcaagcgcaagtgttggtaaagaactgacgctgtattcgtattggaggagctcttgttcccaccgagtccgaatcgctctcanccctcaaagggcttaaatacgaatacaagcccgtcaatctgctcaagggagaacaatctcgccctgagtttctccagctcaatcctgttggttgtgtccccgttctagtggatgaccacgttgttctctatgactctttcgccattattatgnatttggaa

SEQ ID NO: 2318 - DNA, 272 bp, Glycine max
  Clone ID: 700997893H1
cgactcccccaaactcatggcaactcccgctcaagttgaaaggtctgtttcatacaacgaacaccggcccagaaggccgccacctgacctgccttcgctgcttctccatggtagaattgtttacattggcatgcctttcgtgccagctgtcacggagcttgtcgttgcagaattgatgtacttgcagtatatggatcctaaagagccaatctatatttacataaattccactgggactacgcgagatgatggtgaaacggtaggcatggaga

SEQ ID NO: 2319 - DNA, 274 bp, Glycine max
  unsure at all n locations
  Clone ID: 700997895H1
cgcggacggcggctccncggcggtctcggacgggtcgaaagccgagcacggcgaggacgatgaccggaatcccgccgncaaccggtggccgagngaggagacaatggctttgctcaatataaggtccganatggacgttgctttcaaagacgcaaacctcaaagcccctctctgggaacaagtctcaaggaaattatcggagctaggttataataggagtgcgaagaagtgcaaggngaaattcgagaacatttacaagtaccataggagaata

SEQ ID NO: 2320 - DNA, 277 bp, Glycine max
  unsure at all n locations
  Clone ID: 700997896H1
anctgaagangctgggtgaggatgctgcgaggcatgctgaggagagtagtgagaccttggaggatttcaggagggtgaagaagcttctcaatgatgtgaggnctgaattagtttcgtctcagcaagcnttggcatcttccagaagcaaaatggaggagcaggagcngttgttggaactgcagctgagtgagcttggggagcagagggcaagtgtgatgtcctacatggaaaatttgaaggatgcacagattgaagtggagagtgagannacganact

SEQ ID NO: 2321 - DNA, 290 bp, Glycine max
  unsure at all n locations
  Clone ID: 700997901H1
gtgagaaaactttgccaaataatttttctgcagaattgctctcttgcaaattggatactgttactggccaatattatcctgagtgggctccaattaattgtcgagttcatcgacaaccaattcacatcactgaaggaaattatgtcaganagcnagatgtcagcattgaatatgatgcatgtaccattccaaatgattgtggntcattggttgttgccaaagttgganatccacaaacaaattgttggtttccatgttgctggnancccggaagacgggatatgctcatt

SEQ ID NO: 2322 - DNA, 294 bp, Glycine max
  unsure at all n locations
  Clone ID: 700997902H1
ttgtgaaggaccactttttaccaactatgtttgtagactaccngnaaggcgtacagcaagccatatcgagtccagctgcatttcgtccaagggcacatgttgctactacttacacttcatcaattgagaagggtcgacctgttttacaaggattattagctatagatcacttnaacaaaggagntgcttggctgggccacnaggcatgccccaagttctctaatgnatccggtggaagtatgtgcnaacttttcnggagaggncttatganagatgccgaactggcatacatgg

SEQ ID NO: 2323 - DNA, 285 bp, Glycine max
  unsure at all n locations
  Clone ID: 700997903H1
gngaaacatggcttccttaagctccttagtgctgctccttgcagctctaattctatcccctcaagttcttgcaaactatgagaatncccccagtgtacaagcctcccactgagaaaccaccagtttataagccccnnttgagaagcctcctgtttacaagccnccagttganaagccnccagtttacaagccnccagttgagaagncaccagngtanaagcccccattgntgaagcnccacantagcngcccccgnnngaggncnccaggtacanatnncnnacg

SEQ ID NO: 2324 - DNA, 284 bp, Glycine max
  unsure at all n locations
  Clone ID: 700997904H1
ggcattttcttcataattnctgaaccctggaggcttcagtttactgttgattttcgtgttatgcttctaccaatgccataagcttgaagcagganctaaatatggctgacttgttggcatggtcnaagcaagataagaaacgaatgcttcatgtcgtctaccgtgttggtgaccttgatcgcaccatcaaattttanacagcatgtnnnggncatgaagctttgagggcaaagnngntatccccagaggngnnatatgccaatgctttnctggcnttggcccga

SEQ ID NO: 2325 - DNA, 272 bp, Glycine max
  Clone ID: 700997905H1
gtggatacaatgaatctgacattttcatgctttcatctttttctgtgattgttttgcaggaaagcaactaatggtaaaggttgcagagatggtacctaggcatcatggaaggaccaagaagcaggatcctgcatcaacatcaactgctggaccttccaccaaatctgggaagggtggaaaaaagaggagataattttgtgtttgaacattgtctacatgtgtgatttcgagtgttgtgccggatatatatttatatattataataggactat

SEQ ID NO: 2326 - DNA, 274 bp, Glycine max
  unsure at all n locations
  Clone ID: 700997907H1
gnaaatctttgttaagactctgaccggaaagacaatcacccttgaggtggagagctctgacaccattgacaatgttaaggccaagattcaggacaaagagggtatcccaccagatcaacagaggctcatctttgctggaaagcagcttgaggatggccgtacccttgctgattacaacatccagaaggagtcnactcttcacttggtatccgtctnacgtggtggaatgcaaatctttgttaagactctgaccggnaagacaatcacccttgag

SEQ ID NO: 2327 - DNA, 273 bp, Glycine max
  unsure at all n locations
  Clone ID: 700997908H1
gtttcaattatctcaatgagagcataatggaacttgtgggcgttctcccatctgtcaagantttaattcttgctgctaattttatcagaggaccctttttgaaagaattatcacttttaccaaacttggaagtgttggatttgcatatgantatgctcggcaatggcagccactttgcaactgnagattataaaaacaagtcaacattgaaaaagttgaagacattagatctcagtatcaataatctcaacgagagcataatggaatttgttg

SEQ ID NO: 2328 - DNA, 274 bp, Glycine max
  unsure at all n locations
  Clone ID: 700997909H1
ttttttagggttccatcccatctattctatctatttagataaaacacgaaatcccaatcttaatcgcaagcnattcctctctctgagagaagctctcgaaattcttctgatactcgtagaattttaatggcttgttcatcatccgattcaaaaaaaccagtgacgtcgctgttgttcttttccttcctaattccgataccttccgattctcttccgccntacggcataacncgcctacttgttcatctctctctttctcaaatccgattccttt

SEQ ID NO: 2329 - DNA, 269 bp, Glycine max
  Clone ID: 700997910H1
cagcttcgctgatttcttcgtttggaggataccctcaaaggtgttctactgtgaaagttagccaattttgaagatgaattgttataatcttcagaagaatgccttctcagcctgtgaagagatgagaggctctcttcccattgctgatcagaatggacctgtcttttgccctaagccacgccgagctggggttttaatgaacttgcctattcgacccgtaaaatggcatttaggtcaacaagctgaggggtctgattcaaaagctgggg

SEQ ID NO: 2330 - DNA, 271 bp, Glycine max
  unsure at all n locations
  Clone ID: 700997911H1
gcactactccttaatttctctcttcacttatcatcatacttatatattatataacccaataattaaattaaatacatgttagcactttaacattcctttctctaacctcgttcccactctcatattttcnnttctgctgatattcagctaaactaagtcaataagatgactcagggaaagatagttgaagctgcagaagctcataaaacacttgaggatttcgatcctccaaagangcgcaaaaggaacaagtatgcttttgcttgtgctg

SEQ ID NO: 2331 - DNA, 274 bp, Glycine max
  unsure at all n locations
  Clone ID: 700997912H1
gntagataggtganaatggcgcagtgtgtgaccaacacattcgtgcaaggnaaaccctttcttccagttgcagcagctacccactaaaaatgttcggagagcggttcagtgcggtgtgtggtgcaagaagaaggagatacacccgcaattctacgaggnatcgnnggtgtactgcaacggggagctggtgctgatcacaggtgggacccagaangaatcacgtggtggcacgtgtggncgggnaccaccccttctncctcggnagccggtcggc

SEQ ID NO: 2332 - DNA, 272 bp, Glycine max
  unsure at all n locations
  Clone ID: 700997914H1
gnaaggaataccaagattaccaccacaaagcaatgggcggtatactttctgcgcttcttggcggcgaagcggcggcggcngngtcttcgccggagagttctncttctagagtgtcctccttccaatcgtcgcngcgctngcagctctacttcaacgagatcaaagataccgataagcncgttgtgnntagatttctcggcgtcgaggngnggtcttggcaaattcatagagnccancgattcacgcnaggacgacaactcaaagagttgatt

SEQ ID NO: 2333 - DNA, 273 bp, Glycine max
  unsure at all n locations
  Clone ID: 700997916H1
gggaagataggtctgtacgaattgctgctggtgaagcactagctctaatttttganattggagttatagataaattttctgctgagttagacagtgcaagtgatacaacgcaagggagtaaaccacttgaaagctacatatttttacnaggattgaaaggaacggtgataaatcaatgcaaaaatctttctacagaggctggtggaaaaggttctgcaagaaagatcttaatagtcgaggaactgtttcgagatatctggattttttgagtat

SEQ ID NO: 2334 - DNA, 284 bp, Glycine max
  unsure at all n locations
  Clone ID: 700997917H1
tctttcttcttttttagctatccctctcttgaaaaatctagatctcgttcttccttgatctacgttacgcttttagtgaccggatctgtatggatctgaaccagatctacacgccgatggtggttttggcctggtctttcatagatctgatgcatggaggctcagatctactgtacagaggtggccgattcatgttcgtctctcttttggaatctgtttcgtagaaagtngtttggtctccatgtcgcaggctctgaggtattttttttgcagatatgtagaaa

SEQ ID NO: 2335 - DNA, 280 bp, Glycine max
  unsure at all n locations
  Clone ID: 700997919H1
ancttatatctcgcgtcgcaatatattatagtattacnttcttaattatcacaaacgngcttttnnatattcgnatctcgcgccaacatggcggccaccggagcccgtntcttctccgatgaanttctccgacgttatccgcngtngccgganggaaaaacgaactcncgccggatccgattgcgantcagngncncgcngtgtncggtggaacaggttcgncggngacggtaganaangagaagcgtangagagaagaagagcggagnngaagaagaaa

SEQ ID NO: 2336 - DNA, 280 bp, Glycine max
  unsure at all n locations
  Clone ID: 700997920H1
agaatccgaggcgaagagaagaganaaattaagatggaggggaaggagcaggatntgtacgctgggagcgaacaagttcccggananacagccgattgggacggcggcgcagagccnagacgacggcaaggactaccaggagccggcgccggcgccnanggttgacccgacggagtttacgtcatggtccttttacagnnccgggatagcagnntttgtggccacttttcctgtttctatacatcatgtcttaaccgtccatgggatcgccggggccagt

SEQ ID NO: 2337 - DNA, 276 bp, Glycine max
  unsure at all n locations
  Clone ID: 700997921H1
gngtgtccctaacaagcagctcattgctatataaggaggaatttgagaagatgcaagagaaatatcctgacaacttcaggcttgacttcgctgtgagccgagagcaaacaaacgagaacggagagaagatgtacatccaaacccgaatggctcaatatgcagaagagctgtgggaattactgaagatcnataacacttttgtgtacatgtgtggactaaaaggaatggaaaagggtattgatgacattatggtgtcatggctgccaaagatggcat

SEQ ID NO: 2338 - DNA, 276 bp, Glycine max
  unsure at all n locations
  Clone ID: 700997922H1
cgaagatggagactcctcctccccaacaaggcgtcgtgaagaagaaggagacaaggggccgaaaacccaaaccaaaggacgaacacgggaagggtttgaaggaaggtaggannnnnnnnnnnnnnnnnnnnnnnnnnnnnnnnnnnnnnnnnnnnnnnnnagatcaaccttcggtggacgagaaatacacgcagtggaaagttccntgttcctgtcctctacgactggctacgccaaccacaacctcgtctggcctctctctcttgcaggtggggc

SEQ ID NO: 2339 - DNA, 277 bp, Glycine max
  unsure at all n locations
  Clone ID: 700997923H1
gncatgaaaggcagactacaaaggggagaagaaaataagcatggagcagaagaccaggaggaagatgtggannnnnnnnnnnnnnnnnnnnnnnacgatgatatcgatgaaaatgatcaagagaaatcagagatggatactattgatcgtgatgatgagttcttggatgaagagaaagagaaagaagaggttgatgagaaggagancgaaaacgaggatgaagaanaggagcagtttagttganaaccacaacaatcatgaggctcgggaggaacnt

SEQ ID NO: 2340 - DNA, 273 bp, Glycine max
  unsure at all n locations
  Clone ID: 700997926H1
cnttcctatccgagaggtngctgtcttccatctgcacaagaaatatatctcaatgcattgagaaaaagagggctgttgccagatttgagaaaacagaaacagatacatattcatcatgctgcttcagttgatatgggagatgtcaggttggtganagtcagagatccggatcgtgtttcatcctgatnagctcgccaaaggaaacntgttaaatctggaacaatctcgtcggcaaaaatatttctctcgaaagggcgctggagtctgaggtat

SEQ ID NO: 2341 - DNA, 267 bp, Glycine max
  unsure at all n locations
  Clone ID: 700997927H1
gntgcttaagaatatttcagtgtcttttaggaacattgtcaacttatacgtagagacaagtggtagcattgtgcttttaacctgtgatttcttgtcccaaatacagaaaacattacaggtttttggtggaactctacttagtttggatgttatgacttcatacattagtattaacgtccatgatttgtttttatttcgtcagcactatgtacattagaaactctaaatatttctctcggttaatgtccctacttgccagattaacaa

SEQ ID NO: 2342 - DNA, 273 bp, Glycine max
  unsure at all n locations
  Clone ID: 700997928H1
tcaagataagacaaaaganaaaatgtttgcngggaaaggggctgtttggttctccagagcggtggcgttggcagcaatcgcggtggtagcttgcnttgggcttacacaggcccaacccgaggccaggttcaagtgcaacagcgcgaacatccccacgtgtcgcgcgctcataagctactctcacccgatacaccaccaccctcggcgacatccaaaagctcttcaacgtgaaacacttcntcgacatcgtgggagcgancaacctcccaagca

SEQ ID NO: 2343 - DNA, 274 bp, Glycine max
  unsure at all n locations
  Clone ID: 700997929H1
cnagctgcagctaccttcatgcaacccaccaaggttggcatagcctctcgcaacctcaaatctacacaatgcatttctaaggcttttggcttggaacctgctgcagctaaactcacttgctcccttcagcctgatctcaaagaatttgctcaaaaatgtgtcgacgctaccaaaattgcaggattcgcccttgccacctctgctctcgttgtttctggagcacgtgcagaaggtgttccaaaaaggctaaccttcgacgaaatccagagcaaga

SEQ ID NO: 2344 - DNA, 278 bp, Glycine max
  unsure at all n locations
  Clone ID: 700997930H1
gnatcattgcttcacagaagcaatagttggtctcagaatccatgatgagctaactgtggattcttcattgatgaggggtaacaagagcatctgctgattttagaaaccttttggataaagcttattggccaaggatcaaggggctgattncgagacgaaccaaggaaagcncaanaganattgagcanaacaagtcnctcatctgaatcatcagaagcctcacaacaacagttatcatanctattagggcaacaagtgcaagacctccaatgaagagc

SEQ ID NO: 2345 - DNA, 275 bp, Glycine max
  unsure at all n locations
  Clone ID: 700997931H1
gnttattattactacttgaatatctcagtctttcacattttcccatcatctgctaggtgaaagaaggaatcacttctaccttgtatggatcaagaaatcttattagttacttttttggtccttattgtagaattaaattgatatattttnnngtgtaattataagacatatagattcattttcaaatattaatggttattnttntgtatattattaattactatgaagtctattaataagatactcactcattttatatatnacananaannaac

SEQ ID NO: 2346 - DNA, 283 bp, Glycine max
  unsure at all n locations
  Clone ID: 700997932H1
agaaganacncaaagacaaacaagaatacgtcactttttcaattttcaatgganaaccaaagcctcatcgatgncagtttcttcatcctcgaancaagttcagttcttgaaggtgaacgacgnttccctcttgccagtgggaactcgtcgangttgttgacgccgaagaggagatcgatgggttcggttcnntcatcggattcnncttccgtttcnggttcgaatccgatttcttntnccccatcgangcctcaattgaagaaatcggccaattctctcatcc

SEQ ID NO: 2347 - DNA, 217 bp, Glycine max
  unsure at all n locations
  Clone ID: 700997933H1
gngtaatattcatatttccggcttattttacgacggcaganacaaattctggactaaacacgagngcanatcntgctttgncagaagaggacaagatggaggtgattaganctngaggaantacctgatgatgntcttnaaaanagagtccatgaatttganaaactgtnagntcatgaaancnnngcgngatacantncgngntgtnganaattga

SEQ ID NO: 2348 - DNA, 286 bp, Glycine max
  unsure at all n locations
  Clone ID: 700997934H1
gggaaaaacctcaagaatcatacttaactgagcaatcaccatcatcttcgcatcttccagaaaattgggtggaggcaatggatganacaacaggtcataagtattattacaatacaaannctcatgtatcacaatgggagcgtcctaatttagttcaggaagttgtttcanatcactcagacttgtctgntggtggtgggtatgatcaatcatctnattttccgcantgncatgggnagcggtggttggggtgtcngcctgttcaagcatggggntatgcaanctt

SEQ ID NO: 2349 - DNA, 286 bp, Glycine max
  unsure at all n locations
  Clone ID: 700997935H1
caaccggggcggataagcccattggtcagcccaaaccggttgggattaaaaaagctttggtgttttacgcagggaaagctcctaaaggggacaaaagcaattggctcatgcacgagtatcgtctacgcagacgtagatcgctccgttcgcaaaaagaacaccctaaggttggatgattgggtgcnttnccgtatttaccccaagnagggcacgatcgaganactgccaancnagccagngatgttgctctagncnaatatcgaatccctcggaganngaancaccc

SEQ ID NO: 2350 - DNA, 280 bp, Glycine max
  unsure at all n locations
  Clone ID: 700997936H1
gncttggcaatttgacatcacttcactctcttgatctctgctttaacttcttaagtgggaacccggcaccttttattgggcaccttgtctctatcgagaatctttgcatatctttcaatgaatttgagggcatattctcattaagcatttttagcaaccattcaaggctcaagagtttgctaattggcaatatgaaagttgacactgaaaatccgccttggatcgcaccatttcagttggagcaactagcaattacctcttgcaagttaaacttacccac

SEQ ID NO: 2351 - DNA, 273 bp, Glycine max
  unsure at all n locations
  Clone ID: 700997937H1
gntttaccttcaatcatacatganactttgaaagccgtggttgcccagtacaatgccagccagcttattactncagcgagaggctgttagtcgggaaatccggaagattttgactganagggctgctaacttcaatattgcccttgatgatgtgtcaattactagtctgacttttggcaaggagtttaactgntgcnattganggcaaagcnggtagcngcacaagaagntgaganggtanttcatattgcccttgatgagtgncattatnnt

SEQ ID NO: 2352 - DNA, 271 bp, Glycine max
  Clone ID: 700997939H1
ggaaaaaggaggtgcctaattttgttaaggttggcaatgttgtttctggtaaattgacctcgaagattgtcaagaagaagaaaattgttaagagagtggtgcagaaaggtactgcaagttccaagtcatctgcgtcaaattcactaccggctaaaaccctcctggaactgtgaaagcggagagtgttgcacgtctttcattgactgcctctggtcctgagaaaattgcagctaatttggatgagaaaagcaacactgtcatccaaagcaac

SEQ ID NO: 2353 - DNA, 270 bp, Glycine max
  unsure at all n locations
  Clone ID: 700997941H1
caacacaacacagcataccgtgtttcattttctctcacacacaaacctccttcgttttcatttacttctcaggaggtataactactatttttcgcnnnnnnnnnnnnnnnnnnnttgattaaatcttttgccatgggaacccagattttgcgacctcaggactgcttggtagaacgaatcngggctcctccggctgacttttcccggcggaggagttccggtaattacngntaattattattnctacaacnacaacaacancccnnnngc

SEQ ID NO: 2354 - DNA, 272 bp, Glycine max
  unsure at all n locations
  Clone ID: 700997942H1
ccatctttgccttctgcatgttggttctctgtaaacagatactgcaaaagaanaataatattgaatatttggttgggttgaatccctgggttgaancgttgcagacatcncggctattctaagagtgtctcgctctctcattcatgtacccaactgtacgaccggaggacaggttgcgtaactgcccaaccaaccctcggccgacacggtgggcgtggngctttggcctctnaangttggnagcccttcagacttggtcctcttagctggtg

SEQ ID NO: 2355 - DNA, 203 bp, Glycine max
  unsure at all n locations
  Clone ID: 700997944H1
ggtgactctaactatggtggcacaaattcatcaagtggaggaataaaagaatcactaactggttatggtatcactatggatgtagatactagaaagatggcaagaatcatggttttctcagttataccactcctcataatgcagattcccagtatattcaacttctcttctattccacacaangtacnccananagnncacgc

SEQ ID NO: 2356 - DNA, 273 bp, Glycine max
  unsure at all n locations
  Clone ID: 700997946H1
ggctatctagggcagcacccgaaacatgtgctgacttccttggnacttttgtagctgatcaaactaattcacagtttcacaaaaggtgganaatggcttgtttggcannttgagggagatcgtactcttgctgattncatgaaagatcgcaactttccttcaaacttggaatcagtgatgtttggacgtcgtcttgacanggtgtggactcttcgaaacgaaatgcnttgnaccatcaaacaaataatgcgccagatccatacgtctcttagg

SEQ ID NO: 2357 - DNA, 279 bp, Glycine max
  unsure at all n locations
  Clone ID: 700997947H1
tgacaacanaacactgattatatttatggtttnntgttctgtttatggtttcatttattgctagttactgaatatttatgaattatatatgggtatctcattnaacctgttaatgtctggtaaacagtgctaatgactcttgngtatatggannngggcaccctttgngccctatatatnactacatattttngncngattcaaccaacagnaannaacacttcttaatntaccattntgnatttgtnaggttatangggagancaangaacacatngc

SEQ ID NO: 2358 - DNA, 269 bp, Glycine max
  unsure at all n locations
  Clone ID: 700997948H1
gnattttatttctggtttgtattttgagaaattctgttccttttggatggatttgttccggataacctggaattatcccaacaagcactctggctagtgaccatcatcgtagtagtaacgatgaataaagaggaaaattgggcttatggagcctctaattatggtctaacacttgggtattctaggcgctatagattgaccgttacgntttgtctgataatgaaaaaatatttcatttgganttggacatccaataccaagtgctaaca

SEQ ID NO: 2359 - DNA, 118 bp, Glycine max
  unsure at all n locations
  Clone ID: 700997951H1
aggagctggaggaagaggntgatagcgggatangtttgcttnatgagtnanagtgatcatcaatatgagaatgttgnctgnttacncagacaccccaagntattcnacacaacnnnag

SEQ ID NO: 2360 - DNA, 253 bp, Glycine max
  unsure at all n locations
  Clone ID: 700997952H1
gngatttcnatgatgggtggnagatcaccaattccaatggaccccttttctctatgcctcnnnnnnnnnnnnnnnnnnctcttnaagttggaggcttcaacaagggaggaggantctattccaacaccaacaccaccncttcctcctaccatcctaataaccttaacaacaacgcttttggaggcttcaacaagggaatctattccaacnccacatcctcancctatcttaaacaacanncaccaccacctcg

SEQ ID NO: 2361 - DNA, 271 bp, Glycine max
  unsure at all n locations
  Clone ID: 700997954H1
gnttttttcagggcctactatatcagactaaaattgaaaaagcaaatactattattcaatcatttacttgagcatcagtatcatctgatgaagtgtccaatgcctgcaaaggttccattggctccaatacagaatggaatccatccaatgcctgccaacaacctacctatgggatatccagtgctacagcagcctcccatgccagcaacaggtcaacctcgtattgactccatgggttgtggtatatcaagttgtcatgtagttaacggat

SEQ ID NO: 2362 - DNA, 278 bp, Glycine max
  unsure at all n locations
  Clone ID: 700997955H1
gngctgatgaggaacagaaganagtgaaganagaggttaagaagaaaggctcttcatcttcaaaagatggcactgctaaatccacctacttcaaagaagaaagcaagtggctctgatgaagaccgcacttcacctactcacagtcaaattgatgaganngaggaggctccagatgaagatgctggtgatgatgacgtggcaatggctgacagatcacatcacttgcatggctgncncgtncaacgtatcccgaacagttaagtgctgtgacagctgat

SEQ ID NO: 2363 - DNA, 268 bp, Glycine max
  unsure at all n locations
  Clone ID: 700997957H1
ganaataaatgctgctaagttgctgaaagttattgtgccacacattgatgcaaangttgcttcaactcatgttttgcctgcccttgttactcttggatctgaccaaaacctgactgtaaagtctggtagcatagatgcanttggtgctgtggctcaacacttcaaaaacgagatgattgttgacaagatacgtgttcaaatggatgcttttcnngnagatggttcccatgaaagctactattgctgnnattcgngcattggtggttgc

SEQ ID NO: 2364 - DNA, 269 bp, Glycine max
  unsure at all n locations
  Clone ID: 700997959H1
ggngacatgtaatgagtacttatctctcttctctcgctagctgtttataaccaagacactaactaggtaacatagaattgagaagtaatggaaatgaagaagccgtgttgtgaagagtcagagacaattgttggatccgggaatgttggttcgacgatgcatgcatcgttgacatggnttactttgtgaagaccctttcaagcatcanacagaaaggtgttcgtgccngacttggattggntccatcatcatcatatgcctccatatgg

SEQ ID NO: 2365 - DNA, 268 bp, Glycine max
  unsure at all n locations
  Clone ID: 700997960H1
aaagagaggactatatctggagattcatactatggctctcacgtgatgcagtatggtgatgtacggcttagcagtgatgttctcttccattatttgggtacagatcctgctaatgataatttcacttttgtggacgaaaactccttatngtcaccttcaaaaccagtcaaccaacgtgatgctgatctcatccatttttgggataagttccgcaaagctcctgagggttctctcaggaaaaatgcagctcagaaacaagttttggaag

SEQ ID NO: 2366 - DNA, 278 bp, Glycine max
  unsure at all n locations
  Clone ID: 700997961H1
ggactctgtnttcaaagggaaacccntgtnncttttccttgcctttctttcctagcactgtcttctaacttccaactacatataattncnntttccctagtcttctttgttttcaccctttccttgtgaaatctgcaaaaccagctattcagtttggctatcaaaccaagccaaagntncttatattatntntnnngtataaataggcancaaatacanatttatgancacaccaatttgcagnngtgcacacaagacaagatnncccancagaggct

SEQ ID NO: 2367 - DNA, 189 bp, Glycine max
  unsure at all n locations
  Clone ID: 700997962H1
gaagatggctcacaggttgcanagctgcttccagagccgcgaggtccttttcgctccagagcctccatggacggcggtggggtgcaggtgttcatagtcnatgctcttcaggaaaacgttganggtcgtatctcacaaacngatcaganatgttctgcgagtangttcagaaggtggatactgagatca

SEQ ID NO: 2368 - DNA, 272 bp, Glycine max
  unsure at all n locations
  Clone ID: 700997963H1
ctggcctggacgcgaggctgttatctatgatttatctaaacaaatttaccaaatatgtgacaagcgttcggtntcctgtattattgaacacaagcatgatgcaggtgctgtgatttgtgattctgatctgagttcacagctcaagtctgcagcttattctgcactcaagaagatggagggtgacattcaagatgaagtgccaacgttaatgagtggagcagggcatgatggcaatggcntatctcacttaacaaaggtgggaatgcngtttg

SEQ ID NO: 2369 - DNA, 274 bp, Glycine max
  unsure at all n locations
  Clone ID: 700997964H1
gttccgggaccgtgatcagtataacaaagctgattttccagaagaatatactgatgctaaattttttgtcatcaagtcttacagtgaggatgatatccataagagtattaagtataacgtgtgggccagnncccaaaatggcnacaagaagcntgatgctgcatatcatgagggcacagcagaanccggtggctgcccgtttttctctttttctcagttaataccagtgggncaaatttgtggggctgctganatgatggtcctgttgatttaa

SEQ ID NO: 2370 - DNA, 203 bp, Glycine max
  unsure at all n locations
  Clone ID: 700997965H1
ggaaattcgaacaatgattttntcattttctttttaatacttttttggtttagactccctaagaatctgtcgatatttccaattaaatcttcttgttcctgtgaaggtcctataaaaaaaagggctatgcctttctttactcagaagggcttattccaagttccacacaacatacgntnnntcccncgacgccgnanngnanc

SEQ ID NO: 2371 - DNA, 284 bp, Glycine max
  unsure at all n locations
  Clone ID: 700997966H1
gacattctccgtcgccacaacaacaancgctccgaagaaaggtgtgaaaggttccgttgtagcagcgaagaagaaggttcaggagaaggtgacgaatcctttgttcgagaagcgtccgaagcagttcgggatcggaggcgcgctgccgccgaagcgggacctgacgcggttcgtgaagtggccgaagaacgnccaaatccaacgcaagcngcgnatcctcaagcagaggcttcaaggncctcctgcactcaaccnnttcaccananccctagaccagctttcgc

SEQ ID NO: 2372 - DNA, 279 bp, Glycine max
  unsure at all n locations
  Clone ID: 700997967H1
tatcctaagtctttgggaatagtgctgcaatggcttcaagtcaggaggaggtgacccttttgggagctactggaagcccatttgtgtgcagggttcatattgccctcaagttgaagggncttcaatacaaatatgtcgaagaaaatttgaggnacaagagtgaactgcttctcaaatccaacccagttcacaagaaggttccagtgtttattcacaatgagaagcccataggcagagtccttgtgatgttgaatacattgatgagacatggaagaacnc

SEQ ID NO: 2373 - DNA, 274 bp, Glycine max
  unsure at all n locations
  Clone ID: 700997968H1
gnaaaattgatgcgtganaggacacacctgctgttggcttgttgttcaagaatggcaatttgtaaganagatgtttggagagttgaatgtggaatcccttctggatttccgctcacagttatttgtaatagcatttttnatgagatgctcattagatatagctatgaaaaattactgcgccaggctaaagctccaagtatgtttttacaatccntcaaaaattttgtttcttgtgtgtgtaggtgagatancttanttagtgttcatgcatatg

SEQ ID NO: 2374 - DNA, 272 bp, Glycine max
  unsure at all n locations
  Clone ID: 700997969H1
gnnatattggttgattcaagaactgggcagtacatgagccgtgcttaagatttcacctcaaattttgtagttgaagtcctgagaattctcgtttatttttttattttgtaggatataatttaccaattgagatggattaagttcattaagcttagcaatttggctgtgttttataacaccgttaaaattgtttgtagtttatttgcgaaactgaagctcttgcggtggcataaagtttttataaaaaaaagccagccatattaaaanaaaac

SEQ ID NO: 2375 - DNA, 265 bp, Glycine max
  unsure at all n locations
  Clone ID: 700997970H1
tgggattctctgtgaagccgtgttttcttagtgtcctatgttgtnatgtaagggtattaatcttcattatgtatggtctagtctaggtcttagtgtcttctcaggtggctgctactgcaatggagtttttggcaattgcagagccagtcttagttaattactagtattctgtgtataatctctctctaccttgggtcatagctggtttttttctgcttgaccagggagaatagtccacttaatatgtttctcaagtgcatcgctg

SEQ ID NO: 2376 - DNA, 268 bp, Glycine max
  unsure at all n locations
  Clone ID: 700997972H1
tgcaccgcaacaaaagtgataaagaaaagancaattgatcattgancntcaatctacagtatcatggttatttttctgtactagttaattttntttggtcttgctttctgatttaccttgattgtatggcagcgtatcactatacctgagattttggatgatgaatggtttaagaaagaatataagcctcccatttttgaggagaatggggaaatcaacctcgatgatgttgaagctgtctttaaagactctgaagagcaccatgtga

SEQ ID NO: 2377 - DNA, 268 bp, Glycine max
  unsure at all n locations
  Clone ID: 700997973H1
gccaagtcagatcctatggttgtttgtaccattgaggagtctggtgaacacattgttgctggtgcaggagagcttcatcttgagatctgtttgaaggacttgcaggatgntttcatgggncggagctgagatcattanatnctgaaccctgttgtgtcattcagggagactgtcctggagngatcatgccgcactgtgatgagcaaatcacccaacaagcacaatcgtctgtancatggaagcnagaccannggnggccggtctgccg

SEQ ID NO: 2378 - DNA, 265 bp, Glycine max
  unsure at all n locations
  Clone ID: 700997974H1
gttcatcagttcttgaagcttctgcttcaaacagtcacacaacaaaagagtntgaggcttcatccaaatctggcatatctgcaatgctatttcccacatcaaannagcnnncagcccatgttgactcagctcaagcatccaaaacacaaaatgtcaaagcaaaccctgggcaatggtgcaaaccccgagttgagaaggacatcatcttttgacagaattgggaagcagactgtggcgaactgtagctaatgaacttgtgntacaa

SEQ ID NO: 2379 - DNA, 267 bp, Glycine max
  unsure at all n locations
  Clone ID: 700997975H1
gnnggcttcttgagtggcatactctgagcagaatgaaaagcaatgaggaagcgtctaagtctttgattttctttattattattgaagaacgatggaaatcagctgtgtgattgtagatagtatcaaagtcagagcttgtagttcaacttgctggtggtggagcccttgcttaaaattgagtgtagatgcacgggaaatgatgntttgcacaaaanngcantatcanataataaatgatccaagatttaagggacaggaggaacaacc

SEQ ID NO: 2380 - DNA, 266 bp, Glycine max
  unsure at all n locations
  Clone ID: 700997976H1
gtgatcaatggcttctttagtgtcttctccatttaccttacccaattctaaggttgatcaactctcttctcttgcccagagacacctttttcttcattctttccttcccaagaaggccaatggctatgctagcagctcaaaagcttccctgagagtgaaatgtgctgctatgggcaatggtcttttcagccaaaccacgccggaagtgcgtcggatagttcccgagaaganacnangccgccaaatgttaaaattgtgtatgttgc

SEQ ID NO: 2381 - DNA, 267 bp, Glycine max
  unsure at all n locations
  Clone ID: 700997977H1
gcgacggtcaaggtccagaatccagaaccgaatgaataacccactgcccacagattatagaattttggacttgcacgccgtcgtctcccaccactcaatcaccatgccttctccttctgcagatcaatcacaatcccaaccaaaacctaancccaacctcctttccctcttcctcaagcccatcatcatgctccttctcactccctcttcttcctcttcctcggcttcgngccttcntcctcctcagnctcttcctcctcggtgggg

SEQ ID NO: 2382 - DNA, 263 bp, Glycine max
  unsure at all n locations
  Clone ID: 700997979H1
tttgcgcagttccctacctctcctttcaagatgcagatcttcgtcaagaccctcaccggaaagaccatcacccttgaggtggaaagctctgacaccatcgacaacgtcaaggccaagatccaggacaaggncggaattcccccggatcagcaacgtntcatcttcgccggaaagcagctcgaggacggcgtancctngncgactacaacanccanaaggagtcanccttcnctngtctnctctacgtggtggctgcannttct

SEQ ID NO: 2383 - DNA, 276 bp, Glycine max
  unsure at all n locations
  Clone ID: 700997980H1
gnaaatctttgttaagactctgaccggaaagacaatcacccttgaggtggagagctctgacaccattgacaatgttaaggccaagattcaggacaaagagggtatcccaccagatcaacagaggctcatctttgctggaaagcagcttgaggatggccgtacccttgctgattacaacattccagaaggagtccatcttcacttggtactccgtctacgtggtggnatggcanaattctttgttangactctgaccggnaagacnatcacccttga

SEQ ID NO: 2384 - DNA, 283 bp, Glycine max
  unsure at all n locations
  Clone ID: 700997981H1
aatattggttgattcaagaactgggcagtacatgagccgtgcttaagatttcacctcaaattttgtagttgaagtcctgagaattctcgtttatttttttattttgtaggatataatttaccaattgagatggattaagttcattaagcttagcaatttggctgtgttttataacacagttaaaattgtttgtagtttatttgcgaaactgaagctctgcggtggcataaagtttttataaaaaaaagccagccnttatanaaacanaaaaaaanaananggg

SEQ ID NO: 2385 - DNA, 137 bp, Glycine max
  unsure at all n locations
  Clone ID: 700997983H1
tctttctttttctgtgagcctttctttcaggttcttaacttganccagtgtgcagtgtccaaatcataagggtagttgcaaattgnaatgggnaaagcatgatgttgagggtggttccngncccggcaanggacnac

SEQ ID NO: 2386 - DNA, 276 bp, Glycine max
  unsure at all n locations
  Clone ID: 700997984H1
gngatggagatgtatcagatctggagcaggagaatagcgttgggagcgttcgcgtttgttctgcttttcctatacggcctcagcagacgacgtcgttgtgctctctgaagataacttcgngaaggangttggtcaggacagaggagctactcnttgagttctatgctccttggtgtggacactgcaaaangcttgctccgnatatgaaaagcttggtagcagcttcaagaaagcccnaatcgttttaatcggcaaggttgcangtgangcncncnc

SEQ ID NO: 2387 - DNA, 272 bp, Glycine max
  unsure at all n locations
  Clone ID: 700997986H1
ggnagaacccaacgctcacagtaccccacagtttttcctcgagaatgttcggagccccgtccccggtctaactctacttccgcttcgtcggttctttcccggttttctccccctccggcgaccgaatcgcgtacgtccgagatgcccggagtttatgtcgtgaancgggacggttcgaacctgcgtaaggtttccaacgcgatggcgttttcaaccgcttgggancgggttcgnancccggtgtcatctacaccgcaattggagaaacattg

SEQ ID NO: 2388 - DNA, 236 bp, Glycine max
  unsure at all n locations
  Clone ID: 700997987H1
gtttttttttaataagattgttgttgggtttggttcttcatttgtttactttgaagtggnggtgtggggagaganagttgggtntctctctctcgtatctggaaaaagtttcgatttttgagcgtggggtttgacggatttanggtttgggntgttgggtctgagtggaatcaggcaantanncatntnatggcgganccttcaaagagcatgctctggnagactccattccttca

SEQ ID NO: 2389 - DNA, 268 bp, Glycine max
  unsure at all n locations
  Clone ID: 700997989H1
tcttcgttcttttggangttgtgtgcacccattgatgacaagcaaccccattgcatggaagcctaagaggaggagaagacgaagaggacaagggtaactgaatcgccgcttctgcagcttcgttctttcgtttttgtttcatctttttagcttcagagggtaaataaaaaatggaggttttggtgggtcccgctttcaccatcgacgttccctcgtctccgnccggcagncatgnccggttccgatgatcggatcttctaacgtgtca

SEQ ID NO: 2390 - DNA, 267 bp, Glycine max
  unsure at all n locations
  Clone ID: 700997990H1
ggcttagacccatctcctctaaaatcagggtcccctcaatcaaaaaacttcttcttgttctgttgtgtccatatgttatattttattttatgatatacatagaagcttgttcttctgatctaattttatgagatcaagtgttggttctttctccatctagtactattatttttcccctgtannnnnnnnnnnnnnnnnntattctaattaaactaattcacaggcnacttgnatccgtttgttttgaagaagatcatcgcctgtttt

SEQ ID NO: 2391 - DNA, 266 bp, Glycine max
  unsure at all n locations
  Clone ID: 700997991H1
atttatctgangtcccaaaaccctcagtatcagctgagaaggtggaaggaatcttggaatcccaggatggatcaagaggactagctgacattgaggatgggacagatagtaaaagctgtgctgctgagatgggaaatgtatctgaagtcccaaaaccctcggtatcagctgtgaagggggnaggnatcttggaagcccaggatggatcaagcggnctatactgncattgnagggagggacagatagtaaangctgtgccgctgaga

SEQ ID NO: 2392 - DNA, 269 bp, Glycine max
  unsure at all n locations
  Clone ID: 700997994H1
gnatttttcacattcttggactcaattaaagagtgctatgaagctctggtgattgctaagtttttgggcttgatgtacaattatctaaacatctccttaagtaagaacatagtgccggatgaaatcaagggaagagaaattcatcattcattcccaatgactctttttcagcctcacactactcgtcggaccataaaacactgaagcttctcaaaaactggacttgggcaatttgttgtgatacgtccagtgtgctcaatctgatgata

SEQ ID NO: 2393 - DNA, 274 bp, Glycine max
  unsure at all n locations
  Clone ID: 700997996H1
tccctcactcactcatcaatggcatcaacaatatcagcaatggccatgatcaacgccaaatgcgtcaacccaaagttccccaaccccaccaagctcgtaccatcaaaaccttcccttcaggtcaaccttccaaagggcctaatagcctcacccgaaaacaccaaactttccactgcgacagcaatcgcaggagcaatattcacaaccctcggaaactgcgacgcgctttcggccngttcaacaaatagccgacatagcagaggcgacaacgcgg

SEQ ID NO: 2394 - DNA, 256 bp, Glycine max
  unsure at all n locations
  Clone ID: 700998001H1
gtctncaactaatcatacagatccgntaatcataatcatatcnatagctaattaacttaattattttcatccctcnactcttncttctctcctcnaaactcncttttccantcntgcttccnttgtggggtgtttgagttttctttccttcaatttaattgaaagatggcntgcttgggancncgctcgggagggaantccanngggnaaaaaaaatgggcggccgcaantgtgggggcaaaccctnanaaaaaaa

SEQ ID NO: 2395 - DNA, 131 bp, Glycine max
  unsure at all n locations
  Clone ID: 700998002H1
gggaaggnggnctcgattgcaagtgatccacgatacactctacgcttncacaaaaccttcaaacccaattccacagaattcttctgcncccaccatgncaacaaaagcctttagantangggcnaanaang

SEQ ID NO: 2396 - DNA, 258 bp, Glycine max
  Clone ID: 700998003H1
ttcaatggcttccctcatgagcaccatcctcatgcaaaggtcttcttctacttcacttgctgctgggaggttgttctccacaacaacagcaaccattattgattccccttcacttgctcagagaatcagagatttgcctaaggacctccctggaaccaacatcaagaaacatgtttctcagctccattgggaggactccacttgtttatcttaacaaagtcactgaaggatgtggagcttatgttgctgtcaagcaag

SEQ ID NO: 2397 - DNA, 257 bp, Glycine max
  unsure at all n locations
  Clone ID: 700998004H1
ctttgaaggtcttcttcccgaagatatcaatatttatgcaaccaacagcttccaatgcagaagaaagtagttggggaacatattgccctggggagtatcctagtcctcccccagaatattcaacctgcttgggtgatctgtacagtgttgcttggatggaagacagtgacagacacaatttacgaacagaaatctgcatcaacaatataaattggttaagagaggatatatctggagattcatactanggcctctcc

SEQ ID NO: 2398 - DNA, 256 bp, Glycine max
  unsure at all n locations
  Clone ID: 700998006H1
gncgtgacttgcttcaacgtctatatgctgtgactgtcactgctatagcgactnatttcacacaaatggcgtgtncgctataagtaccagtttttgtttcttcactctcattccttctggaggaagnttccgttccccgcgccacgttaccgcctcgggtttcacttgcaatcttcaaaccccgtcgntgcttctttcttcgngctcgccgcgctactctctaagggttattntagnnnatttaaaaanccgcngg

SEQ ID NO: 2399 - DNA, 252 bp, Glycine max
  unsure at all n locations
  Clone ID: 700998008H1
cgggataccattcaatattcttcacaattacagaggnttgaagccactccaaacggggataccttgttggaacttgtggatgggtctaagctgcttgcaaagattgtgatagggtgcgatgggattcgatcaccaatanctaagtggatggggtttctgaacccaaagtatgtnggcnattgngnttcccggggattgcctnttatccanggnggaaacctttngcccnaaggntgatcnacnccngggggg

SEQ ID NO: 2400 - DNA, 217 bp, Glycine max
  unsure at all n locations
  Clone ID: 700998009H1
cttccatctccttgtgcaaanccaagataaaataaaagaaagatattaggatgaagagagggaacnnngaagagaanttgggggggcccatgttcccaaggctgnatgtgaatgatgcagagaaaggagggccaagagnaccaccaaggaacaanatggctcttnatgaananttnntntccnanctnagnattncacnccntntnaanncaacnta

SEQ ID NO: 2401 - DNA, 151 bp, Glycine max
  unsure at all n locations
  Clone ID: 700998010H1
ttagagaaatgcttgccggngcatcattgatggatgaggctaatagaagtactgtggtatacatcagtttctccaccatttntnntntgttgtcagcntgtccgctgttatngttgtngttgtngtaccnaaatatttcntcnngngtggg

SEQ ID NO: 2402 - DNA, 132 bp, Glycine max
  unsure at all n locations
  Clone ID: 700998011H1
gnaaggttgtgccttgccgctaccggttgaaactcgagcacacagttgaagttcgaacacacacgcaganatnatggaagagaattcgcgtggttgggactncaggaggaatggtgttagaaaccctaagaa

SEQ ID NO: 2403 - DNA, 264 bp, Glycine max
  unsure at all n locations
  Clone ID: 700998012H1
gtcgagccgcttctgttgggatatgcaccacctanttcagatagaagggagggagttctaangaaggaaacgccttgagtatcttgactgtatttctcagtattatgatattcctgatacagaacgttcanatgacgaggtcaacatgcttcgtcagattggtgttgattgtccaagaactgttcccgatgnccccattcttccagcagcagcaagttcagaaatccattgggnacgtntnctnaangannggcnattcccanc

SEQ ID NO: 2404 - DNA, 131 bp, Glycine max
  unsure at all n locations
  Clone ID: 700998014H1
ctggttcttcanttcccacctctgtgccctcttctaagggaacaaaaaggaagtgggatttaattgatggatgtatgggtcaaagagttgactcttctttgtcacttgggcttgggcgttcaagcagttcc

SEQ ID NO: 2405 - DNA, 262 bp, Glycine max
  unsure at all n locations
  Clone ID: 700998015H1
gtctgggaccattcgagtgcatgatgacctgcttctggctgcctctgaggctttggctgcacaagtgagccaagagaactttgataagggactcatatacccaccattcaccaacataagaaagatttcagcacacatagctgccaatgttgctgctaaggcttatgagcttggcttggccactcgccttcctcaactaaagatttggtgaagtttgcagagagctgtatgtatcccccatcctancggaagtncnggngag

SEQ ID NO: 2406 - DNA, 106 bp, Glycine max
  unsure at all n locations
  Clone ID: 700998016H1
ggtcgcatatagatagattttatcttatagaaataattgaacaaatacattccaattatgtcttcggcgtatncancatcattttccttttncatatccgatgncg

SEQ ID NO: 2407 - DNA, 256 bp, Glycine max
  unsure at all n locations
  Clone ID: 700998018H1
tacagcaagagtaaagttctagtagacatanaanaagttaagccatactatatgtcgctncatcganaagtatttcccagcaaagcttaggtggtgaaactccaaagacatacacatcgatatggaatcaaagtcatgggcaagctaaggatttaagtttatacttatgaattatgatcgntatgccgaacgtttaaggnttgntttttccnnttatcagattnnagttgnngcctaactttaaattanctnnata

SEQ ID NO: 2408 - DNA, 256 bp, Glycine max
  unsure at all n locations
  Clone ID: 700998019H1
gnttgctgataatcagaccattaatatcagaccctatttaaaaganggaggttcaagcaagaagtgggccattataggtggtgtcgtaggaggtgttgttctcctccttgtgttgtttgcctgtagattgtttacaaaacaaaagagggttcccaaagctgacatattgggagcaactgagttgagaggtccggttaactacaagtatacagatttgaaagctggcaacaaaaaatttcagtgttganaatntgcc

SEQ ID NO: 2409 - DNA, 255 bp, Glycine max
  Clone ID: 700998020H1
gtggagtatggtggaatcaaaagcactgccaatccaacctcctcctcgtcaagttagttctgccacccaggatccagggtcctctaacactctggctcttccaggtcccggagattccaaggattctcagaaaggaggaccccaaaatgccttggttgttggtccaactatccccatccacaacaccgaatgatactggttttcagaacaaaagtacagcggttgtttcagctctggttcactgaaagaatttat

SEQ ID NO: 2410 - DNA, 240 bp, Glycine max
  unsure at all n locations
  Clone ID: 700998021H1
cctatggntcgtacactccttgctctcagccctccctcctcttcgccgcagtggccacccgcngngatggnggtggncgcgtccgacgccgacgacatcctgatccgtcaggtggtgncagatgttggcgaagcgaagaggaggacaacctgctgaangccgagcaacanttcgcgagttcaaggccanttcacnaagactnacnccancnaaggaggaccnngatnatcccntncggcc

SEQ ID NO: 2411 - DNA, 255 bp, Glycine max
  unsure at all n locations
  Clone ID: 700998022H1
ggaggnacaactgcaggttctgccttagatcatgctgcaacatcaaggggtgctgccccagttcctgaagcacaacctaatgtcagtgagaaggaatatttttgtctaatatactccgtgaaatcatgccagtgatanctcaacaagtagggtctgagggaaatccttcagaagatcatatggctcaagattcttcaacccaggttgaaatgatgtcgggacatcaacgcagacagagtgattctgatcccaanc

SEQ ID NO: 2412 - DNA, 171 bp, Glycine max
  unsure at all n locations
  Clone ID: 700998023H1
aactcaacacaacaccccctctccaccctctttttcttttaatttctncatcttatctattaatcttatatacatatatataaagacatagataatagtccatatagatataattatttcgttatattttccttgccatgggctgttaagatgtctcgcacgtgctcacag

SEQ ID NO: 2413 - DNA, 93 bp, Glycine max
  Clone ID: 700998024H1
ggacgacccaaaattttgtgaacaatgccggagtagaatttattgattctcggatcacgtagatatccaaatgggctatataaaactggccat

SEQ ID NO: 2414 - DNA, 150 bp, Glycine max
  unsure at all n locations
  Clone ID: 700998025H1
taacaacagccctaacccccccgacgtctttcaaaactgattcggagncaattaatgtaaaatctatggacatcaacgaggaatcttcattctctctccgtttttgtttgcatcattaatagncccaaatggacccgaacccgaaagccc

SEQ ID NO: 2415 - DNA, 134 bp, Glycine max
  unsure at all n locations
  Clone ID: 700998028H1
gnacatagcaccctcctctgttttgaaacagancaagaaacagagtgaacaaaganacnancgccatgnttgatccaaggancacaccaccccaccanttcttttgaatngtaacgacgacgagttcacanaaa

SEQ ID NO: 2416 - DNA, 262 bp, Glycine max
  unsure at all n locations
  Clone ID: 700998029H1
gncgcttttcattcttgcaaactggagaggcttttcaggagggcaaagggacctttttgaaggaattcttccaggctggttccactattgtggagaaccttagaacatacaagcngcccatatttgtatacatcccantgatgggcgaacncngtggnggggntgggttgttgtngacagncgantcattcagaccannatcgaaatgcaccgcggaaacancagggnaaggnactgnccnacacncanaannactgccacc

SEQ ID NO: 2417 - DNA, 130 bp, Glycine max
  unsure at all n locations
  Clone ID: 700998030H1
aatattcncaccaggttcctntcattcttggtatntggggaggcaagggacaagganaatctttccaatgtgagcttgtctttnccaagatgggaatcaaccccatcatgatgagtgctggagagttgga

SEQ ID NO: 2418 - DNA, 55 bp, Glycine max
  unsure at all n locations
  Clone ID: 700998031H1
gtaaacgactctatctctcttcgtntngtncttccttgcgctcnncctccgttng

SEQ ID NO: 2419 - DNA, 62 bp, Glycine max
  unsure at all n locations
  Clone ID: 700998032H1
ggaacgttnatcncccaaaaaacaacacatctccatcngcaatggcntntctncacttacnt

SEQ ID NO: 2420 - DNA, 104 bp, Glycine max
  unsure at all n locations
  Clone ID: 700998033H1
gnactccttccgccaacaccaaccnanaaancgaccaaccncagtaggagtngncgtacattnatcttacgcttcttctccaggnnctcctacctcnttcttnt

SEQ ID NO: 2421 - DNA, 252 bp, Glycine max
  unsure at all n locations
  Clone ID: 700998035H1
tacagcaagagtnaagttctagtagacatagaaaaagttaagccatactatatgtcgctcatcgagaagtatttcccagcaaagcttaggtggtgaaactcaaagacatacacatcgatatggaatcaaagtcatgggcaagctaaggntttaagtttatacttangaattatgatcgttatgccgaacgtttnaggattgtttttncccttttaaccgatgaagtngnnccnaaanttaaantaatcctaa

SEQ ID NO: 2422 - DNA, 126 bp, Glycine max
  unsure at all n locations
  Clone ID: 700998036H1
aatnggtcnaggatatggtcttacagagacttgtgctggtgggacattctctgatgttgatgatacatctgtanggcngtgttggaccacctcttccatgcnncatttattancataatagactgg

SEQ ID NO: 2423 - DNA, 245 bp, Glycine max
  unsure at all n locations
  Clone ID: 700998037H1
tttctgatgcttatcaaggataatgataggcatgttaggcgagctgctcnnttggctctcagcacatttgcacacaataagccaccnctcatcaaggggcttcttcctgatctgctgcctcttctatatgatcaaactattgttaagcaagagctcataaggacagttgatcttggtctttcaagcatattgtggatgatggacttgaannaggaaggcgnntttgaagtgnagaaccatnacng

SEQ ID NO: 2424 - DNA, 220 bp, Glycine max
  unsure at all n locations
  Clone ID: 700998040H1
ctganattcaacaggcaagattactcaggggtaccacatttgccatgaaacttatggtgcctacagatccccttgaggaactttgggatggtgaaatctgaganatctatctgnaaatttgataantgaatggatcnangagtganagttctgtgaaantgtgaaccagtatactcctttgttgacttgagccaaattttattttatncntggtttnatg

SEQ ID NO: 2425 - DNA, 252 bp, Glycine max
  unsure at all n locations
  Clone ID: 700998042H1
gntgaagaggaacttgctaaagaaaacaacaagagtgcttcttcttccaagggcaaaatcaccttgagtgtcaccaagaccaagcctgagactggtgaggttattggggtcttcgagagtgttcagccttctgatactgatttgggggntaaaccncctaaggntntnaacatcccacggcatctggtatnctcagcttgantcatanacctttnncnancaganncannnctccttcccccccncccgggg

SEQ ID NO: 2426 - DNA, 256 bp, Glycine max
  unsure at all n locations
  Clone ID: 700998043H1
gncaaactcaatttaattcaattgtgaatggcaacaaccactagattattgttgcgttcctctaagccaattcaacttgnnnnnnnnnnnnnnnnnnnnnnnnnnnnnnnnntgtacatgaaatgtgtacggtaccaaagtatggctagtttgaatgaaaatcatcataacataggttctgtcaagggagaaaagaaaaccagtgggggnngngaaaggnaannaatcgatacnncnaccnnntacccggnaaaag

SEQ ID NO: 2427 - DNA, 256 bp, Glycine max
  unsure at all n locations
  Clone ID: 700998045H1
tatccactaaacaccaccaggatgtcccacttagactcccaacacactgccacaccgcgccactacggccggaccagatggcatcccagccctcgcggttagcaacaacgcaggcggtttgaccacggacgacattgtctccccggcctcgaacaaccccttcctcgctncagaacggtggtgaggtagtttcncctncantgtccgcctggtcgnanttccgantgcngncccgcttcacncnggccggggggaa

SEQ ID NO: 2428 - DNA, 102 bp, Glycine max
  unsure at all n locations
  Clone ID: 700998046H1
ggaacactccatnacaccaaagnnacaaagcaaagctcatccttgnagttaccaaaatggcagcagcttcttcccatgggctcctntccatnccccatgcct

SEQ ID NO: 2429 - DNA, 97 bp, Glycine max
  unsure at all n locations
  Clone ID: 700998047H1
ttttctctnctnctnagaattnctccagatttgacggggcgnagangatganagcagccaggaacccggcatggcaacctccccaaccatggggcna

SEQ ID NO: 2430 - DNA, 130 bp, Glycine max
  Clone ID: 700998048H1
ggttccctcttcttctatgtaccctactcttgaagtaggtgaccgtgttctaaccgagaaggtttcgttcttctttagaaagcctgatgtttcggatatagtcatttttaaagcgcctccttgtttagag

SEQ ID NO: 2431 - DNA, 124 bp, Glycine max
  unsure at all n locations
  Clone ID: 700998049H1
attgtttgttgttgtaactcgttcttcttcttttgntgttctgtgtttgtgtttgtnttttctctcacctgaaaatgtcttgctgcggtggtaactgtggttgcggaagctcctgcaagtgcgg

SEQ ID NO: 2432 - DNA, 144 bp, Glycine max
  unsure at all n locations
  Clone ID: 700998050H1
ggataagtataatttngntacattaggagctcgattcttaaggaaaatgtaaatgntgtttgacattggactacatatacatgttgaggaaacaaggacatgttttacatgganaacnannnannnnaanacaannaananaaa

SEQ ID NO: 2433 - DNA, 252 bp, Glycine max
  unsure at all n locations
  Clone ID: 700998051H1
tttcctccatcctctcctcctctcttcctcttttccatcgctacnntaaccctaacccttcgctctttcgcccctccctttctctctctttctctngcactaaaccccgttcccccttcctcgttctcgctgcctcttcccatgattnnncctccaactccaagaaatcagtgctcaccgagttgatacaagagatagaacctctggntgttagcnacattcagaaggatgttccacacaacaaannnnncc

SEQ ID NO: 2434 - DNA, 250 bp, Glycine max
  unsure at all n locations
  Clone ID: 700998052H1
acatcaagtaatccttcacaatctaaaccgtcaacaaataatgttcttggactgtctcgtaacactgggcagatgaaaacagtaattaacagtggaccttcatcatcaacttatgcaggttctattcaggctacacaaagaactactcacggacaattacctgctggttcatcgaggaacacacgcgacaatgtcagaattgttcatctggcatctgctccaaatctcatggagaacaactctgntgaaa

SEQ ID NO: 2435 - DNA, 169 bp, Glycine max
  unsure at all n locations
  Clone ID: 700998055H1
gtaggactgtggtatcagaattcagaatgataaacagacganttttgaaggattgctctgcttcanatccctttgtcaaagtcaatgtcacctccaaattctagcttgtcanatgacgagttcgtgacggtccacagttactggggtttccaatccttnagtacagtga

SEQ ID NO: 2436 - DNA, 100 bp, Glycine max
  unsure at all n locations
  Clone ID: 700998056H1
gnctgcatccagcatccaaggaggaggaacaaccagcatatgccatcaaaaatcctccgttgcttattctncgtcantctttccacttttccatcccacc

SEQ ID NO: 2437 - DNA, 257 bp, Glycine max
  unsure at all n locations
  Clone ID: 700998057H1
gtcctaacaatttctctctgtttccttcttcaccgcatcaatggngtnggacggcgttctcntccggcatgtgcaaccctctccntccgacatctctgctgtcgtngacgangctttcttgcaaaaatacggtatcaagttgaacgatgcgattctcgctgaggataagcanaaacctatgnatgaagaatnggcaaacaatcactaangtggagtacatcgctggaggtgcanaannaganatcnatgggggnnga

SEQ ID NO: 2438 - DNA, 258 bp, Glycine max
  unsure at all n locations
  Clone ID: 700998058H1
caagggtactgtccatgtattcagcctccaaggttaattctagcatccccgagcaggaaaagtcacaaagttccataccaattccagatgctgccattaccccatctagctcttctcgctccttcatnnnattgaaaggggtgttgcccaagtacttcaattctgagtggtcagttgctcagtttcacttacaagagggctcncatnacacaagtngcatttggtnccnaaaaanacanccnncatannnntgggnag

SEQ ID NO: 2439 - DNA, 209 bp, Glycine max
  unsure at all n locations
  Clone ID: 700998060H1
gcaggttcctccactcaggnagcctccctcntncccactcggttccttccatcctcgccatggcaacaacagttggcatnagttttggggaaaaccacaggaaattccctgcanagnaaagnggtcaggcatccanaccaaaggcagttcctggaaaaaaatgggagcattcancncanatcgtccagtggcagtnatgcagngctaat

SEQ ID NO: 2440 - DNA, 127 bp, Glycine max
  unsure at all n locations
  Clone ID: 700998061H1
ggananaaganagancccancgaagacagaagaacaaacaaagganccaaacaaagccgaaagatcagcaagagagcacgattacttgcanttgttcttcctntgcagtaacaccnagctnnccatc

SEQ ID NO: 2441 - DNA, 131 bp, Glycine max
  unsure at all n locations
  Clone ID: 700998063H1
gtttactgctgagtggtgttacaatgttgcgccatttggacctccanngacaaagcagaacagattccagaaagctatctccaacacgattgcagaagggaagtaccgaacagctgntctcggtggcagtt

SEQ ID NO: 2442 - DNA, 250 bp, Glycine max
  unsure at all n locations
  Clone ID: 700998066H1
gnaaaactttcggnagatttnatccanttgaaatnnccaaaaatgactgggataaacttanganttcaattattgaaattgaataagtanacaatttaattggattggtcgnatggtatcaaaaanatggagtactaactcccatttcttatttattattgaattaaccgntcnacttgctttgttatcgancatttctttttgatttnaaaaattttccggaaaannttgaatcnantttatangcgac

SEQ ID NO: 2443 - DNA, 168 bp, Glycine max
  unsure at all n locations
  Clone ID: 700998067H1
gnaacccagtaatggttttttctgctgtgttcactcccactctcaaccttgccatttcatcccagcacatactgntgtagaagaagaanatncatctaccacaagaagagttgttacagtgagagnnagctccacagagaaggatgaatcccaaggacaangatnctt

SEQ ID NO: 2444 - DNA, 94 bp, Glycine max
  unsure at all n locations
  Clone ID: 700998068H1
gantcgtccagcaaggtctcngtcgaagacatgcttttcntcacgaaacaggaccatccacacagctccccacncgtcnagnanttcnaggttc

SEQ ID NO: 2445 - DNA, 162 bp, Glycine max
  unsure at all n locations
  Clone ID: 700998069H1
tcctctggtctgtgggccctacaaggtccccttcctcctacaacattcacgggtcgggtcatggggtccanggggagctttacttggtctccacgcgcggcctcgagcgcatggacgagntcgagggaacctcangngcccatacgagagtctcccgatcaa

SEQ ID NO: 2446 - DNA, 123 bp, Glycine max
  unsure at all n locations
  Clone ID: 700998070H1
gncttgagctttccatggaagaagaacacgcngcaaagggccaccgcccggacgatttccttcagttcctggagaccaacgggctccgacccttccatttacactgctattgattcccacccc

SEQ ID NO: 2447 - DNA, 145 bp, Glycine max
  unsure at all n locations
  Clone ID: 700998071H1
ggtagatttccgatatcacaatctttacctctttttatcatctcccgttacgtccatcgttttttgtcgctcgaacctgcaagcacactttagtccattctctcagcggtggaganttgaattcttgaattgaagcntttgtccc

SEQ ID NO: 2448 - DNA, 93 bp, Glycine max
  unsure at all n locations
  Clone ID: 700998072H1
gnaaacttcttcttggaatgtcccttccctaaataaccctcaaacaaaaggccaccttacacatccncnttnctcctgaaaattctgctttag

SEQ ID NO: 2449 - DNA, 125 bp, Glycine max
  unsure at all n locations
  Clone ID: 700998073H1
gttcctcactaggagctcctctccactggttcttccatctgcatgcacacagttgcatagttttggaaaccaagaattcntgaagaagggtagcatcaacaagccagttctgaaaatggngatcc

SEQ ID NO: 2450 - DNA, 105 bp, Glycine max
  unsure at all n locations
  Clone ID: 700998074H1
gtccatttacttcgagagtctcccttacaaggtaaactcccaccacaggctcacatccgactacgaccgcttggaagaaaaagccctagacttcaggcnaaaact

SEQ ID NO: 2451 - DNA, 252 bp, Glycine max
  unsure at all n locations
  Clone ID: 700998075H1
acattgaacaaagtggagaaatcatctttaatgcttgcgtatgaggttaatgcagtgggtcctatcttagttatcaagcatatgtggcctcttctaaaagtaggaggaggccatgggactggaanaagtgctgcagttgtggctantttgagtgcaagggttgcttctattggggacaaccgtcttgggggttggcactcttatccgatttcaaaggctnccccnnanatcnattaccaannccccccnccc

SEQ ID NO: 2452 - DNA, 122 bp, Glycine max
  unsure at all n locations
  Clone ID: 700998076H1
cactgtcantgccatatatanatttctgtcttcatcaaaggtgagttttgcatctccttgtcattgtatactctgcaagcctttttgcttattgntgtgctgtatctgagnaatttgactgt

SEQ ID NO: 2453 - DNA, 254 bp, Glycine max
  unsure at all n locations
  Clone ID: 700998077H1
gttcacaagctgatattaatagaaatgtagacatgattgctgctccgtaggaaggagcgtgaatattttgagacaagtcctgaatatggacatttggcacataaaatgggctcagaatatcttgctaagcttctatcccagcatttggagcaagttancaggcagaagatactagtatcattncttaataaataacnattattgcccgncctnnancnnagtttngcccctttncngncnncnnntggnggggc

SEQ ID NO: 2454 - DNA, 139 bp, Glycine max
  unsure at all n locations
  Clone ID: 700998078H1
gtccaattgannattttaaacaatgactgggataaacttcaaganttccnattattcgnncattgaataagtnaaccaatttaattggattggtccgaatggtcatccaacaaaaatggagtanctaactccccattnc

SEQ ID NO: 2455 - DNA, 127 bp, Glycine max
  unsure at all n locations
  Clone ID: 700998079H1
tgcctgnagnaagnagcacagnattttctgttgaanccagtncaaattgtcanatntaagangcttaaaagatttcatccatgaaagggaaagtgaangaagntnacaaaatatccccacaaaagac

SEQ ID NO: 2456 - DNA, 114 bp, Glycine max
  unsure at all n locations
  Clone ID: 700998080H1
gggaaaggcanccattgcatnttntntgcaacccattggggaaatctggaggagctntgatttcagccacnttccatgatcttaacttttggttcactcagctaacctccaacc

SEQ ID NO: 2457 - DNA, 259 bp, Glycine max
  unsure at all n locations
  Clone ID: 700998082H1
cganttgtttaataatagtagcaattaattttttnaaatgcttagtagctgtgttgtatgtttacttgtatctccnccattgtncgggtttcatatatgttttccttgaatgattttccttcccctgtatttccacctcccttccctggattggagaggatttgggcattagtggttggtggtgatacgttaaagtgttttatctactccgtgaaatactgttttttatgccagctttgnctaaagccacctgaagnca

SEQ ID NO: 2458 - DNA, 247 bp, Glycine max
  unsure at all n locations
  Clone ID: 700998084H1
gnagaatgccccgctcgaatttcagaacaccaagctcatgactcgtctgcacctacaccctggacgagatcgagggacgcttccgaggnttcatcggatggaacggtgaaattcgaggagaaaganggaattgactatgctgctgncacngtacagnttccagggggagagngtgtgcnatncancntcannttangcaattgnaggcannggggaaaccaaaacctacaggggnnanncnaannnc

SEQ ID NO: 2459 - DNA, 88 bp, Glycine max
  unsure at all n locations
  Clone ID: 700998085H1
gntcaatccaaattctttgagttgaacacaggggccnagattcccttcctccttgggttagggacttggcaagctganacctggtgtt

SEQ ID NO: 2460 - DNA, 245 bp, Glycine max
  unsure at all n locations
  Clone ID: 700998086H1
ataacaaaaacaaacactttcttacttcataagatcaccttttcttcatcttctacttctgccttcactaaaatgatgctcaaaatcaagagggttcccactgtcgtttccnacttccagaaagacgacgctgcagactctctcgtnccgtcggaggttgtggtcggattgcctcaaagcttgttgcattccagatgcaaancngactttgtatggttncaggaaggcnaantatggggngnatt

SEQ ID NO: 2461 - DNA, 106 bp, Glycine max
  unsure at all n locations
  Clone ID: 700998087H1
gntttctgtccttctattangaaatcnttaactccgcccagatccgggcangtaatcttgcccaaacaggcatttgatgaggccaatttcccgagcttgacacatt

SEQ ID NO: 2462 - DNA, 91 bp, Glycine max
  unsure at all n locations
  Clone ID: 700998088H1
gntttgtctccattccagggagctataatggcatgaagattttgaaggcacgtcaaggggaccatcancnngcacgcnncncanctnccca

SEQ ID NO: 2463 - DNA, 250 bp, Glycine max
  unsure at all n locations
  Clone ID: 700998089H1
cagaacttttcaagatggtttgtgaagaaaatgaaactgatgttgatattggaatacctgcggtcatgcttcccacaagatgctggattgaccttggaaaggcatatagaaaataaatccaatgtgncaatccagttatactctccactgcgtccattggttgatgttncggaagtgtttttgtggctnatggctgttggnaccatttnaattncttctnatnggtctgcctggagtgatagagaancac

SEQ ID NO: 2464 - DNA, 251 bp, Glycine max
  unsure at all n locations
  Clone ID: 700998091H1
tgataacattaggtgggattcttggggaaggtttacagaaaggagtgttgcttatcaaccatggatatggactgcaggaaaccatgaaattgattttgctccagaaattggtgaaactgtacctttcaagccttatacccacgttaccatgttccttataaagcatcctcaaagtacttcacccttcnggnattctatcangagggtttnannaaacancattgtttnggcccncatanccgnggtangga

SEQ ID NO: 2465 - DNA, 252 bp, Glycine max
  unsure at all n locations
  Clone ID: 700998092H1
ctcccgcttcttacgcatcgactgtagtccgagtcgccggaattgcaaccgatgacaaacttcttttccgccaacaccgaangcgacgtgaagcacaccgagaccaagcaagacgagaccggctggcaggagcccactcggcganctaccaatgggtgggaaagaccnaggatngaaaggaatcactgcgcacctttcgggnccnnggaaaaaaaccncccccagtaccnnanacngcngncnnnccncaac

SEQ ID NO: 2466 - DNA, 253 bp, Glycine max
  unsure at all n locations
  Clone ID: 700998093H1
gntgaagacttcattgtccttcccaatgttggacattgcccccaggatgaagcacctccatctcgtgaacccacttgttgagtcatttgtggcacgccatgctaaatcctcaactagtacatcgcattgttaattgattcgccaacagttttttgatgcngctcaactcattgaaattgtgtacatttcccnattnggttccattaggccgnagtttatttncggtnnngnaaacgnattancccgggtgggg

SEQ ID NO: 2467 - DNA, 254 bp, Glycine max
  unsure at all n locations
  Clone ID: 700998094H1
ggagaagtganatacactaagttatcctccataaatacactctaattaggtggcaagataagtgtctaaccttagtaacattgccacatattgtgttcattttggaattgtgccactaaaattctattcaattcatctatggctgcctcttcttnatgctatgcaatccaatcctggcaaaccctttgatccgcatttccagcgggtctagggtgaacnatttggngtncccgntttgnaatgggaggatgtgg

SEQ ID NO: 2468 - DNA, 169 bp, Glycine max
  unsure at all n locations
  Clone ID: 700998096H1
acaatggcgacaaaacctcgtttggcttatctctcttccacttttcttcttctcnttntngtaactgtctttacttcggtgtcggcacaagatcccngaancacccatnantctacannacttccttcaatgcctcaccaaatacacaaatancccctccacnatggtt

SEQ ID NO: 2469 - DNA, 172 bp, Glycine max
  Clone ID: 700998101H1
ctatttctattttgtgtatcagctaagcttaatataccttcacccgggatcaatacaatataatggttcaaacatgctaacggtgtatgctcctagagctattctgaagtgtcatttacaccaagattcagcttctgctcaacaagcatatccatgcaagatcataataatg

SEQ ID NO: 2470 - DNA, 286 bp, Glycine max
  unsure at all n locations
  Clone ID: 700998102H1
tgcttttgggaagagtggaactaatgtgaaaacagctatttttctgtcccccaagtttgaacttggaccaggatcggtagccaataaatatgattatgacgctgattttccaagaggtcatatagcacttaagagtttcaatgctgaagtagttgatgaagcngggaacctgtgcctcttcatgaaacttatctccaccactgggttgttgtagatatatcaactaaatatgtgacgacacacacaaatatgatggacatangatcttcacaactctgnacatata

SEQ ID NO: 2471 - DNA, 287 bp, Glycine max
  Clone ID: 700998103H1
gtaaccaatcatctttagttcttcagtaatttattgtgggattctattctaagattttgagaatgtctagctgtgggtgtggaagcagctgcaactgtggcagcaactgcggttgcaacaagtactcttttgacttgagttacgttgagaagacaaccacagagactctagttttgggtgttgggcctgtgaaggcccaattggagggtgcgaaatgggtgttgcatctgagaacggtggctgcaactgtggatcaagctgcacctgtgacccagcaactgcagtaa

SEQ ID NO: 2472 - DNA, 126 bp, Glycine max
  unsure at all n locations
  Clone ID: 700998104H1
cttgannattatggntanggcncctcganaacatangtgnattgacanngacatctnatatcngangtcntgaagcatgctcagaatgatatggttggccggctgcgccaanatgatggcacacct

SEQ ID NO: 2473 - DNA, 289 bp, Glycine max
  unsure at all n locations
  Clone ID: 700998105H1
ggcatgacaacaatcaagagctacctgagtcatggagccaactactcacgagtgggnntggtgtctgaagaagagaaagggggtatgtgccaggttcagtctaagaagttggagaactgggagcaacaaatgctaagccaggctccaagtgctcctattgttgatgttaagcaagaaagctcggtgaacagctatgcgtatgggcatggaaacgaagagtttcaaccagcaaagccaacatggtctcaaatagtgcctgcttcttcccccaaatctgtgtaacaagttt

SEQ ID NO: 2474 - DNA, 294 bp, Glycine max
  unsure at all n locations
  Clone ID: 700998106H1
attaattagtatcatggcagtttgatggatttttacagcagcaggcccagagttttcaacttcaattcagatccattcagggggagaataatggaagttcttgaaaccttttatgaaaagtccnttctccccaactatttccccttcctcccccctccctccctaatctttactcaaacgggttatccagcaacacccaaagcttaattgggcttcgggcaagcgcaacccacatctcttgtgggcctgaaccacctaaccccatctcagatctctcagatccaagcccaaatc

SEQ ID NO: 2475 - DNA, 281 bp, Glycine max
  unsure at all n locations
  Clone ID: 700998108H1
gtgcaatatgaacacatctcaccagtcatcaatggaatgagaattgatagtggtgcaacagaggtagctgctctaatagccatggtttttggttaccgtttcttggcatatctttctctaaggcgaatganacttcaatctggagcttaaattcaacttgatcactcttgcatgtggggtgataatattaattaaacaaagactcacatgtaaggaggaccaataattgaagtacctagcacattagagattgtggcttttttttatgtctgggaatatcg

SEQ ID NO: 2476 - DNA, 286 bp, Glycine max
  Clone ID: 700998109H1
gggcaccatttttaccttcacaccctgtgatagaaactggtggaattcctgcccctgacaaaccttcaaccacttggtaccatcgctgctgcaccatggggctcagcactcatattgccaatctcttacacttacatagccatgatgggttctaaaggactcaccgatgcatcaaagatagccattttgaatgcaaactacatgggcaaaacgattggagaattattacccggttcttttccgtggagtcaatggaacagttgctcatgaattcatcatgacttga

SEQ ID NO: 2477 - DNA, 282 bp, Glycine max
  unsure at all n locations
  Clone ID: 700998110H1
caaattgcttgtgaatgctagaaaccctagacagattcgattggatgcgctcccatttcacatcaagggcgagcgcattcggttcttgcaagcaagcctggtactaccgctgcctcggcctcgacccctgaatttgaaccattcatcaccacctttcttcattcattcacggttttccttttcgactcgannnnnnnnnnnnnnnnnnnnnnnnnnngacgatgttgacgatgagcaagcagaagaagaaccagaacgcgaagaggctgttgataagcatca

SEQ ID NO: 2478 - DNA, 281 bp, Glycine max
  Clone ID: 700998111H1
catctctgaaatcaggcaagtgaaaaccaaaaataaaatggtctcacagacagttgaactcttaaagaatgagattcctctggagcaggaatcagtggttttagctgaagatgctgtaaatggtctcgttcttgtggacatcataaatggcttttgcacagttggtgctggaaatctggctccaagagaatccaatacgcagatttcgggaatgatcagtgaatcagcaaggctggctagagtgttctgtgagaagatttgccggttatggctttccggat

SEQ ID NO: 2479 - DNA, 285 bp, Glycine max
  unsure at all n locations
  Clone ID: 700998112H1
cagcttcacacctcacttcccttgcctccgtctcttctttccacctctccantttcccgcaaaatttctctcatttccgggaaaaaaacagaaccccaattgcaaccacctcacaagctccccttcttctcagcaagggcctgcccccaccagagtagtgttggtgaagtctcaggccacagcacctgcttcttctgaggctgtgaaggtgacaccggtgccttctgagatgaaggcatgggtgtatggagaatatgggggtgtggatgttctgaagctggactc

SEQ ID NO: 2480 - DNA, 281 bp, Glycine max
  unsure at all n locations
  Clone ID: 700998113H1
gnagaaagatgggtagtagtgaatatcagactctgcacattttcttctttcccttcttggctcatggccacatgataccaaccgtggacatggccaaattatttgccgaaaagggtgtgaaggccactataatcaccacacccctcaacgaacctttcatctacaacgccattggaaaatccaaaactaatggcaacaaaatccactccaaaccatagagtttcctctgcagaggctggtttacttgatggctgtgaaaataccgagtcagtcccttcccc

SEQ ID NO: 2481 - DNA, 283 bp, Glycine max
  unsure at all n locations
  Clone ID: 700998114H1
aatcgatatagatagattttatcttatagaaataattgaaaaatacattcaattatgtcttcgcgtatcaaatattttcttttcatatcgatgcgtacgatatttttccagcaattaatgtatgncgagacagaaactttcacttacagttttttctttttaatattgtatttcattttttttnnnnnnnnnnnnnnnnnnnnnnnnnnnnnnnnnnnaatcaaataataattaataaaaagaaaaaagtgtaaatcaaatagaaatttataanatctatgat

SEQ ID NO: 2482 - DNA, 273 bp, Glycine max
  unsure at all n locations
  Clone ID: 700998115H1
gaacaggagatcagttttgaacaagttgaaggggacttcgattcgttccggggacaaatggatttttgagcaactaggaaatcatcacacactgctaaagtactctgtggagtcaaaaatgcgcaaagatactttccttctgaggccatcatggaggaggtcatttatgaagatctcccatcaaacttgtctgcnataagagactatattgagaacatgaatgcatcaaaatattcggaagtttgtgagcagaatatgaattcagggcancac

SEQ ID NO: 2483 - DNA, 283 bp, Glycine max
  unsure at all n locations
  Clone ID: 700998116H1
gncaacacgaaacacacacatgacacagcaacaacagcatagccacnacacaaccaaatgacacccacaaaggaggagagaaagagagacgnnnnnnnnnnnnnnnnnnnnnnnnnnnncccctctctcgcacagccctgaagctccagaaccccgttttggaattaattcgcttctctttaatctaaatncgttgattctntccgttgacatgttggagggtccaacctttcttgtttcgagggacttaccganctcatgtgagcaagagaccaggtggatt

SEQ ID NO: 2484 - DNA, 296 bp, Glycine max
  unsure at all n locations
  Clone ID: 700998117H1
gagatccganaataccaaaagagcacagagcttctgatccgcaagctcccctttcagcgtcttgttcgtgaaatcgcgcaagacttcaagactgatttgaggttccagagtcacgcggttcttgcgcttcaggaagctgcggaggcttacttggtgggtttgtttgaagacaccaacctttgtgcgatccacgccacgagagtgaccatcatgccaagggacattcaacttcgcaaggcgcntccgtngagaacgtgcttaaggcttataatatgatatancatagttgtcggctt

SEQ ID NO: 2485 - DNA, 292 bp, Glycine max
  unsure at all n locations
  Clone ID: 700998118H1
gtctgtttgtcgttggaccagagagcgcaaggcancacccaggcccagcatgttaccgcaaaggtggtcctctgaccatcaccgacgccaacctgttcttgggcagactactacccgacttcttcccaaagatctttggcaagaacgaagacgaagggcttgatgagcaggcaagcaaggctctttttgaggagctgacgaagcagatcaatgagggatactgctggtagcacaggacaaggccatgagtctggacgaatggcgtacggtttcatcaggatcgccaacgaga

SEQ ID NO: 2486 - DNA, 288 bp, Glycine max
  unsure at all n locations
  Clone ID: 700998119H1
aatcnnacgtgtttaatgattgtcaacatcttttaaatttttgtgcagtatattcgtcctaaacncggttgtcatccctgcattgtggtggatattacctgaccaaagctcacagtttgtttctcataaactctgtgacttaggtggcactttgaaattttattctttcgtacgtcttgcactcattcagctcttttatgtaagtagggatatactattttttaaagtgcacattgactgtaaaaagtactttgttgcattgctctccaagttcattttgtntgccnt

SEQ ID NO: 2487 - DNA, 289 bp, Glycine max
  unsure at all n locations
  Clone ID: 700998120H1
acgaagtagnaagtcagaagtctttcctccacattggatattcattctacattgactgttcctttaaagagtcctgagaaagtgaaagtcaagccatcacaaaagaagaacaagaaagtagccagagagagggatctcttcaagaagaactacttacatgcatgtgagagccttctgtccctaatggttgacaagaggcgacaccggaaaacagcaattctctccctgaagaaatctggtcccgagcttcctgagctcctcacacaattttctggccagcattgccggt

SEQ ID NO: 2488 - DNA, 284 bp, Glycine max
  unsure at all n locations
  Clone ID: 700998121H1
tatctatttgtnttcttgagaccgagtctctggccataccatatcagtaataaacctcatagtgtcgacatggtttgcgaggaagaattgttgatagaaaaagtgtgctcgctctatgaacaaatctcaagcctcgagagtctcaaaccttgcaagaatgtcgacatgctgttcaccaaactagtctgacatgcatacccccaagcccaatcgatgtcacaaagctaaacaaaaccgttcaagacattcgatcccaccttataaaactatgtggtgaagcgagg

SEQ ID NO: 2489 - DNA, 286 bp, Glycine max
  unsure at all n locations
  Clone ID: 700998122H1
cggcgcgcgctgaagtttgctaggcnccatgagcaggttcgggaancngttaccgaancgaggnagagatgagggagaggtacgagatattctccgcaaaacctcaggttcatccgctcccacaacaagaaccgcttgccctacactctctctgttaatcattttgctgattggacttgggaggagttcaaaagacacagactaggcgtgcccaaaattgctctggccactcttaacggcaaccacaagctcactgatgctgttcttcctcccacgaaagactgga

SEQ ID NO: 2490 - DNA, 285 bp, Glycine max
  unsure at all n locations
  Clone ID: 700998124H1
cataatatctacaaactttaaaatgattaatttttgtcgactttcacttcctgttttttttatccagactcaancctaaatcttatttaagagattcaacattataaccaataactctgttggttacactgtcaccttataatcattaaacgcttactatattcttatatgtttattttatccttgcctgtcgtactgtggntttgaaaagcacatgcagtgggcacgccttggtcacagcctcattggagaaattagcataatcactgatacaccgcgttgatt

SEQ ID NO: 2491 - DNA, 281 bp, Glycine max
  unsure at all n locations
  Clone ID: 700998126H1
gtgtccactggatctgctgccccttcgccccgttcatctgcttcaggtcctaatgtcatggacatggctgctgccatgagcctttttccaggatcgccttcatcgggctcttccatgtcgccgtcccactttgggcagccaatgtccccatctgcaaatggcatgccactgtcttctgcttgggctcagncaaatgtgccggctctcatttaccaggaagcaatcttcaatctagtcgattgaggtcttccctaagtgctcgtgacattccaccagaagac

SEQ ID NO: 2492 - DNA, 281 bp, Glycine max
  unsure at all n locations
  Clone ID: 700998127H1
ggcatgtgtgaagattttnctctcttctctgttattcccaattgtgtttacctgttcgcaggggttcttagttggggtttcagcccttttgctcaccanaaaaaaaataagaaactactgggtntggcttttggngtgtttnaagtngngntgaaatagagacaatcggttggggttggnantgttgcgntncgttgcgtatttggcaaattgatgcancgcggtgatngcagaagtgantantcccttttggttgtgttgngggtaatgcttctcagtac

SEQ ID NO: 2493 - DNA, 161 bp, Glycine max
  unsure at all n locations
  Clone ID: 700998129H1
gntagctgagttagggtgagttgcaggcagtgtcatctctcctttgacgacaagatgagcatcccaattccccatcggcagttattcatagacggagactggaaagtccccgtcctcaagaatcggattcccatcatcaacccttccanacaacatacnng

SEQ ID NO: 2494 - DNA, 280 bp, Glycine max
  unsure at all n locations
  Clone ID: 700998130H1
atcntatncaattgaaattntaaaaangactgggataaacttaagaattcaattattgaaattgaataagtanacaatttaattggattggtnaatncgtatcanaaaaatggantactaactcncatttctnatttattattgaattaaccgatcaacttgctttgttatcgaacatttctttttgatttcaaaaattntccggnaaaaatttgaatctatttttatatggngaatcaatctnactacttcggnctcgaggtttctgcgctgaaaaaaa

SEQ ID NO: 2495 - DNA, 101 bp, Glycine max
  unsure at all n locations
  Clone ID: 700998131H1
agcatctgctgacccttctgtattttctcaactaacatggacttttcngtgcaaaccttcaaacaaccaanancgaagatggggntnccnnatgngcacnc

SEQ ID NO: 2496 - DNA, 284 bp, Glycine max
  unsure at all n locations
  Clone ID: 700998132H1
gtttagtcangaccgtggatttggttgtgncgcttggatatattannntggntggnananagctccccataacatgtntgatataatgtctgacncatagaaaatntgagtanngtgttgagaatgttcncattggaaaccgtgggccatatttcggggtcaantgtattatatgntatnngtatntctnanattccgtgacctttgnttgttgcaagcacnctctgggagggtnatagcatgaattaaataangacatgaatgtttcctttatcatcatgtgg

SEQ ID NO: 2497 - DNA, 202 bp, Glycine max
  unsure at all n locations
  Clone ID: 700998133H1
tctttttgggacaccctctattgctattcctcccttggtgttgtttgtgttaaagggtatctctctacttaatataaagttccattgtctcttgaggcaattttcaaccttagttgtgtgttttggagagtttttttgtgttgttttgttgaggttgggttgtgagtnagagaatggtgggtgccctatctgnnntgggccc

SEQ ID NO: 2498 - DNA, 278 bp, Glycine max
  unsure at all n locations
  Clone ID: 700998134H1
ggactgcncatatatacacatgagattcgcaccttcctccaagttcttaggcttttcaaatctctttcactatcttatcgcaccctctttctctccgaccccaaagttctcatcttccatttccgctaccatgtccactttttccantcagaatgagacnnggatcnacaaaacgcagcaacncttgcagtnaagagagtttggttntgtttgtaatggcaatggnatttcagacaaactatgccaaaaaacaggattgtttggtctgttcgtacngg

SEQ ID NO: 2499 - DNA, 286 bp, Glycine max
  unsure at all n locations
  Clone ID: 700998135H1
gaggatacaaaacttatgtgatggaaataaagggaaatcgtgtttacagtaaattgaaatatgaatctggtgtccaccgagttcaacgggttcccctaacagaaactcagggccgggtacatacttctactgcaacagtggccatcatgccagaggctgatgaagttgaagtcgtaattgacccaaaagatattgaactgacaacggcanttctgggggtgctggaggccagaatgttaacaaggttgaaacagccattgatctcttccataaaccaacgggaatc

SEQ ID NO: 2500 - DNA, 242 bp, Glycine max
  unsure at all n locations
  Clone ID: 700998137H1
gggagtgtgagcgtgaaatgataggggcacgggtactcttgagatgcgactggtcngtgtaatgccactggggtcattaaaatattccttagattagattagacaagggatatattatgctaccattttttttagatttagttctgtgttctgggactgggttgaaccaagangtattcgaatgcaacacatctaggacctattacgttggatgaaagaatacnacaaaaaacncctggttg

SEQ ID NO: 2501 - DNA, 274 bp, Glycine max
  unsure at all n locations
  Clone ID: 700998138H1
gagaatcggtgtattgcatctganttggaggggctttggttctcagatcatangaaaccaaaccctaatataagtcccaaatcacaatnacagcatcagnngagaggtctcncgccgattgtnttgtatctgcagttcactccttacgaattccgagtatctccgtntgcngtggcnttcactttctnntctaatcagcgngngaacnagaacaacgctcgcnggnnnnaaagaatgttatagtgtgtataantgtcggngataggaagaagac

SEQ ID NO: 2502 - DNA, 279 bp, Glycine max
  unsure at all n locations
  Clone ID: 700998139H1
acttcaaaaaagttgatgctcatgtgcaccagttaaagggtagcagttcaagcataggcgcgcaaagggtgaaaaatgcctgcattgctttccgcaacttctgtgaggagcagaacacagatgcgtgcctcagatgtctgcaacaagtgaaacaagagtactgcatagtcaagaataagcttgaaacaatgttcaggcttgagaacagattgtggcagctggtggatcaattccctacggaactgagtttcattgggtgactgagagggtntgtagaga

SEQ ID NO: 2503 - DNA, 275 bp, Glycine max
  unsure at all n locations
  Clone ID: 700998141H1
ttggtgattgcatatacgagctntatgcccgtaggcacttttnantccctccccttagtattgaannatacaatgatcgtgttatggcagttgntcgangcgaantcacagatgnattgctgcagaaacttcttgagagtngttcttatcagatcaggaganggatgttcttcgatggggaaannacattgtttccagcaaantaagacgaaaaaacgtgctggtgcagctgtgtntnatagagcatctcantagaancatagtnggcnattgtg

SEQ ID NO: 2504 - DNA, 98 bp, Glycine max
  unsure at all n locations
  Clone ID: 700998143H1
ttncttcatagncaaganctcccactttatnctctaaggatccatactnnncgnataaggcctaaagcangagcaaattcngggagcaaggcacatgg

SEQ ID NO: 2505 - DNA, 279 bp, Glycine max
  unsure at all n locations
  Clone ID: 700998144H1
gncgctattgggagtggttgttgggggtgtggaaatggaatccgtntaccgcngtctcgacggcgtcntattcgctgccaattcgggttcngcggatgcagcnggcggaggcggttaccggtttccggtgaagcangcgcnnaccgncgcntccctcgccctcaccggcgacacaatcgctncagctncagccaccgttggaggaagcaaaggagngcganggcagtgactctcaggatgaatgtggagatacctttcagaccatgattggctgcgtgc

SEQ ID NO: 2506 - DNA, 279 bp, Glycine max
  unsure at all n locations
  Clone ID: 700998147H1
ctgagatctgtcagacatgtagtnagttgaaaaatgtctgtcaagtgtgcttctggatcttgaatatgggactaccagttcaagtttcgagactcggctcttagtattgattccaatgatgccattccaaagagtgatgttaatagggagtatnttnctgaagagcatgaccgtnaggctagagcnggtatagnattatgcgatcnnttatggtaaagtacgcccaaatgatagtntcctgaagcttcaaaggacnatccatnttacaanagnnnccga

SEQ ID NO: 2507 - DNA, 282 bp, Glycine max
  unsure at all n locations
  Clone ID: 700998148H1
ttaatatagaagaattgaganaggctgccgaaacacataaggacaacttatctgcnacttatggtaacatatccttcaantcacggtgtttatgaggtaggtattgacgaaatttgcnagattattcatgatatggaggnccaagtatatatggaggtgccaacatgaatgcctcaggtgggactccnaagccccaggttggatggancagatgtnaggccatcctcnatcttccacaaganattttgcatccctcatggaggangtggnccggcatgggtc

SEQ ID NO: 2508 - DNA, 282 bp, Glycine max
  unsure at all n locations
  Clone ID: 700998149H1
cgaggctttactttctgattggnagcaacaattagaacgtgatattgaaactatgaaagctcagtccaatattgtcagtgtttgcacagttctcaacaggattggattggattgccctgaccttgagactctttgcatcaacgaccaaaccctcacaactgaaagtgtggagaagatcatggctgggctataagttaccatttatgcntccatctggaggctctatcaaggatcccagctgtnatatctgcaaaaagcattattatgggttaacttctacag

SEQ ID NO: 2509 - DNA, 282 bp, Glycine max
  unsure at all n locations
  Clone ID: 700998150H1
ttcatcagttttttgaagggtttgcgcttggaggttgcatttcccaagcgcagtttaaagcctcgtcagcaactataatggcttgtttttttgcactgactacacccttgggtgttgggattggaatggctatcncttcggggtataacccttacagccccggtgcactcatcgccgaagtatcttggattccttgtcgtcggggatttggtttatatggcttggtagatttgatcgctgcggattttcttagcaagangatganttgtaactttaggctgc

SEQ ID NO: 2510 - DNA, 126 bp, Glycine max
  unsure at all n locations
  Clone ID: 700998152H1
gggcaagntnagtgtctaaccttagnaacattgccacatatnaccgntcattntggaattgtgcantnaaattctattcaattcatcgatggggccnnntcnnatgctatgcnatnaatcctggca

SEQ ID NO: 2511 - DNA, 279 bp, Glycine max
  unsure at all n locations
  Clone ID: 700998153H1
cncttgtgggttgaattttttgataacccttgttgatgggttgactcactttttttctcttgggctgctctgctgttcttccacttgcactcaaatactacttgaggtgagtgggactcttgcacatgccagcaacactcttcagcccctctcaatatcacttggaaattttcttgttctgctttttgtttctcactctctgtgtgtgtattggntacgggagtctcattaattttcctcccctggttattttgtatgatagtagatgtatatntcatt

SEQ ID NO: 2512 - DNA, 278 bp, Glycine max
  unsure at all n locations
  Clone ID: 700998155H1
aacgcataaattaggtgcgtgttgtgaattgtgtgagccaaagagagnnnnnnnnnnnnnnnnnnnnnnnnnnnnnnnnctctggattccacctcttcccgtcctnncgagacggttgttgtgctgcttncctcttcaggttgacctgggattgaatctaaagaatcttgatttacattttgagatatggagggagtttgtttctggacaaattggctaccagtatcggttttttgcattccaagaagtgntgattggcgagttttcatcctggagat

SEQ ID NO: 2513 - DNA, 161 bp, Glycine max
  unsure at all n locations
  Clone ID: 700998156H1
gggcaagcaatccggtccaanatcaanccaacttnaagatacagtannngccttagacaaggatattcagtctttacaggatgaactaggagctgttactgaaangagggancnagcttntgagagnttacagcagcaaanatacaaggcgatcaggggnc

SEQ ID NO: 2514 - DNA, 277 bp, Glycine max
  Clone ID: 700998157H1
ttgcatcaccgcaagtccacaacatgggctgccactgccgctgcaggcatagcttccttgttttcttcttctattaacagtgtcaaatgtcttcgttcctccaagaactgctccattatagacccccttataaccacagtgccctcaaaccgtggcatgtttgtgtcacacttggtggaacctttgtccattgggggtgccataattcgcacaagttgtgggggcctagaatttctgctgctgttgcacaagaagaggctgttgttgtggctgatga

SEQ ID NO: 2515 - DNA, 161 bp, Glycine max
  Clone ID: 700998158H1
ggttcgtgtagccagggcactgaagggatagagtacctagggataactgagaaactcacttgggtttcctcccttattgcaatagccctcggatttgctatcattattagccagttttttgggtttagtctgtattaaaacatctttaataagaaaggtac

SEQ ID NO: 2516 - DNA, 129 bp, Glycine max
  unsure at all n locations
  Clone ID: 700998159H1
cnttgganctcgtgtaatnnagtatgngcaggaagattgtnactggcgtcatgcagcattgtcgtgntagncatttcagcangacagtgnatgncanaatcaagntagnnatttattcaatcatgaatt

SEQ ID NO: 2517 - DNA, 276 bp, Glycine max
  unsure at all n locations
  Clone ID: 700998161H1
atgatcccaagaccagatccatgcgtgaggntccacttccagatgcagatccgaatgaaaagttttatttgggtgataaccaatatagaaatagtgggcaagctttagaattcaaggaattaaacatccatgcttgggaagcatttgacaagggacggctgtncacatggcaagcagctccatcccaggctgagttactcatnagaatttcaaggtcatgaaggagaagttgaagtatcaaacaaaggngaccattatcgagaagtatggcaatgc

SEQ ID NO: 2518 - DNA, 279 bp, Glycine max
  unsure at all n locations
  Clone ID: 700998162H1
cattattggatatttacggcgaataggagtatttagtgagtatggaatgcgtttgctgttcttaagatgccgagaggcatggcttactggtatactcgaggatttggaccaggcaaatccatatgagtacttaaaagggangatcanctgtccacagnatgcatctttttnatgttgttaatgcaatatcgagcaatatttgcggatgacacatccaggaagtgaggnnaattatgacggtgggcttctttttagctgggcaatgcaccaaattacctc

SEQ ID NO: 2519 - DNA, 276 bp, Glycine max
  unsure at all n locations
  Clone ID: 700998163H1
anactacggactttctcctccaaaaatactactcatgtatttgctgcatctgatcggccaactgtaatttatagtagtaacaaaanattactttatagtaatgtgaatctgaaggaagtgagtcacatgtgtcctttcaattctgctgcttttccagacagtttggcaattgcaaaagaaggtgagcttactattggcactattgatgatatacaaaaacttcatattcgctctattccgcgggggagcacgcacgacgtatctgccaccaggagc

SEQ ID NO: 2520 - DNA, 276 bp, Glycine max
  unsure at all n locations
  Clone ID: 700998164H1
cttctntctttttctgtgagcctttctttcaggttcttaacttgntcagtgtgcagtgtccaaatcataagggtagttgcaaattgcaatgggctaagcatgatgttgagggtggttccttctctgcaaaggactaccatgatctcctccagcaccgttgattgatgctgaggaactcacacagtggtccttctacagggcttgattgctgagttcattgccacaatgctcttccttacatcacagtgctcactgtgattggttacaagagccaga

SEQ ID NO: 2521 - DNA, 139 bp, Glycine max
  unsure at all n locations
  Clone ID: 700998165H1
ttccacaacantnggaggtnnatccaaaaagagagagtggaaaananggcgcggttnatcacantggtgtggtgcgccgtggcggtgctattatgcnccgcggccggtgcgtcgtgggtngaggangcggcgaacccgc

SEQ ID NO: 2522 - DNA, 278 bp, Glycine max
  unsure at all n locations
  Clone ID: 700998166H1
ttaagatggctaattcctacttatccttgcttgtcttgatccttgtagctctgctcctcacccctcnagggcttgctgatgaatctgattcttactataagccaccagtttacaagaaaccaccagtgtacaagcccaagcccaagccacccnctcacaagcccaagccacccgtttacaagcccaagccacccgtttacaagaaccccctatggtaagtacccaccagtttcaagacaaggatcattctaaaccatgcaacaggcngttatgttaac

SEQ ID NO: 2523 - DNA, 285 bp, Glycine max
  unsure at all n locations
  Clone ID: 700998167H1
ctctcactgcttttaagccttctctcagtttcactattgctgggtntgagttcatcagatacccttcagaatgtaggggcaattcccccaacatgcaagcgcatagagtgtcccagctatgatgtcattcactttggcaacggctacgaaatccgtcgctataattcacccgtttggatttcgaacagccccattctagacatttctctggttgaagccacaagaaccggctttcagggaggctatttgattatattcaaggtaagaataactacaagcagaaaa

SEQ ID NO: 2524 - DNA, 279 bp, Glycine max
  unsure at all n locations
  Clone ID: 700998168H1
attatatgagtatgattcaccaacgattttcgttaactacaagtccacaactacaatccgttncactcaactcttatccataantatcattcttttataatctaaccactcgtaccttcgaatcggagaccgatttgtgtgttttaggttgcntgctgtcagatctacaccctaaacatgcttttcaagctcgaatcctccaagttccgaatcttctaaatcattccacatgatctatatgnnctaatagtaaaagatgatatagtttgggagatgaaa

SEQ ID NO: 2525 - DNA, 278 bp, Glycine max
  unsure at all n locations
  Clone ID: 700998169H1
taacacttcagcctgatccatgtttaanatcaacatgtgtgcatgggnactaaagctttgctgttgtacncttacaatatacttgctagcacttggnggtggtggaatcngaggcngtgtacctgctcttcggagctgatgcaatttgatgnaaacaaaccaaaagnaggtgtaanctagccantnncntcaattngnttntgctagcatnacaattggggccagcttcannagtcannntgtagtttatgtgagcacggaatccaatggtacaaagg

SEQ ID NO: 2526 - DNA, 277 bp, Glycine max
  unsure at all n locations
  Clone ID: 700998171H1
cnaatttccacatattattagatcnctccatggagtgggagatgaggcccggcggcatgttcgttcagagacgcgaggcagcggcggataannnnnnnnnnnnnnnnnnnaacatgacgacgacngtgttgatcactgtcgtccacgcttcctcccactacgacctccacctccctaccaactccactttctgggatgttaagagtctgcttgtacatagaactggtttacagcctgaagagcaacaactcttctttggaggaaaagaaaaggacaa

SEQ ID NO: 2527 - DNA, 279 bp, Glycine max
  unsure at all n locations
  Clone ID: 700998172H1
ttaatggcagctgcaagtagcatcatctccatctcctctgcttcactctttactccaacaacaacccaatgccttccttcaaacacaattacaaggaccatgatcatnttcatgttcnnnnnnnnnnnnnnnnnnacttcacaacacacgctgctctcaagatancaagaccaanaanaacaangtttggantnaccanaacaccaccagggttagtaatgttcctcctcgnaggtttagttgttcaggatcgtcntnttcttnctcntncantcttcc

SEQ ID NO: 2528 - DNA, 278 bp, Glycine max
  unsure at all n locations
  Clone ID: 700998174H1
attccaatatattccattctctctgtgtatttccctacctctcccttcaagatgcagatcttcgtcaagaccctcaccggcaagaccatcacccttgaggtggaaagctctgacaccatcgacaacgtcaaggccaagatccaggacaaggaaggaatccccccggaccagcaacgtctcattttcgccggaaagcaactngaggacggccgtacccttgctgactacaacattcagaaggagagtactcttcacctcgtcctccgtctccgtggtgg

SEQ ID NO: 2529 - DNA, 276 bp, Glycine max
  unsure at all n locations
  Clone ID: 700998175H1
ggncaaatcctcctagagctcctccacctccaatgccgggatctatgccacctcctcctcctatgacagcagctannggtcctagacctnccaccttctggtggaatgccatctattccacccccaccccctgttgcaagtgggacatcgggtttcaacatgggtgctagacctccatcaatgccacctccccaaggttttcttcccaacctatgcagggtcagggtgtccgtcttcctcctccgcccctaacatgggacagtaggtccacggggc

SEQ ID NO: 2530 - DNA, 273 bp, Glycine max
  unsure at all n locations
  Clone ID: 700998176H1
ttgctgataaccccaccaatgtgcagcttccaggtatgtacaacaaggaagagaacccccgtgttcccatcattgtcaccggtaacgatttctcaacactctatgcacctctcatccntgatgggcgtatggagaagtnctactgggcaccaacaagggaagaccgcattggtgtttgcaccggaattttccgcactgtggtattcctgaacaggacattgtcaagcttgttgacaccttccctggccaatccattgatttctttggtgcatg

SEQ ID NO: 2531 - DNA, 270 bp, Glycine max
  unsure at all n locations
  Clone ID: 700998177H1
ttagcactggacttaaacagtacaacttggataacaacatggacggtttttacattgctctgcttttatggacaagcttgttgttcacatcagcaagaacttcatgaccctgcccaacatcaaggttcctctcattcttggtatctggggaggacaaggtcaaggaaaatccttccaatgcgagcttgtcttgccagatgggaatcaaccctatcatgatgagtgctggagagttggaaagtgnaatgcaggagagccagcaaaactgat

SEQ ID NO: 2532 - DNA, 274 bp, Glycine max
  Clone ID: 700998178H1
cgaagtttgctcctgtagctggatatcactggtttgatggagatggaatgattcatggcttgcgcatcaaagatggaaaagctacatatgtttcccgttttgtgagaattctcgccttaaacaagaagaatactttggaggctccaaatttatgaagattggagatctcaaaggtctattcggacttttaatggttaacatacatatgctgagaactaaatggaaagtgctggatgcttcttatggaactggaacagctaatactgctctcgta

SEQ ID NO: 2533 - DNA, 271 bp, Glycine max
  Clone ID: 700998179H1
ggtgcactgtgtctgtgtgtacgtatgactttttttttgggtgaatgtgtgtatgagtgtatgactatgttttacgtaaaatacgttaattccttaaccttcatcatgtcactctggttctgcaacttgctgaatttgggaacctttttcttcttggataagaagacttcttggttttcggaattgctattaagggcataacaaataaagtttccatatacggccaagaataattttacaaaacagctgctaccactccttcgaggctttt

SEQ ID NO: 2534 - DNA, 73 bp, Glycine max
  unsure at all n locations
  Clone ID: 700998180H1
tatgggntcgtcactccttgctcttagccctcctcctcttcgcnggngtnnaacancggngcgatggaggtgg

SEQ ID NO: 2535 - DNA, 282 bp, Glycine max
  unsure at all n locations
  Clone ID: 700998181H1
gganaactggttaatgttggagtcatctgctatctaaaacagcttcttgatactggattttttcatgctgatccacacccggggaatttgatccgcactcctgatggaaaacttggcaatacttgactttgggcttgttacaaaactgactgatgatcaaaagtatggaatgatcgaagcattgctcatctcatccatcgggatatccagccatagtaaaagactttgttaaacttggtttcattccagatggtgtcatttggagcctatcttgccagttcc

SEQ ID NO: 2536 - DNA, 280 bp, Glycine max
  unsure at all n locations
  Clone ID: 700998182H1
aagaggagttgaactccacgcgaaccgcgcatttggaagcagaagaacaaagattaggagttgttgatcaagattctcacaatttnaagttggaacttgaaggagtagaaaaggagctccaaagagtaaatgagcaagttttgtcagccagggttctanaatctcnattggcatcagcttcctcntactgcatgatttaaagctgaattagcaacatatatggnatccaccantncatgcggatgcnataccgaccaaanagagaaacntnnggaactcc

SEQ ID NO: 2537 - DNA, 278 bp, Glycine max
  unsure at all n locations
  Clone ID: 700998183H1
ttgaacacgtgaganaacaacgtgaattgaagggacatcttatatctgaagtctcgaagcatgcttcagaatgatatggttggccggctgcgccaagatgatggcacacctgacaaaattgctatcaaaaggttgtttgaggaaattgatgttaaccaagataaccacatttcaagatctgaattggaaaaagtagtcaggacatccagtttggcaaggcngtagaaactgaggaggcagttacaaaacttgttcagatcttgatctcaacagagatg

SEQ ID NO: 2538 - DNA, 276 bp, Glycine max
  unsure at all n locations
  Clone ID: 700998185H1
caagagtggaagcatgtggcagaacaaaataaaccttactccaccatcgttgcagctccctggtagccgactgaaggctgctttgagtgccagggatctggagatggagatggaactgctcggtctagaaagccctgctcgcnnnnnnnnnnnnnnnnnnnnnnnattgatcgaagagattgccaggatctcttccccattttccggaccaaggatctcaataggattgttgatttgaatcctactaaccttgatgacctgttagcatctgctgac

SEQ ID NO: 2539 - DNA, 273 bp, Glycine max
  unsure at all n locations
  Clone ID: 700998186H1
cagagacagggatcantcatggctctgtgttcagtttttttcaattttcttcttctgcttcttctttctttcaccaaagaagctttaggtgtttcagagcaagaagctgacagagtgcatggactacccggacagcctccggtgaagttcaaacaatattctggttatatcactgtcaatgaaacccatggaagagcatcttctattggttctttgaggccactcataaaccagaagaaaaacctcttctcttatggctcatggaggcctggt

SEQ ID NO: 2540 - DNA, 276 bp, Glycine max
  unsure at all n locations
  Clone ID: 700998188H1
ttggaggatccttgacttcttctctcactttccagaaagccttcacatgttcacctttttatttgatgatttgggtgttccacaagattacaggcannatggatggttttggagttaacacatatacgctgatcaacaaggctgggaaagcagtgtatgtgaaatttcactggaagaccactagtggtataaagtgtctattggaggaagaggccattaaggtgggaggagccaaccacagccatgccactcaagacctccatgattcaattgctg

SEQ ID NO: 2541 - DNA, 275 bp, Glycine max
  unsure at all n locations
  Clone ID: 700998189H1
ggctttttgtgtcttcgacaactgagactaaatctcttcctctcccaaactttcttctttaccanaacagtttaaccaatatagatttgagtgattggaagttggaaggagaatttcctctttggttgttggaaaacaacacaaaaatgaccgaagctttgtttaggaattgctctttcaccggtacttttcagctaccatgagtnctcttcctaacatacaagcaattgatgtgtcgncaataccataaatggccnaattcctagcnacaatat

SEQ ID NO: 2542 - DNA, 264 bp, Glycine max
  unsure at all n locations
  Clone ID: 700998190H1
ctcaaatctgatctattacctcacgcagagactgatgcagttgatcctaagaacngacacaagggaaagcttgagacagagagtttgctacaagcaaggggtgttaattggacatctataaggccagtctacatctatggacccttgaactacaaccctgttgaagagtggttcttccatagattgaaaggggacgcccaattcctatccccggctcaggaatacagataacccaacttggtcatgttaaggatttggccaaag

SEQ ID NO: 2543 - DNA, 274 bp, Glycine max
  Clone ID: 700998191H1
gtttctctctcttagggttttctcctcccccattgacccaccgtccatcgcaaaggaagtcgcgcccaatttccatggaactgtaaagagattatagtttgtagattaaatcttaaagcagtaagtcatcatggataaatcagagcagactcagcagcaacatcagcatgggatgggcgttgccacaggtgctagccaatggcctattcttctcactacccgactgctcccatggtggcttctggcacgcctgctgtagctgttccttccccaa

SEQ ID NO: 2544 - DNA, 275 bp, Glycine max
  unsure at all n locations
  Clone ID: 700998192H1
ctcccgcttcttacgcatcgactgtagtccgagtcgccggaattgcaaccgatgacaaacttcttttcgccaacaccgaaggcgacgtgaagcacaccgagaccaagcaagacgagaccggctggccggagcccacctcggcgagctaccactgggtgggaaagaccgaggatggcaaggaagtcactgcagacctttctggtgctctgggaaagaccatcgaccgtgtcgatgtncatggctgaagtgccaggtttcatcaagaccatcgtcgc

SEQ ID NO: 2545 - DNA, 273 bp, Glycine max
  unsure at all n locations
  Clone ID: 700998193H1
aaatttgatttaatatacaaattttaaaagcatgcaaaatctcatgaannnnnnnnnnnnnnnnnttcaaatattataattaaaatttcgnagttcaattttatttttaaacgccaactctaaatttaatctcatgcattaaacaaatacttcaaaactttcaaacgcttacttangttttgattattggtgtgaataatatttattatttttttcaacaaaaattctttggcttaaaaattgattggatcacctttaataaatttttatttc

SEQ ID NO: 2546 - DNA, 273 bp, Glycine max
  Clone ID: 700998195H1
ctgcacagaatggggaaaacggcttacaagaggctgaagggaagccagagcttcaggcaacgccttcttctctctactctctcctccactcccattctcatcgaggacattcgcgccgacgagacatggcccggcctccgcaaccacgaaatttctctcctccgactcttcgaaaccgtctgcgacgattgccacgtcgaaatcaacgaaaccggtaccaaattaaagtacaaaccgggaactattatgggtggcagacaacacagtccacac

SEQ ID NO: 2547 - DNA, 145 bp, Glycine max
  Clone ID: 700998196H1
cgatacgtgtcttgtggcttcactcaatcagaagtcaaaactgggatgaatttccttcatttgtttcctgaaaatgtggaaatttgtaagcttatatgttgatataataatgttatttgtcaattctaatgagctattgtcgttg

SEQ ID NO: 2548 - DNA, 275 bp, Glycine max
  unsure at all n locations
  Clone ID: 700998203H1
tatccaccgagttgccttagatccccaagattgcaggatagggaatcctcaacaaaagtaacactaaatggagaataaaaagagacagaaaggaatctccctgaatcttgtttaatagttgtaaggaaggaataaccaaaccattacatcatacaaacagttttcatggggaagccgacagggaaaaagaaagatccttcgactcctcngaaggcgaacggccaccaccacaacccgtcgaaatccttggatgacagcaacaacaacaaacgcgc

SEQ ID NO: 2549 - DNA, 273 bp, Glycine max
  unsure at all n locations
  Clone ID: 700998204H1
caccaccatttggacttggttgatatgtgagaattaaaccaagtgtcttctgtatcattcatttgttgcaacttgatatctataaacacccggccattgttttgtgattcatgtttgtcctaagacctaaagttagcatgtgttaaaagtggnataaaatctcagtttaagtcctctggtttcatagaatgtngcnancnaaagctgaagacgacgangtggtgcctttcntaaanaanaacaaaaagggggnnccccnnannatnnctcccc

SEQ ID NO: 2550 - DNA, 274 bp, Glycine max
  unsure at all n locations
  Clone ID: 700998205H1
aattgaggacactagaaccataacaaatttcaaatgcgcatacaaaattttcttcnactcttcanaaccanaacgaattctaatctgaacttcaacactccgaagaacanaaatgctantccttcncgtgctttctctctctccctcttcccctctctcgcttcgaaccgttatctccaatttcgacctcgtcggagcccgccgcgtcgtccgatgngncgccccggagtccggtggcgatgagttcacggcgaagtcggggtactgttcganc

SEQ ID NO: 2551 - DNA, 272 bp, Glycine max
  unsure at all n locations
  Clone ID: 700998206H1
attttgtgctctcctttgattttttctgagagaagtttgatgaggtaatgcttcccgagtgtttggctcgttcctcctctgattgcgtcttgctttgtgtcgtcaaaggtggtagccaccgccctgctgtgagcccttttcttatagtctgccacttccctcngatgaatgggangcatcctcctgtcaaattgggagttgaccaagttngatagagtgcaattttggnagcaacatctatgatttttcaatcgatgaattaggcnacnaac

SEQ ID NO: 2552 - DNA, 279 bp, Glycine max
  unsure at all n locations
  Clone ID: 700998207H1
cccaaaaccctaggtagagagctcttcctcactctcattcgcantggccgcagcagcacgtcctctccgtcaccgtgcaggcctcgacagtgacatggccaccgacgccttccgccaccgtccctatccctgacgtcatgaagtcctcatccggaccggaacatcgtcaacttcgtacactnccaacntctnccangaacagccggancaaccctatgcagtcagccggcgcgctgggccaccagactttccgccgagtctggggaaccggtcntgcgt

SEQ ID NO: 2553 - DNA, 268 bp, Glycine max
  unsure at all n locations
  Clone ID: 700998208H1
tgggaatgattatggccaacactgaagccaacggtgaagagcttcttgcagatgcgcatcttttagcagctactatggtgggtcaaaccgcagagataagattaaggagtatataaagctgagtcagtacccaacagcaacgattgantttagaggaactgtgattggtggttctccttctgctcctcaaattgcttccttnctagccgtggaccgaaccatcttacatcgcagattctgaaacctgatgttattgctcctggtgtta

SEQ ID NO: 2554 - DNA, 273 bp, Glycine max
  unsure at all n locations
  Clone ID: 700998209H1
cagaattggattgaagatttatattggaagcagcatgatataaattatccaggcatggatgatgcaatggtacaccgtggtttttataccgcgtaccacaatacaacaatacgtcctgcaattttagatgctgttgaaagagcaaagagttttatggagatattganattatagcaacagggcattcaatgggaggggcaatggcttcattttgtggacttgatttaacggtaattataattttagctgtcttggcatgactgggcattattc

SEQ ID NO: 2555 - DNA, 276 bp, Glycine max
  unsure at all n locations
  Clone ID: 700998210H1
anaaaaaaaaagagttctggccatggctgnatcattatttatgccttcatccatagtggaggaagaagcgaggttcgaagccgaantggcggaggtgcaagcatggtggaactctgagaggttcaggctaacaaaaaggccatacacagcaagagatgtagtgtccctccgaggcaacctcaganaaacctatgcctcgaacgagatggcgaaaaagctatggcgcctcctgaagaaccaccaagctaatggaacagcctcgaggacttttggtgc

SEQ ID NO: 2556 - DNA, 273 bp, Glycine max
  unsure at all n locations
  Clone ID: 700998211H1
tggnattatactgttttcagtacagtctgttatggaaattgctcaattttatatagtagtttcctagtatcatctatacgtagatattacttctggacacactgcatttccttctgtttcaacatctaatatcagtattgtccagtgtgaataaccaccctctacgtcattatggtctaaaataattttatttttagttccattaatttgtactgcatgcgaattttattttttaagtatttttaattaatgaagttttnctttcttcctttt

SEQ ID NO: 2557 - DNA, 274 bp, Glycine max
  unsure at all n locations
  Clone ID: 700998212H1
atttaattacaactctgtatgtgaattctgcttgcagctgatggcgcaaattctgctccatgggactcttcatgccactatctatgaagtcgataagctcaaaattggtggaggcaactttttaaccaagatcgtacaaaacatcgagggactgttggtattggaaaaggtgtcactaaactatatgcaaccattgatctagagaaggcacgagtggggaggaccagaattattganaaagagattaaaaatccaagatggtacgagncctttc

SEQ ID NO: 2558 - DNA, 278 bp, Glycine max
  unsure at all n locations
  Clone ID: 700998213H1
cctcgctctatttctcagtctctgtgtttgcgngctgaggattccgaacgagtgaccttcttcgtttcctcgcaaagtttaagtaatcatgggtaaggaaaaggttcacatcaacattgtcgtcattggacatgtcgactctgggaagtcactaccactggtcacttgatctacaagcttggaggtattgacaagcgtgtgattganaggttcgaganggaggctgccgagatgaacaagaggtcattcaagtatgccgggtgctcgacaanctcaaa

SEQ ID NO: 2559 - DNA, 287 bp, Glycine max
  unsure at all n locations
  Clone ID: 700998216H1
ggttacttgtttccttgtagaatctctccccttccttctaagtagttccnnnnnnnnnnnnnnnnnnnaccctaacctaacttaaactaaactaaaccctttcacacacttgttcttntantcaagtttcttcccaaaangaccatgccgtttccgtggaagaaaaaccgcgtcccccgaatctncccaattngtngccgatctccaatngcnaaagngcggcggttgcctcgtggtcgagaccggcttccccactccctcatcggacttcttcgtcaaaaaccaaa

SEQ ID NO: 2560 - DNA, 204 bp, Glycine max
  Clone ID: 700998219H1
gggaggagttcacaaggtgcgccaaactgaactgattttccattgagatattgctgcactacaagccaagaatgagcttacttttaagaataagacattatttacccaagggtttatgtagacaacctcttcatccaacagtagtgcggcttaacgctagtaacttaaatgtattttcaagacattttggtcaacctgcgagga

SEQ ID NO: 2561 - DNA, 271 bp, Glycine max
  unsure at all n locations
  Clone ID: 700998221H1
cgcagaggcagagcataacaacacaagagtcgcatctcaagcttttgtctttctctacttttcttcttctttctgtgtatcgtatcgtattggagagaagagatggcgacgagggtggtggcggaacagaagccgaagacgaagattgtgtgcacgctggggcccgcatcgcgctctgtcccaatgatcgagaagcttctgcgggcgggcatgaacgtggctcgcttcaattctcccatgggtcccacgagtaccacnaggnaanccctcc

SEQ ID NO: 2562 - DNA, 268 bp, Glycine max
  unsure at all n locations
  Clone ID: 700998222H1
caaaattttatttatccaaacctttctatttttagcaacttgttcttactgaaaccaaacacggtgtcatgttggttgatgtgtttagccttcgtcttgtatctgatgagagtttggtgtttcacacatgataaacaataacctagccttaatcttcactttctgcagagcttacctgttctcacttgatgctgaagtagcctaatcatgaatgcaaagggacataaatttgtgaggnttgaggactggaaatcagagtcatctttta

SEQ ID NO: 2563 - DNA, 278 bp, Glycine max
  unsure at all n locations
  Clone ID: 700998224H1
ggtcctncttnctaagnaaggtccttnggntaaaaaaggtatggatatngtngtncgagaantgcnagatgcaaaggttaattggaatgtcactgttgcaaatattatcatgttggctatgtgaagatgaaagatttcaggcnttgaaaatttngcctatcctcagttgccnatcnaccgggtgcagctgatataatcncnantgggaattcctatttngatgccncctaggaatggcttttgnagggnagtggnngcctttagaaaacatgggngca

SEQ ID NO: 2564 - DNA, 270 bp, Glycine max
  Clone ID: 700998225H1
ctgcaatggcagtggaagtagccaaagggcaaggtgtgttagaacaaatatccaatggtggcatcccatggttcttggggacaagtgtggtccttacccttgcttccttgattccactcttccaaggtgtcagcgtggagtctagtccaaagggttcatgtcctcagatgcagaactgtggaatgggagatttgctatgttgggtttgattgctctggcttttactgagtatgttaagggtagtactttggtataattcagtcatgaagg

SEQ ID NO: 2565 - DNA, 280 bp, Glycine max
  unsure at all n locations
  Clone ID: 700998227H1
cgacgaggttacaagaccaccatcattatgggtctctgcctctactcgcttggtgctatcctcttctggccagtcgccaaattcaccggtaaatcccccaaccaggccatctttggtggtttcgtcgtctgcaccgccgtcatcgcttgtggtttgggcctcgctcgaagtcgccggccaactcgtacatctcggtcatccccaccccaacaaggtgtcnanctncngatacagttcncccagtntttnnacngganccgcctccgttcaaccggncaat

SEQ ID NO: 2566 - DNA, 274 bp, Glycine max
  unsure at all n locations
  Clone ID: 700998229H1
gttgnaagcatgggaaaaatgatgcagagcattgactattctagacttttctggctattttttgggatcttctctcacgtaaatcatgaaggaaagcctaggatataggataataccatattgaaattttgttctgctttcattttttcccttcttgttcaactctgcagtctgcacaattaagttgcagcgtaaaaaaattatagtgtttcaataaatataagaggtggttgcgaagttggtgcatataaatacgaatcaaacatgggagaaa

SEQ ID NO: 2567 - DNA, 274 bp, Glycine max
  unsure at all n locations
  Clone ID: 700998230H1
gcaaaggattctacccgccgctcgatgggaattgcgcttcaaggcgtctcgtagggctaatccgccttcacgagggtcaccaacggcacgtnntttggggggccgaggcccctactgctggtcggcaaacggacggcgggcgcacgcntcgcttctagcccggattctgacttagaggcgttcagtcataatccaacgcacggtagcttcgcgccactggcttttcaaccaagcgcgatgaccaattgtgcgaatcaaggttcctctcgtacta

SEQ ID NO: 2568 - DNA, 154 bp, Glycine max
  Clone ID: 700998231H1
cttgtattcgtggggtgaactaggtccgggatcgttcttccttcgccttggaggtctctggctggcagtatttacagttcttggggggccaattgcagctgcaagctttaatccttcaaaagagcctctaagatttatactagctggtgaacag

SEQ ID NO: 2569 - DNA, 280 bp, Glycine max
  Clone ID: 700998232H1
ttgttttggtatctgttttagtgttttttcaatctttgcttacaggcagtagattactttattaactgtgtattaacaagtcatcgtttggaggctatagatggcgatgcaaaccgtttacctgaaagaacatgaaggacttgtctacattctgttggacagttgtcatctgtaacttcagctccatggtggagtgccttaggatctcaaccagtttatggggagtattgtggtcaaatcaaacccttttcgttggagatttccaactacgtcgaccaat

SEQ ID NO: 2570 - DNA, 267 bp, Glycine max
  unsure at all n locations
  Clone ID: 700998233H1
ggcgcgttcatgagtcgcccagaagccactttgatttccccgattgggtttctagcgtggcgaattcgcttcccagttcgccggaatttcaagaaaagtggggttttgatgatgagttctgttcgccggaggaccggctcggcagcttttgactgttaatcggccggcgagttggtcggaatcagatgggtggagtagtgttangtgaaattgggggttttcaagntngtncaacgaaatggttcgattttgattatatncagattc

SEQ ID NO: 2571 - DNA, 267 bp, Glycine max
  unsure at all n locations
  Clone ID: 700998234H1
gggaactgttgttgagggaactatacagaagttatttgaagggcatcatatgaactatatcgaatgcatcaatgtggactataaatcaactagaaaggagtcattttatgaccttcagcttgatgtgaaaggctgctccgatgtttatgcttcctttgacaagtatgttgaagttgaacgtcttgaaggggataacaaatatcatgcggaacaatatggtttgcaggntgctaagaagggtgtccnnttccattgatttccctcctg

SEQ ID NO: 2572 - DNA, 215 bp, Glycine max
  Clone ID: 700998235H1
agatcttgtagcaatggcgagcgctcccactccacgcgaagagttcgtgtacatggcgaactggcggagaggccgagcgctacgaggagtggtggagttcatggagaaggtctccgcctccgccgagagcgaggagctgaccgtggaggagcgtaacctcctctccgtcgcctacaagaacgtgatcggcgctcgcgcgcctcctggcgcatcat

SEQ ID NO: 2573 - DNA, 264 bp, Glycine max
  Clone ID: 700998236H1
cctaaaaatgagatgcagtggccttggtgctgaatggggaaaggtatcattgtatattttaacttattattgcctatttatctagtagtttgtgtatggtgaccaatgggggcaagtttatcaatgagctccttagctgcagtgttgtgtgttagttttcatagttctggggcaagtttatcaatgagctccttagctgcagtgttgtgtgttagttttcatagttctctgcactgtatctctttgtctctctcttttctgttt

SEQ ID NO: 2574 - DNA, 266 bp, Glycine max
  Clone ID: 700998237H1
aagcttgtgaactcaaaagatggacctccaacctttgagcagcccaagatgactctggagaagctcttgctgtatggtaacatgcttgtccaagaacaagagaatgtcaagagagtccaattggctgacaagtacttgaacgaggctgctcttggaaatgctaacgaggatgctattcagaggggaactttcttccagtcttgaattggaggcaaagcaaacttggcaagtaaatatttctgttcgtgaaggttgttgtactaatc

SEQ ID NO: 2575 - DNA, 264 bp, Glycine max
  unsure at all n locations
  Clone ID: 700998238H1
cacaacaactcctttttttacctcttcacattctccatttcanagggttctgatcatgttggggaagaggccccggccaatgatcggaaagttgtcggagttgttggtctcgagaggccgcacggtggcatatttggaaccaccggaagccctagaggcccattagacatgaagatgatgcaatcatcaccaagaggcttaaaaaactatgatcttggtggtgttggtcttggaattgtagtggctcttgataaatccaacgag

SEQ ID NO: 2576 - DNA, 227 bp, Glycine max
  Clone ID: 700998239H1
tattgtatggccgccaattccagtagccgagggatcaccgccttagggaagcgagtcgccaaccggatctggacttccaacgcacctcctctcacttcaaggaggggagcatacagtagcggctcagtgtacgacaagaaccctgatgatgagatccagtctgggcaggtcccagacgatgtgatccaggcggcaacacaatccggcaaatactgggccccacatcc

SEQ ID NO: 2577 - DNA, 268 bp, Glycine max
  Clone ID: 700998241H1
atcatcaccactgaaggtagaaaagttggcataaaaaaagcacttgttttctacgttggcaaagcacccaaaggctccaaaaccaattggatcatgcacgagtatcgccttctcgactcttcccgcaaacacaacctcggaaccgcaaagcttgatgattgggttctgtgtcgtatctataagaagaactcaagtgcgcaaaaggttgaggcaaatcttttggctatggatgtagcaatgggtcatccaccttcttcatcgtcccacg

SEQ ID NO: 2578 - DNA, 267 bp, Glycine max
  unsure at all n locations
  Clone ID: 700998243H1
gaagatttcttcaacttggggtgtcattgacataaatgcaaacaatcttgaatttgaaggcagtaagtgattacttaaatccctgaaagacatgcagtcagccttcgttctgctgaaatgaagaacttgcagacntcggggaattacagtcatcgactcaagcttctcatgagcccaagagtgaacaaccanacaatcacacanctgatgctcctgttacagnccacaggctcancatctgctacaantaatgacagcaaaantgtc

SEQ ID NO: 2579 - DNA, 270 bp, Glycine max
  unsure at all n locations
  Clone ID: 700998245H1
tcctcctgggacctcatggtgtaaaagatgcttattgcctactgaattttggtgacagtataaccactgatcatatttctccagctggaagcattcacaaggacagttcctgctgccaaataccttgttgagcatggggtggaagcaaggcnctcnattcttatggangtcctccangcaatgatgacgtgatggcaagggggacntttgccaaacattcgncttgtnnacnagttttnantggggaattggcccgaagacaattcacat

SEQ ID NO: 2580 - DNA, 270 bp, Glycine max
  Clone ID: 700998246H1
cttagcactggacttaaacagtacaacttggataacaacatggacggtttttacattgctcctgcttttatggacaagcttgttgttcacatcagcaagaacttcatgaccctgcccaacatcaaggttcctctcattcttggtatctggggaggcaaaggtcaaggaaaatccttccaatgcgagcttgtctttgccaagatgggaatcaaccctatcatgatgagtgctggagagttggaaagtggaaatgcaggagagccagcaaaa

SEQ ID NO: 2581 - DNA, 263 bp, Glycine max
  unsure at all n locations
  Clone ID: 700998250H1
ctggagagntggaaagtggaaatgcaggagagccagcaaagttgataaggcaaaggtaccgtgaagctgctgatataatcagcaaggggaagatgtgctgtctcttcataaacgatcttgatgcaggagctggtcgtcttggtggaaccactcaatacactgtgaacaaccagatggtgaatgccaccctcatgaacattgctgataaccccacaaatgttcagcttcctggcatgtacaacaagcaagagaacccccgtgtg

SEQ ID NO: 2582 - DNA, 259 bp, Glycine max
  Clone ID: 700998251H1
ttgtttctcttttgtactactagttctgaacatggagctgttgtctctgagactcaccccttcaccttctgcttcgacttcatcgcttcctgcagcacttgctcactgctccaagctatgtgagtttcaaccgcgaagaagaagaaggtgtgtttcgacgcgcctaggcttgcggtgcggtgtgtgaaagcctcggcgcaggaaccggtgatactatcgacgatggagagactcggactgggttcaccacacctgccat

SEQ ID NO: 2583 - DNA, 263 bp, Glycine max
  unsure at all n locations
  Clone ID: 700998252H1
ggaaaatanccaggatttgaggtgctggagaanaagggataaagtgtatggtatgggggcgtggtgaccgagggcacgaaaggaggaaactattggctacagaaagtcgtttctttagccgggtttctttcaaaaatggtncagagtctctgtttnatggcttctcatggttaccctcctggcnttgtnttgccacccacaagtactgggcttgccctgcgctaccatgaagggctaccaaacattctttccttctccagtag

SEQ ID NO: 2584 - DNA, 260 bp, Glycine max
  unsure at all n locations
  Clone ID: 700998253H1
gcagaaagnaagctcatcctagagttttaaaaatggcagcagcctcctccatggctctctcttccccatccttggctggcnaggccgtgaagctgggcccatcagcccccgaagtcgggagggtcagcatgaggaaaccgtcaccaagcaggcctcctccggaagcccatggtacggcccagaccgcgtaaagtattgggcncattctctggcgacccccgtcctacctnagnggcgtncccanaggtnnnnaggggtgg

SEQ ID NO: 2585 - DNA, 259 bp, Glycine max
  Clone ID: 700998254H1
gttgaagacttcattgtccttcccaatgttggacattgcccccaggatgaagcacctcatctcgtgaacccacttgttgagtcatttgtggcacgccatgctaaatcctcaactagtacatcgcattgttaattgttcgccaacagttttttgatgctgctcaactcattgaaattgtgtacatttctccatttgcttccattaagaccgagtttcattttctgttcagtataagcattatgtccttgtatggttacaa

SEQ ID NO: 2586 - DNA, 260 bp, Glycine max
  unsure at all n locations
  Clone ID: 700998255H1
aagagatacatagttagagagagagcagagacaccgttcggtgctccgctgaattcggttgtggcccctgcgctccgctgcaattttacactcaaaaggacctcatgtctaacatagaggagaacaaagatctgggacagatggacgtggatgcatctgatgagtcagctaacatgccatcaccccaaaagcaggaggagtctgtaaagaaaaagtatggaggatgctgcccaaaaagccaccatcatatctanggacca

SEQ ID NO: 2587 - DNA, 263 bp, Glycine max
  Clone ID: 700998256H1
ttcatcacttcattcaacatttctctctcccttagctagtttttaccaatggctgctgcggttagtgctgcagtctcttttccatccaccaagtctacctctctcccaagcaggacctccatcattaccccagagagagttgtattcaagaaggcttcattgcaatacagagatgtttgtagcagtggaagggtagtttccatcagagctcaagtcaccactgaggctccagccaaggttgaaaaagagtccaagaaacagga

SEQ ID NO: 2588 - DNA, 260 bp, Glycine max
  Clone ID: 700998257H1
acaccccccacgaagcaccaattatggctctgaatctttgtatctcacctaagtttaaatgggttccttccttagatagtgcttcctattctttgagaccttcacttgggtcttgttttggtaacataaacattgtagtgtgagtctaagtactactagaagtttgagtttgaggaggagtgggagtgttagtgtaagatctagtttagaaactgcggggcccacagtcacagtgggacaggtcactgaggttaacaagg

SEQ ID NO: 2589 - DNA, 263 bp, Glycine max
  Clone ID: 700998258H1
gggacatgcccatcaaaagaaaaggttctcccatcaagatcttaatgttgtggcctgatgctagcttgaaagaatctgccactattgcctttcagtctcactcaacttttgaacacattgacattccctcagtgggcaaaacagaccccagaatcttgaattctgcagatgtggcaatatttttggcgcctgagagttcccaattggcacccataagaagagtgagtgatgccttttatccaaagccagtggttttgtttaat

SEQ ID NO: 2590 - DNA, 266 bp, Glycine max
  Clone ID: 700998260H1
aatgatattcttgacatgccggaaggatcctgcttccctaggccccagtttcgaaaagatgttgatgcatcgcaaagaacttctaattcaaattccgtttcaagacccagctccttccgaaaggctccttctcgcacatcttcaatgaagaacaacaatattgctgagttgaaatcatttgagctgttggatgccttattcaaggaatgtttccatgttggagaaaaaatggtttctgaaggtataattacaagagaagacataga

SEQ ID NO: 2591 - DNA, 268 bp, Glycine max
  unsure at all n locations
  Clone ID: 700998262H1
agcaaatattgcctattcngcaanatggcggannccngttcgattganctgnacnagtttgtgttcttttctttgttggtgctantacangtggcagtttctgaaatcatttttgaagagcgttttgatgatggatggcgaggtaggtgngtgaagtcagactggaanagcngtgaaggcaaagcaggttcattcaagccacacagctggaaaatgggccagtgatccanatgataaaggtattcanacatccagtgatgccaaacac

SEQ ID NO: 2592 - DNA, 272 bp, Glycine max
  unsure at all n locations
  Clone ID: 700998263H1
gnaaaagatgtaggaaatccaaaaatacaatgactgcccccatttactttctcgtgggggatatgatttgcttgaaaagaagctattggacgagaaaatgaagaaaagataacatgacgcaatgatgactaagaatacaccacacattgaggatcctttatctcccattgaaagacatgttaagtggaagttggcacgcacaaagcgatatgagcagatgacatttcaggcggcacaagaaatatctgataaaattggagattctaatcacc

SEQ ID NO: 2593 - DNA, 273 bp, Glycine max
  Clone ID: 700998264H1
ggtgaactatctgttactctggtggatgctcgaaagctttcttatattttttacggcaagacagatccttatgttattcttagccttggaaatcaagttatacgcagcaaaaagaacagtcaaactactgtaattggacccctggaatgccaatttggaatcaggattttcatatgcttgtttccaaccctagaaagcagaagttattcatccaagtaaaggacgttctaggatttgcagatttgactattggtacaggagaggttgatttag

SEQ ID NO: 2594 - DNA, 260 bp, Glycine max
  unsure at all n locations
  Clone ID: 700998265H1
gggtgatagtaacaagggctgagattggggactgatgacacaaaacttataagggtgatagtaacaagggctgagattgatttacagtatatcaaagctgaatatttaaaganatacaaaaagacgcttaacgtgcagttcactcagaaacatccggccactacagggcttttcttctctcactcttaggtcccaaccagtagtaaaaaatgttcaacgatgttttgtgtggaatgaattcagcgtatgatgtttgaata

SEQ ID NO: 2595 - DNA, 255 bp, Glycine max
  unsure at all n locations
  Clone ID: 700998266H1
gnggcgaactcttcaacaaggtcgcanagggaagattanaagaagaagttgcgagaaattactttcagcagttagtttccgcggtggagttttgccacgcgcgcggcgtgttccacagggacctgaaggcgnancctgttgctggacgaggatgggaacttaaagtctccgantttggtctcagtgccgtgtcggatcagataaggcaggacgggctgttncncacgnnatatgttttcangnnnnngncgtgcc

SEQ ID NO: 2596 - DNA, 260 bp, Glycine max
  unsure at all n locations
  Clone ID: 700998268H1
gnaaagggagaaatagttatagctttagagggaggcatatntccttggctctggttactcttgttatttttaccacgttactgtggacatgggagagaaatccgataattgccatgactttaagatcagctcatgaatggtaccgcttaccttcagaatttcctgtggaagccccgactgaatcagtgggaactccaacactggaaaagggtgtggaaaaatccatatcccccatcagagaaaatggaacaaaacttcac

SEQ ID NO: 2597 - DNA, 257 bp, Glycine max
  Clone ID: 700998271H1
cgacaagttcgagaacgaggaactcatcaaatacggttttcccgaagacatctggttccatgttgataaaatgtcttcagcccatgtctatgtcaggctgcacaaaggccagactctcgatgactgagtgagctttactggaagattgtgcctcagcttgtcaaagcaaattcaattcaaggaaatacagtgaacaatgttgatgttgtttacactcccctggtctaatttaaagaaaatgcttcaatggatgttgg

SEQ ID NO: 2598 - DNA, 195 bp, Glycine max
  unsure at all n locations
  Clone ID: 700998272H1
tgaatctnaagaagcttgaccaatgaccatggtcttcattgaggttcaacgtacacaacatnaatctgtatgaggttacgtggacatctatacgtttcggagttcacgtcgctgtgtgacgacngtggtgacatgcagaagagtcgtnnctacttcgntnaatgttgcatgcaaggtcacagnttnactgtgagc

SEQ ID NO: 2599 - DNA, 258 bp, Glycine max
  Clone ID: 700998273H1
cagcttccaacatggacccatacgtggttacttccatgattgcagacacaaccattctgtggaagccatgagcaaaacctgcatgttttctccctttggatggaaaggaacagttatgcttttcttagtaggattggtctctctctctttttaccttttgattggtactatggttggtgccttgttggttggtgcaactaactggcaagggttgttcattgttttcttctattcctttccctcgttttccgattgtta

SEQ ID NO: 2600 - DNA, 260 bp, Glycine max
  Clone ID: 700998274H1
gtaacatcctgctatcagataatctcactcaatcacttctattcctttcacattttttgggagacgtccatcagcccctacattgtggctttttctcagacaagggtggcaatgaaatcaatgttcgctggtacgaagaaagcaaaatcttcaccacgtttgggatgcaagcataattgagactgaagttgaaagattctatgatgacatagaagacttcgttgatgcaattcaaaggaatattacgaaagtgtgggccg

SEQ ID NO: 2601 - DNA, 260 bp, Glycine max
  unsure at all n locations
  Clone ID: 700998275H1
gctnccgcagaagagagagaacgaacgaacgaaccataccacccttcaataatcttgtggcagtgagtagtgatatgcagcaaggtgatccaacggtcctaagcttgaggcctggtggtggtcgtggcggtggagcaggcttttcgctcactcgtcctcctcttcctctctctccgccgatctccctctctcgcgccctcatgcctctttctctctcaaagnctggagattcacggtttgagggncatgancgtgtgcga

SEQ ID NO: 2602 - DNA, 236 bp, Glycine max
  unsure at all n locations
  Clone ID: 700998276H1
gattaaattatgtatccacgtgcnncgatcttttattatacngttatnngttttgtagattntcccaagatctggtgcaacaataattagacatggcaatggggtgggatagagtgaatattatttttctaaaaaaaaacacnaaaacacannaaacaancanaaacaccnacccaacannacncaaacaccaccncanaacananncncccanaangggggnggnnccnccctnc

SEQ ID NO: 2603 - DNA, 261 bp, Glycine max
  unsure at all n locations
  Clone ID: 700998277H1
caaaagcttattttaacttgcacataagttcaattcatttttccttcttattttcttctcttgtaagtgcttgttgaaaagtatatctaaacggggccaaataattggttgtttttttaacatgttttgttgtatgtgttttttatggctcacttttgaaaggggataaagaacatgcttgtgcctaatttgaatcttgcacagatgatttgttggagatattcttgttntggttgggaatttgtgacgttgatgtccctc

SEQ ID NO: 2604 - DNA, 264 bp, Glycine max
  unsure at all n locations
  Clone ID: 700998278H1
angaagactcngcaaaggncctntgttgcagttgcagtggaaagtgatgagtgacnagcctaaagaggaccaagaagtgaattcaaaacaggttgacttgtgtttgaatctatttgtctgtgtctgtcttcaaatggagccatatttgctcatnttcatgttgggttacctttcgtagtttggtttgacatattacatttatcatttggtaggcacagttggggaaatgagangacatttgttgtatacctaaatgngcttctt

SEQ ID NO: 2605 - DNA, 267 bp, Glycine max
  unsure at all n locations
  Clone ID: 700998279H1
gnaatattgggttgttccggcaaccgtcgtcggtatctcggtggtagtagctttcttatacttacgtaagaagtagcactacacaagtctgcaattcaatttttttgtcattgttacaacaaactttgtattgctatgaggataatttggcttatttcaaaacagtaatgattgattatnngncatgatattacattggaggtttgataattaaaaaaaggtcttaggatcaaaaaaaaaaancnnnnnnaccncnnnccncnngcc

SEQ ID NO: 2606 - DNA, 270 bp, Glycine max
  unsure at all n locations
  Clone ID: 700998280H1
gaataaatggttagaggtccaaagaaggcacttaagagaatcaatgctcccaagagctggatgctcgacaaattaggcggcatcttcgcaacaaaatcttcccaaggtccacacaaatacagaganagtcttcctctcacgttgtgctcaagcaccgtcttaaatacgctcttactggaagagaagtcactatgatcgtcaatgacaaggaaggaaacatcgctgtcgatggcaagatcagaagagaccctagattccccgctggtctta

SEQ ID NO: 2607 - DNA, 258 bp, Glycine max
  unsure at all n locations
  Clone ID: 700998281H1
ggagctcattatctgggccactggtgagcttgtgagccttagtgagcaacagcttgtggattgcgaccacgtgtgtgatccagaagaatatggancgtgtgactcgggctgtaatggtgggttgatgaacatgcatttgagtacatacttcagtctgggggagtacagaaagaaaaggactatccatacacggggagagatggcacctgcaaatttgacaaaaccaaagttgcagctactgtatctaattacagtgtg

SEQ ID NO: 2608 - DNA, 254 bp, Glycine max
  Clone ID: 700998283H1
cgattcttaactcgtatagataatatagaatagataccatgtctgccgttgaagcaaagaagggaaaggtcatcctcgcctactcgggcggtcttgacacgtcatgcattctcttgtggctcattgaacaggctacgaggttgtcgcttacatggccgatgtcggtcaggaagaggactttgaagctgcccgtaccaaggccatgaagtgcggcgcctccggctttttcctcgccgactcaagcgcgatttgtt

SEQ ID NO: 2609 - DNA, 257 bp, Glycine max
  Clone ID: 700998284H1
tgaataacccaaatggaggaatctgtttccttctctttctcttcctctttccttttgcggcggcgcaacctgccaccaaccaaaaccaatcctattacaacaagttcagcccttccatggccatcataatgtcatcctcatcgccgccctctttctaatgggcttcttctccatctacatccgccactgctccgactccccctccgccagcatccgcaatctcgccgccgccactggacgctcacggcgcggcaccc

SEQ ID NO: 2610 - DNA, 255 bp, Glycine max
  Clone ID: 700998286H1
ggcactaacaaaagccatgtgctgggaagttgtgtcgatcagcaaggatccagtaaatggagtaggtgtagctgtatacaggaagccaacttctaatgagtgttacgagcaacgctcaaagaatgagccaccgctgtgtccagactctgatgatcctaatgcagcatggaacattcaattgcaagcttgcttgcacaaagcgccagttagttcaaaggaacgaggctcaaaattgcctgagctgtggccagccag

SEQ ID NO: 2611 - DNA, 254 bp, Glycine max
  unsure at all n locations
  Clone ID: 700998287H1
tgcaaagagaaggagtcgaacccagtgatggtggagaatatgctggacttatggttattcgtgcatatcatttggcaaggggagaccaccaccgcaatgtttgcattatacctgtctcagcacacggaacaatcctgctagtgcagctatgtgtggaatgaaaattgtctctgttggaactgatgccaaggganacattaatatagangagctgaggaaggctgctgaaacacacaaggatacttatctgcact

SEQ ID NO: 2612 - DNA, 255 bp, Glycine max
  unsure at all n locations
  Clone ID: 700998288H1
gtgntattagtggagtttcttctacaatttgtgtccatggagaaaaattctcttgattatagtcctttgtttctcctcgtggtgatgaaaatggaagtgagacaacagcatctcctcttgtgtcagctacaaatggactctcaagactttgatcttgatgatctttgttctatgggcagctttcatcttttttctccctgcaaagcctgtgaatgagttgttctcaaaatggaatgatctcaaccgtgacactcc

SEQ ID NO: 2613 - DNA, 256 bp, Glycine max
  unsure at all n locations
  Clone ID: 700998289H1
gtgagagtacaacatgtcccagcagtttatatctcctattggagggatgggggttgggatgtctactcattnnnnnnnnnnnnnnnnnnnnnnnntgattccagttctggtactgcaaagagaagtcttgaatttgtacactctggaaggtttaactttgattttntcttttaacatacttgcatgtgtgagtgatgacaattttctgttgtacatcagcttgcatatgcaagtgaatgtagtattttgtttttnt

SEQ ID NO: 2614 - DNA, 257 bp, Glycine max
  Clone ID: 700998290H1
tcttcctttgaccatgttccttcccgaagcggagttcccagcctgggttgtttgttacattcctggaatcatgtccctcctaagtgttctaccagctccacggtcatttccgtttatagttccttaccttctatttgagaacactatgtcggtaactaaatttaatgccatgatatctggattacttcgctttggaagttcttacgagtgggtggttacaaaaaagttgggaagatcgtctgagactgatttggttg

SEQ ID NO: 2615 - DNA, 152 bp, Glycine max
  unsure at all n locations
  Clone ID: 700998291H1
aggtttgagtctgttgagaaattgtaatcactaccatatggtgataaggaataataataatgaatgtgtatcgtaaacggatgggattgttgggtgctggttctgtaaatgtggcatgggccattactgtaatttgtcancnnctttcctat

SEQ ID NO: 2616 - DNA, 259 bp, Glycine max
  Clone ID: 700998292H1
ttttattaacgtgagaatatcaaacctgatgagcaagtggtttggggatgcccaaaagcttgttgctgctgtatttagcttggcttataagcttcagcctgccatcatattcattgatgaagtagacagtttttgggtcagcgtcgtggaacagatcacgaggctatgttaaacatgaaaactgaattcatggctctgtgggatggatttacaacagatcagaatgctcaagttatggttcttgcagcaactaatcgtc

SEQ ID NO: 2617 - DNA, 260 bp, Glycine max
  unsure at all n locations
  Clone ID: 700998293H1
ggtctctgctgagggaaatgagccatcctttgaagagcggaggntcctggaaatgacctgtttgaagaatcatctatttcatcatcagtcaatactttggtagatgagcaggttacaaatgataattatgaggttgatgaagttaaatctaaatctccaaattctggatcctttttctctgttcccggcattcccgccccatcagtagtttctgcatctgtacaagtgcttcctggaaaggttttggttcctgcagctgt

SEQ ID NO: 2618 - DNA, 264 bp, Glycine max
  unsure at all n locations
  Clone ID: 700998294H1
gtagttgagaactaagaagaaggaaatggcttcctcaatgatctcctccccagctgttaccaccgtcaaccgtgccggtgccggcatggttgctccattcaccggcctcaaatccatggctggcttccccacgaggaagaccaacaatgacattacctccattgctagcaacggtggaagagtacaatgcatgcaggtgnggccaccaattggcaagaagaagttcgagactctttcctacttgccagacctcgatgatgccca

SEQ ID NO: 2619 - DNA, 265 bp, Glycine max
  Clone ID: 700998295H1
tggtatctggggaggcaagggacaaggaaaatctttccaatgtgagcttgtctttgccaagatgggaatcaaccccatcatgatgagtgctggagagttggaaagtggaaatgcaggagagccagcaaaactgataggcagagataccgtgaagccgcagacttgatcaagaagggaaagatgtgtgctctcttcatcaacgatcttgatgcaggagctggtcgtcttggtggaaccacccaatacactgtcaacaaccagatgg

SEQ ID NO: 2620 - DNA, 270 bp, Glycine max
  unsure at all n locations
  Clone ID: 700998296H1
caggctttttctgtatatactggattcaacatggtcaaaatgcgttccagaggaggaatgcctgttgcatttgttgattttgaggaaactgaccaagctgctaaagttgtggaggagcttcagggaagcttgctgccatcatcagatcggggtggcatgcacattgaatatgcaaggtctaaaatgaggaagcgttaggagaaacgggagctagacagtttccggataatttggttgttncgatacagnggnttcnnancatgtnggaaa

SEQ ID NO: 2621 - DNA, 257 bp, Glycine max
  unsure at all n locations
  Clone ID: 700998301H1
aagattaaagattcaacaatggcctctgcttctgctactcttctcaagtcatctcctgttcttgacaagtgcgagtgggtcaaaggccagacccttcgccaacctctcgtgagatgtaacccntcctcagcatcagctctcaacnatcaaagctggttcctatggtgacgagctcntcnaaaccggcnaaacnatgggcttaacggggcntggnatttgggnntgggnganntcaatggcaactggnggnaacgntt

SEQ ID NO: 2622 - DNA, 253 bp, Glycine max
  unsure at all n locations
  Clone ID: 700998302H1
cggcttctggttgacgctcaatgccccgggcgtgatcaagagcgtcctctcgggcggcggcttcaactgggtctcatcgacgcggaacacggccagatcactgactcggactactatgtggccaacaatctcatcgcgtccgnnngcgcctcgccatcatccgggtgcccgtcgaacnagaattggaatcagcgggcgccgangcggtgcgacggtgtcttacggccattngcatacccttnaaaagcgttcg

SEQ ID NO: 2623 - DNA, 263 bp, Glycine max
  unsure at all n locations
  Clone ID: 700998303H1
caggaaatctcccaaggattatactctaacccatagtgatataaccgctaagctcaccttggcaatctctcaaaccataaataattctcagttacaggggtggtacaacagattgcaaagggacgaagtggtggcacagtggaaganggtgaaggggaaantgtctcngncacgtacanttgcnanntcnatggtggtcntttcncctaaatatantangcagggtaangtannttnncctcngncaaggngnnacnatggnt

SEQ ID NO: 2624 - DNA, 257 bp, Glycine max
  unsure at all n locations
  Clone ID: 700998304H1
ctggggtatctaaggggagaaagaggattaagaccgtgaaaagtttcaaaactactttatgtacaaatttggatggccaaagaactagatatgtgtgtgtctgtggggggtgtgtgcgtgttaactttggagtggttttggtccttggaagtcantcagaagagaaaccaatccagttaataaaantantggggggcggtttaanaaccngggatcnattttccntaaccttggaaacntcngnaaatgnccnttgc

SEQ ID NO: 2625 - DNA, 262 bp, Glycine max
  unsure at all n locations
  Clone ID: 700998305H1
gacatttggggtatgttaagtctatacgaggcatcatatttaggtgcaaaangtgaagaagtactacaacaggccatggacttctccaaggctcatctacaccagtcactgccacacctaagtcctgaactacgaaagcttgttgcccaagccttaacacttccaaggccactaagaatgggtanggttagaagcccgggcacttacatgggnaaaattttagcccagcnactaaacnaatnacntgcntcctanggnatng

SEQ ID NO: 2626 - DNA, 253 bp, Glycine max
  unsure at all n locations
  Clone ID: 700998306H1
agcatctaagtgagatacacagtagttaggtagcaagcataagtgtctaaccttagaaacatatctgctacatatcgtgtgcattttggaattgtgccactaaaattctattcatctatggctgcctcatcttatgctatgcnatcaatccttgcaaaccctatgatccgcattccnncgggtctagggagaacccatttggnggtcctggttatcccatgagaagggatgttgggctgnaanttnngtncnt

SEQ ID NO: 2627 - DNA, 254 bp, Glycine max
  unsure at all n locations
  Clone ID: 700998307H1
gcaattgaagttaaaagccttagccttccatacaacnnnagacnnnaagacatnaanatccatggctgnctccgtctccactgtcggagnngtcaanagagntcttttgaanctgaatggttctggagtggagnttcagntcccagttcagcttctttgggancangttgaagaaggnnaatggctnaaggggccccaaaaggaaggttccggngggaaactttcaaaattggtggtgtanaagagaagaaaga

SEQ ID NO: 2628 - DNA, 257 bp, Glycine max
  unsure at all n locations
  Clone ID: 700998308H1
cnattacgcgagcaaacagtttctgagtttcttctattttctgtncccaatttgtttcggatctctgttcacgaaccctaaatctgacgttaattcaccatgatctgaacacaacgtggttcccatctgatccactgcatcgtctttctcaattgtcgaaagatgagtacaagtggttaatgagattgaggnacttgcggtgtttganggnaaccaancagagatgtacctggangangcggtatgcnggtgaaaca

SEQ ID NO: 2629 - DNA, 256 bp, Glycine max
  unsure at all n locations
  Clone ID: 700998309H1
gaggagatagagactggcggtcctgctgctatgatgaggtactggaataatgaggaggttttgcagaagttgggacaagccatgggtcttgccaattcgggagatgcaggtgcctctgctgaaaattctggggcagatgagaccgaagatttgggaaatgaagatgaatcnattgttccatcntactgctaatgttggtgatgtgganggcnttaaaaatgcnctannctcnggtgnngaccagggtgaaaaagat

SEQ ID NO: 2630 - DNA, 247 bp, Glycine max
  unsure at all n locations
  Clone ID: 700998310H1
atcttaccactttcantggcncantnactnncagaaatnagcntggctagncactcaaacactaaatcagttcacgatttcacagttaangntnccaggggaaatgatgttaatctcggncgattacaaaggaaaggtccttctccttgtcnatgnngccncacaatgcgggtttgactaattcnaactaacacagagctaatcnattgnatgagnaattaccaaggggaagggctggaattcnggc

SEQ ID NO: 2631 - DNA, 257 bp, Glycine max
  unsure at all n locations
  Clone ID: 700998311H1
ccactctctgagtaggactacactgccatggctgcctcagtctccactgttggagctgtcaacggngctccactgagcttgaacagctctggagctggagcttcagttcccagttcagccttctttggcaccagcttgaagaaggttattgcctcaagggtccctaaacgtcnagatttcttctggnagtttcaaaatcgttggccgcggaaaaaganatgattgagnaacnaccggncagaccagggaccagtngg

SEQ ID NO: 2632 - DNA, 255 bp, Glycine max
  unsure at all n locations
  Clone ID: 700998313H1
gnagatgatgaagatgaagctgagagagagaggctggagatttggngctccatccaacggaacaagaaggaggagcaagagaaatcaggagcctttgatatttggagctcaatcgtatctctcaagggcaaagatgaaatctccaaatcaatgcctattacaccttatgttcaacctcttgtcnaaaggtccaagagttgtttgagtggccagaggctcgaaatnngcnnngagantcncngctccgagactggg

SEQ ID NO: 2633 - DNA, 258 bp, Glycine max
  unsure at all n locations
  Clone ID: 700998314H1
aacgctcttcatgctttgagaancaggctttctgaccccagcaacgtgcttcagagctgggacccaaatctcgttaatgcttgtacttggtttcatgttacctgcgactccaacaatcacgtcattcgcttagacttgggcaattctaagctctccggaaatttggggacccgaacttggccagctaaacccaactccaataccngggggtcnaannggattaaccttaagggggnaaantcctcngggacntttcnt

SEQ ID NO: 2634 - DNA, 256 bp, Glycine max
  unsure at all n locations
  Clone ID: 700998315H1
gngaagacaagggcaatgttaaagttaattcgnagaagatgcagattcctttgctaaacgtgcagagatgtattacaagangcgaccagaacttgtgagcatggttgangatttctacagggcacaccgctccctagctgagcgctatgatcaagtcaagcctgatactactggaattggacnactccttaatggggggtcaacnttcggttcnaccaagtatccnttgggagagttgnngacttttcnngtaacg

SEQ ID NO: 2635 - DNA, 254 bp, Glycine max
  unsure at all n locations
  Clone ID: 700998316H1
tttcattgaaaggggatgctgtcacagcaagccagtcccgcttttgaatacttggagaatgctcttggtaaatttgatgatgggccattcttgcttggccaattcagtttggtggatattgcttatattccatttgttgaaagattccaaattgtcttgctgaggtgttcaaacatgactcacngaaggaaggcctaaacttgcaacntgggttgaggagttgaataagctaaatgctataacgggacnagagt

SEQ ID NO: 2636 - DNA, 259 bp, Glycine max
  unsure at all n locations
  Clone ID: 700998318H1
acaatggcgtctctctctcacctcaacaaactcctctgcatgcccccgctcaactcttcaccctctatttcgccaccacgcagcagcgtcggnatttggaccaaacctgtcggaaggccgaggctaactggtgcgtgtccgancggtnagagcggacgaagantggggggcggaaaaaggaggaaggcgtaangcngcggcgtaacgtggaagtngaaacggncaatngaagaacgganangganaantnannanggct

SEQ ID NO: 2637 - DNA, 256 bp, Glycine max
  unsure at all n locations
  Clone ID: 700998320H1
gngatcacctaatccaagggattggtaatggtctcattccaagtgtactggattttaatctcctagatgaagttattcagatatcaagtgangaagctatagaaactgctaagcttcttgctttaaaagaagatgggaatttctcaggagccgcngctgcagctgccataaaattggggaagagaacnagaaatgccgggaaactcaccgtggggnaattccnanttanngggancggtatttaacctccacnatg

SEQ ID NO: 2638 - DNA, 254 bp, Glycine max
  unsure at all n locations
  Clone ID: 700998321H1
tcgctaggagaggatgtaaatcagaggtgttctctgccttctcctgattgcttcttcttgagtcgcggatttctgtctgagttgatcccaaaggtttctgcaacatggcccgaggagactcttgtggactcatcgtgtcaaactcaaactgttgtttctcctacaatgtgtaaatcngagtaccaattcttgagaagtngctggcangggatgncnaattcncnattgtgggggcaantaattgtgacancnng

SEQ ID NO: 2639 - DNA, 256 bp, Glycine max
  unsure at all n locations
  Clone ID: 700998322H1
ctctccactggttcttcatctgcatgcacacagttgcatagtttnggaaaccaagaattcctgaagaagggtagcatcaacaagcagttctgaaaatggagatcaccaatgtcagtnagtatgaggctattgcaaagcagaagttgccaaagatggcgtttgactactacgcatctggtgcngagggaccagtgggactctgcnagaggaacagaaatgccntttccnnaattttgtttcgggcncgtatctattg

SEQ ID NO: 2640 - DNA, 208 bp, Glycine max
  unsure at all n locations
  Clone ID: 700998323H1
gccatggttctctccaaaaccacctccgaatccgacgtctctgtccactcaaccttcgcttctcgatatgtcagaacttcgcttcccaggtttaagatgccggaggagtcgataccaaaggaggcagcgtatcnaataataaacgatgagttgatgttggatggggaaccnaggttgaacttgggcatcnttgtgnacaacctggatg

SEQ ID NO: 2641 - DNA, 244 bp, Glycine max
  unsure at all n locations
  Clone ID: 700998324H1
cttcctgctgtgatgaccactacagttgctgccctgcagactatcccatctacnacacttacgctggaacttgnctcaggagcaagaacaacccctttngagtgaaggcattaaggcgtactccagcgaaaccccattggaccttcggacgtaagaacaaggtcagcagtggttaagcagtttaaggnaatgtgaacgtgcngaaggaggcaatgatgaagtaaaagggnagacgaaggataaa

SEQ ID NO: 2642 - DNA, 262 bp, Glycine max
  unsure at all n locations
  Clone ID: 700998325H1
aacaacctcgtttcaacgttttcactttcatctctcatcatccaaccacaccctcaggnncancagaatagtttctagtgctcaacaaaatgctaaagnaacccagagagtgtccatggccaaggcnnaggccaaggttctcacgggactttcaagtggaagaggtggagaagcagccatgagaancttgtcttgggaactggggtaccttgggcaggatcttccccnaagattacancttcttnggcaacaaattnnttgg

SEQ ID NO: 2643 - DNA, 253 bp, Glycine max
  unsure at all n locations
  Clone ID: 700998326H1
ctctntcgtcttctccctccttcttcaatggtcttagggtttccggtgtccatgcgtagagttcgnactaatgngcttttgaaacccgtgttcatctgtatcnaacgatttactagaaggaggtcgcaatttctccatcttcacatttcgctagcacgtgaaatcanaagtatcgacaatttcgcgnggacatgaaatancgggnaacaagcaaaatatctatgggttgacgaaacattatatccaatagcgg

SEQ ID NO: 2644 - DNA, 251 bp, Glycine max
  unsure at all n locations
  Clone ID: 700998327H1
ccaggtctttaaacctcagatagaganaacaagactggagtatattaaacatgatgacttaatattaagactttttcaacgtgttgaaaaacaaactctgcaaaagatcctcaccgacgatgggactcccaatgtagctgcnataagtgggttgtatctgaaattngtcaaagtggggggcaggnttgttagcntctgaagtggaagngctggtgtnctgggaccaattaaatgnccccaatttncaangg

SEQ ID NO: 2645 - DNA, 254 bp, Glycine max
  unsure at all n locations
  Clone ID: 700998328H1
tggatggnaacaagtatgcagcacttgcaagttcccttggacatttaacatgggaaaagcccttatattctgagtttcaacaattggcaagtgaaagtgagtatgctgcctggaccctagtcaacgggtatgcactaaaccatgttactatatccactcatcggctgaaaactcntttganggaggtnaaaaacacnaaatcngtttatttagggtagtgggtttcnggttggattcngaagggggngtggngg

SEQ ID NO: 2646 - DNA, 254 bp, Glycine max
  unsure at all n locations
  Clone ID: 700998330H1
ccacttctcaaatgcagtggccgaagagacaaaggcaattttggatcgactcaacatctttcttagaaactgatgaaattagtgaagctaatgaggaattgaatgcgtccacctcagtcttctcttctgaactggagctcagtttattgaatgctatattagctctttggacccaatctgcatcggtgnctcctccaagggacagaaacaagcaggngatagatcatcntttcnagtggctgancaactgcgct

SEQ ID NO: 2647 - DNA, 255 bp, Glycine max
  unsure at all n locations
  Clone ID: 700998331H1
ganaanacaattagagattncatatcanacnntaaaactttgattgaatcttggttctacntngcagatnnggaccnataatngcaacanttngcgagagnttagataccttggatgaggccagaagccaaggcatcaatgatctggataattggtgaatatgcggnaagaatcgacaangntgangaattcctgaaantttcttggaaagntttccangaaggaacagcacaagtccaatananttgggganng

SEQ ID NO: 2648 - DNA, 258 bp, Glycine max
  unsure at all n locations
  Clone ID: 700998333H1
ctgttttatgtggaaagangtcttggggcatggggtagcaattgtnttagctgcaagtntagcatctcagtacacatccctggtgangnttggtaatcttctggaaatggtaaatgtttctcaaaatttcaatcaaacccaattcccgntccaatgcnttcctccgcnnggtaactagctgggcngataaatggtggcaaattaaaactttgggcntggtttcnagcnagganaggnngcngnccattcnggtctttc

SEQ ID NO: 2649 - DNA, 129 bp, Glycine max
  unsure at all n locations
  Clone ID: 700998334H1
gtcactcatcaagtggagttcttccctgctgctgaccttatattggtcatgaaagatgggaaaattactcaatgtggaaaatatacagatctgcttaatngtggtgctgattttatggaacttgttggt

SEQ ID NO: 2650 - DNA, 265 bp, Glycine max
  unsure at all n locations
  Clone ID: 700998335H1
cggccaagatattagggacagtttgttgcgtcgctggagccttaaccatggctttggtcaaaggacagaagctgttacacacagagttccttcncttctatacatcttactggcngtgaaggtgacgattggctgctgggttgtctaatggctcttagcaagcantgtttncngggtcntggttgggatgatccnggagggtaacggatggttnggggctggccaagaacaattnannanaaacttttggnnggggcnggtttcc

SEQ ID NO: 2651 - DNA, 267 bp, Glycine max
  unsure at all n locations
  Clone ID: 700998336H1
cgcagacgtcacaacaaagtatctcttcccaccaccacctccacnnttcatttgannccgaagctcgaagccgttatcgacctcactcccctaaccgctttccaatctgaacttcgacngttcctatcttccggcaaagacggttaccgagatttggcaaaaccttggtcaattctcgancaacaaacgggaggcttgtcggtttcgtggtngccctttccaactttgcnnttnctcnnnnaatttngngggnttganctttcttgg

SEQ ID NO: 2652 - DNA, 255 bp, Glycine max
  unsure at all n locations
  Clone ID: 700998337H1
gttggaggattctaaggcgaataaagaagcaaatccaacaaaaaatagcaactaattaatcctcggacagtgtaaaatcaaatttccacatttccgagagagnggatatggcaaaggaatacgagcangctattgaagaactccagaaattgttgagggagaagagtgaactcnaagccnaagctggtgagaaagtggagcnggttacngcttncctgggnacntccnccncnggtggnnttccnncnncnngag

SEQ ID NO: 2653 - DNA, 134 bp, Glycine max
  unsure at all n locations
  Clone ID: 700998338H1
cnaataatttatcttgttcatattggattgtnatcctttataattttnagttacattgtctcactactaaaaaanacacttgagataatcaattaatatttcctggtgttcattgtggttctgctgaactttgt

SEQ ID NO: 2654 - DNA, 253 bp, Glycine max
  unsure at all n locations
  Clone ID: 700998339H1
cagcaaccagggtataacagttcacgggcttacctggntcatcttgctgatttgccatggcagaaggctagcaaagagcttgaactggacttaagggctgcacaggagcncctggacactgatcactatggtttagtgaaggtcaagcaacggataattgaatacctggctgttcgcaagcntaanccagatgccaggggtccaataatgtgcttgttggacccccaggggtttgnaagaccttcactgggcc

SEQ ID NO: 2655 - DNA, 144 bp, Glycine max
  unsure at all n locations
  Clone ID: 700998340H1
caaataatttatcttgttcatattggattgtnatcctttataattttgagttacattgtctcactactaaaaaanacacttgagataatcaattaatatttcctggtgttcattgtggttctgctgaactttgtggctcnaata

SEQ ID NO: 2656 - DNA, 252 bp, Glycine max
  unsure at all n locations
  Clone ID: 700998341H1
tacaaganagaatggctgctaggttgaaacacttgggtattagagtgaaaagcattgaagaagatgagcattgtgtcattccaatgggtggccccctcccagttctcccccaaagagttgttggaattggcggtaccgcangaatggtgcatccttcaacagggtatatggtagcaaggaccctaagctgcggctcctattgttgctaattcnnntgtcantgccttggttcngatagaggnttttcnngag

SEQ ID NO: 2657 - DNA, 246 bp, Glycine max
  unsure at all n locations
  Clone ID: 700998342H1
ggtcttccaaaatgctgttgccanaggngttagcaatatcagctttggagaccttttaggaaacttaggaaccaccatgtataaattcaaatttaggataccatcatacttctctcnggtcattagaagncttgctgtactggaaggnatgcaatcagctttaaacctgagtaacaaagttttggggagtattaaccttggattgcccganaaggactacnganaatctcctcngcttaaatcntc

SEQ ID NO: 2658 - DNA, 254 bp, Glycine max
  unsure at all n locations
  Clone ID: 700998343H1
gacctcttcaatggcggccaagctggcgttcttccctccttctccgccgtcctacaaggtgctgaaggaggaggccacggggctgctgctgatggacccgttcccgcaccgcgagaacgtggaggtcctgaggttcccgaaccgccgcggtaccgagatcgtggccattcaagtgcggcaaccccatggccaaatncaacctgntctaatcgcacggtaanggccgggcggacattggncanatgtacgagctc

SEQ ID NO: 2659 - DNA, 251 bp, Glycine max
  unsure at all n locations
  Clone ID: 700998344H1
cttctcatcattctcatattattgtcgccacttcgacctcaatcaccctcgcgccctcgctcttcccttcctggtggcgacaatgtcgactcctgctaggaagaggctgatgagagacttcaagaggctgcaacaagacccgcctgcagggatcagcggtgccccccagnctaacaacataangcngtggaatgctgtcatatttggtcctgatgataatccatgggntgggngcncgttcaagttgactc

SEQ ID NO: 2660 - DNA, 207 bp, Glycine max
  unsure at all n locations
  Clone ID: 700998345H1
ggtaaagttccaaaaggaaacactggntggcctctacttggagagacccttgagttcattgcttgtggctacacctccaaccctgtcagcttcatggaaaagcgcaagtctctgtaatggtagtgtatttaagacgagcnntttgggaactggtgtgattgtgtcggcanacccggaagtggacaaggtgatcngcnnaacccgggg

SEQ ID NO: 2661 - DNA, 254 bp, Glycine max
  unsure at all n locations
  Clone ID: 700998350H1
ctggttcttgcaggttctctccttgggcttcttagggcagatggggctcctctgctagagcaagccactttcaggaaccgtcaccgtctctatctttccgaacagactgatggcngtgttcccaatactcttgttaaacccagggttgctgcagagtttaatggagaaggtcgtctcccnttttcaangagtaacaaactgaatacantctgggnaaggtgataggattnaggggttcnagcaaaccnntagtt

SEQ ID NO: 2662 - DNA, 254 bp, Glycine max
  unsure at all n locations
  Clone ID: 700998351H1
gcttctttgtgtggcanatacacatgtaaatgtcccccaagatctaaaggatgtgaaactctggcaggttcatactctcttaaaagggttggaaaaaatagctgcaagcgcagacattccgatgttggtttgtggagattttaattccgttccagggagtgctcctcancgcactttntgccatgggggaggnagancctttcnacatcctggnttnnncntttgaccggntaacnntcnannnncncnccaca

SEQ ID NO: 2663 - DNA, 209 bp, Glycine max
  unsure at all n locations
  Clone ID: 700998352H1
gaagaattggnagcagangaagaggaggagttaaaaancaaccatgtcagaatcaaacgcacttgcaaatggtttagctggtgccaggtggtggnattattgctcaaatcatnanttatccttctntcaaggcggtaagtacggggtnagaanactgagagancnctncaagagggaacaaggcaaggttttaccttncaactccnnnt

SEQ ID NO: 2664 - DNA, 255 bp, Glycine max
  unsure at all n locations
  Clone ID: 700998355H1
gnaaatctgggatctctgccgggagggcccatgtgaagaggataaaatgaatattgccccacttgttgcaggcattctttcagttgtagtctttttcattgtattgggtattgtactgaatatcatttggagaaggagatggaacagaaaaccaggtctgataatagatatacttgtcntattttgaaactagattcnggggtctcngccnttggacnttcaatgcnatgaactgaatgnctttnntacnaanaa

SEQ ID NO: 2665 - DNA, 75 bp, Glycine max
  unsure at all n locations
  Clone ID: 700998356H1
ttgactattgcattaaagcntaagtaatgattccttnttcttttctanntctntcttaatatgatccacnanaac

SEQ ID NO: 2666 - DNA, 250 bp, Glycine max
  unsure at all n locations
  Clone ID: 700998357H1
ccaaattcattccaaacaggagaganaancaaagctcctcctgttgttatttcttggnggttggaggaggttcaaaggaaannnnnnnnnnnnnnnnnnnnnnnatcaattaactcttcaatttcttcaattttggagtccanttgatccatccctggtaggggaatcnagaaagtgggtgatactttgggctcnatatgggtgcnngcattcacnngggacaaactttgacttctcnncctantcntct

SEQ ID NO: 2667 - DNA, 252 bp, Glycine max
  unsure at all n locations
  Clone ID: 700998363H1
gnattttacattgctccagcttttatggacaaacttgttgttcacattaccaagaacttcatgaccctgcccaacatcaaggttcctctcattcttggtatctggggaggcaagggacaaggaaaatctttccaatgtgagcttgtctttgccaagatgggaatcaaccccatcntgatgagtgctggagagttggaaagtggaaatgcnggcgagccagcaaaactgatcnggnngagatancgggaagcc

SEQ ID NO: 2668 - DNA, 252 bp, Glycine max
  unsure at all n locations
  Clone ID: 700998364H1
cgacccgaaggcacctctggaganagtttgtcttcttggatgtggtgtttcaactggccttggagctgtctggaacactgcaaaagtggagtcagggtccattgttgctatttttggcctggaactgttgggcttgctgttgcagagggtgctaaaactgctggtgcatcccgggttattggcatagatattgacagcaagaagtttgatgtagccaaaaacttggnntcactgagtttataaatccnaatg

SEQ ID NO: 2669 - DNA, 256 bp, Glycine max
  unsure at all n locations
  Clone ID: 700998365H1
ctggggaaacaaacaagcatgcctccaatctattcactgtctaggaaaactccaatgaaaaaattcttcattctctgtttgatatactctctcttcaatgcttgtnttttgaacacttcatacttacttccatactatgattggngctagaaagcctctaaatatggcangcccaaagcncgggtaaggtgggagggnaggacnggttccaggtatgaccgggnaagtggaattcagggcttgatggttccaangc

SEQ ID NO: 2670 - DNA, 257 bp, Glycine max
  unsure at all n locations
  Clone ID: 700998366H1
aaaacaagtagttgagaactaagaagaaggaaatggcttcctcaatgatctcctccccagctgttaccaccgtcaaccgtgccggtgccggcatggttgctccattcaccggcctcaaatccatggctggcttccccacgaggcagancaacaatgacattnccttcnatgctaagcaaaggtgggagagtaacattgnntgcnagtggtggcaacaactggcagaagganntnccggattntttctaantggcaag

SEQ ID NO: 2671 - DNA, 250 bp, Glycine max
  unsure at all n locations
  Clone ID: 700998367H1
ccatgatgggttctaaaggactcaccgatgcatcaaagatagccattttgaatgcaaactacatggcaaaacgattggagaattattacccggttcttttccgtggagtcaatggaacagttgctcatgaattcatcattgactgngaggcttaagaatangcngggattgagccnggangnggtngcaagcggctccnnggataacggtttncaggnaccaacanggnnanggctnnngcnngnnanat

SEQ ID NO: 2672 - DNA, 252 bp, Glycine max
  unsure at all n locations
  Clone ID: 700998368H1
ttttccaactgagtcttctgacacttcaacaagcaacttcaatntggaagaaggggcagataacagtgattcaagtcagaattttgattcatctgagggatatgaacaccctgaggtgtcaagcccttccaattctatgacaagggtggctattgagtctcngagcacagggcctgacnntcntaataagtgacttgntagcccatgggnaaatttggnatangggcggntttggncaaacnccnggtcnnc

SEQ ID NO: 2673 - DNA, 250 bp, Glycine max
  unsure at all n locations
  Clone ID: 700998369H1
aaaagttcgtattttccctcccatgatcgaccctcatggtcacagactccaagcccatcattccccggcgcggcctcgtcgtcggcaactactgtcatgacgtcctccaccgcgacggcgagancgtcgccgagaccctcggcggcgcgnctccttcatctccgttatcctcgatgccctctcccttcccttncaaancgtntnnaanccaggnnccaanttnggctaaaacggcggaaaatcgaatcaa

SEQ ID NO: 2674 - DNA, 248 bp, Glycine max
  unsure at all n locations
  Clone ID: 700998370H1
gcaaaggattctacccgccgctcgatgggaattgcgcttcaaggcgtctcgtagggctaatccgcctcacgagggtcaccaacggcacgtgcctttggngggccgaggccccctactgctggtcggcaaacggacggcgggcgcacgcgtcgcttctagcccggnttctgacttagaggcnttcngtcataatccaacgcncggtagcttcgcgccaatggcttttcnaacaaacncgangancaatt

SEQ ID NO: 2675 - DNA, 245 bp, Glycine max
  unsure at all n locations
  Clone ID: 700998371H1
ccagtngcttcctaaatagttatgctcagggtttcaatatgaatccaattggnggttatggagtcaggntggatggnaggtttagtcctcttactagtgccagangtgggtttagcccatttggctccagtggttatggaatgggagtnaatttggatttaggattgaacccnagctntgganggacttccagttaaggtgggnnncnggganacgncggatgantcctttcaaaaatggcnatc

SEQ ID NO: 2676 - DNA, 114 bp, Glycine max
  Clone ID: 700998372H1
tcaaatcaatgaaaatattttttatgttcaaaatttggatgcgaaaaaaggaagaatttgaaatttctagttatacagaggaaagggcaaaagaaagttcgaaaaaagaggagg

SEQ ID NO: 2677 - DNA, 247 bp, Glycine max
  unsure at all n locations
  Clone ID: 700998373H1
cnaaatttagaaacaaaaacatgttggtgaaggtgtacggtccaacctatggngcccccaagagggtgctggtgtgtctgattgagaaggaaattgagtttgaaacagtacatattgatctcttcaagggagagaataaggnacctgagttcctaaagctgcagccctttggatcattcctgttattcaagatggtgattatactcnctatggatctcgtggnataatccgatacttgcngagaagt

SEQ ID NO: 2678 - DNA, 247 bp, Glycine max
  unsure at all n locations
  Clone ID: 700998374H1
ctttctgtgtgtatgtnaaatctttgtntttatcagaggtggtgcagaaagttgtgtctcagatccctatatacaccgaaaacgatacaactgtgtgctgtgtacagtgtgcaccgngctnnnnnnnnnnnnnnnnnnnnnnnnnnnnatcattttacatattactactacacctagctattaacggatagagtgggtctcaaactccanctaaagctcaatcnttttttttgncttttcctttccc

SEQ ID NO: 2679 - DNA, 248 bp, Glycine max
  unsure at all n locations
  Clone ID: 700998375H1
gtttgcaagcnatacaacgttcctcccctgttggacagcattttcctgtttcttttgtaaactggactactaataagtttgacaacttttaagcctattttatatattccagttgtgtctagatgttaccaagtgtaacatgtcattggttaatgcaganacaaatgtgcngctgtttttgtattcgaataacactacncatngtgtaagggcttagacccttggtagggttanggatcngtggctgt

SEQ ID NO: 2680 - DNA, 250 bp, Glycine max
  unsure at all n locations
  Clone ID: 700998376H1
tttattaattatatatgtanctctctccatcgatcagaattcattcagagaagtgagagttaaagatggaagggatagagcaccaaacactgaacgtgaatggcataaacatgcacatagccgagaagggtgaaggcccattgatcctcttcatccatggcttccccgacctatggtactcctggcggccancagatcacagcttcttgcctccctaggttaccgctgcgtggcgncggaccttcgtggg

SEQ ID NO: 2681 - DNA, 249 bp, Glycine max
  unsure at all n locations
  Clone ID: 700998377H1
cacgagccagantaagacaggngtgtcattcatggcgattgangcatggttgatggacgatancnatgaagatccaaggctttctcaccgtcgcaatcccaacgaatcagtttcattggaccaattagcagaattgggtgtgtnatactggaagctcaatccaacnntctatgagaacgatcaagagttgaccnagattagacaagatagggggttaccantaccnggnaatanttctanttancnttt

SEQ ID NO: 2682 - DNA, 250 bp, Glycine max
  unsure at all n locations
  Clone ID: 700998380H1
tcatatccctcanggnttggcttgtgcctttgtgtgctcatttttcactaaacaccaacccaaaccttatacacaaacattcttaattttgatatttttgtttatatattctaggnttttgttaattaattatattaagcatcatgggaaccccacaatccaataacttgccaccagggnttaggntccnncctacagatgaagnnnctcattctcataactaaggnagaagggtgcctccattcctttg

SEQ ID NO: 2683 - DNA, 262 bp, Glycine max
  unsure at all n locations
  Clone ID: 700998381H1
gttgantcgattcgagangttgggtatganatagcnaacacaanctctnctaatggtagtncaaatgcaatccaaggnaatcaagcactagatganacacttanggttgaacagtntaaccnatggcactnctcaagtcggaanctgggncattatnggtgatggcattgagtaaantgtgncccataaacttccngnattcccagcgnatgtatgttcgcaactttggccagncntgagaataatggttcngnccccaggg

SEQ ID NO: 2684 - DNA, 195 bp, Glycine max
  unsure at all n locations
  Clone ID: 700998382H1
ggagctggtgcaaagnatgctattctcatgaatatggcanatgctgttctttcaatgtggagatattttgtggantctcgtcttgagtnctaagtgattctcnctaatanatgacagccttctcaangattgnnattgctntgcactcacntngntncccacantgtcnttgaggtcagaantgatgantncagg

SEQ ID NO: 2685 - DNA, 255 bp, Glycine max
  unsure at all n locations
  Clone ID: 700998383H1
tcatagtgtacacctagttaggcanacacaccaaacaccaaacaccaaactagttggctcaattctctttgaatggctttggaggctttgaattcaccaacagcagccaccactccgttccgtggctaccaagangagggaggnggacgaggagggtggacctttcanttacgtgagccntggggtaaaaaggnaacggttcnaaaggncggggttttagaanggnggaaggataactcggtcttggctccntca

SEQ ID NO: 2686 - DNA, 257 bp, Glycine max
  unsure at all n locations
  Clone ID: 700998385H1
ctcaacgttccttctcagttatccgccgncatggctgcccgccacgtggagcntcgctcgcccaaacacgacgacgccgttcatgtcgttttgccggacggggaatcgtggtgtgcncaagggaggattgtcgaggagttcgtcatggaacagtccgtgccgccttaacctctttcgcttttgcggttgggggaagctttgggaatccgggangttgggtcccnaggaacaagggtnaangccgaagacgcnggcgc

SEQ ID NO: 2687 - DNA, 246 bp, Glycine max
  unsure at all n locations
  Clone ID: 700998386H1
caatcatatttgctttcaagaacaagctggacattncattgggtgttgcattgggttcagcaactcagattgccatgtttgtngtcccattatgtgtaatcgttgcttggataatgggtatcgatatggacctgaacttcaacctcctagagacaggttcccttgcgttggcnataatagtcacaggcntcactttacnggatgggacttcncactanntgaaaggcctgntcnnctggngtgcna

SEQ ID NO: 2688 - DNA, 247 bp, Glycine max
  unsure at all n locations
  Clone ID: 700998387H1
ctgccttagttgcaatcacccctagcccatcttaattgcagcttctttgggctgcgtaacagtctcaagcaccttcattgtactgggtgtgagtggtcctgttttgtcccacatttcctagtaatatggcccaattgtagtcctcaccttacaagctggttttgtgggggtgagtaagggcttaagcccaaattctaagggttantttttctgnaatttccaaaataaacancngtcntccatcnna

SEQ ID NO: 2689 - DNA, 253 bp, Glycine max
  unsure at all n locations
  Clone ID: 700998389H1
gcgttggtgcaataacaagtggacctcttgctgattttattggacgtaaaggggcaatgagagtgtcaantgctttctgtgtcgcagggtggcttgttatttatttttctgagggtccagtgcctttggncattgggaggttagcnacaggattatggaatggggagttttttccatangtggttcctgtctttgtaacagnaatttgcaacaaaaggaatccganggggcnatggactaacttaaatccgnt

SEQ ID NO: 2690 - DNA, 246 bp, Glycine max
  unsure at all n locations
  Clone ID: 700998390H1
tcaaggttgtcacccgctgttgaaaagggtagcaaccgcacacggtgacaatcctctttccctccactttcatctcttagcattcctcaaagcaagctttcngtntgtcctctgtcatcagcagtggctaccacccatggctgacacaacggtggtggaacaatttctcatncancaccatcatggtggtgcgctggaatgattatgcccataacngttttccnttccacggtgtgnaatctgctg

SEQ ID NO: 2691 - DNA, 107 bp, Glycine max
  unsure at all n locations
  Clone ID: 700998391H1
gttgagtgctccaataataccatgnnagctcaagcgtcgtancttgtttattagcttgttttnctctctggtgttgcatttgcttgcaaagtattattacaagccaa

SEQ ID NO: 2692 - DNA, 252 bp, Glycine max
  unsure at all n locations
  Clone ID: 700998394H1
tttagttatctactcttttctgcatgtntgttctctcaacgactcctccgcgaaagagtattattcaatattttggttgggttgaatcccggggttgaagcgttgcagacatcacggctattctaagagtgtctcgctccctcattcatgtccgatctgtacgacggaggacgggtagtttncgtaaatgccgttaaaccttcggccggcaaggtggggcgtggtgctttgcctttctggaangtggtaacc

SEQ ID NO: 2693 - DNA, 251 bp, Glycine max
  unsure at all n locations
  Clone ID: 700998395H1
gnggaagctccagtgcttgggaagccaacaatttttaccagtgatagtgtgggtgaaaagatccagtgggctcaatgtgaagattgtttcaagtggcgcaaattgccagcaagtgcgcttcttccatcaaaatggacgtgttctgataattcgtgggatccngaaagatnttcntgttcngctgcgcaanagctgacnagcngagcnattgaggatttgctaacnccntggagtttcnncnggtcccnagg

SEQ ID NO: 2694 - DNA, 244 bp, Glycine max
  unsure at all n locations
  Clone ID: 700998396H1
tgttccnagatcttcctctaaatggaacagccgcctcaaatgcaacctnctactactaccggaccaactacttcattttgattgtttctgttctcatattgggttttcttcgaagaccgctagctattgtagctgcacttcttacggcactcagcatgcttttctgaatgacnagcnttgcnggtaactttagtgagaaggtaaccagaacagttangcnattttcnacncatttancnggcca

SEQ ID NO: 2695 - DNA, 266 bp, Glycine max
  unsure at all n locations
  Clone ID: 700998401H1
aaaaatgtatttcttccttttgtatttataacattttgcctttngaaattgaaatctcatctcttgataggtaatcaagaaaatgaactatgttgcagagaaaggggactaaggtaatatcattgccattatacttagacagaagcactgagtatcacttatatggctctgcatttccaaattggagtttggtgtnaagactttagtcattaattatcccattttggaggggagacttggcagcttaangnggtttgcttccnaga

SEQ ID NO: 2696 - DNA, 259 bp, Glycine max
  unsure at all n locations
  Clone ID: 700998403H1
aaggtgaaggttaggttgggttgttagagacaagggtggaacgcattcaattgaatttgggatagtcttaagaagaaatgattgtgttatgtnatagcaactattcaatggcccttttctttgttgctgtgaaatggaagcagctgttattgcacgattttctcaantnnnctcagatatttgctggggattaagtgaaaaagactcaatggtaancccaaaagtgtctactcaaccaaaaatatgctacaggcctatt

SEQ ID NO: 2697 - DNA, 259 bp, Glycine max
  unsure at all n locations
  Clone ID: 700998404H1
tgatcgaccaataaaaacatccctgtgttcgaaggtttcagaagaaaagtgcaagctttgcaagtttgaagggtattattattatggcanagttcaccacgcagggtcgcctgangctgctcttgaatggggaggtgtgtcttctgttttggagcacaagganccttttctctacaagtgcagancagttcanacccannanagaagaacaaggtncgcaggntcttctgccagantttantatgnntcnacatcatct

SEQ ID NO: 2698 - DNA, 259 bp, Glycine max
  unsure at all n locations
  Clone ID: 700998405H1
cttcgtacatgtctatcacttcttccacttccttcaagtccntcactatggccgagtcctgcctcctctcttctccctcctcactcttcaacaacaaaaccaaaccctctctattctcacccccctccaaaccctcacactccaattctcatgcatcaactcctcagtctctctctccctcgccgcgngagctcangggctctcccctcgtcacgcgcgtggcccaaanttccgattgggcccaacaagaagaagacgt

SEQ ID NO: 2699 - DNA, 258 bp, Glycine max
  unsure at all n locations
  Clone ID: 700998407H1
gggattttacattgctccagcttttatggacaaacttgttgttcanattaccnagaacttcatgaccctgcccaacatcaaggttcctctcattcttggtatctggggaggcaagggacaaggaaaatctttccatgtgagcttgtctttgccaagatgggaatcaaccccatcatgatgagtgctggagagttggaaagtggaaatgcaggngagccagcaaaactgatcaggcagagataccgtgaagccgcagat

SEQ ID NO: 2700 - DNA, 259 bp, Glycine max
  unsure at all n locations
  Clone ID: 700998409H1
tttttcacaaagggttgtngtctcttcagagagacacagatcttgaggttggaggcaaaatccttcacacactttggtggttatggaaacagaagagaggaaccagaaagattgcaaggcttcggagccagagttttcttgcagtgggggaacaggaagaggctgagatgtgtgagggtgaaggaccctcggatttcagcaaggctcaacggtggaatcagaaggaaacttggttctgcaatggagcatcatcgctctg

SEQ ID NO: 2701 - DNA, 260 bp, Glycine max
  unsure at all n locations
  Clone ID: 700998410H1
ggagatcgagacggttctcaccgacgttaaagctgacaacgttaaggttataccagttcccaagcactgcgattgggctgatttcatggtactcgccactggcaggtccacctggcacgtcaagaacatcgccaagccctaatttacaaggctaagcagaaacagagaggagttgaccgattgatncnncncaagtgnggagtgccccggcaggannangtancancttnatnccnggtngaaagntgntccncccncnc

SEQ ID NO: 2702 - DNA, 261 bp, Glycine max
  unsure at all n locations
  Clone ID: 700998411H1
ggaggaggtggccctggcatgggtcctataggtgtaaagaaacacttgggcaccatttttancatcacaccctgtgatagcaactggtggaattcctgcccctgacaaacctcaaccacttggtaccatngctgcgcaccatggggctcagcactcatattgccaatccctnacattacatagccatgatgggttnctaaagggactcaccgntngcatcaaagatngccntttggantgccanactacatnggcaanncg

SEQ ID NO: 2703 - DNA, 208 bp, Glycine max
  unsure at all n locations
  Clone ID: 700998412H1
aagatctgaaatcactctgatggagcagagtaaggagaaaaatgctncttggttatcagtgccacagtttggggactgggatcaaagggacaagtgccggactactcgctagatttctctaaaattcgggaaacgaggaagcaaaacaagacaaatatttcaagggcaagtcttggtaacgaagaggagctccacggnttctgcaana

SEQ ID NO: 2704 - DNA, 252 bp, Glycine max
  unsure at all n locations
  Clone ID: 700998414H1
ctgacatccaagactatctccaactcttcttcctctggttactctccatcatcgccgttagagccatactcaccaaactccgccacaagcctcgccgtccaccgggcccacggtccctccccatcatcggccactccatctcatctccgccctgcctcacnagtctttccangggttctncaggtnnctagggcccccggtgaatttttcnggnttcgnncccgncggggtttttgggccngnaaacgnaaa

SEQ ID NO: 2705 - DNA, 255 bp, Glycine max
  unsure at all n locations
  Clone ID: 700998415H1
gnacatttgaagcaggatggggatgagatcgagctagacattgaggctgttgacacagagacactttgggaacttgatcgattggtgactaattacangaagatggttagcaagattaagaggcaggcattatgggnnnnnnnnnnnnnnnnnnnnnnnntgtgcagtctaacaaaggcaacggggaattgccttctagcgagaaggttgatggggggccagttgaagtnaagannccaaaganagtngngggcg

SEQ ID NO: 2706 - DNA, 256 bp, Glycine max
  unsure at all n locations
  Clone ID: 700998416H1
cttttgatgtctctcttctcaccatcgaggagggtattttcgaggtgaaggccactgctggtgatactcacttgggaggtgaagattttgataacagaatggtgaaccattttgttcaggaattcaagaggagaacaagaaggatattagtggaaatgccagactctgaggaggttgagaacagcatgtgagcgggcaaagaggnctctctcttccactgctcaaaccaccatagagattgattccttgtacgagg

SEQ ID NO: 2707 - DNA, 257 bp, Glycine max
  unsure at all n locations
  Clone ID: 700998418H1
gacttttgataagatggattgcattgattgtggaacagtttggtaagacctataaggccttaactatacatagttgccctgtcacatgaaagtagcccttagtagtcaattgtgcatggtagcactgctaggctttttgcgaccctctgccatttctgtgtggctcattncggatcagttttgtgtagctttgcaaattgcaactgtttttgtgtgaaattgtggccatcttggcacttattctttccacaagtgaa

SEQ ID NO: 2708 - DNA, 233 bp, Glycine max
  unsure at all n locations
  Clone ID: 700998421H1
gaaggcnggngacattggaantnatccantcanancctgcagagggtacaggggncncttactttatgcntgattcaaccgggcaaaagtatatatctgtntnnaagcccattgatgaagagccaatggcngtaataaccctangggnnnagngggcnccgaagcccggngaaggctnaaaagaagggancaacagtnggncncggagcattcagggaagatgccagctanat

SEQ ID NO: 2709 - DNA, 257 bp, Glycine max
  Clone ID: 700998424H1
ttttatttggctttgattttcttctgcaaccttatctactgcaaagctttgattactgagtctaacttaccctgccacagtttgccttgtttacctgagctctgtttttaactggtctttgatcaaggatggcataaaggcaattgagttgttgaaaggaagcggaaaccatgaagagatatttgaagttcttgcagcagtggctgcatctttgggggatgtaatagatgatgtgaacactttgcaggtaacacctt

SEQ ID NO: 2710 - DNA, 254 bp, Glycine max
  unsure at all n locations
  Clone ID: 700998425H1
gngantgtccctccaaactggaagcctacaattgatgaggaaaggggagaggctgatccgttggttgggacagagtttagtaatctgccgtctgatcccaatccaanggttcggtactgtcggaagtgcaacagctcaagccgcctcgatgccatcattgttcagtttgtgggcgctgtgttttgaagangcacnacattgtgtgtgggtagtcaaatgtgtcggggctccaaatncaaaanntcccctntttt

SEQ ID NO: 2711 - DNA, 278 bp, Glycine max
  unsure at all n locations
  Clone ID: 700998426H1
catcaagggttgtgaaagcagagnagtgagatacactaagttatcctccataaatacactctaattaggtggcaagataagtgtctaaccttagtaacattgccacatattgtgttcattttggaattgtggccatnaaaattcctattcaattccatctaatgggctgcctcttccttanggctatgccaatccaatgcntggganaaacccctttgcatcccgtatttcccaggngggtccnggggtcaacccaattgggncgtccccggnttaaa

SEQ ID NO: 2712 - DNA, 258 bp, Glycine max
  unsure at all n locations
  Clone ID: 700998427H1
gtcaagattgttgacaccttccctggccaatccattgatttctttggtgcactgagggccagagtatatgatgacgaagtgaggaagtggatttctggtgttggtgttgacggcattgggaagaagcttgtcgactcaaaagatggacctccaacctttgagcagcccaagatgactctggagaagctcttgacgtatggtaacatgcttgtcccaagaacaagagantgtcaagagantccattggccnaanaattt

SEQ ID NO: 2713 - DNA, 256 bp, Glycine max
  unsure at all n locations
  Clone ID: 700998428H1
gattgtntatgctatatgttttccgaatttagttacgattcctgatttaatctttctcctcattaaagtaaggctttgtggtttaattttnttaattgaggtattagggcttgtagtttaatttctncttctcttcttcttccatatttgaggtattgnggtttgtntttttattctatagtcgatanancatnanccaccggnttgcgangnncccttnntgtgnataaaaggnatgcagntnganannannctc

SEQ ID NO: 2714 - DNA, 238 bp, Glycine max
  unsure at all n locations
  Clone ID: 700998429H1
cacaagccaagtgaaagtgagacaaaataaaaatcaaagagcataatgtcagggatcattcacnagattggggagacccttcatgtggganggcacaaganngaggatgagcataanggtgagcaccatgctgagaatacaagggganaccatggtgancacntngtgattncaaagggancctctggtaaaaaaantgnaanccaatggtcnnacacccacnnnnaaagggtttcta

SEQ ID NO: 2715 - DNA, 254 bp, Glycine max
  unsure at all n locations
  Clone ID: 700998430H1
ggnacatttgaagcaggatggggatgagatcgagctagacattgaggctgttgacacagagacactttgggaacttgatcgattggtgactaattacaagangatggttagcaagattaagaggcaggcattatgggnnnnnnnnnnnnnnnnnnnnnnnntgtgcagtctaacaaaggcaacggggattgccttctagcgagaaggttgatggggggccagttgaagtgaagaagccaaagaaagtagangcg

SEQ ID NO: 2716 - DNA, 261 bp, Glycine max
  unsure at all n locations
  Clone ID: 700998432H1
ggnattgttgtaactttttgattcctaaattctctaaaattcgaaattctaatttcgttaggggaaaganattgtttgtgtgtgagtgagtatggctggaaaaggcgagggtcctgctatcggaatcgatttngaacgacgtactcttgcgtcggcgtgtggcaccacganccgtnttnaaatcatacccacnnnccngggtnaacannnctccccccncngggnntttnccncnaaanaanttttttnnnggggggggnc

SEQ ID NO: 2717 - DNA, 264 bp, Glycine max
  unsure at all n locations
  Clone ID: 700998433H1
aatcattgttctacgaagctcccctcggatacagcattgaagacgttagaccaaacggtggaatcaagaaattcagatctgctgcttactccaactgcgctcgcaaaccttcctgatatccatccagattgatgttcattgcatgcaaccatagttttattaggttttttcttctttgttttcaattaggtttttgctgctctccttcnaaactccgtctttccggaatcccctcttngngatggngnncngtcccgcccccnc

SEQ ID NO: 2718 - DNA, 97 bp, Glycine max
  unsure at all n locations
  Clone ID: 700998435H1
gnttgccttttcttttttctatagttccattanccttagttccaccaaactcttataagtagagcncaagcncaaacccaaccaccacaaccntang

SEQ ID NO: 2719 - DNA, 255 bp, Glycine max
  unsure at all n locations
  Clone ID: 700998439H1
gaacaccctttaataaccaagctgatgttactaacatcacacttaaaccagccactaatgcagttttaagcgcttaattagtaggctttggcctatttcttgtcctttcctgagatgaagantggtggtangatccaaacccaaaatcagattcaaattcaatggattggttattgtttcattctgatcacattgtcatatccataaagaagggggggaaaaaaagttagcactttgcagaagcattgcaattat

SEQ ID NO: 2720 - DNA, 114 bp, Glycine max
  unsure at all n locations
  Clone ID: 700998440H1
ctcactctttctaagttttttctatctctttctgctctgctgctctgtactgncatggttctnctgccaaaacnaaccttccgaatgccgacgtctctgtccactcaaccttng

SEQ ID NO: 2721 - DNA, 188 bp, Glycine max
  unsure at all n locations
  Clone ID: 700998441H1
ggctatcgcggtgcatggtggcgctggtgtcgaccctaatctcccactcgagcgccaagaagaagcnnacaacttctcacgcgctgtctcaatcttggnatctctgctctaaattctaatcttcccgccatanannccccnnnttntgngggggtttcaaagggcccccgttttattcgggggggggg

SEQ ID NO: 2722 - DNA, 258 bp, Glycine max
  unsure at all n locations
  Clone ID: 700998443H1
ctccttgctcttagccctcntcctcttcgccgcngtnnccaccgcngcgatggcggtggccgcgtccgacgccgacgacatcctgatccgtcaggtggtgccagatgttggcgaagcgaaagaggaggncacctgctgaacgccgagcaccacatcgcgagcttcaaggccaagttcgccaagacctacgnnaccaaggaggagcacgatnatcgnttgggcgtcttcaagtcgaaccctncggaagagccnaggtct

SEQ ID NO: 2723 - DNA, 254 bp, Glycine max
  unsure at all n locations
  Clone ID: 700998445H1
gcaaactccaaccaaccaacttcttaattaataactgtcgtcgtttcaatctcgttacacatctcaaaacncagcagcagcacactcgacttaaaatgcaagccgtttcactctcacctttgtcgtctaggattcttccgacgagttcgctggaaagttcgaacacgatttcgtggctaagctcaaaatcaacgannccgaaaacgangagangcataacgagntgaggtagangagggggangtttttccnct

SEQ ID NO: 2724 - DNA, 255 bp, Glycine max
  unsure at all n locations
  Clone ID: 700998446H1
gctgtatcaagaagcgaggtgcattgtgtccttgactttgtatctacacattcatatgtngcgttttgtgtgagatggaattatatctctgaagaatgaatgaataattcttgtatttcctggaatgtagttagtaacgcgtacttataagattgnaatnaatatcctncctttctcnagggntcanggcccgttcnaaaancnccccatnncagcgggggananctnntnaccangngganaaaagggggggnt

SEQ ID NO: 2725 - DNA, 254 bp, Glycine max
  unsure at all n locations
  Clone ID: 700998447H1
ggtacaacaacaccaccgtcgccgtttccccctacggcgaccactggcgcaacctccgccgcatcatggcgctcgaggttctctccacccaccggataaactcccttcttggaaaatnngagggacgagatatgaggctcgtgcaaaagcttgctcgggactcgcgcaatggcttcaccaaagtagaacttaaatccaggttttcggagatgacatttancactataatgaggatggtgtcagggaagattttt

SEQ ID NO: 2726 - DNA, 255 bp, Glycine max
  unsure at all n locations
  Clone ID: 700998450H1
gctgganntctcattgggtgttgcattaggttcagcaactcagattgccatgtttgtggtcccattatgtgtaatcgttgcttggataatgggtatcaatatggacatgaacttcaacctcttagagacggttcccttgctttggcaataatagtcacaggcttcatcttacaggatggaacttctcactacatgaaaggccttgttctcctgctgtgctacattgttattggggcatgcttcttcgtacaaaga

SEQ ID NO: 2727 - DNA, 255 bp, Glycine max
  unsure at all n locations
  Clone ID: 700998451H1
gtcgaagatgcgacggcggcgcaggcggcgcatacttccagaccgacgacggcgncgcatgaggctgtcgttgcgccgccggaagggagangcaggcgcaagggcatgctgcgtcgtcaaattcgcatagtcgatgncgtttccacnacagnnaaanagggaaaaagcctgataaggacngaatattacccaactnctcancancnntcttgcgaccnggcagcaagtccaagggaagaaanaatccgacngnng

SEQ ID NO: 2728 - DNA, 255 bp, Glycine max
  unsure at all n locations
  Clone ID: 700998452H1
ttagatatagctatgaaaaattactgcgccaggctaaagctccaagtatgtttttacaatccttcaaaaattttnttctctttgtgtgtgtatggtgatgataacttaattagtgttcatgaatatgtcagccttactttagtggttctaaattgaaaagctttctagctggtccataatatcaccattactgatggtattgacaaaactagtgcaactttgcaatttagaaagttagcagattgtgattntctc

SEQ ID NO: 2729 - DNA, 255 bp, Glycine max
  Clone ID: 700998453H1
gtcaacaccctcgaatcagagctgtcctcggcttcgcgcccagatcgccgacaaagacaacctcatcgccgaccttcaatctgcagctcgactccctcgacgcttccctctcccaaatcgccgacaaactctccaaaccgaacaagataaggagagcttgctccaggagaatgcttcgctttccaacaccgtcaaaaagctcaatcgagatgtctccaagttggaggttttcagaaagacgcttatgcaatcatt

SEQ ID NO: 2730 - DNA, 256 bp, Glycine max
  unsure at all n locations
  Clone ID: 700998455H1
ggaggacgtgattctgtctgccgggtttgggatatacgaagtaaaatgcagattcatgctctttcangtcatgataacactgtactgttctgtgtttacgcggccaacggatccccaagttgttacaggtttcatgacactaccatcaagatgtgggaccttagatatggtaaaacaatgtcaactcttacaaaccataaaaaatctgttcgagcaatgnnncngcatcccaaagagcaagcttttgcatctgctt

SEQ ID NO: 2731 - DNA, 258 bp, Glycine max
  unsure at all n locations
  Clone ID: 700998456H1
tcacacactctcgttgtcgtncaataccagcatcaacagtcttgcttacttgtatatttgaagtgactgatacctcgnncnncagtctcctncgcgtcgttactnantctcgctgttcaagtacgcccaatacataataccgacaaaaccacttccgaaaatgaagtccttcgttgctgctggcctcgtggcgctgttgctgcctaccctcaggcctcttccgatggtgggtgtgcgtcctcnntggacgggcacttt

SEQ ID NO: 2732 - DNA, 260 bp, Glycine max
  unsure at all n locations
  Clone ID: 700998457H1
tttttcacgaaaacgagcgtnntgaagctgaggagccacctggacaagtacctcgtngcggatgccgacggcgcgcgggtccgccagacccggaggagctccggcagggggacgtggtggacggtggaggagtggcggcggaaggagggnttantantaagtttcncttaagaatttccccagggngtnttnaacccgtgaananacccgttttttctancaatttcanggggaaaanttttttttnnaaancntttttt

SEQ ID NO: 2733 - DNA, 253 bp, Glycine max
  unsure at all n locations
  Clone ID: 700998458H1
gtttcatcantatcaaatgcggcaaatattggacatcaacaaacagggggtgcaatagcaccagctcaatcccttgccattgggactcctgggatatcagcctctcctttattggcagaattcagtgctctgatggtgcgcatggtaatgctttagctgccacttctgggaagtcaatgttacagagcagcctnttgancgcctaattncangnggtgaaancantgtcaagtanagcattaagtgcnncagt

SEQ ID NO: 2734 - DNA, 124 bp, Glycine max
  unsure at all n locations
  Clone ID: 700998459H1
gcgcgctgtaagtttgctaggttcatgagcaggttcgggaagagttaccgaagcgaggaagagatgagggagaggtacgagatattctcgcaaaacctcaggttcatccgctccaaanaanana

SEQ ID NO: 2735 - DNA, 252 bp, Glycine max
  unsure at all n locations
  Clone ID: 700998461H1
gaacactaagtcagggttcagttgatatatatgctgctcagtgcaaaanttgcttganatggagagagattgatacacaggaagagtttgaagagattagaagtaaagttgctgaggaaccttttctttcagcagaaaggctaatagtncctgtgatgancctggtgatattaaatatgattcccctnggacatgggtgattgaccaanccaanccnccaaaagccccccacgggtttnaagggncttnggt

SEQ ID NO: 2736 - DNA, 252 bp, Glycine max
  unsure at all n locations
  Clone ID: 700998462H1
tccaccaagttcgatgtgtgtgaccatctcatactccatccatgtgcttaattagtgtggtatcgaaattgttgtatgtgtagtttctgctgtgttnnnnnnnnnnnnnnnnnnnnnnggtatgtgtcaaccagacgttcacgtattgcttttagagatccatgaatcgtgtctatctcaggnctaattccagcttggtttttgtatcagaaaactatatatctgcattctgcagaagaaggtatataaatt

SEQ ID NO: 2737 - DNA, 234 bp, Glycine max
  Clone ID: 700998463H1
agaagctaattgatagaactatcaatgctacgattgtgctcgccgctggcactttcgccgtcaccaaacttctcacgattgatagcgattactggcatggatggacgctatcgagatactaagatatgcgcctcagcacaactggtctgcttatgaggaagctcttaagacaaatccagttcttgccaagatgatgattagtgggattgtttactctataggggactggattgc

SEQ ID NO: 2738 - DNA, 119 bp, Glycine max
  Clone ID: 700998464H1
aagagattcatcacagtaacatagattttatctggttcgagcaaggttgtcttctaaaacctaggtcttcagttgtggctaccacaaggcggttcccttcagattccggtgcctttgca

SEQ ID NO: 2739 - DNA, 253 bp, Glycine max
  unsure at all n locations
  Clone ID: 700998466H1
gcagatatatgtgtagcactggatatctgtcatttgatgggcattttgcttgaaccatccgttgcncttgaaggcattcaaatggttttgagctcgccgaactttagtgctttatcttatgaagcaggcagcttgcatggatgcaacgctttgtatnccaggtagatctactacnacagggagagtcaggtggcctttcatgcagagagcatcagaaggtattgactcgtttgtttcgcaagtacatagctga

SEQ ID NO: 2740 - DNA, 83 bp, Glycine max
  unsure at all n locations
  Clone ID: 700998467H1
ctttagcancnaaagtgagtgatcggcactgggaggatccatcgagannngatgtgggtgttttancctggatnctnctttgc

SEQ ID NO: 2741 - DNA, 253 bp, Glycine max
  Clone ID: 700998468H1
gtcgaacccctaatggcttctcaagttcttcttcaacaggcactgtttgcccccaagctaagtttcccttcttcttctcgtaacgtcgcgttaatttctagggttccttccaccccaatttcatggcgtgcactcctctcattgctaagcctagtttcgctgtgagagctgactccaacgtcgaaggcgctggtgaagccaccgaggatgttccttcgtataatgttgatgaagtttcggaaggcgaaggagt

SEQ ID NO: 2742 - DNA, 253 bp, Glycine max
  unsure at all n locations
  Clone ID: 700998469H1
cacgtacacgcgagagaagaccaggaaaaatctatggcatagaatccagcaagtagggcatatatagacgctttgtatgaaacggtgagggtgtgtttcaaaatcgaaaatctagagcaaagtgattgttccagttccaatggccttgggcaccagcgccttgatcggaaggnaggttcttgtctcacccccaacccccaaaacaaccaaatcatctactccgctacaattccttttcaagagaagcatnttt

SEQ ID NO: 2743 - DNA, 248 bp, Glycine max
  unsure at all n locations
  Clone ID: 700998470H1
gaggacagagaagtcggtctttcttctgttgagtgacaaagctaatatcattgtcttaaagttctcataaggtttgtaggttttgaaacgtgacattttatggattgtcaaacacgttggcttgtgtgtataagtgatatttgtgttgtctctaggaaaatgtggttgctgtttgaggttctgcaattcaacacgatgagcaaccttttttgggaganaaggacactgatatattgtaaaatagtttt

SEQ ID NO: 2744 - DNA, 252 bp, Glycine max
  unsure at all n locations
  Clone ID: 700998472H1
gaaaaacaagagcaaattgggatcgaagaatttgaagaacaccacaagcaagatgcatgttgttgtggtgctcaacacgcaatcctactgcagaggcctagaaccncccttcatcttctccttccgtcgttccaacaagggaacaaggactttgagtttcaggaggctgctgctgcgtccttctcttgggattcatttatcgcgtantttgctttaaagtgtgttgttactccgaacccagctgtggaattg

SEQ ID NO: 2745 - DNA, 250 bp, Glycine max
  unsure at all n locations
  Clone ID: 700998473H1
gcctctacagcagagtcccagatctctgcattccaattcccatggctggtcgctatgacagtaaccccttcgatgaggaagaagttaaccccttctataatcctggaagtgttcccgctgccactaatcaaggctttcacctctgaagccagaacctgttattataattatggctttggtgcgacagttgatatacctcttgattcatcaanggnttgaaaaaanngggaagggnntcnaagccangggg

SEQ ID NO: 2746 - DNA, 251 bp, Glycine max
  unsure at all n locations
  Clone ID: 700998475H1
cttcttttatttctcttgctctaatctcacaagtcacttgcaaatgctcccaatttcctcttcaatttagggtttcatctttcgcttcgagtttgcgcatccatggattccatctacgcgagctcncagtgcacggttctcaccttctccgtcgcgagactctgttcttgccgcgaacatcgattccttcttcctcgcttcggcgagcgaagaaggcgcggcgccgagggtttcgagttctgcctccgang

SEQ ID NO: 2747 - DNA, 252 bp, Glycine max
  unsure at all n locations
  Clone ID: 700998476H1
gttggaaagtggaaatgcaggagagccagcaaaactgatcaggcagagataccgtgaagccgcagacttgatcaagaagggaaagatgtgcgctctcttcatcaacgatcttgatgcaggagctggtgtcttggtggaaccacccaatacactgtcaacaaccagatggtgaatgccaccctcatgaacattgctgataaccccaccaatgtncagnttccnggtatgnaacnncgggaacancccncccnt

SEQ ID NO: 2748 - DNA, 253 bp, Glycine max
  unsure at all n locations
  Clone ID: 700998477H1
tacttcgtatcggttatccatttattcgtgggtgtggcgtactgtttggtgagctgggccgtgggacttcctaaacgtgctcctatagactccaacctactgaagttgctcattccggtggctgtggccatgcattaggccacgtgaccagcaatgtctcatttgctgcagttgctgtttctttcactcataccattaaagctcttgagccattcttccaatgcngctgctttcacagttccatacttggccc

SEQ ID NO: 2749 - DNA, 253 bp, Glycine max
  unsure at all n locations
  Clone ID: 700998478H1
atttctcctaagaaggagttntcttcaatcacttctctgtctgtgtcgaatcctaanccatctgatgtggaagcagcgggaaataagaaaaaacggatatttgatatgaacttgccttgtgatgctgtgtcgttgagttggacaaagaagcattcactgaaactgctgttggtaagacaaggtctcctacaacagaagnagnnccctagaaatcaaatngatcnganttgaattaaggnntggggccnaaggt

SEQ ID NO: 2750 - DNA, 252 bp, Glycine max
  unsure at all n locations
  Clone ID: 700998479H1
ggctaagcgactactgacagacccaaatccagctctacgtgaacgncctcatacaggtnagtaattctgttcaaaatgcataagctttttngcatataaattttattctgtataatctacattcctcaattaaaagagggcncatttttngtgatatatatttaaaatttggaatcaacgtcaagaagtatcatatgtcgggtaaganattttacaagggcaggtttcccttgtnganganggggggggaca

SEQ ID NO: 2751 - DNA, 217 bp, Glycine max
  unsure at all n locations
  Clone ID: 700998480H1
gtanagttttaagactatacaataccataacagaaaactcaacagcacagttctgttaacactaaacagaagtatcttcagtttgtttggcaaagaaaggncggggattggcctaattagtctcgnatgatggttatgtgagtnaaaanaaagaaataggtgaggtagaatanctaccaaacgntttngtcaacccanatttcccatttccgcnngt

SEQ ID NO: 2752 - DNA, 128 bp, Glycine max
  unsure at all n locations
  Clone ID: 700998482H1
gctgcaatttgtatggtctgaaagagccnaatggctaccgcgaagataggactccggagttggtcccgtcccaanaaccactcaccncagtcaccgccgtcgccgnttcttcctccgccgcattctcc

SEQ ID NO: 2753 - DNA, 253 bp, Glycine max
  unsure at all n locations
  Clone ID: 700998483H1
tttgaatgaatagaagaaaactcattacagtatctgttgaaatctcaacttgaatctacatttcagattcctacctatccttaaccattagaaaacaatgctgcgctcggaggactaccacgcccaatatcaaaagttcataggacacagagtgtnctcacagatgtccctcgctaccccaatgctcacctagccttcagcaaccaacacagccatcacaacaccctttctaatgaaagggttgagtatgatg

SEQ ID NO: 2754 - DNA, 254 bp, Glycine max
  unsure at all n locations
  Clone ID: 700998484H1
aaaaagcccgtcatgtccgaaatcaacgtcgcccgtctcgtcaagctagacgaaccccttcgaactcggcaaggtcgccaagcctactccgggcccgaccgacgtcctggtcaaggtcgaggcctgttgctcgtcccaaactcttataatctcgtcactggcaaggccaaactgcctattcctgagctgcttgnatcttnggactggacgtggcnggcanaatcgagagnntcggggacccacgtccctnattt

SEQ ID NO: 2755 - DNA, 249 bp, Glycine max
  unsure at all n locations
  Clone ID: 700998485H1
ttttacttcccctatggctcgtcactccttgctcttagccctcctcctcttcgccgccgtnnccaccgccgcgatggcggtggccgcgtccgacgccgacgacatcctgatccgtcaggtggtgccgatgttggcgaacgaagaggaggacaacctgctgaacgccgagcaccacttcgcgagcttcaaggccaagtacgccaagacctacgccaccaaggaggagcacgatcatcgcttcggcgtctt

SEQ ID NO: 2756 - DNA, 251 bp, Glycine max
  unsure at all n locations
  Clone ID: 700998486H1
tgggaatcggcatgaatggcgaggggagtgaagcaatgcaagtntgcgaaggagagcttggtgtacatgtggggttacctgcccggngctctgccgcagaggacgcctctgttgacgccgcttcttgtagggttccgccctctggttacttttggaaggatgtctgcggcggtggttgtggattcgccatggctatctctgancctggaaanctcataacatggggttcaacagatgatttaggccnaact

SEQ ID NO: 2757 - DNA, 249 bp, Glycine max
  unsure at all n locations
  Clone ID: 700998487H1
tctaaatgtctttatgtttttatgatgttctactaccgctattatgctgagctgattatctgatttttttgtagcgtttatctcacttgaaatcacagggcatcaaataattcagcagatcatactctgttgttgactttagttgttttgaatacattgcattactggttgtgctgaaaagtnncttactctagattttctctttcaaattggtgaggttagactccaagcaactgttgttaagatcac

SEQ ID NO: 2758 - DNA, 201 bp, Glycine max
  unsure at all n locations
  Clone ID: 700998489H1
ctggtgtcagggctggtgttggtggntatnattatctcttggagccactatggngggngggaatgatcacaagtaagcnttaaatactgtnnaattntgcctctatgcnttnagtattgncatttngtcncntaanttttnangggnggnaaancaagtttccctnnaccctaatggggttnccttttgcccaaaaaancc

SEQ ID NO: 2759 - DNA, 249 bp, Glycine max
  unsure at all n locations
  Clone ID: 700998490H1
aaactattaccattataaggataacagggtactcccttctcacgttgatgccgaacttgccaatgctcaagcttggtggtacaagccggactatattatcaacgagcttaacataaactccgtgataccacgccttgccacgaggagatcttgcccatcaactcanggactactcagatgccttatttcatcagaggctatgcgtattccggtggtgggagaaaggtgacacgtgttgaggtnaccctg

SEQ ID NO: 2760 - DNA, 248 bp, Glycine max
  unsure at all n locations
  Clone ID: 700998491H1
ggcatcttgtgttgtgtccctcttttaagctatttccttctcttaacacaattggttgtgccaattgccatagtcaccaaccaattaacaaaggtatatatatcatcatatcatcaccaaatgaacatattgggttgttttttcttgtggtggtggctacttttgtggtggcagccacagctggtagcttttaccaagactttgaaataacgtggggtggtgagcgtgccannctctatgaganggaa

SEQ ID NO: 2761 - DNA, 255 bp, Glycine max
  unsure at all n locations
  Clone ID: 700998492H1
caaattgttattacatcggctaatttggtggaaaagcaggtgttctatgaaccaaacttctagttancaacattcagttttggaggccacttcactcgattaagttaacttatatgatacttcagttagtataaaaacattgtaactcttagcattatacttgtaaaatggttatctgtaagacatcaactgnaattgcccttagtgtccctaatataaacttggaagccntataatngccacatttggtatccc

SEQ ID NO: 2762 - DNA, 226 bp, Glycine max
  unsure at all n locations
  Clone ID: 700998493H1
gtgggagcttgttgggacagtcatttaaccatcaaccacttggtcaaggagtacatgcttcacagagtgctgtttctcaaccgcccaaggacaagtttgagacaaaatcgacagtttgggcagatacctaagcagggggttggttaatttgaatatatcaggacctaaattaaacccttnagcatatatnggagtggactttgatgcccattaataggggggaaaa

SEQ ID NO: 2763 - DNA, 250 bp, Glycine max
  unsure at all n locations
  Clone ID: 700998494H1
gaaggatgtgatgactaagaacgtctccatttacaagtcccaggcttctgcccttgaaaagcatgctgctgccaactgcaaggttcttgttgttgctaacccagcaaacaccaatgcattgatcttgaggaatttgctccatctattcccgagaagaacatttcttgtttgactagattggatcacaacagggcattgggccaaatctctgaaagactgaccgttcaggtttctgatgnaaagaatgnct

SEQ ID NO: 2764 - DNA, 251 bp, Glycine max
  unsure at all n locations
  Clone ID: 700998495H1
gatgacttctccctacattaaatgtacagtctctttcttcatagcatttggaaatttggctgatgacnccatcaattttgaggcttttccccacaagctggtgcagtttggagagattcaggaaaaattgtattgaaattttcacaagaggaatttcttacagcttggtcaactcaggtgcgtcctgcaacaactctgttggctgatgggtgtccatatttgtatgctatggtgcatgatagttcagtgtc

SEQ ID NO: 2765 - DNA, 257 bp, Glycine max
  unsure at all n locations
  Clone ID: 700998496H1
gaaaaacaagtagttgagaactaagaagaaggaaatggcttcctcaatgatctcctccccagctgttaccaccgtcaaccgtgccggtgccggcatggttgctccattcaccggcctcaaatccatggctgcttccccacgaggaagaccaacaatgacattacctccattgttagcaacggtggaagantacaatgcnnccgggtgggcccacnacccggcaagaantttccgggnnttttcccnntttggaaanc

SEQ ID NO: 2766 - DNA, 269 bp, Glycine max
  unsure at all n locations
  Clone ID: 700998501H1
tacaaaggttgctgtaggagataagattgcagtagtgctaagtgctaacacctgcagtgaacaatggcctctgcatcagcatctctgctcaagtcttcacttgtccttgacaagtctnattgggtnangggaaaaccntncnacattttcatcnatcttngnangnnacccccaaccccttangctnnccataaaacngtcccagcggataacncgtaanaccggaaaaaatggnttcccaggngggggtttttgccntggnnaanccc

SEQ ID NO: 2767 - DNA, 282 bp, Glycine max
  unsure at all n locations
  Clone ID: 700998502H1
ctttctcctacctcgtccttctaacccaacctcaacctgtttctccgagaatcacatccaacgcttctgtcatggaggaagttaacgttgtggaaactaaggatggaactgtctcagtagctgctgcgtttgctggtcatcaggaagccgtgcaggatagagaccacaaatttttaagaaaagctgttgaagaagcatataaaggggtannttgcaaagatggcncncccttntggtgntnttatantncataataatgncatagttgccncccccccnccc

SEQ ID NO: 2768 - DNA, 258 bp, Glycine max
  unsure at all n locations
  Clone ID: 700998503H1
tcttctcatcaagcncagagttacagactcaccgatcttccgattctctttcgtcttggtttatgagctcgaaggagagacccactcttggtggcacgcggattaagacccgcaaacgaaatattgctgcgccgctggaccctgcagcattctcggatgcagtngtccagatttatttggataatgctggtgatctggaccttattgccnaagagtattgactcttcagnctaatttttccaaanagggggggccccc

SEQ ID NO: 2769 - DNA, 276 bp, Glycine max
  unsure at all n locations
  Clone ID: 700998504H1
aaaatggtggccacagttggtattcctgagaatacaggtatagcattggcctgtgctatgaatagttcttttagggggcgtgccagttctgatatttacaccatctgctctcaagactgtgaattatggaatcctgcttgcacaaaagcaatgactatgtcatttaatccaaacccgtgttctgatgcatggagtttggaatttctgaagcgtaccggatttcattgtgataccattngtgtcantggngggnccnccccnnacaaggnnggttgc

SEQ ID NO: 2770 - DNA, 271 bp, Glycine max
  unsure at all n locations
  Clone ID: 700998505H1
tttaagctgttttctantttgttgacacaaaaatatttttacagtaaaagtntagcaaaattaaactcaattncttttacttttatagangataatggagagtgtttcagtgagtggagaagttggtggtgctggtggagcatactcatatgaagcttgaaaagattagaccagctatggtcaagcatatgctcctctcaagaagttgtgcaagagcctcagcaagttgtctctaccatcccaagcttgtttggctcatcggatcttgcnc

SEQ ID NO: 2771 - DNA, 241 bp, Glycine max
  unsure at all n locations
  Clone ID: 700998506H1
gtctgttttagctttgcagaggttggccttggcaggcacacgcacatcccacattacancaaacanntttcattttttttttctttctcctttgtcatcctcaaaatccccgaccttaattgctccgaccccaacaaaaaacaaaacaagcaagccatggattcctcccagatccatggcttgtcctcgtaaattcaacacctttacaagtcaaacttaaaccaccattaatggaaaaacc

SEQ ID NO: 2772 - DNA, 272 bp, Glycine max
  unsure at all n locations
  Clone ID: 700998507H1
ggtctttctacgtctccgcatcgagcaccaagaaaatcctaataatgggaggcaccaggtttattggtgtgtttttgtctaggctccttgtcaaagagggtcaccaggtgactttattcacaagaggtaatcgcgcctgtccactcaacagttgccaggtgaatcagacagtgattatgctgatttttcttccaagatctgcatttganaggagacaggaaggacttcgactttgtaaaaatccagtctctcagcagngggnttnnnttttt

SEQ ID NO: 2773 - DNA, 269 bp, Glycine max
  unsure at all n locations
  Clone ID: 700998508H1
agagaaacaagacaagcacaacaagcattctgaaattctctatttgttagtatcaggactagtaacaaattaaccttgaaaataaagcttcacctagtttcatcttccgtaggttgaaaagtgatcaagagaatacacgtcatcaggtggaaatgtaccatcatcaccancaccaaggaaaaaacattcnctcttcttccagaatgccaatcccctctgagaggcacatgttccttcaagcaggaatggttctggtgattctggacttc

SEQ ID NO: 2774 - DNA, 268 bp, Glycine max
  unsure at all n locations
  Clone ID: 700998509H1
agaaatatggcagttggcacttcaacctgcattcctgtcgtacactgcctcggcgatcgctgtagtgttctttnttgattttgtattgtgctcctcgccatggccagactaatattttagtttatattggaatatgctccataattggatccttgactgtcatgagcataaaagcaattggcattgcnataagacttacgatcgagggtgccgnccagtttccncanttcanttcacagannnnancannggcanaggcccannaana

SEQ ID NO: 2775 - DNA, 133 bp, Glycine max
  unsure at all n locations
  Clone ID: 700998510H1
caactctcactgctgtaaganttcccactttccaccaacgccatctcattnaacacttcacggcaccctcttcctcttccttacgcctcctcaatctcgcaaaggtaacaactaacaacacattacaccacaa

SEQ ID NO: 2776 - DNA, 274 bp, Glycine max
  unsure at all n locations
  Clone ID: 700998513H1
caatttatgttcaggtttaagtagcgtgacatgtgaganactatgtattttccaccatttttatagcatcatgttgactccaccttatgaagatatatatgccccccagcatatcgataacttttttactttggccataaattattttgtgagaatcaactaaggtaagaagtaggagttcagtgatcttcttnctcctncnaggtgggnnttannngttcnagtncccacannttaananccnngggnaanaaacancttttnnnaacncgnc

SEQ ID NO: 2777 - DNA, 271 bp, Glycine max
  unsure at all n locations
  Clone ID: 700998514H1
cgcaacggggtgaagttcggagaagccgtgtggttcaaggccgggtcccagatcttnagcgagggtgggctcgactacttgggcaacccaagcctgatccacgcccagagcatcctcgccatctgggccacacaagttatcctaatgggtgccgttgaaggttaccgtattgctggtggccccctcggtgaggtcactgacccaanntgacccaggtggcagcttcgacccattgggccttgctgatgacccagaggcttttgctgagctt

SEQ ID NO: 2778 - DNA, 272 bp, Glycine max
  unsure at all n locations
  Clone ID: 700998515H1
gttgaataggtggatggggaaactgactttcccccagggcacttcccgaagtgttaagagaatgcctctttctatagggggaggagctggtgcaaagaatgctattctcatgaatatgccaaatgctgttctttcaatgtggagatattttgttggagatctcgtctttgaagtttctaagatgacttctccctacattaaatgtacagtctctttcttcatagcatttggnaattnggcctgatgacccnncaatttggggncctntcccc

SEQ ID NO: 2779 - DNA, 136 bp, Glycine max
  unsure at all n locations
  Clone ID: 700998516H1
aggaattgtgctcaagaatccagngngcaacaaattggtcaattagatattttttgcatgctttgtctgtgagcaattctaaaaccaanggcctttanagntatntcangnngnnaccccttgggnncnaaancng

SEQ ID NO: 2780 - DNA, 225 bp, Glycine max
  unsure at all n locations
  Clone ID: 700998517H1
tgcagcaggggacaatcaatttccttttggtttcgtaacaagtncccagtgatatctctctgtcttgctggactcatgcataagcaccctttnggattaaacctatggcgccnancangggaaaaaaatngnagcngcnttctnaaangggcagagggttttntgcagntccccncgntgccngggcnaaacncacnattgggggggngnaaggnnnatnntggg

SEQ ID NO: 2781 - DNA, 280 bp, Glycine max
  unsure at all n locations
  Clone ID: 700998518H1
gtgacatagagagggaaggatggcagtggcagagattctaaaccttggaggcccgccaagcttaagtgggaggaaactgccgccatgccgttcgaattcccaaaactggacttgtttgcagcacaagctcaagtgcaacggacagattcctttgccttttctccgacaacagaaaggaggaacaagcnnnnaaagcattagaaggtgcactaagtgggaagaaaaatgaatttgacaatggggacagggattcnaaannngaaancnggggggggggnnc

SEQ ID NO: 2782 - DNA, 274 bp, Glycine max
  unsure at all n locations
  Clone ID: 700998520H1
ctccatgggacaaagaaattggcaagacatacataattcactacacttatggctgtgactatacaatgaagggtgagctgacctatggaaagattggagaatggagatttgataaaagatcttatgatancgtgctcccccaaagaatctgacattgccaccacctggtgttccagaaagtgtggtgactctcgtaaaaatggtgaatgaagctacagcaaatattccaattggnggtcaataggnncttaaagggngtnnnncatncacaggg

SEQ ID NO: 2783 - DNA, 274 bp, Glycine max
  unsure at all n locations
  Clone ID: 700998521H1
cgcatggngaacgacactgccgccgccgttaacaataacaccaccgccaccgccaccgctaaagcaggttctggaggagtgaaatcgaacaaccataacctagaagaggagcattccaatttgaatggcgaggagcacatggcagaacaagtggaggcagaagaagaggaagatcgagaagccgatgatggtgaaggagaacaaactggatctcgtcaaccttccagaacccctttcactaatctcagccaggtcgattccngncctcgctcnc

SEQ ID NO: 2784 - DNA, 271 bp, Glycine max
  Clone ID: 700998523H1
cagaatacgagttatatctcaaacatctagtaagttcgagtttcatatctttgtgagtattattttttaagtctcaaaacctacctagttcatctaaacttttgtaccataataacaaaaaactagtacttgaatgagaaaaagaaaaggtgagtgactgagtgtagctgaagccttttaacattgatgttaaaattgacatttgggtggtttttccccacagttcccctccagtcccacagagagaaccaaggtgagtgataatctagtg

SEQ ID NO: 2785 - DNA, 272 bp, Glycine max
  unsure at all n locations
  Clone ID: 700998524H1
aagtatnatgaatatcggcttgctcaagaagaagatgctcttgggnaattcaagggaatcacaggtgcactacgtaacgggggtacaagcaantcatcttccaaacaggctagtggtcatcagagatcatctcagcagcatacataccaaattcctgcatctgctttatatgaaagtcctgacaatccaagagcttctggattttcaattcaaacatcangnntnggaagcagtgaagngcccagtggttcatnaaagnngattctttggcg

SEQ ID NO: 2786 - DNA, 273 bp, Glycine max
  unsure at all n locations
  Clone ID: 700998525H1
gtatcctttcattagaatatccctcccttcaaatatttttgaaatcctagggtttcacattccggatcccantccgcggttctagctgcacttgtatttcagattttctcaatttaatcagattattaacgtatctcgatttttttttgggggtnacgatgccgccatttttgtccgacctcgaaggccctttgctccttagcatcgcgcaaaagcggtggtagtcaattgataggtctagcaagagcagtgggaagcacgatggatgcagat

SEQ ID NO: 2787 - DNA, 270 bp, Glycine max
  unsure at all n locations
  Clone ID: 700998526H1
gttcacacagtctgagaagcngcggaaaggcatccatgtcttgcgtctccctcgcatcgcctggctcgccgtatggaaactcgttcggcagttcctattcgtcagaactgtcgaatggttactctacggcaccaacatcagtagccaacagcccgcccggcactcctttctgggatgagaggacccgcctacgcatgaagacaccagacgttccatcctcagtacctctcccttcggcacgacgacccttcncccgggatggcaccgagg

SEQ ID NO: 2788 - DNA, 265 bp, Glycine max
  unsure at all n locations
  Clone ID: 700998527H1
acacaacaccttttccttttcccttccgttggtgccattcgtgcagcaccggatcctctcatttctccggcgataactctcccttttccggcgaattcaccgcttcctcgatatgaatcccgagtatgactatcngttcaagcnccttctgattggagactctggtgtngnaaaatcatgccttcttnnaagatttgctgatgattcatananngagantacatnagnngnancggatanacanccccattcngaggggggnaaa

SEQ ID NO: 2789 - DNA, 271 bp, Glycine max
  unsure at all n locations
  Clone ID: 700998528H1
ttctccagagagaagaagaaacttaatcgatcatcacttcacttcactaatacatcatggcagacgagacccagaacaagtatgagagctctgaggttgaggtccaggatcgtggtgtttttgactttctcggtaagaaaaaggatgaagaagacaagcctcatcctcaggaggnggtcatcgccaccgagtttcaaaaagtcactgtctcagaccaaggagagaacaagcacagcctcttagaaaagcttcaccgatctgacagcagctc

SEQ ID NO: 2790 - DNA, 271 bp, Glycine max
  unsure at all n locations
  Clone ID: 700998529H1
gtttaaacctaattctcatttcttcatcgttcgattcttctcctcctaaagatgcagatcttcgtgnaaactttgaccggtaagaccatcacccttgaggtggagtcctccgacaccatcgataacntgaaagctaagattcaagacaaggaagggatcccacctgaccagcagagacttatctttgcgggtaaacagcttgaggatggtcgaacccttgccgactacaacatccaaaaaggaatccactctccacctcgtgcttcgcctc

SEQ ID NO: 2791 - DNA, 270 bp, Glycine max
  unsure at all n locations
  Clone ID: 700998530H1
ggagagattaagaatcttcctcagggtgctactgtcattgactatgcttatatgatacacactgaaataggcaacaagatggtagctgcaaaggtcaatggcaatcttgtttctcctgctcatgtacttgcaaatgcagaagttgtagagataatcacatataatgcactttccagcaaatcagcctttcagaggcataagccagtggttgcaacatgctaaaacacgtagtgcaagacncaaaataatgaagtttctgagggagcaagc

SEQ ID NO: 2792 - DNA, 268 bp, Glycine max
  unsure at all n locations
  Clone ID: 700998531H1
ggaagggaagagtaccactggagaagggttagagtggggggtgctattcggattcgggccgggtctaaccgttgagaccgttgttcttcacagtgttcccttggagggataaatcatgctgatgcggtgactagtgatttaagagtgatcaataaggaaccctcggaaataccagggaaagtttgttattattactagtttcacttgtggatttatcgaccacnntgttgtaccaagaataatttaatatgaccaaaccngggtttgt

SEQ ID NO: 2793 - DNA, 277 bp, Glycine max
  unsure at all n locations
  Clone ID: 700998534H1
aatttgtncattgtgggaaaaagatgccgcagaggcactcgnagaacaacaacgatcttggcgttcttcacntacgatgagangcgaaaactaggttatgggacccagaaggagaggttgggcaaggactccattaagcccttcgatgcttgctctctctgcctnaaatccctaattgatcctatnccctgccagaaaggccatctcttttnaaaagagtgnattctcantncctcttntctcaaangacnnanancnnctgnnacccncngcnccc

SEQ ID NO: 2794 - DNA, 281 bp, Glycine max
  unsure at all n locations
  Clone ID: 700998535H1
gttaatggttaccgggcacagacatttacttttgctgagcttgcagctgcaacagggaatttcaggttagantgctttctnggtgaaggnncgtttggcaaggtttataaggggcgcatagacaaaataaatcaggttgtagcaatanancatagancctcanggggcttcnnaggcattacaaggatttnnnntcnaagggnannnccttaggttggnccccncaacccnaaannagnacagantcattcggnctncaaccnaaaagtncatnctnttcc

SEQ ID NO: 2795 - DNA, 270 bp, Glycine max
  unsure at all n locations
  Clone ID: 700998536H1
tgcgattaatcgcaagaggggaaggcctgaagctgcnttcaatttcaatggcggcgccaagaaatcgangcctgaaacggactcctttccaactggtttaggaagnaaatcgaagccatgcacaaannttttcagcacctncggctgtccatttggtgaaggatgccacttcntgcattatgttcctggtggctttaaagctgtctctcaactgatcnatgttggtaacaatcctgtnactccnaangtggggaaaacccctntccaacc

SEQ ID NO: 2796 - DNA, 85 bp, Glycine max
  unsure at all n locations
  Clone ID: 700998537H1
tctctctcnactctaagctnctttccttgttgaaactgtgagtcctatgtnatttgtngcggagcatgaaantnnncacacaaaa

SEQ ID NO: 2797 - DNA, 266 bp, Glycine max
  unsure at all n locations
  Clone ID: 700998538H1
catcttcccctctctctcttcctttgccttgtctccgtgtgaaagatcacancctccaccgtcaccgatttccaaggttgagttatttnctggtctaacttaaccatactgtctattttgactcctgagattgctagtgagtcatggggcatagacatttatatagctcatctccaatgtttgagggtgaacctgaccagaactggaatcatatgcatatggatcancaatangtgnnccttggaaggagtacccctncancaagg

SEQ ID NO: 2798 - DNA, 268 bp, Glycine max
  unsure at all n locations
  Clone ID: 700998539H1
cgccagagggttgcatgagagttctccagtagttaccaggtatgagaggagaaaagtgaggcatgatagttatgaactttgaaagggttttctacaagcttaagcccttttaaacccaaaatacctccataaaattcccctttaacattaatatttgaccgcattctcaggatttttgacaccataagcatagcagtgctatgtctcaatgaaatgcccccattgcagccactaactgtgaagtgtgatnctatggtnatncatatnc

SEQ ID NO: 2799 - DNA, 264 bp, Glycine max
  unsure at all n locations
  Clone ID: 700998540H1
caaaaaacagcacaataatacatgagcttatccacaagtctaggagtgcattttccacagttgtttgtttanctagaatttacacaaaaaagcatagctagcatgggcatggagaactgtttacgagtgaccacagtaggcacagccacaccccaatgcctttctccattctttccatcttcangggataagcttgtctccccaccncanggnggtnaaaagnntcntaaacnnnacncggcacgcccctttttcnaagggggg

SEQ ID NO: 2800 - DNA, 265 bp, Glycine max
  unsure at all n locations
  Clone ID: 700998541H1
gttgagaactaagaaggagaagcaaatggcttcctcaatgatctcttccccagctgttaccactgtncaaccgtgccggtgccggcatggttgctccattcactggcctcaagtccatggctggcttccccaccaggaagaccaacaatgacattacctccattgctagcaacggtggaagantgcaatgcatgcaggtgtggccaccatngnnnncaagattcngagtcttnncctnccanacattttngccnannnnnaaaag

SEQ ID NO: 2801 - DNA, 268 bp, Glycine max
  unsure at all n locations
  Clone ID: 700998542H1
gagagtgaaagcaaggctgaactagacaggttctgtgatgctcttatttccattagacaagaaattgctgagattgagaaaggaaatgctgacattaacaacaatgtacttaagagcgcccctcatccaccatcactgctcatggctgatgcatggacaaaaccatactccagggaatatgcagccttcccagctccttggctccgtgcttcaaagttctggcctaccacaggacgtgttgataatgtgtanggtncncgccnccctc

SEQ ID NO: 2802 - DNA, 265 bp, Glycine max
  Clone ID: 700998543H1
ccaacatgctccgagaagaaacttctctgttttcgccatgtctgctgatgacgcaaagcgcagtgttccattgaaggattatcgcaacatcggtatcatggctcacatagatgctggaaagactactacaacagaacgaattttgtactatactggaaggaactacaaaattggagaggtgcatgagggaacagcaaccatggactggatggaacaagaacaagagagggggattaccattacttctgctgcaaccactacattt

SEQ ID NO: 2803 - DNA, 265 bp, Glycine max
  unsure at all n locations
  Clone ID: 700998545H1
gtggagctctggcatccaaagaagggtacgaagcagattaccgctcgtcatgtagttattgctntgggtngacgacccaaggagctgacgtgcccgggcggggagcacgcgatttcgagtgacgacattttttggatgaagaagaaggaaccaggcaagacgttagttgtgggtgcctcgtacgtagcacttgagtgcgcaggctttctaaagggcatgggctacgacgtgaaggtgatggtgcgctctattttgcttcgtggct

SEQ ID NO: 2804 - DNA, 276 bp, Glycine max
  unsure at all n locations
  Clone ID: 700998548H1
tngngngcatgagngcntttttttttntaacaaacaaaanaatctngnttcatactatccnatatttacattatacaaacccatatatcttcactngcaaattaatctattagtagattaatnagtactaccatttngatttangcaaatnaccaacctaaatcanngngganaatccccagcatcatctcnccttaattgggntacctcaaaccatcatngaaanagngaaagtccacaatctcaaacancccntagtggnganactggcncncc

SEQ ID NO: 2805 - DNA, 99 bp, Glycine max
  unsure at all n locations
  Clone ID: 700998549H1
tttttngtacatgttgtagtaccatacttnangcctancatgtgggcagtncgttacncataanatncgactggntactggcntaactgtatactactc

SEQ ID NO: 2806 - DNA, 274 bp, Glycine max
  unsure at all n locations
  Clone ID: 700998551H1
cgaccgganccactggtgctggtgccactgaggtggctttgaaatttgagcacaggaacagcaaaggctgtaactatggccctccttacgagtggcaagtgtacaacacccttggnggcagtcatggaatacctaaagtacactacaaagggagacaaggggaatattatgtgnnggtgatggacatgcttggtccaagcttgtgggatgtttggaattccctcaagtcnnccancnccngggaannggtnccnatgntttncagncgagnccc

SEQ ID NO: 2807 - DNA, 269 bp, Glycine max
  unsure at all n locations
  Clone ID: 700998552H1
cttacccaaatcccccaatgatgtctgcgggttttagtaggtcagcttccatgccattgactatgttcggtaactccccaaatcagcaacagactgagaaccagccaagcatcttacaaagtatctctgttcctccagcttcctttcagtcaatgcatccagttactcagttgcagcccctccagccaccccagtttcaaggccaacnacaacctcntaagttcttaggcngctgtcnangctttacagcagtnggannaagggtggct

SEQ ID NO: 2808 - DNA, 271 bp, Glycine max
  unsure at all n locations
  Clone ID: 700998553H1
tccagancnggaaattnannnttcagagangnagtcaagcnnttgtngatgaaagattntgacaataaagttcaagaaattangttggtgtcgaatctctcccatgatnttaatcatgtcantacatctgacgcctgttatcctgttngagatgagatagttactgaaggnaatgtagaatctacaaaagaganaaatgnttnggaatcgncnttggatccaaatggtttcatcatagganaggcncaaaatatngatatctccagaaatc

SEQ ID NO: 2809 - DNA, 260 bp, Glycine max
  unsure at all n locations
  Clone ID: 700998554H1
cgcgccgggcattcagcacgacgacatgcacacctgagagcgccagcagcagcagcgaggccagcaaccgccctacaccctccatcgagcttcactcgccatcgcacactctgcagnngcagcctctgccgtcctcgtccgataccgcacaatctttaccctcgtcttccacgctgggagcaccaccacgcttcccatccctggcccacctccgtcggacacgcacagcgccctcgccctncctccgctcacagccctcg

SEQ ID NO: 2810 - DNA, 264 bp, Glycine max
  Clone ID: 700998555H1
tgagttcgggtgaattgaagcttaaaattgaagtagttaaggtggaggaccaagaaggatcaaggggttcaactaatggttggatagaacttgttgtgattgaagcgagggatcttattgctgctgatcttcgagggacaagtgatcctatgtgagggtaaactacggaaactcgaagaaaaggacaaaggttatacacaaaacactccaaccctcgttggaaccagacattagagttccttgacgatggcatccccttgatac

SEQ ID NO: 2811 - DNA, 270 bp, Glycine max
  unsure at all n locations
  Clone ID: 700998556H1
gngatcacctaatccaagggattggtaatggtctcattccaagtgtactggattttaatctcctagatgaagttattcagatatcnantgaagaagctatagaaactgctaagcttcttgctttaaaagaagatgggaatttcatcaggagccgcagctgcagctgccataaaattggggaagagaccagaaaatgccggaaaactcatcgttgtggtatttcctagttacggggagcgttatttatcttcaccattgtttgaatccatt

SEQ ID NO: 2812 - DNA, 268 bp, Glycine max
  unsure at all n locations
  Clone ID: 700998557H1
tctcatcctttcttttagttttatttttatttttttatcttgggtaaaaaaaatcatgggtgttttcacttctgaaagcgaacacgtttcccccgtctctgctgcaaaattatacaaagctattgtcctagatgccagcaatnccttcccaaaagcattgccaaatttcattaagagcgtagaaaccattgaaggagatggagggccaggaaccattaagaagcttactcttgngaaggttaggttttgtgaagccccncgtaatttc

SEQ ID NO: 2813 - DNA, 269 bp, Glycine max
  unsure at all n locations
  Clone ID: 700998558H1
ccttcagaaaccctaatttctcaaaatcttcagaggacacacagcacaaccancacctccacagccttctcctacctcccggagccatggccgccgccgactcctccgccgctccatcgcaccagttgtcgcagagggagacggacatccagatgatgctcgccgccgacgttcacctcggcaccaaaaactgcgactttcagatggaacgctacgtcttcaagcgcagaaccgatggtatttacataattaaccttggcaagacatgg

SEQ ID NO: 2814 - DNA, 269 bp, Glycine max
  unsure at all n locations
  Clone ID: 700998559H1
aaaaaaanagantaataaatagaaaaaggagcatgttgattatatagaaagtaaagggcaacaatcatttttntttaccatgggtaaggacaccatcgctgacataataacctatataagnnatgctnnacatgantaaaaaaggnanggttcaaataccatttactaacataacaganancattgnaaanntccttncccgcgngggttttgttgnacancgnccagacaacatngggcanncntttnttnttttcacncnggggcnc

SEQ ID NO: 2815 - DNA, 269 bp, Glycine max
  unsure at all n locations
  Clone ID: 700998560H1
atancaaagtagtnagtagtgngtagtccaaccagaatccagaattncaaagccttttttttangtnaaatgncatgtntncggagccacnaagagcagccannnttagnggantcgttcatagaagaagaggaggngcaagagacagcctangactcctcngagaagattgtggtggttggagtggacgagtcngacaacgaggacaattgggggagagtaccccnattctngtggaagaagctatggntgtatacagggcngggctt

SEQ ID NO: 2816 - DNA, 267 bp, Glycine max
  unsure at all n locations
  Clone ID: 700998561H1
caacaagacagagtgtattcatcatatcttgaattanacctttctgatgttgaancatggcatttcaggaccaaagagaccacatgatcgggtacctttgaaaganatgaaggccgactggcatgcttgtcttgataacaaagttgggtttaagggatttgctataccaaaagaggcacaaggaaaagttgcaaaatttgatttccatgggcagccagcagcgctcaagcatggcagtgttgtgattgctgcaatcacaagctgtac

SEQ ID NO: 2817 - DNA, 247 bp, Glycine max
  unsure at all n locations
  Clone ID: 700998562H1
attgattcatgcagtagatgatcacgtggattcttacaagcnagaacttgatacaagtaaactcatctggcagtttagaacctagtgccaatacaaatcccatttctcagggtggtgaggatttaagggtcaatgtatcaccatcaagtcagattcgtaccgggggcatcccatataaganattgtctgcatctgcagctcccattccaacccatcacctcgccattgcagtgctgcaccaattgcc

SEQ ID NO: 2818 - DNA, 274 bp, Glycine max
  unsure at all n locations
  Clone ID: 700998564H1
cgngnnttaatgaaatttcaatcnctataagtagaggttatgatgtactcantttaccttgaagttagaagtgattgcctcatgttagaggatgggttgtccaaatcctgtcattttactgaaatgatggtgcctacatggaagtggcattttatttacagttttacttaaacatatttttgttcacccttactatacatgtttacatgtgctgctcttacactggtaattgtacatatatttttccngtatatgcagaaatattgtttttggt

SEQ ID NO: 2819 - DNA, 291 bp, Glycine max
  unsure at all n locations
  Clone ID: 700998565H1
gagactataggatacggctttttatccgaactgaactcttggggaagggaattccacccactcatcaatggcatctactcncttcgcttncccgtcgttgtgcccncctcctccaaaaatattnccacccnccnnaaacncnccnnaaaaaccnccaaaaaaattccncnttcngttccngggaaanaaaaaaacctnttnggnccccaatttcaaggggggggncaaaggtcnngnannaggggcccccccaaaaacccnggngngaagcccnaaaaagnggtttttnnc

SEQ ID NO: 2820 - DNA, 270 bp, Glycine max
  unsure at all n locations
  Clone ID: 700998567H1
gaatttgaggcaaagttgcattgtngttctgcatatttgattcagaacattaaagttgttgacaatccattctacatacaaatgatggtgagatgatcatgaccgtgtaggaggnatatgcttttcagcttgatgatgctatcgagaaanatcattttgttagaaagccattggtggttatgttancncttgtnanactcagnncnccannagananccanccctccaaagtcccaanagncacgccngggccnanagnnaanccnaccc

SEQ ID NO: 2821 - DNA, 268 bp, Glycine max
  unsure at all n locations
  Clone ID: 700998569H1
gctcaaccttcaaatcctccagctgatactccacaggcagcacaaccagcatctgttccttcctagtggacctaatgctaatccnttagacctctttccccagggccttcctaatgttgggtctggtgctgctggtgctggttccttagactttcttcgcaacagtcaacagttccaagccttacgcgctatggtacaggctaatccacaaatattgcagcctangctacaagngctgggaaannaaaatcccccanctnanggnttc

SEQ ID NO: 2822 - DNA, 261 bp, Glycine max
  unsure at all n locations
  Clone ID: 700998571H1
ggtgtgcccatctcatgtgctagatttccaaccaggagaggcctttgtggtcagaaatgttgccaacattgtcccaccatatgaccagtcaaaatacgctggaactggggctgcagttgagtatgctgttttgcatcttaaggtgtcggagattgtggtcattggacacagtgcttgtggtggtattaaggggcttctgtctttcccatatgatggancctaccctactgattnnatnggagngngggcnaaattggcttc

SEQ ID NO: 2823 - DNA, 266 bp, Glycine max
  unsure at all n locations
  Clone ID: 700998572H1
cccagccaaaacctctctcaagaaggccacattaggcccttctgtcttcgcaaccgttagcntgncnnnnnnnnnnnnnnnnnnnnnnnnnnnnnnnnnnnnnnnnnctcattcaagacaggcctgtctttgctgcccctgnccccatcatcaccccaactgtgagagaggatatggcaaaggaatangagcaagtattgaaganctcaagaantnntngagggagaagagtgcnctnaaagccanagctgcnnanaacgngganc

SEQ ID NO: 2824 - DNA, 266 bp, Glycine max
  unsure at all n locations
  Clone ID: 700998573H1
tcaaaaacatggctctaacacttcgttcttcaacttcttttattaatcagaaggnaaccaaagtcctcaaaacttctgacaatgcccctgcaatagttagtttttcaaaattcaagccatcatcatcattgttccggctccgggcaaaaaattccatgcaagaagctcatcacactcgtgaganatgggagnaggtgctggctccgtcggtcgcacatagccacaangattcaaagagngtacccggggnagggnagtcccancac

SEQ ID NO: 2825 - DNA, 266 bp, Glycine max
  Clone ID: 700998574H1
gggagtttaaggaaagcactaaggttgacaaggtggttgtcctgtggacagccaacacagagaggtacagcaacctagttgtgggactaaacgacaccatggaaaacctctttgcttccttggacaggaacgaggctgagatttccccttccaccttgtatgccattgcttgtgttatggaaaatgttcctttcatcaatggaagccctcagaacacctttgtcccagggctgattgatctggccatcaagaggaacagtttgatt

SEQ ID NO: 2826 - DNA, 265 bp, Glycine max
  unsure at all n locations
  Clone ID: 700998575H1
tggcacagaggacggagccgaagaagccgttttcgcatgcctgtnactccacccagtaacaaaggcagaatctctaccctcttcgctttcactcctcgccaagttttgttaagcaaccaaacaatgaagcacaccactgacaatggaacccccatctnggaacacaaagttcttcttcaccaatccattgcccgttacttggaacgnagtgncttctccaaaactactgaaaanntttctnctccgaagcgcatatcgaganaaa

SEQ ID NO: 2827 - DNA, 269 bp, Glycine max
  unsure at all n locations
  Clone ID: 700998576H1
gcattcgctcccactgatgggaggtgccactttgccgccgacgaatatcgggtggcgtctggcgatgtcaccaaatcgccggtgacaagtgcgtttgaccttgaatctgtggcagtgcacgagatcgggcacttgctcggattaggccactcgtcggacctaagagccatcaaggaatccntntaaancnnctngaanccaggaaggngaatctaagggcaaatggnntnnangggggttcnnaagccnnnggngnnacccccaanntc

SEQ ID NO: 2828 - DNA, 265 bp, Glycine max
  unsure at all n locations
  Clone ID: 700998577H1
gagcacaagcttggttctagtagttttagtagctctcacagttcaaattttctanatnnnnggncatagntcnagtncntgntggatataaaanctgctccttcaaccaaagacaatccaantanagaatatcattaagcttggagaaggacttttgaaggaaccagaagatgttgttgtagataaagaagggatctctatacagctactcganntggttggataaaagattgcgcaggaataatggaaaatgggagaattggaa

SEQ ID NO: 2829 - DNA, 262 bp, Glycine max
  Clone ID: 700998578H1
ttgatttgagcaaaacttcatgttcttgcaacttttggcagttggtgggaatcccctgcaggcatgctatagctgcaatcaattacaaaggagagcatgcagaagaccatgttgacaaatattaccatagggatacttacaagctatgttacagtcatagtattacaacaatcgatggtaggaaaaaatgttctaagaccctgatcctgacttattgcctcctaattacaaacgtgcagctggtagaccaaagaagttgagg

SEQ ID NO: 2830 - DNA, 264 bp, Glycine max
  unsure at all n locations
  Clone ID: 700998579H1
gcttcctcgaagcgtgttgatgcggcagcagtcccctaccgtcccgcacccacaagcttggcggtgntcgacatcaacaccatcgaggagccatggctgaagcacctcaacaacaccatcgaggagccatggctgaagcacctcaacaacaccacccntctcccccaagacaataataaaccctccctccccgnccctattctcacaaaattcaattgctcgacgcanngatgcccccaaatccgggtggnttggnaaancccc

SEQ ID NO: 2831 - DNA, 179 bp, Glycine max
  unsure at all n locations
  Clone ID: 700998581H1
gttgacaagccgagctatcttccagagaatgaaaaattatacaatttatgctgtctcgattacaattcgtatagtacttggtttcatgttactggctctcatatggaagtttgattttccncctttnagggcnccanannnncgccttnaangggngggnnctancnntnntctncnac

SEQ ID NO: 2832 - DNA, 273 bp, Glycine max
  unsure at all n locations
  Clone ID: 700998582H1
ggggaaggcacaggcactcccaatgtacgtataaaagcaggccttacggttagaggtgatttaaggtttcacagaacagcagggtntaaatatggtcctagtgtggtagtgctcaaagttttttccaccgccaaaaggccaacacgcttgcgcttgataagaccttattgcagtttgaggtcncaanacaaccaagggaaaggatattttctcanatttacaaaaaaccngggccnaangatgncaaaaannnggggnagannatnttttntt

SEQ ID NO: 2833 - DNA, 267 bp, Glycine max
  unsure at all n locations
  Clone ID: 700998583H1
ctccgcagaaaaataaaaaaagagtagctagcactagctagctaaacacagtacgagtagtgatcataggcaagcaaaagcatattcataatatggcaaccatggaagacatgaacaacatgagtggtgnaattacacttccaggcttccgattccacccaactgaagaannnattcttgatttctaccttaaaaacatggttgttggcaagaaattngttangaggncatgggttcccnaaantnntnggctgntccngggncttg

SEQ ID NO: 2834 - DNA, 266 bp, Glycine max
  Clone ID: 700998584H1
gaaactcatctgctgaagcagcgtgtatgggctggccgtatccccgtcgtgttctgtctcgacccgaatgaggtcactacacttcatgccccacgtccattctacgcgatgataccccgtatgagctatttagtgtcccagactcgcgatgtggtcgagtattttcgagacgcagctccacctatgtccactatgcaaggtgcatccatctggtttgaagcaaatggggtcccgttgcattggcatcggccttttggataattcgt

SEQ ID NO: 2835 - DNA, 263 bp, Glycine max
  unsure at all n locations
  Clone ID: 700998585H1
caacaacaagtgagtggtgaggtacaaagcagccgtagggcagtgctttcacttgttgctgctggtttggccactggctcttttgttcaagctgtgcttgctgatgccaaatctatcaaagttggaccacctcccccaccttctggtggattgcctggnacgttgaactcagatgaagcaagagaccttcagctgccattgaaagataggttcttccttcaaccattgtctcctacgaggntgcnaaangggcaaggatcccc

SEQ ID NO: 2836 - DNA, 263 bp, Glycine max
  Clone ID: 700998587H1
gcaataaacacatccttcatcaacatgtcttcctcttccattcccacccatggtaaaggctacggaatctccgacaccaagaactacaccaacttcaccgttaaggagttcccccttaagactgccggtcccgatgatgtgaccatccacatcgagtgctgtggtgtctgcggctcggatgtccacaccgtcactggcggctggggcgagctgtccactgactgggtctgcccaggtcacgagattgtcggaaaggtcactca

SEQ ID NO: 2837 - DNA, 271 bp, Glycine max
  unsure at all n locations
  Clone ID: 700998588H1
aaagaaagaagcgatagatatgctaaaagcagtggctgcgtgtgcagtgttatgctcaaactcttccantagcgctataagatganatgagtagtttctcgcctgcgtttcccaagttcatatccgtagnaggcgcagacatacattccagaactaaacctgacggcttcagattcagtattgtttcgtataacatgttggncttcaggcttatgtgaagagctcactgtttcccacactctccttcccnncgtctcaaatggaagcttcg

SEQ ID NO: 2838 - DNA, 264 bp, Glycine max
  Clone ID: 700998589H1
gactagttccttctttaacactctgtgagaccttgcaagcagcgcctctggaggaagttgttgaagcacgaacagttcctactgccactactcacatcccaccatggatgctgcatccatttacaagataaattaatcggcatgacaccgttatgtttgtgacatgtgattaatgttaaaagcataagctatatatatctatatgtcaaaaacataatgttatagctaattgttaagtttgataattaactgctcgtcctgtaa

SEQ ID NO: 2839 - DNA, 265 bp, Glycine max
  unsure at all n locations
  Clone ID: 700998590H1
cgcaatcgtcccaacggcaatagcaacagcattaataataatccctcccttggtcaaaggaatttgatctgtttgaggagaaaatcgaacaagttcctttgaccaagtgtgaatggttctctgatttccatcccaatantcagtccgnantngnccnangggnattggnacnngnttnatnatnatcccccccctgggnnngttggcttnactgccctagcgntnaagggnnnaaggntttnttccaggcngangngggtgtgtc

SEQ ID NO: 2840 - DNA, 263 bp, Glycine max
  Clone ID: 700998591H1
caggtcggctttaaggaagtgctcagattccaaagaagcattgtctttcagcgtgccaccttgagaatcatgtgctattatgctttcttagaaaatgttacagttcaacgaggcttttttttggcaaagattacacgtaaattggttctggtattaatttggctttaccagagaacagagattaagagaattattacctgagttcgttgtagagaaatactcgtgagtctgatagtccaagttcctcgaactgatgttgttgt

SEQ ID NO: 2841 - DNA, 265 bp, Glycine max
  unsure at all n locations
  Clone ID: 700998592H1
gcaggcagcgctgtttcacagcattaagtctttgtttatgaacaagccgttgattatagtctgcaacaagactgacttgcagccactggaggggatatcagaggaagacatgaagttggtcaatgagatgaaagctgaagccttgaagactctagttggtcaaggaggtgagcctacagacaataacagtgtattgttgaccatgagcactttgacagaagaaggggtaattgctgtaaaanatgcagcatgtgagaggttattg

SEQ ID NO: 2842 - DNA, 264 bp, Glycine max
  unsure at all n locations
  Clone ID: 700998593H1
ggtgctgcccggcctccatcctctccgctcaacgccgctggcagctccagtacctccgccagcccgaccacttctacttcaacgacctcanatccgccgtcctccaatcccgaaccttaatcaaggacctcgtcaacgccgaccacgtcgacgagatctccattgttgacaannnnnnnnnnnnnnnnnnnnnnntcctccagcacaccgcctggaacttccgcgaaggaaagttccagaagggtgacgtcgtcctcatgctcc

SEQ ID NO: 2843 - DNA, 263 bp, Glycine max
  unsure at all n locations
  Clone ID: 700998594H1
cgaagtgcagcgcgtcgctcgcaccggctattctgggtaaacttgaggaggccttcggtgcgccagtgctggaggcttacngcgatgacggaagcgtcgcatttgatggcttcgaaccctttgccgcaagatgggccccacaaggccgggtcggttgggaaacccgtgggtcaagaaatggttatattggacgaaacgggtcgggttcaagatgctgaagttagtggagaggtttgcattngggtcctaatgttacgaaggga

SEQ ID NO: 2844 - DNA, 257 bp, Glycine max
  unsure at all n locations
  Clone ID: 700998595H1
gctagtaaagctacaccaaaagcaatcatgcggnctatgaatgtcaagggtttgactctgtttcatttgaagagtcatcttcagaaatacaggcttggtaagcaatctgggaaagatgtgggcgaaggatgcaaagatggtatgattgttattcccctctgtggatcaattacgttcccgtncgtcanccccngcttgctcngtccaatgtgttctgtagtgtcttcacttttccctttccacacaacaaaantnnt

SEQ ID NO: 2845 - DNA, 272 bp, Glycine max
  Clone ID: 700998596H1
caaattcattttaatcctaattctgcacttcttgatcattcgatttttctcctccaagatgcagatattcgtaaaaactttgaccggcaagaccatcacccttgaggtggaatcctccgacaccattgacaacgtaaaagctaagattcaagacaaggaagggatcccacctgaccagcagagacttatctttgcgggtaaacaacttgaggatggtcgcaccctgccgattacaacatccaaaaggaatcaaccctccatctcgtgcttcg

SEQ ID NO: 2846 - DNA, 265 bp, Glycine max
  unsure at all n locations
  Clone ID: 700998601H1
ggtgcttgaaagatgcaattgcagggcaggttcgcactgcgaataagagcttaggagaagaagattgctttggaggtaaaatggaaggttcgagggctcaaatatgttgaccatcatcttcggcaacagcgagctctccaacaattgggaatgatccagcacaatgcttggagaccccagagaggattgcctganagatccgtttctgttctcgtgcttggctctcgaacacttcctccacccttatcctaaggatcggacaagc

SEQ ID NO: 2847 - DNA, 267 bp, Glycine max
  unsure at all n locations
  Clone ID: 700998602H1
aaacaaacagtactatggatgtttggtcatggatatgtgagctccccaactcggtggagtggacagagtccgactcgccacccatgaagttcgaactcgcgagtgagaagaaggagaactcaactcgttccattcacctgaaagccgagcgaacctccggctcagactcggaagctgcggtgaccttcaccgtatgcttgcaaggcttcacccacacaacgcccacaancctctctgggtctccgaaaagtgccactgtcatcagaa

SEQ ID NO: 2848 - DNA, 267 bp, Glycine max
  unsure at all n locations
  Clone ID: 700998603H1
caccaccattattcatatctcattctctaacctttcactattccncctcattcactctctagctagtttccncatcatcgtagaagaaccaatacttgtactctctcttactttttaaccatgtagaatgattcacctaaggaaaaattagtagcttcttgttgtgctttttattttgttttgttctgtgtagagataaatctgtttggtattgttttgtgttttatgaattatttgatgggtgaagagggagaagaagtggtgaga

SEQ ID NO: 2849 - DNA, 260 bp, Glycine max
  Clone ID: 700998605H1
aatggccttcggggccaatggcttggacctagtgctgaaataaaggttcaatatccaagcagtagtgatctcacacatgccaaggattcaagcctgaatcaggctgggctatatgatcttggggcaattaaagatggcgatcaaggacctgttacatccacaatggactcagttctctccttggatgatggaagtggtgcgtcctgctgttgagtcctgttctcctggtgtaactgaatcaagggaggacccttacaatg

SEQ ID NO: 2850 - DNA, 262 bp, Glycine max
  unsure at all n locations
  Clone ID: 700998606H1
tctgatataaaagttaaaaatgaataaatagaataaatgttactagaattccgataaagataaatttagaaagatatggaaaacatttatgctctggcaccacttggcattgcaagaanaacacaacggtaatgcattttctttgaatggtgtaaaaagatcagtgtggggcatattccaacatcagatttgttatgaattgtngattgttaaaaacagtagtctattttgttttgatgattgantatagcataatgacaaa

SEQ ID NO: 2851 - DNA, 267 bp, Glycine max
  unsure at all n locations
  Clone ID: 700998607H1
gtttgattnttgagctaaccagtctncaacaacaatctctctncaggaataggatatggatgggntcagcntcaaagnctggtnacacaacaagaggatcggtttggttaaagcttntgttaacttatatggcaacaggattgaagatgtcantagtccttgntgaaaaaatatttctcaacgaagcaatcttctaaagcaaaagaatccacagagcaagcaaggntatggntcggtacanagagatcaaacgggtagnagaatctg

SEQ ID NO: 2852 - DNA, 264 bp, Glycine max
  Clone ID: 700998609H1
ctgttgtctctgagactcaccccttcaccttcgagttcgacttcatcgcttcctgcagcacttgctcactgctccaagctatgtgaatttcagccgaggaagaagaagaaggcgtgcttcgacgcgcctaggcttgcggtgcggtgtgtgaaggcctcggcggaggaaccggtgatacgatcgatgatggggaggctcgtagcgggttcaccacacctgccatggaagtcaccacattcaatcgaagcactttcagcgatgctg

SEQ ID NO: 2853 - DNA, 262 bp, Glycine max
  unsure at all n locations
  Clone ID: 700998610H1
aaacaggaagcattgccgccagttgaagttcctgcggcggctaaatggaaatttagaagcaagccctctcagcaagtaatacttgattacgactatacatttacaacacctnattgtggaagtggcactatggagattgataaagatccgaatgagggagagagagagacttctaaggaaaccagtgatatccattgggaagactgcaaggatcaaattgatgtagttgcactagcatccaaggagccaatacttttctatg

SEQ ID NO: 2854 - DNA, 259 bp, Glycine max
  unsure at all n locations
  Clone ID: 700998611H1
ctcagctccaagcagattcgtgaactatgacacactaggctctagtggctgttccggaatgcgttcggagaagccatgaggatgatgtcttgctgaatggaaaggcagactttgcaagtgttgaagtttgtacatgtttttttctggatatgagaaagatgagataatcgtgtcattttgctngctatctgtgattgatatatctattacaattttgaaggaagtgctaggcaaggtgaaaatgttagtattctttccg

SEQ ID NO: 2855 - DNA, 266 bp, Glycine max
  unsure at all n locations
  Clone ID: 700998612H1
cggaaggaagggtcaccnttcagttgctacagaggtttttgaagtggctccctccttgcacatggtggaactgcgaaagaccgggggtgacacactagagtttcacaagttctacaaaagcttttcatcatcatcagggttgcaagacatagtgtggcattctgaagcaaaacaatgaagaatcaagatgtgcatgcatggaagatatcatgcacgtatttttgttggaagatatcaggaactttttttgttcatggaagatatcg

SEQ ID NO: 2856 - DNA, 270 bp, Glycine max
  Clone ID: 700998613H1
gcttcatgtaccgcacctccctccctcatgctcgtccactctcaagacctttctccctctcttcgctccttctctcacaggcccatttctagaaccaccttcctctctcctatcctctccttttgaagccctccaaatggctccacatagagcccaaatccaggacttgccatgccctcgtcgccgctttgtctgcagaggtccaagtgcccgaaactttcgacgacacggaggaggacgacggtgctgatggctccaccgccaccaaca

SEQ ID NO: 2857 - DNA, 268 bp, Glycine max
  unsure at all n locations
  Clone ID: 700998614H1
cgcaacggggtgaagttcggagaagccgtgtggttcaaggccgggtcccagatcttcagcgagggtgggctcgactacttgggcaacccaagcctgatccacgcccagagcatcctcgccatctgggccacacaagttatcctaatgggtgccgttgaaggttaccgtattgctggtggccccctcggtgaggtcactgacccaatctacccngtggcagcttcgacccattgggccttgctgatgacccagangcttttgctgagct

SEQ ID NO: 2858 - DNA, 269 bp, Glycine max
  Clone ID: 700998615H1
agaaatcatcatggcttcagcagcatctgggtttgtgctgtctcttaatgttgcagcttccaccacaaactcaagggtggtcttgttcaacacaaagaacaacgcttctagacttcttgtgagggcttcagatgagcctgcagcggcggcacctgccaccgccacacccccagctgaagctgaagccaaaccaaaaccaccaccaattggtcccaagagaggtgctaaggtgaagattcttaggaaggaatcctactggtacaaaggca

SEQ ID NO: 2859 - DNA, 274 bp, Glycine max
  unsure at all n locations
  Clone ID: 700998616H1
gatgacttctccctacattaaatgtacagtctctttcttcatagcatttggaaatttggctgatgacaccatcaattttgaggctttccccacaagctggtgcantttggagagatnccagganaaagttgtattgaaattttcacaagaggaatttcttacagcttggtcaactcaggtgcgtcctgcaacaactctgttggctgatgggtgtccatatttgtatgctatggtgcatgatagttcagtgtctacaataccaggtgattttgtc

SEQ ID NO: 2860 - DNA, 267 bp, Glycine max
  unsure at all n locations
  Clone ID: 700998617H1
cttccatctccccagccaanncctctctcaggaaggccacatnacgcccttccgtcttcgcaacccttaacactccttcttctaccttcctcttcatctnncttcccctctctcattcaagacaggcctgtttttgctgcccctgcccccatcatcaccccaactgtgagagaggatatggcaaaggaatacgagaaagctattgaagaacttcagaaattgttgagggagaagagtgaactcaaagcgacagtgctgaaaaagtgg

SEQ ID NO: 2861 - DNA, 266 bp, Glycine max
  unsure at all n locations
  Clone ID: 700998618H1
atttcacttttgtggatgaaaactccttatggtcaccttcaaaaccagtcaaccaacgtgatgctgannaannaatntttgggataagttccgcaaagctcctgagggttctctcaggaaaaatacagctcagaaacaagttttggaagcaatgtctcacagaatgcatgtagacaacagtgtaaaactgattgggaagcttttatttggcattgaaaagggtccagaagtactcaacgctgttagaccggctggatcggcattgt

SEQ ID NO: 2862 - DNA, 265 bp, Glycine max
  unsure at all n locations
  Clone ID: 700998620H1
cagtgtcaaaggttacctcaatgaagcgattatcttctaaagcatgggataaattattgtctaagtatggtgggggaccaacttctttctcatgaagnctgttgttgggattgtctgattgatggggctcagaatgtggtgtcagctgacacttatcgggatcaaagagaatcattgaagcgacttgcacgggatattctcgatggaaattgtgaagacggaatgtactatgtgtctagaccatggttgcagcaatggtggaaaa

SEQ ID NO: 2863 - DNA, 264 bp, Glycine max
  unsure at all n locations
  Clone ID: 700998622H1
gtgaggaagtggatttctggtgttggtgttgacagtgttgggaagaagcttgtnaactcaaaagatggacctccaacctttgagcagcccaagatgactctggagaagctcttgctgtatggtaacatgcttgtccaagaacaagagaatgtcaagagagtccaattggctgacaagtacttgaacgaggctgctcttggaaatgctaacgaggatgctattcagaggggaactttcttccagtctgaattggaggcaaagcaa

SEQ ID NO: 2864 - DNA, 265 bp, Glycine max
  unsure at all n locations
  Clone ID: 700998623H1
aagcaccatggaattgtagaatgcatgtattcttttccatttggagaacaatatttgcagtacatagttaactntnacaatgatatgcaggtttattaaattttaagagttaacatttgtgtttgtttaggttgcctgatgactttgacaaaccggagtttgccacggtcaacattcagcgtgatctgttctatggtnacgatactctcatggagaatgtctctgatccttctcacattgagtttgctcatcacaaggtcacagg

SEQ ID NO: 2865 - DNA, 264 bp, Glycine max
  unsure at all n locations
  Clone ID: 700998624H1
ctaagtgggaaggcttgggataatcttttggagaacaagactgccttcactacaaagaaagactatggtaaagaagagagggaagctcaatgggcggctgcacagaggacacttcacggtcttcagcctccggaaacttccaaccttttcaatgacaaaaatagctacagggagctttcaganntgcagaacaagccaagagacgtgctgaagttgcaaggcttagggagcttcatactctaaagggacatgtcgagtcagtgg

SEQ ID NO: 2866 - DNA, 261 bp, Glycine max
  Clone ID: 700998625H1
ttagatagtattttgcagggagaattgccctgtgaactggagaaatctaatcctacatacaatatattggcattattgcgggtgcttgacggtttgaaccaacttgcatctcgtttgagggcccaagtggttactgatagcttgcagagggaaaaattttggatttagttgagctaagttttaccagtggtgctagggttcctacagaggaatttataagcagcaaacttactccaaaattagctaggcaaatacaccatg

SEQ ID NO: 2867 - DNA, 275 bp, Glycine max
  unsure at all n locations
  Clone ID: 700998631H1
cttatcgtcaaggaaaactaagttcttcagtcttgacttgagngctttgagttcatggatccaatccaacacncagttcgtcaacgttggtgctctcaagctccacgtcgcagaaaccggaaccggtccaaacgccgtcgtattcctgcacggcttcccggagatatggtactcgtggcggcaccagatgatagctctcgccggtgccggattcagagcggtttccttcgattacagaggttacggtctctccgacccgccacccgaacccgata

SEQ ID NO: 2868 - DNA, 276 bp, Glycine max
  unsure at all n locations
  Clone ID: 700998632H1
cagtgacttgagaatggccttgccagtggtcgtcgacgcagagtaccttcaaagaggtcgncaaggctcgccgcgatctccgggcactcatcgctanccaggaactgcgctcctctcatgcttcgattggctggcacgatgccggaacttacgatgctaagaccaagactggtggacctaacggttcgatccgtaacgaggaagagtantctcacggcgccaacaatggcttgaagaaggctattgatttctgtgaggaagtgaaggaaaaactcc

SEQ ID NO: 2869 - DNA, 264 bp, Glycine max
  unsure at all n locations
  Clone ID: 700998633H1
gttgtaccaaatcaaagaccatgtctgggatgcttccgggagttgaatgtgctcgaaggagacgcttgcataacagtgctggtgatgattccaccagcaaccgctctttctgtttgtatactaccaggaacctccaatcctcttcctctttactggtacctttaccttcctctttcgtccactttaatttctctctctgtctataatggggatgcgttatcantttaatgaaatcaggaaagaagcatgttaaatcgggcatac

SEQ ID NO: 2870 - DNA, 266 bp, Glycine max
  unsure at all n locations
  Clone ID: 700998634H1
ctctcttctggattggngttggtgttgggctttctgcactgttttcagtggtagcttcaagattagcagaaatatgnaatgcaacaagcttncangannatgatgggncagatganttcanaanataancaatttggcaatgntgnnttttctccgggatctcctttnccctttcnaatgcctanagcagcagggcncacngcacctgctagttctgnaactactnaatctcgagcaccttcagcatntagtgcatctcantccat

SEQ ID NO: 2871 - DNA, 270 bp, Glycine max
  Clone ID: 700998635H1
cgagggcgaagagaagagaaaaattaagatggaggggaaggagcaggatgtgtcgctgggagcgaacaagttcccggagagacagccgattgggacggcggcgcagagccaagacgacggcaaggactaccaggagccggcgccggcgccactggttgacccgacggagtttacgtcatggtccttttacagagcagggatagcagagtttgtggccacttttctgtttctatacatcactgtcttaaccgtcatgggagtcgccggggc

SEQ ID NO: 2872 - DNA, 263 bp, Glycine max
  Clone ID: 700998636H1
atagacatggccaccgtcacttctgcagccgttgctattccctcattcactggcctcaaggcaagcgcaggcaaagtgagtgccgcagttaaagtctcagctccccaagccacaaggttgggcatcaaggcttcgctgaaagacgttggagtcgctgttgtggccactgccgcgagtgcagtgctggctagcaacgccatggccattgaagtgttgctgggtggtgatgacgggtctctggctttcgttcccaacaatttctc

SEQ ID NO: 2873 - DNA, 263 bp, Glycine max
  Clone ID: 700998637H1
ctccactatagaaagaaaaaagaaaagaacaagcaaatccacaaatactaatataataaatactagaaataaaggctttctacatatacatatatcgtccaaaacaacgatttttatcagctgtagcaaagaatgaaacttcatagaagtcaaaatatgaagaaatcaatatgtctagatacccccttttctatggataaaagatctaattgataaaggaagcatcgtaaggatccattaacgcggttttgaaccgatacaat

SEQ ID NO: 2874 - DNA, 262 bp, Glycine max
  unsure at all n locations
  Clone ID: 700998638H1
tgccaccaacaatttttcgttgaataataagattggacaaggtggttttgnacctgtatataagggagaattagtggataggcgacaaattgctgtcaagagactatcaactagctccggacaaggaataaatgagnccacaacagaagtaaaactgattgcaaagcttcaacaccgaaatcttgtaaagctccttggctgttgctttcnagaacaagaaaaattactaatatatgaatacatggttaatggcagcctagac

SEQ ID NO: 2875 - DNA, 262 bp, Glycine max
  Clone ID: 700998639H1
ggcttcttggtgtgggaggatttggtaaggtttacaaaggggaaattgatggtggaacaaccaaggtagcaattaaacgtgggaatccactatctgagcagggggtgcatgagttccaaactgagattgaaatgctctcaaaacttcgtcaccgccaccttgtttcactgattggctactgtgaagaaaacactgcaatgatcctgtgtatgactatatggcctatggaacactcagggagcatctgtacaagactcagaaa

SEQ ID NO: 2876 - DNA, 260 bp, Glycine max
  Clone ID: 700998640H1
gtttcctgctgaaactagcaaaatcaatgggtttccaatgatgccagtgtatcagtttgggtttggttcttctggagtgatttcagtccaaggtggcaatggaaacccaatggaagaactcactctgggacaaggaaacgtggaaaaacataatgtgccaaacaaggtctctacagtgtctgatatcatcaccccgagttcttctagttctgccgttgacccaccgacactgtccctggggctatcctttcatctgacca

SEQ ID NO: 2877 - DNA, 264 bp, Glycine max
  Clone ID: 700998643H1
ttagatcttggaaacaatcaaataaaggatgtgtttccccattggcttcaaactctaccagaattgaaagtattggttttgcgagccaacaagttgtacggtcccattgccggtttaaagatcaagcatggattccccagtttagtcatctttgatgtctcttccaacaacttcagcggctccaataccaaaagcctacatacaaaaatttgaagcgatgaagaacgttgttatagataccgatctgcagtacatggaaatttc

SEQ ID NO: 2878 - DNA, 264 bp, Glycine max
  unsure at all n locations
  Clone ID: 700998644H1
agtgaacaaggtgtaaccacactacaaaaccatncttatgtngtgtggagtcaacaaggttttgtccancacccttcattctagcagtcagtgcaagtctcaatgtataaaccgtgggagctattgtgcctccggatccggagaangattttggagaaggatatgaagggaangatgtggtgtatgaaaatttgaggcagttgtgtgttcatagagttgccaatgagagcaaccgttcatgggtctggtgggattatgtgacag

SEQ ID NO: 2879 - DNA, 100 bp, Glycine max
  unsure at all n locations
  Clone ID: 700998645H1
gttttttaaagttgtctgaccagcaagatcccaaaaactactttttcattcccatttctgcgtccttccntctcaccatgcttccgccacncacanagcg

SEQ ID NO: 2880 - DNA, 271 bp, Glycine max
  Clone ID: 700998647H1
ggcacgtacaaacgtatcagccacgtgctagccaagaatggcgcgtcaaagcaatagccacacacattcaaagttgtacaaatctagatgccacaacctcggtgaccttagccgcaatgtccaatgtcaaaaactgttgctttcgtctggatcagaccaatgcctcgcctgctgtttactgcgaaggctacgcgcgcattaagcgccgcaacgtattgacctggaacacacgctttctagtactaagtaacacaaaactgctattctttca

SEQ ID NO: 2881 - DNA, 256 bp, Glycine max
  unsure at all n locations
  Clone ID: 700998649H1
caacaactccaatgtattccttagcccaacacaagtacataccacgctttacacctccaagcttgcangaaccacccaccccaccacccatcgtctccagtgttttgttccaccacaaccacaacgtctagggacaagcccaatcctaagccattggtcattgagccatggctcgtgccggtgccgccaacggtggttaccgccgataacccccgtccaatgaacaatgacccaagtttgcaatcaacatggtctc

SEQ ID NO: 2882 - DNA, 269 bp, Glycine max
  unsure at all n locations
  Clone ID: 700998651H1
gacaaacgntacaagaatagagagttacaaattatgcaaatgctggatcatccaaatattgttgccctaaggcattgtttcttttcaacgactgacaaagaagaagtttacttgaatcttgtacttgaatatgttcctgaaactgtgaatcgcattgcgaggnngctatagcaggattaaccagcgaatgcctttaatatatgtaaagcttatacctaccagatttgcagggcccttgcttatatacataactgcattggtatatgtca

SEQ ID NO: 2883 - DNA, 257 bp, Glycine max
  Clone ID: 700998653H1
ctctggagccatgtaattgggaaccagaggtcagaggtcctatatcttttgaaacagattcttggggattcggttgcaccattgtcgaaatgttgaccggtaatcaaccttggtatggatgtcctgttggcagaatataccagtctgttgttgaaaagcatgaaaaacccaatattccaagtggccttccttcttcagttgagaatgtcctcagtggatgcttgagtatgatttgaggaatcgcccttaatggtaga

SEQ ID NO: 2884 - DNA, 174 bp, Glycine max
  unsure at all n locations
  Clone ID: 700998656H1
gaaattcgaacaatgattttttcattttctttttaatacttttttggtttagactccctaagaatctgtcgatatttccaattaaatcttcttgntcctgtgaaggtcctataaaaaaaagggctatgcctttctttactcagaagggccttattccaagttccacacaacata

SEQ ID NO: 2885 - DNA, 78 bp, Glycine max
  Clone ID: 700998658H1
gcatacatagctatctatttatctatagcaagtgcgtcaagagacacgtggtaccctagctagagtgccattctgtgg

SEQ ID NO: 2886 - DNA, 263 bp, Glycine max
  unsure at all n locations
  Clone ID: 700998662H1
taagttgggtgtgtacgattttnatgattacgatggcatggatttggagaacatgaggaggaggcatttggatggtcatggaggaggaagctttatgggatcagtgcatgctgctagaagtggcattgatagggaattcataacaggttcaagtgtacgaattcttgataagagaaagaactctacggtgacagacctagtggctgtatctgggagataatgttgatcacagtaggtacaagataaacagggatggagtctgg

SEQ ID NO: 2887 - DNA, 271 bp, Glycine max
  unsure at all n locations
  Clone ID: 700998664H1
aatatagaacacactaccctcaacatagtaaagcagctggtgcaagtgaagcaatggctcaaaccatgttgctcatgtctagtgtctctagcagttattccgtggatttgaagaaagacttttcctccaattgcagagtcaaagtttaaggcctaagttctctcaactctcattcaacccacttccaccatcaacttcttctntttcttcaccccgtacattcacaaccctggctctctcaaatctaagacaaaagccgctcctgctaaga

SEQ ID NO: 2888 - DNA, 260 bp, Glycine max
  Clone ID: 700998665H1
ttttcaggagctggcatcggatttagctcaaattacctttgattatccttttaggatacccccatactttgcccttataattagagccattggggttctggaagggatagctttagtaggaaattctgaatttgccattgttgatgaggcctatccttatattgcgcagaggctcctcacggatgaatctcctcggctaagggatgctctacgttacactatatatggtaaatctggagtttttgatgctgaaagattat

SEQ ID NO: 2889 - DNA, 265 bp, Glycine max
  unsure at all n locations
  Clone ID: 700998666H1
cttcaaaacactcataacacaaagcacaaagcaaagctcatccttgagttaaaaaatggcagcagctncttccatggctctctcatccccatccttggctggcaaggccgtgaagctgggcccatcagccccagaagtgggaagggtgagcatgaggaagaccgtcaccaagcaggtctcctcaggaagcccatggtacggcccagaccgagtcaagtacttgggcccattctctggcgagcccccgtcctacctaaccggtgag

SEQ ID NO: 2890 - DNA, 264 bp, Glycine max
  unsure at all n locations
  Clone ID: 700998667H1
tttggtgcatgatcgtttagggtttgtgcttgtcgttgccgccttagtgacaataatcgcgccaactcttgtatgatccatcactcagatccttccaattccgctgtctcgctttgaccgccgccacaccaaactagcatgttcttcagtgtttccctttcagatatttgatgcttggaaacgtagggaaagttgcccaatctantcttagaacccatagaagaagatatttggaagcaagtagaaatgaggctttacctcagt

SEQ ID NO: 2891 - DNA, 259 bp, Glycine max
  unsure at all n locations
  Clone ID: 700998668H1
agggcttccattgccgttgagcaacaaacttcccagactaaggttgctctcctcagaattggtaccagaggaagtccactagctctggctcncgcatatgagaccagagacaagctcatggcatnccatgcagagctagcagaagaaggggctattcagattgtaataataaaaacaactggtgacaaaatactatcacagccacttgcagacattggtgggaagggcctattcacaaaagaatagatgaggcatcata

SEQ ID NO: 2892 - DNA, 261 bp, Glycine max
  unsure at all n locations
  Clone ID: 700998671H1
gnactacatcctatcattcnntataancaacanganataagaaaaattaggtatgaatagaacaagagancggggggataaaagagaaaagagttttagaaatctatatacaagtgcatccacacccccttttttntgattcattaatggaatttcgtttgttgattcgagctaagttccataaaaacaccagcntcntttganatgtcctgaacagttctgtaggttgaggcctcgtttcnaggagnataggataacagg

SEQ ID NO: 2893 - DNA, 259 bp, Glycine max
  Clone ID: 700998672H1
caaacagtttgggcgtcatgtggagagagagagcgttattggtgatcctgctactgcttctagtccagcaaatttgtgctaccaagaagcaagatcatggttgccccctttcttcctgcggcaaaatcaccaacataacttacccatttcgattaaagggccaccctaaaagctgcggcgacaataggtatgagctagctgtgaaaacaatgttactgtgttacatttgtactctggaaaatatcatgtgcaggcaatc

SEQ ID NO: 2894 - DNA, 260 bp, Glycine max
  unsure at all n locations
  Clone ID: 700998673H1
accaaagtgcatactttttccttctcagatgctatcttcagaagaagatatacctgagggctcatcatttgctgctggagaaaaaatgcatgaactagtgaaggtatttgtagttctgcaccagcttcaaatattcactctaggtanacctttgcctgagaaacctcttatttatcctcctggtgatctcccagcaaattctcgtgcccaaacttctggacttgatgtttcaggcccaaaaccaggaactgaagtcagcc

SEQ ID NO: 2895 - DNA, 255 bp, Glycine max
  unsure at all n locations
  Clone ID: 700998674H1
gttggtgcaataacaagtggacctcttgctgattttattggacgtaaaggggcaatgagagtgtcaagtgctttctgtgtcgcagggtggcttgttatttatttttctgagggtccagtgcctttggacattgggaggttagcaacaggatatggaatgggagttttttcatangtggttcctgtctttgtagcagaaattgcaccaaaagaactccgaggggcactgactacctaaatcagttcatgatagtta

SEQ ID NO: 2896 - DNA, 263 bp, Glycine max
  Clone ID: 700998675H1
tcaacccaaaacaaagaaacaatggctctgagattcgcagcagctgcttctgcttctgtctcacgaatatcaaggccacaaaacccaccattcttttcacttcaacaccgcaacaacggtactctcaaattccatagcccaccttttcatcatccacttcccacaccctcaaaacgctgcaacgttcgagccataagcgaggtagctgtggaacctgaaatttcaaagaaagaacaaaatgagtcacctaaagattggaagat

SEQ ID NO: 2897 - DNA, 261 bp, Glycine max
  unsure at all n locations
  Clone ID: 700998676H1
aaaganagtagttggggaacatattgccccggggagtatcctagtcctcccccagaatatacaacctgtttgggtgacttgtacagtgttgcttggatggaagacagtgacagacacaatttgcgaacagaaactctgcaccaacaatataaattggttaaagagaggactatatctggagattcatactatggctctcacgtgatgcagtatggtgatgtagggcttagcagagatgttctcttccatatttgggtacag

SEQ ID NO: 2898 - DNA, 265 bp, Glycine max
  unsure at all n locations
  Clone ID: 700998678H1
caaaaacttaagttcattccttgtgttttgctttcttcctcaaaaccaaacatgtcgaacacatgcggcaactgcgactgcgctgacaagnctagctgcaccaagggaaacagctatggtgttattgtagagactgagaagagttacatcgagactgttgtcatggatgttccagcagctgagcatgatgggaagtgcaagtgtggcactaactgcacttgcacggactgcacctgtggccataaggaatatgtatganaatgta

SEQ ID NO: 2899 - DNA, 268 bp, Glycine max
  Clone ID: 700998679H1
gtatagagagcgcggcataacctaaacttacccttcttctctctgtgtgtgtgcgcatcaaacgcaaccagaagcagccatggccactgcaagaactgtgaaggacgtttctcctcatgagttcgtcaaagcttactcttctcacctcaagcgatctggcaagatggagctgccagagtggactgatattgtgaaaactgcaagatttaaggagttggctcctatgatcctgactggtactatgtcagagctgctccatggcaagaaa

SEQ ID NO: 2900 - DNA, 262 bp, Glycine max
  unsure at all n locations
  Clone ID: 700998681H1
caattgaagttaaaagccttagccttccctacaactccaaacacaaagacatcntcatccatggctgcctccgtctccactgtcggagctgtcaacagagctcttttgaacctgaatggttctggagctggagcttcagctcccagttcagccttctttgggaccagcttgaagaaggttattgcctcaagggtccccaacagcaaggtttccggtggaagcttcaagattgttgctgtagaagagaagaaagagattgaag

SEQ ID NO: 2901 - DNA, 265 bp, Glycine max
  unsure at all n locations
  Clone ID: 700998683H1
cantcncnctgnangnttccagagggatggagtatctccatactctggctcaccaaagcttcattcacagagatcttaagccgtcaaatatcttgcttgctgatgatttcaaagcaaaagtctccgattttgggttggtaaaacttgctcctgaaggggaaaaagcatctgtagtgacccggcttgcagggacgtttggatatttggcgccagaatatgcagtgacaggaaaaatcactaccaaagcagatgttttcagttttgg

SEQ ID NO: 2902 - DNA, 259 bp, Glycine max
  Clone ID: 700998684H1
gaaggcagaatgggtaggaaccgatagagtgattggttgtggatttgatcctaggcagaagaaggttttcttcacattagactcagagctaatgcatgtcattcactgtcagacagaggaatttggtacaccactctttccaatcttggctgcaaacatagacattctggtgttagttaattttggacaaagtgcatttaaatatgcacctgcaaatgcccagagaacaccaaatccatgcttcatagccccacttgta

SEQ ID NO: 2903 - DNA, 258 bp, Glycine max
  unsure at all n locations
  Clone ID: 700998685H1
ctttgaaggagactttcttcnctgatgacccnttgangtngttcaagaacaagccagcttccaagaagttcatgcttggccttcagttcttcttccccattttcgaatgggntcccaaatacacctttcagttcttgaaagctgacctcatagctggcatcaccatcgctagcttggccattcctcagggcatcagttgngncaagctcgccaacctccctccaattcttggactatattcgagnttataccaccatt

SEQ ID NO: 2904 - DNA, 263 bp, Glycine max
  unsure at all n locations
  Clone ID: 700998686H1
ctccccttgagttccaaaacacaaagctcatgacacgtttgacctacactctggatgagattgagggaccctttgaggtgtcttctgatggcactgtcaagtttgaggagaaggatggcattgancacgccgccgtgacagttcagctaccgggaggcgaacgtgtgccctttctcttcaccatcaagcagttggtggcatcagggaagccagatagctttagtggggagtttctagtcccatcctaccgtggaagctctttc

SEQ ID NO: 2905 - DNA, 260 bp, Glycine max
  Clone ID: 700998687H1
gtttcagacgaccagcaagacatcacaagagggaagggtttggttgattccctcttccaagctccacagtctactggaactcactatgcaatcatgagctcttatgagtaccttagcactggacttaaacagtacaacttggataacaacatggacggtttttacattgctcctgcttttatggacaagcttgttgttcacatcagcaagaacttcatgaccctgcccaacatcaaggttcctctcattcttggtatctg

SEQ ID NO: 2906 - DNA, 175 bp, Glycine max
  unsure at all n locations
  Clone ID: 700998688H1
gtttgcatacctatattattagagttcccttttagtatcattgttattattcatttcccttattcaactgctttttaaactgttaatggaaatggcttcctcatccttcatcttaggctcagatttcaaatgcatgtncctcttcgaggaacactaaaaccatgtctggatttgg

SEQ ID NO: 2907 - DNA, 261 bp, Glycine max
  unsure at all n locations
  Clone ID: 700998689H1
gggcagatagaaaaaaagagcgacttttgagttcaaaagatgactaacttcccattgatcaacttggagaagctcagtggtgaggaaagaaacgataccatggaaaaaattaaagatgcttgtgaaaactggggattctttgagctggtgaatcatggcattcctcatgacatattggacactgtggagaggttgaccaaagagcactacaggaaatgcatggaagagaggttcaaggaattagtggcaagcaaagntcta

SEQ ID NO: 2908 - DNA, 196 bp, Glycine max
  unsure at all n locations
  Clone ID: 700998690H1
cttgtccctgcttcaaaatccaaccacacactgcacgnnacngacacttcagnttnnctnttcttttctcaaagtcttgttctttgtgtagctatcaacagaaaatttcttgagggtctctgattttttttcaccacatggagaggtaattnttggctgangtccaaaaatggtgcaggnctactatgaaagatga

SEQ ID NO: 2909 - DNA, 175 bp, Glycine max
  unsure at all n locations
  Clone ID: 700998692H1
aggagcgccggttgaaggatttgattaagaagcattctgagttcattagctacccaatttctctttgggttgagaagactaccgagaaggagatttctgacgatgaggatgaggaagagaagaaggatgaggagggtaaggtggaggatgttgatgaggagaaggagaagnaaga

SEQ ID NO: 2910 - DNA, 266 bp, Glycine max
  unsure at all n locations
  Clone ID: 700998693H1
cagttcccaaattcattttaatcctaattctgcacttcttgatcattccgatttttctcctcaagatgcagatattcgtaaaaatttgaccggcaagaccatcacccttgaggtggaatcctccgacaccattgacaacgtaaaagctaagattcaagacaaggaagggatcccacctgaccagcagagacttatctttgcgggtancacaacttgaggatggtcgcacccttgccgattacaacatccaaaaggatcaaccctcc

SEQ ID NO: 2911 - DNA, 268 bp, Glycine max
  unsure at all n locations
  Clone ID: 700998694H1
agggcaactattgcatctgcatgtcttccttcctacatcatcaancaaancacttgggatttcacccttcaaacctccacaacaagtgtttctctaagtccaatgcctccacctccactctcacatgcaagncattatcgtcatcaaccatgatggactttgacttgtatgaccttctgggcattgacagctcttgtgatcagtcacaggtcaaagtggcgtatcgctctcttcagaagcgctgccaccctgacattgctggccctgc

SEQ ID NO: 2912 - DNA, 270 bp, Glycine max
  unsure at all n locations
  Clone ID: 700998695H1
ccaaaatcagattttatttttnatttttttgctgaatctgaatagatcagaaggtgatgtcgtgtttctcgtcatctgggtcggaggaagacgatgagggattcgactcttaccggaaaggaggctaccacgccgtcagagtcgccgatcagttcgccgccggcaggtacatagcgcagagaaagttgggttggggtcagttttccaccgtgtggctcgcttacgatactaaaactgagtcatatgttgctctcaatctccagaaaagtt

SEQ ID NO: 2913 - DNA, 274 bp, Glycine max
  unsure at all n locations
  Clone ID: 700998696H1
gcagaagacacaaaagaagtcacaaaatgtatcgcgttcttcaccgcgctttctgcaccgccaccgagcnccgccaccaccgccaccgtcaccgtttccatcaagtccatttcggaggatctgtacaaggaagtgaagctaaagaatgtggtggagaagttcaagaaagcctcggacatcgaccgcttccgcaaaaaaaccggctctacgaagacaccgtccgccgcctcgccggcgcccgacgcttccggtggatccgcgacatcctcgagca

SEQ ID NO: 2914 - DNA, 272 bp, Glycine max
  Clone ID: 700998701H1
aagaaacgtagttccatgtgggctcttaggatccactcacttaactctaaactcgtcgtgtgtgttccttctttccacttcaaacttgtgacccagaaaaaagactctttccattctcctccttttcttcctcctccactggctgcacctcgctgccgtgtctctgcctagcgtgaaattggctcatttcccatctgggtcctgtgaattgcgattggaaccgcgttttccccgcttctgggctggctcagaagtagtcagaatgatgtctg

SEQ ID NO: 2915 - DNA, 271 bp, Glycine max
  Clone ID: 700998702H1
ttcatcgtgcattcaatggccaccacagcagctctatccggaaccatggtgagcacctccttcatgaggaggcaacctatgaccaccacaagcctaaagacattccccaacgttggtgaagctctttttggtctgaaaagtggacgaggtggtcgtgtcacttgcatggcctcgtacaaggtgaagctcataaccccagaaggagaagtggagtttgaatgcccagatgatgttttcattgttgacaaggcagaggacgaaggcattgaac

SEQ ID NO: 2916 - DNA, 270 bp, Glycine max
  unsure at all n locations
  Clone ID: 700998703H1
ttccgtagctcaacacaagtatacaccaaacttccaccaccaagtttgcangaaccatccnnccccgtcacccgtctcgagtacattgttctnnnnnnnnnnnnnnnnnnnnnnnnnnnnnnnggtctaagtccaatgctaagtcattggtcattgagacccggctcgtgccggtgccgccaatgccaacggtcgttaccactgagatccaccgtccaatgaacaatgacccaagtttgcaatcaacatggtctcatagagcttgggtgg

SEQ ID NO: 2917 - DNA, 267 bp, Glycine max
  unsure at all n locations
  Clone ID: 700998704H1
attgagtgcttttggttgcatcaagcttagaagttttccaaccatcaagtnttccaaaaatatcagaaaagatggaaaatgtaagggaacttcatttgcagtacactcccataagcatgtctgtctagttgtggagttgttcagttaccaagtagcactgtcattctaccagaactgactgatattatagcttttggatggaaagggtagcaatggctaaaacaggaagatggtgagaaaaagcgggttcaatagtatcttcaaagg

SEQ ID NO: 2918 - DNA, 267 bp, Glycine max
  unsure at all n locations
  Clone ID: 700998705H1
aaggatttgaatgtttgggtgagcaattgaatcttgcagaagggatgaatgatttacaggagccncaaggagatgatatgtctaagagctttaagcacagtacatcttcctcaactcaaggatcaagatggaagtctatgttaaattctgttgccaagcaagtttcacaggttcctctctctttggcaataagagtagcatccctcaaagggacattgcgtttgcagataaagccaatccctctgaccaattgtgggttggnttcac

SEQ ID NO: 2919 - DNA, 265 bp, Glycine max
  unsure at all n locations
  Clone ID: 700998706H1
ttgactggtatagatgaccctgcatttgaaatttccttctcaaaaatctacactgccaagagcctccaaaagcaatggtatagtgtgttgggcaaccatgactacaggggtgatgttgaagctcaattgaatccaatccttcagaaaattgatcctngatggatctgccaaagatcatttattgttgatactgaaattgctgagttcttcttcattgattcaacaccttttgtggacaagtattttcttaagccaaaggaccaca

SEQ ID NO: 2920 - DNA, 264 bp, Glycine max
  unsure at all n locations
  Clone ID: 700998707H1
cagccacgcggtagttttcggcacggataggacganaagggatagtcgtgaaactggttctttatagagtaaaagaagagcgtatctgctgccaatttaaagtatgcggatgagcatctgaaaataaattttacagatcatccactgtaaactcatatatcaggaaactggctacggatagaatctgattcngagggatttgttgctaaggatacaggaattgcatatganatntttgagctggtgtgggnattncccccttct

SEQ ID NO: 2921 - DNA, 263 bp, Glycine max
  Clone ID: 700998708H1
gcttacagaagaataatcaaaatgagatccatggttaaggatcttgaatgaaggattatacctctagtgggattcagtggttatttgacaatccatgttatagcctaattttggtatattgtcacagctgcacctttgacatatagtgctgaatctgatcatagttatccttttatcccacccttgtaagttgtaagcatcttcactggagatgtactactctctgaaaaacaagaagttttctagcttaagaaatgacctat

SEQ ID NO: 2922 - DNA, 69 bp, Glycine max
  unsure at all n locations
  Clone ID: 700998709H1
atanaaatnatcaccttaatcatggctgtgttctagctcataggntaannaaatncttatnccnttata

SEQ ID NO: 2923 - DNA, 260 bp, Glycine max
  unsure at all n locations
  Clone ID: 700998710H1
tgggttccaacaagcctcgcggttcttcaggcagcgcgcaagtcccgcacttcccgccgggaganccgatgggcggacaagaactacaagaagcgcgccctcggcaagttctacaagacttcgcccaccggtggtagctcgcacgccaagggcatcgtgctggagaaggtcggtgttgaggccaagcagcccaactcggctatccgcaagtgtgtccgtgtccagctcatcaagaacggcaagaaggtcactgcgttcgt

SEQ ID NO: 2924 - DNA, 257 bp, Glycine max
  unsure at all n locations
  Clone ID: 700998712H1
ggagatccatttattgaaagcaactatggtgtccactcccggcagtttgaagttggtgttttggattggtttgcccgattgtgggaactggagaaaaatgagtactggggctatataacaaactgtggtacagaaggcaatctccatggcatcctagttgggagagaggtctttccagatgggattttgtatgcttcacgggagtcacattattctgtgtttaaagctgctcgaatgtacagtncggaatgtgagaa

SEQ ID NO: 2925 - DNA, 256 bp, Glycine max
  Clone ID: 700998713H1
ccagaactagctggagatcggcgaaggacagttatgaggcctcctcaagttcttcgtgagggcacaaagaaaactgtgtttgtcaattttatggatctatgcaaaacgatgcatcggcagccagaccatgtcatggctttcttgcttgctgaattgggtacaagtggctcccttgatggacagcagagattggttgtaaagggaaggtttgcaccaaagaatttgaaggaattctgcgacgatatgtcaatgaata

SEQ ID NO: 2926 - DNA, 263 bp, Glycine max
  unsure at all n locations
  Clone ID: 700998714H1
ccgcaagangcttcgtaaggtgatagatccaganatggctcgaaattcttacaccattcagtctcatncctcatgttctgccaatctggcatncaagatgtgtccgtactgagagtaatgaaagaccttcaatggcagaatgtataaaagaactcctaatgattatctatacaaattcgaanggcttgggaatggttatgcatagtttgagaatgatctagtgaaatcacaagtttagacattggaattatgatgatatcttg

SEQ ID NO: 2927 - DNA, 257 bp, Glycine max
  unsure at all n locations
  Clone ID: 700998715H1
tcttctcttgcggctagggttttagtncagntcttctagatttaaggaagatgggtaaggaaaaggttcacatcagtattgtggtcattggccatgtcgactctgggaaatccactaccactggtcacctgatttacaagcttggaggcattgacaagcgtgttattgagaggtttgagncggaagctgctgagatgaacaagaggtctttcaagtatgcctgggtgctggacaaacttaaggctgagcgtgaaaga

SEQ ID NO: 2928 - DNA, 257 bp, Glycine max
  unsure at all n locations
  Clone ID: 700998716H1
tgcaattgangttgaagtcttgcccttctctcttcaactccaaacacaagacatcatcatccatggctgcctccgtctccactgtcggagctgtcaacagagctcttttgaacctgaatgggtctggacctggggtttcagctcccagttcatccttctttgggagcagcttgaagaaggttattggctcaagggtccccaacacaaagattccnctggaagcttcaagatgttgctgtagaagagaagaaagagat

SEQ ID NO: 2929 - DNA, 272 bp, Glycine max
  unsure at all n locations
  Clone ID: 700998717H1
ganagtntctcaccaaacacacacttctcttctcttctcttctcttcattttctgtggttctcactttcttttctctaatcttctaatctcttattttcttcccccctctgttactccccgcttctctgaatccctttctgttaatcatctgtctttcaactcgtgattttntgggtttgcctcaccaaaaagattcaaactttgaaaatttttctcgaaagccaggtgttttcagaatcgagatccagctttttttttgtttgtttttaaa

SEQ ID NO: 2930 - DNA, 269 bp, Glycine max
  Clone ID: 700998718H1
gttgctaacattgtcccaccatatgaccagtcaaaatacgctggaactggggcagcagttgagtatgctgttttgcatcttaaggtgtctgagattgtggtcattggacacagtgcttgtggtggtattaaggggcttctgtctttcccatatgatggaacctactctactgattttattgaggagtgggtcaaaattggcttgcctgcaaaggcaaaggtgaagacacaacatggggatgcaccttttgctgagttgtgctcacactg

SEQ ID NO: 2931 - DNA, 268 bp, Glycine max
  unsure at all n locations
  Clone ID: 700998719H1
gtctcatcnaaatgggagaacagnatgacattacgctgacatgggagaatttggaagctactgttacaaatggaaagaaccgaaaactaattcttcatgggcttacaggttatgcccagccagggngacttttggctataattggtccttctggcagtggcaaatccacacttcttgatgctntngcaggaagattgacatcnaacataaagcaaacagggaagattctaatcaatcgccacaaacaagaactggcttatggaacatc

SEQ ID NO: 2932 - DNA, 265 bp, Glycine max
  unsure at all n locations
  Clone ID: 700998721H1
gattcactctggtgaacataagtggaaaccgatggcttgcaatccgattggaaactttgggaggcctcatgatatggttgactgcaacctttgccgtcatgcagaatggcagggcggagaaccagcaagaattcgcatccaccatggggttactacttagctatgctctgaacattactagtttgcttaccggtgtgctgangctggcaagtngcgctgagaatagtttaaacgcagttgaacggattggcattacattgatttg

SEQ ID NO: 2933 - DNA, 155 bp, Glycine max
  Clone ID: 700998722H1
tctatttgtagattaatttgtattaagtctatgtgtattcagcagaatggatgttgtacctaactctgatctgtaagccgtgtgtgtgtgccaataattgaaaatgatgattattctactgatggacaagttaaataaagagacgtttagaggat

SEQ ID NO: 2934 - DNA, 263 bp, Glycine max
  unsure at all n locations
  Clone ID: 700998724H1
atccaagtaaaaccgaaaacatccatcaacaccatgatgttgggggagacccaccgcgcaaatccaaccgtacacgtgccaccgtngacgccgganatcttctcaccgtacaccggcaatgccgattactctccgtactcattgcaagangcactgagtgcgcttcagcactacgaatccaccgatgctgagtcagactcggagtttccgtctcgggaaccggaagtcccggtggacgcttactcctgcgaccatttccgcnc

SEQ ID NO: 2935 - DNA, 259 bp, Glycine max
  Clone ID: 700998725H1
ggtcatttgaatggctcagttgttgtctccagtgtacactgaacctctcaaatcgaatttaagttccataagctcatggaggatgctaccaaagactgcaactccttcgaattttgtaacacacaatggcaaacgaagagggtgtggaagggtaagagttgcttctgaggaaaaatctttttcaacgagtggcactgctgttgtagatgactactatgcagttttgggtcgcttccagatgccactccagggcagatca

SEQ ID NO: 2936 - DNA, 258 bp, Glycine max
  unsure at all n locations
  Clone ID: 700998726H1
cgacatatgtgtagcttataaaatctttagctaaatttgagcatcagagtcatggatgcttttcagttcaaaactattatttcaggcattcttgccctgctagcatgcgccttgttttatcaatttaagaaaacactttgtggcaatacaaagaagntctgtagggcacctcaagcagcaggtgcatggcctatcattggccatttgcacctcttcaatgctcatcaatcacacacaaaacacttggcaaaatggctg

SEQ ID NO: 2937 - DNA, 259 bp, Glycine max
  Clone ID: 700998727H1
gacttcgccagtacttggacaacaacatggatggattttacattgctccagcttttatggacaaacttgttgttcacattaccaagaacttcatgaccctgcccaacatcaaggttcctctcattcttggtatctggggaggcaagggacaaggaaaatctttccaatgtgagcttgtctttgccaagatgggaatcaaccccatcatgatgagtgctggagagttggaaagtggaaatgcaggagagccagcaaaact

SEQ ID NO: 2938 - DNA, 257 bp, Glycine max
  unsure at all n locations
  Clone ID: 700998728H1
agagatcnggggggcaagtggcttcatcaccgccatttttctgtggatctccacctacccagggcttcaaaccctgtgatccaagatgagcaatttggtagtaatggtaatgagagttttggttcnttttccttggcacccccttcaccatcttcctcagcaagaggctgtnttaggatgaagtttggtcacaccccagcagcagtgaggattgaaggttttgattgcctcagcagggataggcgcaatgcagcatt

SEQ ID NO: 2939 - DNA, 259 bp, Glycine max
  unsure at all n locations
  Clone ID: 700998729H1
ctttctctattctcttctgcatcaccattcaccgctgagagaacatcacaacacaacaaacaaagncagcctctcggtttccaatgtgaagagagcgaacatggctctaatcgctgccaggattctcggttccaattcgaggccggcggtcgcgctccaccgctggcagtggctggcgtactcctccgcctccgcggcggtggcggagcggagaccacggaggtgaaggactacgccgattaccggcgctccctgtacg

SEQ ID NO: 2940 - DNA, 261 bp, Glycine max
  Clone ID: 700998731H1
cccgtcctcccacagtgatttgagagagaaaataatactccaaatatatcgtcaaaatgcctgtgagaatccctcgtgatagcccaatgaagataattcctgatccaaatcgcaagacaggtccagatgacgcggttataatgcagaaaataatgggaaaattgagagaagcagatagcaacaacgacggtcgttacgacaaagatgagctgaagcatgctctcaagggtttaggtgccatcctccctgggtggagagcca

SEQ ID NO: 2941 - DNA, 262 bp, Glycine max
  unsure at all n locations
  Clone ID: 700998732H1
attggtgnatgatcctgccagcatttctgcatattggggaaaacgtccacgcgcggttgcaacnggcattgtgcagttgctatcagttgcaggaggttttctttctcgcattgccggggatgtgattaacaagnaggttaaagagaatgangttgctagggccattgagttacgtgaaattgtgacatctttgggtccagcgtacataaaactcnngcaagcatgagcattcgacctgatatactgncccccgtagcaatga

SEQ ID NO: 2942 - DNA, 268 bp, Glycine max
  Clone ID: 700998733H1
cttcaagaagccgtggattttgtgatcaagcaccgtctcgatgaagggatggctggtctcattgctgtgtccaacgctggggaagtggcttatggtttcaattgcaatggcatgtttaggggctgtgccactgaaaatggcttcatggaggtcggaatctgggaatagcttcattattttccttcatggttgtttcgatgcaacttttggatttctgtaccatgttccactgtagtgtagggtctttctgctggtgcccgatttagat

SEQ ID NO: 2943 - DNA, 270 bp, Glycine max
  unsure at all n locations
  Clone ID: 700998734H1
anagatataaacaaaancgagncatgccnctaaccaccagnagcaaaaacagaagacaaaggcanaaactagtaatatttganatctcacaatcttganagtcacaaatnantgacacatatttcagccatggcagttcggagaaagttcttcgcgaattagtacatatgtctcccttccttttgtaaatgaatttaggagctcatggttttctaaatctaaatgcatgggtcattctanaatttttattagnnagnnttagaatctcct

SEQ ID NO: 2944 - DNA, 265 bp, Glycine max
  unsure at all n locations
  Clone ID: 700998735H1
caaaaagatggtggcacccattgctgtttcttctccaaagtccacacnatagaagatgaggatctgtnttggtgactcaagttcaagttttgtnggggggtcttngaagggtctttgcttcaatctgaaacgaaggnaacaaagaagagaattgaccaatttggttgttgcttcatccacctnaagtgttacaaatagcaatgctagtggcaggttttacntcaacatcatggtttcctttccnacttggtccttttcncaanag

SEQ ID NO: 2945 - DNA, 148 bp, Glycine max
  Clone ID: 700998738H1
tagtgggcgggggaatatggatggggaactacacataatgttatttccgttcccaggtcaggggcacttgataccaatgagtgatatggcgagagcatttaatggaagaggggtgaggacaaccatagtgaccactccactcaacgta

SEQ ID NO: 2946 - DNA, 261 bp, Glycine max
  unsure at all n locations
  Clone ID: 700998739H1
gtttttcttttggtcctgggtctganaccgcggtgtcccctaacccattggtcagagaattatctgctcgcggtgtgtggtgtgtggctgcncctgtcacaagagaattttgcacatgacattttgatgagaagacaaatagatggaaaaatgtgctatgatcaattggtgcgctcttgattcattatcaggagatgcacatgcagcacgtcatgctattgttaaggaacntgttgccgatattttgggagcgcattatta

SEQ ID NO: 2947 - DNA, 263 bp, Glycine max
  Clone ID: 700998740H1
caaaaaatcaccgaattctgatcggatcaccgcagtgccccactctccaccaccgcgccatcgcaaaccctagatggacctactgaagcaagagcttctcaagaagcgccaatccctggcgcaagacaccggcggcaagaaattcttcaagcgctccgagatccagcagaaggaaatccagaaactccgggagcaagagaagcgcgaattggaagccaagtcacagaagcgcctcgcaacgtcctccgacaacgctgccaccg

SEQ ID NO: 2948 - DNA, 258 bp, Glycine max
  Clone ID: 700998741H1
gtgtttagcagtgtgactcagtgaagtgtgtgagttagttatgcctggcggtagtaggaaccctcttgttgttgggcgtgttataggggaagtaatagatccctttgaaatttctattcctttcagggtcacctatggtaatagagaagtgggcaatggttgtgagcttaaaccttcccaagttgccaaccaacccagagtgagtgttggtggagatgacctcaggaacttctacactatggtcctggtggatcctga

SEQ ID NO: 2949 - DNA, 256 bp, Glycine max
  Clone ID: 700998742H1
caggaagccacagcaattggaaaaacatttgcatctatgaaagactatcaattggatgggaacagagaaatgatggcattaggaacaatgaatgttgttggttccatgacttcgtgttatgtagcaacaggttctttctctcggtctgcggtaaattacatggcaggctgccaaactgcagtctctaatattgtgatgtcagtggttgtgttcttaaccctgaaattcatcactcctcttttctactacactccaa

SEQ ID NO: 2950 - DNA, 197 bp, Glycine max
  unsure at all n locations
  Clone ID: 700998743H1
tnggacggtgggctantcgcggtgcatggtggcgctggtgtcgaccctaatctcccactcgagcgccaagaanaagcgaaacaacttctcacgcgctgtctcaatcttggaatctctgctctaaattctaatcttcccgncatanatgtcgtcgaacttgtggtgagggaattggaaacggatccgctgttcaattc

SEQ ID NO: 2951 - DNA, 257 bp, Glycine max
  unsure at all n locations
  Clone ID: 700998744H1
cgatggcgttcttcaatcgaaaagctcctagaaagtggtcgtcccttccttcgcggngatctggngtccatcgacaagaacttacctcggctggttggcgtcctgcagagtgtgggtgccggggagtgctggcacaaacacggcagcttccttcaccacctcgtcgacatntttcgcattctcaagctctggaaagcccctcactctgtctgcctctgtggcctcttccacacancatnncccccgccctgacgtta

SEQ ID NO: 2952 - DNA, 254 bp, Glycine max
  unsure at all n locations
  Clone ID: 700998745H1
ttggcgctgcaggttcggagagtggttcagtgcggtgtgtggtgcaggaagaaggagatacacccgcaattccacgaggaagcgaaggtgtactgcaacggggagctggtgctgacgacaggtgggacccagaaggagtacgtggtcgacgtgtggtcggggaaccaccctttctacctcggaagccggtcggcgtctatggtcagcgacgaccaggtcgagaattccgcaagangttcggagagctaaaagag

SEQ ID NO: 2953 - DNA, 257 bp, Glycine max
  unsure at all n locations
  Clone ID: 700998746H1
atcaaggnntgtgaaagcagagaagtgagatacactaagttatcctcataaatacactctncattaggtggntngataagtgtctaaccttagtaacattgccacatattgtgttcattttggaattgtgccactnnaattctattcaattcatctatggcngcctcttcttatgctatgcaatcaatcctggcaaaccctttgatccgcatttccagcgggtctagggtgaaccaatttggcgttcctgctttgca

SEQ ID NO: 2954 - DNA, 256 bp, Glycine max
  unsure at all n locations
  Clone ID: 700998748H1
cattcctcttgcctatgctctttttacccaacaaggaaacaacgacgttgggtaccaaaacctctttgatgctatgttggattcaatatatgctgctttggagaaagtgggagcgtccaatttgcagatagtggtttctgagagtgggtggccatctgaaggtggagctggagcctcaattgatantgcnggcnntantatgctaatttgatcgtcatgcctcgagtgggnatggaactccaaagaggctggtgag

SEQ ID NO: 2955 - DNA, 267 bp, Glycine max
  Clone ID: 700998750H1
caagattgttgctgtagaagagaagaaagagattgaagagacccagcagaccgacaaggacagatggaagggtcttgcctatgatatctcagacgaccaacaggacatcacaagaggaaagggtttggttgactcccttttccaagctccacaggatgctggaactcactatgctgtcatgagctcctacgagtaccttagcactggacttcgccagtacttggacaacaacatggatggattttacattgctccagcttttatgga

SEQ ID NO: 2956 - DNA, 264 bp, Glycine max
  Clone ID: 700998751H1
ttgagtgcttttggttgcatcaagcttagaagttttccaaccatcaagttttccaaaaatatcagaaaagatggaaaatgtaagggaacttcatttgcagtacactcccataagcatgtctgtctagttgtggagttgttcagttaccaagtagcactgtcatgttaccagaactgactgatattatagcttttggatggaaagggtagcaatggctaaaacaggaagatggtgaagaaaaagcgggttcaatagtatcttcaa

SEQ ID NO: 2957 - DNA, 270 bp, Glycine max
  unsure at all n locations
  Clone ID: 700998752H1
ggttgctcagcttgtgagaagagctgaaagggctggattcaaagccattgcccttactgttgataccccaatactaggacgcagagaagcngatatcaagaacagattcacattgccgccatttttgacattgaagaactttgaaggattggaccttggaaagatggacaaagctgatgactctggacttgcttcatatgtttctggtcaaattgatcgtactttaagctggaaggatgtgaagtggcttcaaacaatcaccaaactgcc

SEQ ID NO: 2958 - DNA, 87 bp, Glycine max
  Clone ID: 700998753H1
gtacctatgtaagctgtctactgagacttgtggcatgccttgatcgtaaaatagtgcaccctcaccttcccacaactgtttggtacc

SEQ ID NO: 2959 - DNA, 262 bp, Glycine max
  unsure at all n locations
  Clone ID: 700998754H1
gaggcttttgctgagcttaaggtgaaggaactcaagaacggacgattggccatgttctctatgtttggcttctttgttcaggccattgtcaccggaaagggtccattggagaacctcgccgatcaccttgctgaccctgtcaacaacaacgcctgggcctatgccaccaacttcgtccccggaaagtgagcgtcaaagaacgaaatgacttttgagagtttttagatttgngtttggtgaagtacttcagataatctgaatt

SEQ ID NO: 2960 - DNA, 260 bp, Glycine max
  Clone ID: 700998755H1
ctagaactcaacctggcttcagcaaaggatctcaaagacttgaatatattctcaaagatggatgtatatgctgtgctttcactctccggcgatcaaaagaccaagactcccgtccacagaaacggcggcaccaacccaacatggaattttccggtcaagttcacttttgatgaatcggtggcgcggcagaaccgtttggccctcgaaatcaagatccgctccgagcgcgcctcgccaccgataaggacatcggccaggtc

SEQ ID NO: 2961 - DNA, 259 bp, Glycine max
  unsure at all n locations
  Clone ID: 700998756H1
attcaactacagtgtctattttgacacccaagattgcaagtggcagttatggggcatagacagttccataacacatcttcattgcntcgagggtgagcctgaccagaactggaatcatatgcatactgatcaacaatgtgtgcaccttggtaggactagcacttcagagaatggttcatttatttatcctgctgaaaatatgtccatagataacatgtctttcccttctcatggaattcttccacaaggtcaancntac

SEQ ID NO: 2962 - DNA, 258 bp, Glycine max
  unsure at all n locations
  Clone ID: 700998757H1
ccgctcgagggctcgagcagtgatcgattctgcgaactgcgattcgcatcgccaattcaaaagcgttcgttcntcggagatggagacgctaccgacgacgacgacaaagcgaggaggagcgagatcgaagcccgttcagaccttcgaaatcgtctctcgttatggccttcttctcctgcgtcgcgtggctctacgtcgccggaaggttatggcaagacgcagagaatcgcaatttactcgctagtcttctgaaaaaga

SEQ ID NO: 2963 - DNA, 255 bp, Glycine max
  Clone ID: 700998758H1
gaagtacagaaagcgtgaaagatgatttgaatggtcttgataaggctgtcagtgctgtcctaggagaaagaaccattgagcgcaacctcttgttggttaaggttgcaaaaagcaaactggcaaatcgtcatgatgataaaaatgaaaaactcaccaaacctgaagagcttgttcgcttatatgatctcttgctacagaatacagctgatctatctgatttagtcaattctggaagggataaaaagccagaagaag

SEQ ID NO: 2964 - DNA, 257 bp, Glycine max
  unsure at all n locations
  Clone ID: 700998759H1
gaaaaaatattcatggnaaaagaaaagtgaatcgcacaaagacattacaaaatgaagactttaatctcttattcttctctctaacgcttganaattctatcaaagcaaatcagaggaaaagctcgagggatctcaggaaattgctagagatgtcattatcactgtcagaatacacacgtaagcctgcttngaggagggagaggccctgacggattctttgaagtgtaggccttagagatgattaaatgaatgactat

SEQ ID NO: 2965 - DNA, 237 bp, Glycine max
  unsure at all n locations
  Clone ID: 700998760H1
ggggtcatgtctttcggtgggttaagtattgctttaagtcttgtatntgggtgtcttctgctggctctgtgtgctcagctttactacttcttatggtggaagaagagaaggacacagatggatattgagatggatgcaaaangggtgttttattgggggtgctggaaggccaccccttgtgccatgatgcatggtggcaacaacactggaagagggggtgtgaatagcagggacata

SEQ ID NO: 2966 - DNA, 256 bp, Glycine max
  unsure at all n locations
  Clone ID: 700998761H1
ccgattaccgtgccaggnttcggttgattaatcaggacaagaacaaatataacactccgaaataccgatttgttgttcgctttagcaacaaggacattgttgcacaaataatatctgcnagcattgctggcgatattgttcttgctgcagcatatgcacatgagctgccacgatatggtcttgaagtagggcttacaaattatgctgcagcttattgcactggtctcctgttggcccgaagagtccccaaaacact

SEQ ID NO: 2967 - DNA, 258 bp, Glycine max
  unsure at all n locations
  Clone ID: 700998762H1
ataagtaggaattagccttgcttgtctngatccttgtagctctgctncctcacccctcaagggcttgctgatgaatctgattcttactataagccaccagtttacaagaaaccaccagtgtacaagcccaagcccaagccacccattcacaagcccaagccacccgtttacaagcccaagccacccgtttacaagaaacccccttatggtaagtacccaccagttcaagacaacgatcacttctaaaccatgcaacaa

SEQ ID NO: 2968 - DNA, 258 bp, Glycine max
  unsure at all n locations
  Clone ID: 700998763H1
actcgttcttcttcttttgttgttctgtgtntgtgtttgtnttttctctcacctgaaaatgtcttgctgcggtggtaactgtggttgcggaagctcctgcaagtgcggcaacggctgcggaggctgcaagatgtacccagacttgagctacactgagtcaaccaccaccgagaccttggtcatgggagtggcacctgttaaggctcaatttgagggtgctgaaatgggtgtgcccgctgagaacgatggctgcaaatg

SEQ ID NO: 2969 - DNA, 258 bp, Glycine max
  unsure at all n locations
  Clone ID: 700998764H1
caaaaataacccaaactctcttttaaaaaaaaacccgaacacatagaaacagagatngtgtgantatcgccgccgtagccctaccctctcttcatattattctattgcctttctttaactccctcactttttcagttttgaagcgcttccagtggcgtatttacggttatacccttcttgttatgatagcttccaatcggcgtcagccanagagccgaagctctggcnttcanacatcntncnnntcncgtcgatgag

SEQ ID NO: 2970 - DNA, 266 bp, Glycine max
  unsure at all n locations
  Clone ID: 700998765H1
cttttttgcggtaaaggaggtgtctttgctggatgaaggtggccanggaaaacagagcttttttcaacttcagcaggaaatatctcttttgagtaagtttgagcataaaaacatagttcgatattatggctcaaacaaggacaaaagtaaattatatatattccttgagcttatgtcaaaagggtcattggcaagtctctatcaaaagtatcggttaaacgattctcaagtttctgcatacacaaggcagattttatgtggcttga

SEQ ID NO: 2971 - DNA, 178 bp, Glycine max
  unsure at all n locations
  Clone ID: 700998767H1
gctctctcttccctcatatggatgaccaggtcctcgagagagcgctccaagancgtggcaatgacctagatgctgccatcaagagcctccacggcctctgtttgggatctgctgatgataattctcaaattgctccacaacctganctcccnaatgtcgtccacacaggcacgttggc

SEQ ID NO: 2972 - DNA, 262 bp, Glycine max
  unsure at all n locations
  Clone ID: 700998768H1
aaaaactgaggctgaactctgcaaatcctgttgcagatgctgngagcattgtatcaaaggctattcgtgatggtgcaattgatgctacattggatcatgccaatggttggatggtgnccaaagaaactggagatatttactccacaaatgagccacncccagccttcaattctcggattgctttctgtcttaacatgcacaatgaggcggttcgagctcttcgttttccaccatacacacacaaagagaaggaaagtgctga

SEQ ID NO: 2973 - DNA, 261 bp, Glycine max
  unsure at all n locations
  Clone ID: 700998770H1
gggttgtgaaagcagagaagtgagatacactaagttatcctcataaatacactctaattaggtggcaagataagtgtctaaccttagtaacattgccacatattgtgttcattttggaattgtgccactaaaattctattcaattcatctanggcngcctcttcttatgctatgcaatcaatcctggcaaaccctttgatccgcatttccagcgggtctagggtgnaccattttggcgttcctgctttgcacatgagaagg

SEQ ID NO: 2974 - DNA, 262 bp, Glycine max
  unsure at all n locations
  Clone ID: 700998771H1
ggtgaactcncaagccacagctgntgagaaantggagcagataacagcttctctgggaacatcatcatcctgntggcatcccatcatcagaagcctcagacaggatcaaagctggtttcattcacttcaagaaggagaaatatgacaagaatccagctttgtatggtgaacttgccaaaggccagagccccaagtttatggtgtttgcttgctcagactcaagggtgtgccnatctcatgtgctagatttccaaccaggaga

SEQ ID NO: 2975 - DNA, 258 bp, Glycine max
  unsure at all n locations
  Clone ID: 700998772H1
gtcctatcacacccacgtaccagtatacattccaagatacacctttagctggctggtgcaacccatgtggtgggtcataaaatttctgcatagagcagctgatcttacactggtgccatcagctgccattgcaaaanatcttgaagaagctagagtaacagcagcgaacaagatttgtctttggaacaagggtgttgattctgaaagtttccatccgcgattcaagtcccatganatgcgattaagactgagcnatgg

SEQ ID NO: 2976 - DNA, 253 bp, Glycine max
  Clone ID: 700998774H1
gtggacatggttactcctttgtgttcccaattaacatatgaggggctacttgacgagtttctgcacatcaacaatggttctgtagagcttgatgcatctattatgggtcttcagcaagaagggaagaaaactaaagttccacttaattcaagtgacaagctttttaaggagatacgagatctcaactttgaagttgttgtccagattttgcgccaaaaagctacttccatgaagcaagactacacagaaatga

SEQ ID NO: 2977 - DNA, 254 bp, Glycine max
  unsure at all n locations
  Clone ID: 700998775H1
caaaaccctgaagaanncacacagccattgtttgtttactttccattgattgagcgaaanctttgttttttctgcgatcattttccattgggtggaagaaantctcaacctttagtcgaaagagcaaggatctgagtgagtgagcgatcatgtgtggtggtgcgattatctccgacttcattccagcgggtcccgccggcggggcgcaggcgtgaccgccgacatcctgtggccgaatttgaggaagcggttct

SEQ ID NO: 2978 - DNA, 256 bp, Glycine max
  unsure at all n locations
  Clone ID: 700998776H1
attgaagttgaagtcttgcccttctctcttcaactccaaacacaaganatcaacgatccatggctnnntccgtctccactgtcggagctgtcaacagagctcttttgaacctgaatgggtnggggacctggggtttcagctcccagttcatccttctttgggagcagcttgaagaaggttattggctcaagggtccccaacacaaagatttnntctggaagcttcaagattgttgctgtaggcgagaagaaagaga

SEQ ID NO: 2979 - DNA, 253 bp, Glycine max
  Clone ID: 700998777H1
agtcagatgaggttctggtgaagtcatctttcctggctgaattacagcgccgggtacttaaggcagaagcttccctgagagagaaagaagaggaaaatgacattcttcaccaacgccttcaacagtatgagaacagatggtctgaatatgaattaaagatgaaatccatggaagaagtatggcagaaacaaatgaggtctctacagtctagcctctctattgcaaagaagagccttgctatggatgattctga

SEQ ID NO: 2980 - DNA, 257 bp, Glycine max
  unsure at all n locations
  Clone ID: 700998779H1
gaaaatggaaaccgttttgtngaaatgatgaggaaagacctaccacaggttgtcataccaagaacctaccataaatatacatcaaggagggttcttacgacagaatggattgatggagagaagctgtcacagagcacagaaagtgatgttgnagaattggttaatgttggagtcatctgctatctaaaacagcttctagatactggattttntcatgctgatccacacccgggaaatttncatccgcactcctgatg

SEQ ID NO: 2981 - DNA, 254 bp, Glycine max
  unsure at all n locations
  Clone ID: 700998780H1
tcctgtggctgcacatatccaaccttaacttcggccgtcgaatctttctggtcattggttgtntttaattctttcaaaaattcaaacacaacccaaaatctcttgggaattgctagattcactgcttctcctagcagcagattttgggttcttctgacccaattattcattttcccaacttggtcttggtcgaatttttattggggttgtaaattccttgttgttgagnttggaagtattccnttttccccttc

SEQ ID NO: 2982 - DNA, 266 bp, Glycine max
  Clone ID: 700998781H1
aagaactcgacgttggattattaggcttaaaaacgcttttgccttctccaaaattctcttacgccaacgaggctcacggtctttggattctcaaaggttacgcgccagtcatgaccatgaaactggcgcgaaccaacacagttcaaaaaactcaattctctggcatcgatgccaaggagtcgattctccgttactcactcgcgcaccaccaacttgaggcacacgtgcagctagactacaccgttgggttttacgatggtttcatt

SEQ ID NO: 2983 - DNA, 263 bp, Glycine max
  unsure at all n locations
  Clone ID: 700998782H1
ctactatcttgcattggtatgctgctgtgttctgctgctgctgaaccccaccgtgggggagcaggacgagcagaacttggtgctccagtaccacaaaggcgcgctcctcaaggggaggatcaccgttaacctganntggtacggcagcttcaccccaatccaacgctccacaatcgttgacttcataaagtcgttaagctcctccccgggggccccacttccctcggtggcatggtggtggaagacgacggagaagtacaatg

SEQ ID NO: 2984 - DNA, 262 bp, Glycine max
  unsure at all n locations
  Clone ID: 700998784H1
gggaacctggtgaaagtctttctgattgtgataaagatgaagaggaatgtcaagaggaatgtacaaagtctgatgaagaaagtgaagatgggttctttgtaccagatggatatctttctgaggatgagggtgcacaagtggacagaatggaaatagatgatgacattgacggggctgatagctcccctagctgtaagaatgacatagagagcgaggnattttgtgctttacntcggcagcagaaatatctaaataatttgac

SEQ ID NO: 2985 - DNA, 190 bp, Glycine max
  unsure at all n locations
  Clone ID: 700998785H1
acnagacccttacccttctctatcgctcgctttcctttgacgcttctgacccttgctttgtctgcgtcnnnnnnnnnnnnnnnnnnnnnnnnnnnnnnnncgtaatggctctcccagactcttcttcccgtcgcaactccctgatcccctccttcatctactcctcttcctccaaaacgctccctcccca

SEQ ID NO: 2986 - DNA, 259 bp, Glycine max
  unsure at all n locations
  Clone ID: 700998786H1
gactattnccgatggtgcagtggtantatngggaaatatgctgcaggagaantcaagcntccatcaaccgcntcttnnccgtggttctgggaagnatcctcaanttgtgccttcaactccaagatnggctnttgcnaatggtgctggtgttatattaagtgtttgtgatgatgaagttgctcgcaatgagactgctactttaacannanctgctgtncctgcgcttttcgcttncncnananannanattatngnncna

SEQ ID NO: 2987 - DNA, 257 bp, Glycine max
  unsure at all n locations
  Clone ID: 700998787H1
ggaaagcagaagagttacttactactatggaagagaggggtgttgtccctgaaatgtcgactatgcaactggtggctgatgcttggcgtgccattggtttattcaaagaagccaacagaattcttaatggttcagaagaagaatctgagctagatcaagaatttgatagtgacaagatacaagtgcaaagcttggagagtatttataaganacagaaactcagtgcttctccctctaatctgcttcaaatacctgac

SEQ ID NO: 2988 - DNA, 238 bp, Glycine max
  unsure at all n locations
  Clone ID: 700998788H1
gtgggagtccaaggatgataggaagnggggacatgataagtntgaggaaattacttaancaggaaaggnactataaagagggaaggagaccttctaagggtaattttcgaggccgtggtggtaaaacacgaggngttgaccacagtggaagatatgttagaggtagccggaaagggtatgataacagaggcaatcaaactcacagcaccaaagagtgttgtgcgagggagangagacc

SEQ ID NO: 2989 - DNA, 252 bp, Glycine max
  unsure at all n locations
  Clone ID: 700998790H1
ttgaattttgattctagcaagcagagcttttgtcaattttctattgaccttctcggtggaggaattttagtggncaaaactggagattggatcacacttatacaaaattctccaattagtaacttgttgagagttgctgcttggaagaaaggctgtttaatggttaaaattgngatgtctgggaatgcagcagtcaaaaggagtgattgggcctcattggtacaagtgtttttaacnaacagcaacagtaca

SEQ ID NO: 2990 - DNA, 251 bp, Glycine max
  unsure at all n locations
  Clone ID: 700998791H1
atccanctaatcctggacnatcanccccttcacctgtgnagccancanatgtctgtgacaactactacagctgtgctgatagtnctacttgtcgctgtattnncgagttcggaaatgcttgctttgagtggggttgctgtcctcttgagggtgctacctgctgtgatgaccactacagtngctgccctaangactatcccatctgcaacacttatgctggaattgtctcaagngnaatnacaacccattcg

SEQ ID NO: 2991 - DNA, 253 bp, Glycine max
  Clone ID: 700998792H1
aagcaaggcatgatttcaaatgcagcaggtcgggtgcaaccaattaaacctaacaatgcccatcaaaattctgcctcagtggcatcaaccagttctgctgttggggtgtattcctcttcaacagatccagttcatgtgccctctcctgattctagatcatcgggtgttgttggagccattaggcgtgaagttggggttgttggtgttcggcgacagtcttcagacaacaaagcaaaacaatcatttgctccta

SEQ ID NO: 2992 - DNA, 253 bp, Glycine max
  Clone ID: 700998793H1
ggttcctgttttggaaacgcccgatggtccagtctttgagagcaatgcaatcgctcgttacgttgctcgactaaagggtgacaacgctttgttctcatcttctgccattgataatgcccacattgaccagtggattgatttttcatccttggagatcgatgctaatctcatgaaattgctcctaccaagacttggatttgccccataccttcctccagttgaggagggtgcaaattctgcgttgaagagagca

SEQ ID NO: 2993 - DNA, 256 bp, Glycine max
  unsure at all n locations
  Clone ID: 700998794H1
cttgccttccacactctgtgcgactnncccaagacattgctacagtcgctactttattgtatacactcttggcacaccatgtctggaaccaaggtcttttcgctggagggcaagggcctcaagctcaccaccgctgaggacatcgagccgcacattcaggatctcaagagcaatgatcaggtagaggagatcaagttcctaggcaatacgctcggtattggagccatgaggctcttgccaaggttctggaaggaaa

SEQ ID NO: 2994 - DNA, 254 bp, Glycine max
  unsure at all n locations
  Clone ID: 700998795H1
aaaggggttagggtttgttcttgtgatcgaagctaagcgaagaaaatgggtggatcagtgagggacgtgaagtcgaagggcgaggtcgacgaggtggtggcgagtngctctncggttatcctccacttctgggcgtcgtggtgcgaactttccaagcacatggaccaactcttctctcacctttccactgatttccccaacgcccgcttcttaagggtcgaggccgaagagcaacccgagatttctgaggctta

SEQ ID NO: 2995 - DNA, 259 bp, Glycine max
  unsure at all n locations
  Clone ID: 700998796H1
ggaggatgctgttggataatgtggtccaaggacttcctctacaaaatacagctcggagagctagtgnaggattttactgctttctcattatctctgcctgtaaggttcaattattgcttttgttcaaaaaataaattggaatagcagcgtgtgactttttctttattctttgaatatatgaagcattttgtatgagaagtaatgaccatgcatgaggcatattccgaagaaacctaaattgntgctggatagcttattt

SEQ ID NO: 2996 - DNA, 274 bp, Glycine max
  unsure at all n locations
  Clone ID: 700998801H1
tcaatccctcatctcattgctgagatctgcaagctggctatggactacgaaccctacgacagtagcggaactgatgatgaccttccaccaacccatcaaanngagaatttccaggggaggaggaggacgtctcgctgggaatgggagatctgctgttggttcaattccttacccaaggatgtatggtgaaattgatatggagacccaaattcatcagcttgagcaagaagcatacagttcagttctaagagcctttaaagctcaagccgatgcc

SEQ ID NO: 2997 - DNA, 266 bp, Glycine max
  unsure at all n locations
  Clone ID: 700998802H1
cttcacttnacaaacagncanncgtttcagctccatngtnttctcaaganggaccntaaaacagtcatgggtaccattattangaacatnnnctcnactctnngtgcttgtggcgacctaaacaggaatgtncttgctcctncanctccccttgcaaganaagattacctctttnctcaacaaactgctgagaacattgctgcnctcctcgctcctcagtctggtttctactatgatatttgggtggatggggnnaagattttgcc

SEQ ID NO: 2998 - DNA, 269 bp, Glycine max
  unsure at all n locations
  Clone ID: 700998804H1
gtgtatttccctacctctcccttcaagatgcagatcttcgtcaagaccctcaccggcaagaccatcacccttgaggtggaaagctctgacaccatcgacaacgtcaaggccaagatccaggacaaggaaggaatccccccggaccagcaacgtctcattttcgccggaaagcaatttgaggangggcggaaccctttggnngantaaaatttcanaagggagagtantttnaactngtcctcgtctccgngggnggnntnnaanntttt

SEQ ID NO: 2999 - DNA, 266 bp, Glycine max
  unsure at all n locations
  Clone ID: 700998805H1
aacaatgaggactaccgttctccagcaattccagctatgaccaaaacactgcttgaggncntcaagaagattttcaagaccataactggaatcccatttctcatccctacaactggtactggtgcttgggagagtgctctcacaaacacactgctctcctggggatcnaattgtatctttcctgattggccaattcagcttgctttggattgatcagcagcaacgcctgaaattcaatgttgatgttgtagagagtgaatggggcc

SEQ ID NO: 3000 - DNA, 265 bp, Glycine max
  unsure at all n locations
  Clone ID: 700998806H1
tttgtngtntgcttgtncagtaccctggcactgagggagaggttttggactatggagagtttgtgaagaangctcatgctcatgaggtgaaggttgttatggcaagtgatttgttggcactgactgtgttgaagcctcctggggantttggggcagatattgttgttggctcggctcagagnttcggggtgcccaanggggtatgnngggcnccntgcagcttcctnggccattaccaanntnncanaaggnnnnngcncggnnc

SEQ ID NO: 3001 - DNA, 269 bp, Glycine max
  unsure at all n locations
  Clone ID: 700998807H1
gtgcagtgctgcagggactgtcactganctcaaaaatgaactgtcttcggaatctttctccgattctctgttttgcccttcgaaacacctgttacgcgccaccgcaagaaccttcccctttccctgggtttcgtcaacaattctcgtcaatatccaactatggccctcaaggctgcctcaggttctataccaagtgcagatacaagtagtgccgataaggaggaagaaaagtctgagacatatagtcataacatgacagangccatggg

SEQ ID NO: 3002 - DNA, 55 bp, Glycine max
  unsure at all n locations
  Clone ID: 700998810H1
ctcaattctcaaattattatanttgncactatatctgtaccnnagggnnttccat

SEQ ID NO: 3003 - DNA, 269 bp, Glycine max
  unsure at all n locations
  Clone ID: 700998812H1
aaaggttttcatccaatttctttccctctcttttcattggtgtgcactttcacttgtggagctgcatcaactgcagtggaaattgtgctttgttcttgagatgtctggngttcttctttgggtgagttgtggacccaaagagaacatcaactccttggtgagtttttcatgcaggagtagtagtggtggtgaaagaacacaaaagagatttnctggatcagttttgctagtggtattccgcttttccagtgcagtggcagctactgaga

SEQ ID NO: 3004 - DNA, 276 bp, Glycine max
  unsure at all n locations
  Clone ID: 700998813H1
cagagctctgacagattggacactagtgctggtcagtctggtgctccttttaccatgattacacaggatgttttacagaatggtccccagtggattgagagttctcaaagggaatcgagcagaagcatgcactatgatcaaccctctgggcttaatgatgttcaaaatcatgacttgtacaggccagtacacagtagatccatgggcaatatgtcaaccgagttcccagcctgcacatctgggcgtcagnaccngggntatttggtggatcncccc

SEQ ID NO: 3005 - DNA, 150 bp, Glycine max
  unsure at all n locations
  Clone ID: 700998815H1
tttagctgaaaganatggacattcttttattgttgccatggaagagagggaggggcaacgagcacgtgtgtgctgcatagccttacattctattttnncatgattcanngtcatggtgttnnnaanaaannncnggccccccccnnnnnt

SEQ ID NO: 3006 - DNA, 155 bp, Glycine max
  unsure at all n locations
  Clone ID: 700998816H1
ggaaaaaggcaaaaggagatttgtttctggggatggtgaagagatgacattgattccgggaaccagtgttgaagaggcttacaataagctaatagttgaattgagaaagtgtctaatggtnnatgcnncnnaggattcnnnnnattncaccccaa

SEQ ID NO: 3007 - DNA, 270 bp, Glycine max
  unsure at all n locations
  Clone ID: 700998817H1
ccgcagacttgatcangaagggaaagatgtgtgctctcttcatcaacgatcttgatgcaggagctggtcgtcttggtggaaccacccaatacactgtcaacaaccagatggtgaatgccaccctcatgaacattgctgataaccccaccaatgtgcagcttcctggtatgtataacaaggaagagaatccccgtgtgcccatcatcgtcaccggtaacgatttctccacactctatgcgcctctcatccgtgatgggcgtatggagaagt

SEQ ID NO: 3008 - DNA, 261 bp, Glycine max
  unsure at all n locations
  Clone ID: 700998818H1
gttgtgcntattgtttttggttggatttgatttgagttatttgtcaaaatncgtataactcataataagcatggcaagcactatgcaactaagttgggttagtaaganccacggtccccgtggctttgagtagaagagtgtgttgtcaatgtcaaccacccctgtggctgccatggcgaattgggtttgttactcccgttccccttgtgaggagagtttcgagtganagggtggcggcactcagggttagttgcagcaagg

SEQ ID NO: 3009 - DNA, 260 bp, Glycine max
  unsure at all n locations
  Clone ID: 700998819H1
aaggcggcttcggaatcacaggctacgatgcggttgcccatatgattgaagagatcccaaatgcgtcagtcgaaggacccaagattatgatctactgtgtcatgatcggcactgtgaccgggtttctctttctcatgattctcttttcgtctcaggtggcgatnnggagncattnantnggggggtnaggccccccnaancnaanncctcaaaatgnnaaaaancggggggcnnanttttnttccccantttttcccctt

SEQ ID NO: 3010 - DNA, 250 bp, Glycine max
  unsure at all n locations
  Clone ID: 700998820H1
atggatgnnattgtgaagnctgctgagctggcagcagaagctgtatctcaagcaggaaaaattgtaactatgggtgatcctttgccaataagtcagttcgtagaagtggccagagggtgttgacanaacccgagagtntctcagcaagttggatattcaaagacattaccagagtatggtgaacattatgtgagantatcctgaaacttcttatacacataaccnggacnnctatccggtggctttctgt

SEQ ID NO: 3011 - DNA, 265 bp, Glycine max
  unsure at all n locations
  Clone ID: 700998821H1
gcagaacagcttccacaccaacacttcagntattcttctcgttcttcattttttatgaatataaatagtataattcattgatagataagttgtgagatgcaaatataagttgagtgtcatatcgatggtatcacagtatgtatcacggttaaaagaaatacagaaatacatatcgatggaacatatacttctcatattcggcagcaataggacaacacacgcaagaaccgggcaaagagcatattttcaagtttaaggattgtag

SEQ ID NO: 3012 - DNA, 225 bp, Glycine max
  unsure at all n locations
  Clone ID: 700998822H1
aaaacatcaaccgaagggtncatttctcccaatccgctagncttctgctttctgtcttccaggnatattttgaactcccagtgcgtgaaggatacgatgaacatcatgtctacccaccagtgtagttggcctgtnananttcaggatcatctganaanggantataagngggctctttnccnagaggnnngnatcccnangggggnnnnccanaaaaaaaanngg

SEQ ID NO: 3013 - DNA, 270 bp, Glycine max
  unsure at all n locations
  Clone ID: 700998824H1
gtgcccaatatcctcaaggttgatgtatgatcctgttatcattgattcaggagtaacatatganagaatgtggataaaaaagtggtttgatgagggtaatgacatatgtcccaaaaccagaaagaaactagtccatatgggattaactccaaacacggccatgaaagactaatatcaaagtggtgcagaaataatggagtctccattccagaccctagtaggctgcagaagatatttgtgcatgggaagcttcaaacacttccattagca

SEQ ID NO: 3014 - DNA, 265 bp, Glycine max
  unsure at all n locations
  Clone ID: 700998825H1
tttagttgaggaggtggatgggcatacagcagttctttatcaccgacttcagctagactggttcccaatgtttgtgtggcctcntgatctttgttatgtgcgatactggcgccgaaatgatgatggaagtnatgttgttttatttcgctctagggaacatgcaaactgtggtccacagccagtctgtgttcgggcacatatngaangnggaggttnaaataccccccnaaannacnngggggggnccnccangcntntttttttt

SEQ ID NO: 3015 - DNA, 272 bp, Glycine max
  unsure at all n locations
  Clone ID: 700998827H1
agcgtgtagttcttggatttttattctggcaggcaaagcaaccagctcgggttctntcagtcctaaaaagtgtgtatataaattcttccaatgtggatgactatcttgnggaatctataacaaggccagctcaagatccaaatgccggagaagtctactacaggttnacgacgcgcttcatgatgaatcagagcaagtacactcaaatggcnggctaagngaacnccnaggccggttgnncctgtgggggggtccccccnccngggggtncc

SEQ ID NO: 3016 - DNA, 283 bp, Glycine max
  unsure at all n locations
  Clone ID: 700998829H1
caggtttgnaagatgantcggnaccaaaagaggaagattgatgagacacatgtagagggacatgaggagcttgatgctgccagtttgcgagaacatgaggaatttaccanagtgaaaaatatagctactattgagntngnaganntgngntttccgnaaatggnatttctncccattcccancagaatagaatgaacgtttgaagtgtantcttgtgagttttggcctcaattcaaggaangnagnnagntttnannagggttttnaggaatgggatctttag

SEQ ID NO: 3017 - DNA, 171 bp, Glycine max
  unsure at all n locations
  Clone ID: 700998830H1
gaaaatatntgntgatttgcatgggcaatttggagatctnatgngcctactttgaagagtatggnngcaccatccaantgctggtgacnatagcatatangngannatntattcctgggagnttatnttaaanggggcaanaacangnctgggaaacnatttagccttcgg

SEQ ID NO: 3018 - DNA, 279 bp, Glycine max
  unsure at all n locations
  Clone ID: 700998832H1
caataaggttttcaagccgtttccactggaaaaggccatctttgaatagaaccttattgttcttgcaaaggaaaatgtggccaagatgagcaacaatccagcattgcaagtgaaaaacangtccntattttgtaaaancanttcgtctgtgncaangaaaacagcntgcatgtttggttatttcattttagtcattcctaatattcactcaggcagtntatggggaccngcggntttantttggnaaanaattggccccccnngnnaanngnggggnnt

SEQ ID NO: 3019 - DNA, 270 bp, Glycine max
  unsure at all n locations
  Clone ID: 700998833H1
tctggtgttggtgttgacagtgttggngaagaagcttgtgaactcaaaagatggacctccaacctttgagcagcccaagatgactctggagaagctctcgctgtatggtaacatgcttgtccaagaacaagagaatgtcaagagagtccaattggctgacaagtacttgaacgaggctgctcttggaaatgctaacgaggatgctattcagaggggaactttcttccagtcttgaattggaggcaaagcaaacttggcaagtaaatattt

SEQ ID NO: 3020 - DNA, 260 bp, Glycine max
  unsure at all n locations
  Clone ID: 700998836H1
tatcatcgcaccctagaagctggaactctgttgactcttgcgataccgtgctttacacaactaaacctttcagctatcaaccccacttccaccgcanacctctaccgaccacttttcaccccaaagtttttctccaacaccagcagaatgagcgaacaaaagcaagggngtacacaactcagtggagggcggtttanaaangggcncaagggganaggcccgttncangcgccgggnntntttnccaaaggggggggctt

SEQ ID NO: 3021 - DNA, 269 bp, Glycine max
  unsure at all n locations
  Clone ID: 700998837H1
tatcatcgcaccctagaagctggaactctgttgactcttgcgataccgtgctttacacaacttaacctttccagctatnaancccanttccacagnaaacatntaannannnanttttcancccaaagtttttctccaacaccagnagaatgnngngaanaaaagcaaggcgtacacaatctccagtngacggcngantacaangaaggcgctagagggacaagganacgttcatcgtcctggatgttttngnnacatggtgcggacct

SEQ ID NO: 3022 - DNA, 131 bp, Glycine max
  unsure at all n locations
  Clone ID: 700998838H1
gttctnagcngcaagaagccccacgtgaacatcggcatgnntcggccacgtggaccacggcaagaccaccctgaccgccgccctnacatggccttgngntnggaaaangccnagatnagatgngnncgaag

SEQ ID NO: 3023 - DNA, 68 bp, Glycine max
  unsure at all n locations
  Clone ID: 700998839H1
tcagtctccagntnctgannagaaaaggnaaattagagttagattattaaggtttaancgttnntcgg

SEQ ID NO: 3024 - DNA, 270 bp, Glycine max
  unsure at all n locations
  Clone ID: 700998842H1
tctatattttggtgctctgtntctctacgatctggatccaacggtccaaaatgttcggggcttgtgctgcttgttttcccaggttttagagctccaaaccttcagatccacctcattcgtctccagatcttccttccttgataacgttttcgggttcgagaaggcacttgtntgtttgtcgtacgaaatggagactaaaccgagttcggtgatggttacgctcagttacggcgcgtngaaggtgcgccgcgnaangttctngngantttc

SEQ ID NO: 3025 - DNA, 137 bp, Glycine max
  unsure at all n locations
  Clone ID: 700998847H1
aacaagataaatgtcaggattaaaattntttccggatcaccttgtggagcagtggctgcagaagccaaaaaaacacaagccaattgggtcgtattagacaancngccccaagnntnanncnnnngnccnccccnccc

SEQ ID NO: 3026 - DNA, 215 bp, Glycine max
  unsure at all n locations
  Clone ID: 700998848H1
caacagcaaggtttccggtggaagctgtcaacagagctcttttgaacctgaatggttctggagctggagcttcagctcccagttcagccttctttgggaccagcttgaagaaggttattgnctcaagggtccnccaacagcaggtttccggnngnccctncnaganngnnctccnaaccccnaacccgncnnnngannngagnagggggnncncc

SEQ ID NO: 3027 - DNA, 268 bp, Glycine max
  unsure at all n locations
  Clone ID: 700998849H1
catcatgatgagtgctggagagttggaaagtggaaatgcaggagagccagcaaaactgatncaggcagagataccgtgaagctgcagacatgatcaagaagggaaagatgtgcgctctcttcatcaacgatcttgatgcaggagctggtcgtcttggtggaaccacacaatacactgtgaacaaccagatggtgaatgccactctcatgaacattgctgataaccccaccaatgtgcagcttccaggnatgtacaacaaggaagagaa

SEQ ID NO: 3028 - DNA, 258 bp, Glycine max
  unsure at all n locations
  Clone ID: 700998850H1
tcttccttgtcactgcccgtgtgtcgccgccatggccaccgtcaccanccaagcctccgccgcaattttccggccatgtacctcgaaatcgaggtttttgaccggctcttccggtaaacttaaccgggaagtgactatgcggccaatggggtgccctccttctgcctctttcaaggttgaagccaagaagggagagtggttacctggctnggcctccccaacttacctcaatggcatcttcctggtgacaatggattt

SEQ ID NO: 3029 - DNA, 261 bp, Glycine max
  unsure at all n locations
  Clone ID: 700998852H1
ctgcnatgcatgtgggagctatagaaattatgntngatagtttcgnaagtgcctgacngnaacatagtnggtgcaatgcttntggttgatacttatcatacnaatcntgnnaatgcagttcgtagtatttttgttgcgcctttcagaggcggaaggccnattcgggtggttacatttccgaatagnatcgtgcaggattgaaccaganatgaattnaaggtttcagcttttgagtagcagtagnaaggtggattttgttna

SEQ ID NO: 3030 - DNA, 154 bp, Glycine max
  unsure at all n locations
  Clone ID: 700998856H1
tcacgancacgacaccaaatattctcnctgcgtcgtctnngtctgcgccctaaccanattcaatctcaaactcttnctcatcaanatccaaggctcgttcntgaaaccctaattcgatntaccnccncntcagnagcngagngancnatgtggg

SEQ ID NO: 3031 - DNA, 274 bp, Glycine max
  unsure at all n locations
  Clone ID: 700998857H1
ctgagcatgatggacatctgtctcctcttaaagaatcatcttatgncatcaaacatggagagttctaatggtcattctttggngcctgcggccttgaaaacaaatgagaatagaganaagttgtatcattgctgtgatggaaccctgttaagtagtaatttcaaaaatgaaaatatgccaaatcaaatgccatttcacagtctgggcctcagctcagcnagtaggncccccnntttgaaatggaaagggggggnccaggtnanntccanggntt

SEQ ID NO: 3032 - DNA, 268 bp, Glycine max
  unsure at all n locations
  Clone ID: 700998858H1
attaacctttctcattccccatctcctcaccttattcagccactgctaatttctagggttccgaaatggacgctggcggaaagatcaagaagggcgccggaggaagaaagggcggcggccctaagaagaagccggtttcaaggtcgtcaaggcngtctccnaatnccccgtcggaannnttggcngttatntgnagaancgaaggtacgccnancgtgtcggnaccggtgntcccggttacttggccgcattctcgagtacctagngg

SEQ ID NO: 3033 - DNA, 264 bp, Glycine max
  unsure at all n locations
  Clone ID: 700998865H1
ttnnatctcagaattntcnanaagagatctttttctgntctntgaagaaagangggtctttgcttgattttngagatgtctctgntctcagatctcatcaaccttaacctctccgataccaccgagaaggtgatcgcagagtacatatggatcggtggatcaggaatggacctnaggngcaaagcaaggactctcccaggaccagttagngacccttcagagcttcccaagtggaatatgatggttccagcacaggtcaanctc

SEQ ID NO: 3034 - DNA, 258 bp, Glycine max
  unsure at all n locations
  Clone ID: 700998866H1
ggnatacgagcaagctattgaagaactcctttgccatatcctctctcacagttggggtgatgatgggggcaggggcagcaaagacaggcctgtcttgaatgagagaanggannnnnnnnnnnnnnnnnnnnnnnnnnnnnnnnnnnntgctaacggttgcnaagacagaagggcctaatgtggccttcttgagagaggttttggctggggagatggaagagaggcaccacccgttaatggaagangtcgacttgtgcc

SEQ ID NO: 3035 - DNA, 258 bp, Glycine max
  unsure at all n locations
  Clone ID: 700998869H1
ctgggttatgcttatgtctggcacagaacaggtgaccatgggaggnttaggactcaatttgactccaattactacatttgctatcattactgtgattgctaacgtgctaatatggtggttttggaatgcactcaactgggtgtggcngagacccaagaggatagagaggcgtctcaaggagcagggtatccaaggaaattcctaccgccctttgattggagacatcagagatatggttaagatgattaaggaagccaa

SEQ ID NO: 3036 - DNA, 268 bp, Glycine max
  unsure at all n locations
  Clone ID: 700998871H1
atgacgtccatggccactttcntcgcccaaacctccttcccctcccactctctctnccaaaanccttcgataccnatttcgcccctgccccgaaagtcaacgtctttgtgaacttcagggcgnggaggcacgttggggtgcgagtttcnaacgcgctgatcgaaccagatggagggaagctncgtggagttgtggtgacggattttgagagggatttgaagaagggtgaggctctttcgttgccgaggatcaaagccctcaagnntng

SEQ ID NO: 3037 - DNA, 268 bp, Glycine max
  unsure at all n locations
  Clone ID: 700998872H1
cgncatggaggccttgaaagagnaaaatggccacnntgatggaggccatgatgagcataaaggagataatggaggtcaatggcggcttaccgcacccgtgctaganctagagtaatgggtgaagtagaggaggtgcaagancagatgaaggccgacatgaaggccatgaaaganaaaatcgccacaatggtggaggccatgatgagcatgaagaagataatggnagccaatatggttgcnnttgccgctaccagcgctgttgctaagg

SEQ ID NO: 3038 - DNA, 268 bp, Glycine max
  unsure at all n locations
  Clone ID: 700998873H1
aggagatggccagactttacttccaacaactcatctctncctgtggacttctgccacagccgcggcgtctaccaccgtgacctcaagccagagaaccttctcctcgacgacgacggcaacctcaaggtcaccgacttcggcctcagcactttctccgancacctccggcacgacggcctnnnagcacactacgtgcggcacgccggcctatgtcgcgcccaagntnttnggnaaaaggttnnggggnnaagggntnttttttttttgg

SEQ ID NO: 3039 - DNA, 265 bp, Glycine max
  unsure at all n locations
  Clone ID: 700998874H1
ccttgagttaaaaaatggcagcagcttcttccatggctctctcatccccatccttggctggcaaggccgtgaagctgggcccattcagccccagaagtgggaagggtgagcatgaggaagaccgtcaccaagcaggtctcctcaggaagcccatggtacggcccagaccgagtcaagtacttgggcccattctctggcgagcccccgtcctacctaaccggtgagttcccaggcgatacggcgggncctgntgggcnnncnnacc

SEQ ID NO: 3040 - DNA, 264 bp, Glycine max
  unsure at all n locations
  Clone ID: 700998875H1
ctctctgttactggaagttcaacacttttgatgcacncaagtttcctatgatttctaaccagttgttcacggccagtggacataaatatgacaccaccaagancttaacccctgagtatgtccttaatgttgatgcatacaacaagtacagcaagttataccttagccctctgtttgcattatctattggatcaggttttgcaagatttacggcaaccctcactcagnggcccntttnagggnaannttnngnnnnnnnnnnnc

SEQ ID NO: 3041 - DNA, 180 bp, Glycine max
  unsure at all n locations
  Clone ID: 700998876H1
ctaaatcagttcacgatttcacagttaaagatgccaggggaaataatgttaatctcgccgattacaaaggaaaggtcctctcattgtcaatgttgcctcaatgggttgctatcaataacggttacatgaggatcaagaagtgattgactnacgtggnaggagnagggtgggntncccanc

SEQ ID NO: 3042 - DNA, 185 bp, Glycine max
  unsure at all n locations
  Clone ID: 700998878H1
ccaccccaaaccttcaaaataacacatctttctccaaactctttcacaagcccatatccctnccgcacatgtaaaggtgtctatgttatccttggcttcgtccatattcaaatcataanntngnnnacggaaaanccccgggggcttnntnggnaactttnnagggtnnnggncnaaaantggtc

SEQ ID NO: 3043 - DNA, 73 bp, Glycine max
  unsure at all n locations
  Clone ID: 700998879H1
gcnaatgcanaccgttttgcagnaatgatnaggaaagacctaccacaggttgtcataccangannctaccata

SEQ ID NO: 3044 - DNA, 86 bp, Glycine max
  unsure at all n locations
  Clone ID: 700998880H1
gccttggtgaccntttggtcacgggttcaaattcggaaacaacttctttgcatattncnaggaaatcaggagttgtncaatggcaa

SEQ ID NO: 3045 - DNA, 84 bp, Glycine max
  unsure at all n locations
  Clone ID: 700998881H1
gcattacatctaccatagttttgctgtttgataactttttttgtccaatataattaanataaaattgtaacaattcaattttaa

SEQ ID NO: 3046 - DNA, 259 bp, Glycine max
  unsure at all n locations
  Clone ID: 700998882H1
atttgaatggcacagttattgtctccagtgtacacagagcctctcnccatcgaatttaagttccataagctcatggaggntactaccaaagactgcaactccntcgaactttgtaacacacaatggcaaacgaagagggtgtggcagggtaagagttgctgctgaggaaaaatcattttctacgagtgacactgttgcagatgactactatgcagttttgggtctgcttccagatgccactccagcgcagatcaagaag

SEQ ID NO: 3047 - DNA, 55 bp, Glycine max
  unsure at all n locations
  Clone ID: 700998883H1
gaaaaanggccgtnttganataagaacgncctgttcctnangaacttctggatat

SEQ ID NO: 3048 - DNA, 258 bp, Glycine max
  unsure at all n locations
  Clone ID: 700998885H1
attaaacagaaacaaaaagtggcattgagaagaacagaacatcatcaacacaaacacaacaaaaacacccaaagaggaataccacaacggaacttcctcgttttggcctttaccctcttttttctctccttgcttttacccttaaacaacggagcgagtgtttttcctctatcgatctggtttcgttggatttggattgantctgatatgnggtgtcccnnngggattccggggggccatantgcccnaanaagacgg

SEQ ID NO: 3049 - DNA, 259 bp, Glycine max
  Clone ID: 700998886H1
aaatatcagaactcttccctggagtaggttcaccttgatgcatttgtgtgttgttgctgtttgctgggtcaagttatgcatccctttcctgatgaccaatgaagattagctcggcctaaccacacggaaccatgcaaaactcttatgctcatggctgtatactgcaggctcgcggttacagctccattgtgacatgcggatagtaactgtgtctcttcgctgggctaaaataatgccacagttggattttttgtttcac

SEQ ID NO: 3050 - DNA, 267 bp, Glycine max
  Clone ID: 700998888H1
aacttctaattttcttctatcctgaataggtaaatgtttgttgcttaattcattttgactttctacttctttttatcctcctcctccaagtactagttcaaaagttgatccacagcgagtaactaactaagtaactaacctggcttaaaaaagacggagaggccaaaatctgtggccttgaggggggaatcatcgttcttgttgagcaacaagaaattctcgggcttcaagtccctatgcatgactcccatggagtggcagttatgg

SEQ ID NO: 3051 - DNA, 267 bp, Glycine max
  unsure at all n locations
  Clone ID: 700998890H1
ctgagcatgatggacatctgtctcctcttaaagaatcatcttatgcatcaaacatggagagttctaatggtcattctttggngcctgcggccttgaaaacaaatgagaatagagaaaagttgtatcattgctgtgatggaaccctgttaagtagtaatttcaaaaatgaaaatatgccaaatcaaatgccatttcacagtctgggctcagctcagcaagtaggtcatcagtttgaaaatgaaaatgaaggtcatagtgaagtccngg

SEQ ID NO: 3052 - DNA, 264 bp, Glycine max
  unsure at all n locations
  Clone ID: 700998891H1
gggaaactgactttcccccagggcacttcccgaagtgttaagagaatgcctctttctatagggggaggagctggtgcaaagaatgctattctcatgaatatgccaaatgctgttctttcaatgtggagatattttgttggagatctcgtctttgaagtttctncgatgacttctccctacattaaatgtacagtctctttcttcatagcatttggaaattggctgatgacaccatcattttgaggctttccccacaagctggtg

SEQ ID NO: 3053 - DNA, 271 bp, Glycine max
  unsure at all n locations
  Clone ID: 700998892H1
caattctgtctaatttagcccctttatgtatatctacnncttttgattgggtcattgatgatagtttaaatagtgacttgcttccgtatttaaatttcagaagccatggacttcagagtttggtgtgagaatgaatgtgcgaggctcattgggacaaaagatacaagtttccttgagttttgcttgaagcagacaagatctgaagcagagatatttctcacagnaaacctgggnntatatgaccatgatcatgaattcattgataaattcc

SEQ ID NO: 3054 - DNA, 269 bp, Glycine max
  unsure at all n locations
  Clone ID: 700998893H1
aattgaagttgaagtcttgcccttctctcttcaactccaaacacaagacatcatcanggcatggctgcctccgtctccactgtcggagctgtcaacagagctcttttgaacctgaatgggtctggacctggggtttcagctcccagttcatccttctttgggagcagttgaagaaggttatngggctcangggtccccaanaaaaattttcctgggganntnaagnttttgtgtaaaaaaaaagaantttnaggccccncgncgaaang

SEQ ID NO: 3055 - DNA, 160 bp, Glycine max
  unsure at all n locations
  Clone ID: 700998894H1
gcacagtctctcaatgaatctcaagtgcctgattctcttctaaaaagattggngacaaatgcaacagaatttccccctgtttgtngctattatagggggaatccttggacaggaggttatnaaatttngggggcccccaaanntntttttttnnngtnnt

SEQ ID NO: 3056 - DNA, 175 bp, Glycine max
  unsure at all n locations
  Clone ID: 700998896H1
ccccatccttggctggngatgagagagcatggaagaagtgtgccatggtntctcatcccatcttggtggcaaantgtgnagtgggncatcagcccagaatgggaagggggcatgagganncntcccaggagttcnaggnntttggggnnnncgnntaattnggnntttggggccc

SEQ ID NO: 3057 - DNA, 269 bp, Glycine max
  unsure at all n locations
  Clone ID: 700998902H1
ctatatagcataaacatttgantcttcattgcacaatgtcaacctcttccataaacgggtggtgcctctcttccatctccccagccaaaacctctctcaggaaggccacattacgcccttccgtcttcgcaacccttaacactccttcttctccttcctcttcatcttccttcccctctctcattcaagacaggcctgtttttgctgcccctgcncccatcatcaccccaactgtgagagaggatatggcaaaggaatacgagaaagct

SEQ ID NO: 3058 - DNA, 268 bp, Glycine max
  unsure at all n locations
  Clone ID: 700998903H1
ctcaaaggggcctgtnggacggcgggaagggggaggaaggggcggtgtttgaagttggcagggtgtgggaggtgctggagatactactcgagaccgagacgctgctcatcacgaccctcttcccccagcctccctcgtcactcctcgcctcgaccctctcatcgtccctctcgctcgccacttccccctttgcgggcatcgtcagcaacatcaaacgcgccgtatcgtcccgcgccttcctctccctgggattgtaccgcttcctcgt

SEQ ID NO: 3059 - DNA, 268 bp, Glycine max
  unsure at all n locations
  Clone ID: 700998904H1
cctggatgttcaattcccaattgagcaactgtttggacatcatcattgtttctatgccctggtagtggtagaagctttagctttggggagatgttgagggctctctctttacatcccccttctagtaaaatcatttttctngtncattcttttttctaaataggtgggcaaatgccaaactcntattgtnaaatncatagttaaataacgagaattttaagaagcctgtgcagaaggantccccttcattatttgcaatgggggnatt

SEQ ID NO: 3060 - DNA, 267 bp, Glycine max
  unsure at all n locations
  Clone ID: 700998905H1
cnaagagttgctgagagggctcttgatcttcccttatattcaagttttaagaatgattcgtatttgagaagctcttagtacaattttttttatcccttagcttcttgtcgaataaaaccctggtgttaattgttgtaagtgcaaaatccagttattcaactcgaaagcagttcgcatattataccctatgattctaatcatgccaatgcaatgtgatttggaacatgcataaagaaatactgaaaaaaaataagagtcattgtttgc

SEQ ID NO: 3061 - DNA, 266 bp, Glycine max
  unsure at all n locations
  Clone ID: 700998906H1
ccgccggctcctacttgttccagagccgcatcctcaacaccttctggggctccttcgactccatgaactgcaaaaacgacacgagtttagcttccaccatcatcaccatagcnaagggtaaacgactcttgaacttcggagctaaaagcctctgcgttggagaagggtctaatgtaattgtctccgcaatgcaaggttgggattctccagtgttattggtctccacaagcacccttttttctccctcaacaaaaagaaaatcgcgt

SEQ ID NO: 3062 - DNA, 267 bp, Glycine max
  unsure at all n locations
  Clone ID: 700998907H1
ccaaagttccaaattttttggnttggggatagatagagtgatacgcgtcacattttcataataataaaaaaatggcagcngcggcggcantgacggtgctactcccacctaggattccgaccaccaccaacgttacccgctgctctgctttgccttctctccctcctcgcgtctccaacancaaaaccactttgttctcaccttccctcaacaacttttcagtgtcccgaaaatcttctctgcttcagaccagagcttcttcagagg

SEQ ID NO: 3063 - DNA, 263 bp, Glycine max
  unsure at all n locations
  Clone ID: 700998908H1
gaagattccgcaacanagagtaganaagatggcgcggttgatcacagtggtgtggtgcgcggtggcggtgctactgtgcgccgcggcgggcgcgtcgtgggtggaggaggcggcgaacccgatacgaatggtggcgggggtggaggcggaggtngttcgggtgatagggcagtgccgaccncgcgctgaagttgctaggttcatgagcaggttcgggaagagttaccgaagcgaggaagagatgagggnnaggtacgagatat

SEQ ID NO: 3064 - DNA, 265 bp, Glycine max
  unsure at all n locations
  Clone ID: 700998909H1
cagcactgtacaagtataagaacactgttattgatgttaaacttgacaccgcatcaactatctccacaaccctcacatttaatgacgttcttccatccaccaagactatngcttcatttaagctgcctgattataattctggcaagttagaggttcaatacttccatgaccatgctaccttaacaacagctgttgcactgaagcaatcccctgtcattgatgtttctgccacagttggtaccccaaccattgctttgggtgctgg

SEQ ID NO: 3065 - DNA, 261 bp, Glycine max
  unsure at all n locations
  Clone ID: 700998910H1
tgcgccaaagacganaganggtcgctccatgacagccagctctagtgcccaggaggcnctcgaagcataggtgagagcgcttctccatccagagatagaaaggttttttctacatcatcaaccccanagagtccagtattggcctctgaaacggacagaaagctcacacaagcttgcttgcttactgtaagtaatggttatagagagttagtatttattaaattgatggaagcatcaaaaggttgcagagaaaaagagaga

SEQ ID NO: 3066 - DNA, 260 bp, Glycine max
  unsure at all n locations
  Clone ID: 700998911H1
cgngatgcagaaacatagcttgccaaaaccaacttcctgctgaagattgtacctgtnagacatgcactaatggcaatggtttctgcaatctttgcatgtgtgtnatctgcagccagtttgactttgaagtaaatacatgccgctggattggatgtgcnttgtgttctcattggactcacacagactgtgccatacgtgagcnacttatttgtatgggcccttctgcaaagaatggagcagggccaagtgaaatngttttc

SEQ ID NO: 3067 - DNA, 260 bp, Glycine max
  unsure at all n locations
  Clone ID: 700998912H1
tctcttcaggaaatgtatggagccggtggagaaatgtttganggatgctaagatggacaaaagaagtgttgatgatgttgtccacgntggtggttctaccagaattcccaaggttcaacaactgctgcaggacttctttaatgnaaaagagctttgcaagagcattaatcccgatgaggctgttgcatatggtgcggctgttcaggctgcaatcttaagtggtgagggcaatgagaaggttcaggatcttctcctcctgg

SEQ ID NO: 3068 - DNA, 252 bp, Glycine max
  unsure at all n locations
  Clone ID: 700998913H1
tttaaganaaagtgattttcntttttttcattacaattacaaggctgaattaccgattccaatttccacatattattaganccctccatggantgggagatgaggcccggcggcatgttcgttcagagacgcgaggcagcggnggataannnnnnnnnnnnnnnnnnnaacatgacgacganggtgttgatcactgtcgtcnangcttcctcccactangacctccacntccctaccaactccactttntgg

SEQ ID NO: 3069 - DNA, 263 bp, Glycine max
  unsure at all n locations
  Clone ID: 700998914H1
agaaagaggattgagctttgagccaganactatggcttttacttcttcatgttctcttgcttcctcagtttctccctcccatatatcattctgcaatcccttttcacncaacgaactncagtnatttgtcattccccgctgttccgactccaagacaacaaccactgttgttttcttcaacctcaacttgcttagcagcagcggcggcgtcaaactcaaacagcacttcgaattccaataacaacaaccctgcttcagcttca

SEQ ID NO: 3070 - DNA, 265 bp, Glycine max
  unsure at all n locations
  Clone ID: 700998915H1
aattttcaaagcaacaagaacctaagttccagtaaccatgtagctgcagaaaatcccagccttcctcagccaggcattcggcagcaacaggacaacttctttcgcagtcaaggaatcactatggaaggnaacttctatgaagangccaacatgcccaacaatcatcacatgtttgccaganaggnaagtcattnnnncggttcatagctttgaatgcnccaccctttganagcaatcacaacaataacttccatttgatgtttgg

SEQ ID NO: 3071 - DNA, 265 bp, Glycine max
  unsure at all n locations
  Clone ID: 700998916H1
aaaatcacacctttggnttgtngtccttggtcagccttcaccataaggcaagtngtacttttttnatgttttctttccttttatgtctaattttatcacaatacgtgctcttttcctatangatttccctganaaacaaatcgcacctttgggttgttgtcgctggccatcctccaccataaganaatcgtggattganagaataggaaaaagtttcaaaagaatttttggtaggctgtaaagattgatgtcaacgaatattcta

SEQ ID NO: 3072 - DNA, 268 bp, Glycine max
  unsure at all n locations
  Clone ID: 700998917H1
cagaattgtgttagaatgatcgaggctggggcagttacagctcttgttggtgctttggnaaatgaaggagttgcagaagaagcagcaggtgcgctggccttgatcgttcggcagccaattggggccaaagcagtggtgaatgaggaatcagcagtggctggactaattgggatgatgcgttgtggaacaccgagagtaaagagaatgtcgttgcagcgttgcttgagttgtgccggagtggaggcncantgcaacagaaagagttgtg

SEQ ID NO: 3073 - DNA, 269 bp, Glycine max
  unsure at all n locations
  Clone ID: 700998918H1
acaatctctcttgaatatgtgggagagattgctggtaatcctgtaattgctcctcatcttcacaagttccatggtataataaatngaatcgaacccagatatatgggacccatataatgataaattcattcccgtatcatactcttcagaaaatgttgttgaaggaaaaagagcttcgaaggaaaccttgcaacaaggcttagtttaaaaaaagctgatcttcctttagtgggaattattactcgattgactcatcagaaaggaatcca

SEQ ID NO: 3074 - DNA, 269 bp, Glycine max
  unsure at all n locations
  Clone ID: 700998919H1
ctttgatttctctctcctcgactcgatcccaattccactagggantcaatttncgatgcgattccgagcttgttagatccacgacaaggtttcgtttcccagattcttttgtaaanaaaaattcttcctctgcccaacaggtaagtcgtaaaaaaatggaccatgacaagactgggtgccaagctcctcctgaaggtcctatattgtgcatcaacaactgtgggttttttggaagtgcagctaccatgaacatgtgttctaaatgccac

SEQ ID NO: 3075 - DNA, 269 bp, Glycine max
  unsure at all n locations
  Clone ID: 700998920H1
cacaacaacactctctcttctcgctcttggcttttcgctcttcactcactctcattcattcatttccacagaacatanaacagntaaagcgtgtggggtaacacgcccttggcgancggtggatcccgagntccatgacctcatcgagaaggagaagcgccgtcaatgccgcggaatcgagctcatcgcctccgagaactccacctccttcgccgtcatcgaggccctcggcagcgctctcacgaacaaatactccgagggcatgccgg

SEQ ID NO: 3076 - DNA, 267 bp, Glycine max
  unsure at all n locations
  Clone ID: 700998921H1
ccgaaagggttaggctattgaattttaaataattacagataaaataatcgatagccttgattttaaaaattaatcataatcatcggttaggttgcaacataatacttaattcgcttaattttttaactgcgcctcagagtattcataacatattctattaaattaataagcnggtgatgtaattaatattaatagtagttttggcaatcttattggcagaagatgctaggtggagttcatcaatattctggcaggtataatatcttc

SEQ ID NO: 3077 - DNA, 266 bp, Glycine max
  unsure at all n locations
  Clone ID: 700998922H1
cctggatgttcaattcccaattgagcaactgtttggacatcatcattgtttctatgccctggtagtggtagaagctttagctttggggagatgntgagggctctctctttacatcccccttctagtaaaatcatttttctttattttcttttttctaaataggtgggcaaatgccaaactcttattgttaaattcatagttaaataacgagaattttaagaagcctgtgcagaaggaatccccttcattatttgcaatgggggtat

SEQ ID NO: 3078 - DNA, 267 bp, Glycine max
  unsure at all n locations
  Clone ID: 700998923H1
ctnttctgcgagcnaggatatgagnngnagacagtngcatganattgcagagcaagtnctgccaaggttggcaaataagtccaatctccctgaggttttgaggcacatcatgtctttcctttcggatggtgattcttccaaattacccatgacaacaaacttttctgggaaggaacaaattaaaganaacaatggagtagctgggcccagccaggaagcaacttggatgaaatctatttattcagaaaagccacctctgttagaaag

SEQ ID NO: 3079 - DNA, 266 bp, Glycine max
  unsure at all n locations
  Clone ID: 700998924H1
cttagatctgaatttcctactcaagtcaatttattaactgagtanctaaagatccagaacgattacagggcactaaacatagatcactggagaaatttttatcggttttttaaggaggtaanccttattgatcttcgaagttatgactccagtcaggcatggccagtgatcctcgacaattttgttgattggttaaaagaaaaagaagagaaaatatagttctcatatttctcaagtttaagttcaattttaatctgctgctgact

SEQ ID NO: 3080 - DNA, 260 bp, Glycine max
  unsure at all n locations
  Clone ID: 700998925H1
cntaattccaagattttnagaatgtctagctgtgggtgtggaagtngctgcaactgtngcagcaactgcggttgcaacaagtactcttttgacttgagctatgttgagaagacaaccacagagactcttgttttgggtgttgggtctgtgaaggcccaattggaggntgctgaaatgggtnnngcagctgagaacggtggctgcaactgtggatcaagctgcacctgcgacccatgcaactgcaagtnaggtcaagattt

SEQ ID NO: 3081 - DNA, 260 bp, Glycine max
  unsure at all n locations
  Clone ID: 700998926H1
ttcnctcnccctcactnccactctttnttaatacaccacnttcnccaaccctcttncattctccttctccaantccaacccctgcttcccttttttcattttctcactccccatcttctgagagtgatgggtgtttgctaccgctgttcccacacctcccacatcnngancatcancatcaccagcttttccgccacaagccttanangatatactattcccaccctnnntntttcttcaacaacaaccgttgacttcac

SEQ ID NO: 3082 - DNA, 263 bp, Glycine max
  unsure at all n locations
  Clone ID: 700998928H1
gctttaggcaagactcatcttgncgaaatcattcatgtnaacttgtttccattccccaaatgatcctaacttatatgcagagtggaattanccaggaatggaaacaagttcacatgaatgatttcgtcaagatgactgatggctttaggcaagagttggagttaccagaatcaaagccaagagtgcagacttatgaaaccttctacaagcaagatgcacgataagccacttgaaccttgatgtttgcagtttgtaaaaattct

SEQ ID NO: 3083 - DNA, 260 bp, Glycine max
  unsure at all n locations
  Clone ID: 700998929H1
ttgaagttttcaaggaattttatcaaacaaaaactaagcacaggaaacttacttggatttattccttgggaacctgcaacattagtgggaaattcgatccaaaaactgttgagctgattgtnaacaacttatcaggcttcggcatngcttctatttaattcctcagatagactgagtcattcggagataatgactcagttaaacttatctgatgacgatgttattagactgctccactccttgtcatgtgccaagtacaa

SEQ ID NO: 3084 - DNA, 262 bp, Glycine max
  unsure at all n locations
  Clone ID: 700998930H1
cngtcaactccagtttctggagatgataattttncaaaatgctacgtatgtagtttggaagtcagtgaattgagncataggaactgtgacnatcttgattgtaatttgctttttctatgncgcggacaatgtgcagaggatctaagaggttgttgttgtttgacgtgcactactgctcctcggcttagacctgttttaaatggaatgcagagatacaaaaaatggcactactatcgggatatggattttcaagggaaaatga

SEQ ID NO: 3085 - DNA, 266 bp, Glycine max
  unsure at all n locations
  Clone ID: 700998931H1
ccgctttcttcacacccctccangatttcactcaagccagaacaaccccatcaccccctttgcctttcatcaaatcctcctttgcttcctccaagtcaaccttttttcaccctgccctttccctacaaacctcttccaactttcccaggctttttggaaagcctaagtttttctctgttcatgcaagggctgccacagaaaaaaccatttatgattttactgtcaaggatattgacagaaaggatgtttctcttagcaagtttaag

SEQ ID NO: 3086 - DNA, 269 bp, Glycine max
  unsure at all n locations
  Clone ID: 700998932H1
cnctgagagaactactgcactcctttcccaacttggccatgaccacagatttgtccaactcaactgctttacacacagcngcaactngtnagtcatattgatgtggttaagctccttctggaatcagattctaaccttgctaaaatagccaggaataatggtaaaactgtccttcactctgcggctagaatggggcatttggaagttnngaaagccttactaaacaaggatccaagcactggatttaggactgataagaaaggtcaaac

SEQ ID NO: 3087 - DNA, 270 bp, Glycine max
  unsure at all n locations
  Clone ID: 700998933H1
anaaactcacccactccaagttactcactcaaccacaaccaccatgttctgatattcccccaaccacacttttcacacaccaatcaaacnaatgcaaatgcaaagcatgtcaaccaccatggcttcgttttctcctccgacccatttctcagccactccttcttcctcgaaaccccgtcttgtctacaagaacaactttttcttctctctcaggtcgaggagtctttctctctctcccttgaaggctgctgcttctgagaacggcgtcgt

SEQ ID NO: 3088 - DNA, 156 bp, Glycine max
  unsure at all n locations
  Clone ID: 700998936H1
caaaaccatccaactctcatntnccgaagaaaacatacacaatctcttcaaactctaattttcttatcctttcatttaatttccncaatggcggcttccctcgaccagcgtccgnaccccggcctccacacaacatacgaagntnannanananca

SEQ ID NO: 3089 - DNA, 258 bp, Glycine max
  unsure at all n locations
  Clone ID: 700998937H1
ggntgcttataacatactacncatattttataanacanaactggncctaacttatcatccaaaactgnctacatanccagtatattnccanttatanatataatcnntattnagggngcccaatcccatctnagtaactaaagtgatcattaggctgtttcatttaatatgattaacagactcattnggnaccggtttctaattcaactttctcctgtatgttttcntcttanggtttaataacacttgantgcgtga

SEQ ID NO: 3090 - DNA, 265 bp, Glycine max
  unsure at all n locations
  Clone ID: 700998938H1
ctgggtggggtgtggctctactgttttctcttaccataatcatnaatggcttccttatccctctcctctcccccatctctctcttccgcacaccacaacgcttcgacncgccttattctangcacccctaantccnttaaactgcgcantncaccccantccctccacgcnatcngcncnatcaccctcagccaggangacctcaagagactcgccgccganaangccgtggagtccgtcaagagcggcatggtcctcggcntgg

SEQ ID NO: 3091 - DNA, 264 bp, Glycine max
  unsure at all n locations
  Clone ID: 700998939H1
cttcgcttgnaccnccaggcanacgtttcagctccatggtgttctcnagaaggaccttaaaacngtcatgggtaccattattaggaacatgggctcgactcttggtgcttgtcgcgacctaaacaggaatgtgcttgctcctgcagctccccttgcaaganaagattacctctttgctcaacaaactgctgagaacattgctgcgctcctcgctcctcagtctggtttctactatgatatttgggtggatggggaaaagatttt

SEQ ID NO: 3092 - DNA, 260 bp, Glycine max
  unsure at all n locations
  Clone ID: 700998941H1
caacatcagtagctctttttctcatagaaacanagaggttaaganatctattagagatgtttatgagaagaaaatagggtgccctataagtattagtgagtnggcttttctaactgctacaaatgcaataatgagtatgatttggggtgagactttgcaaggggaagaaggggctgctattncggctaatttagagcatttgtgtcagaacttatggtgttagtagggaagccgaatgtttcggatctttaccccgcact

SEQ ID NO: 3093 - DNA, 256 bp, Glycine max
  unsure at all n locations
  Clone ID: 700998942H1
gcaattgaagttaaaagccttagccttccctacaactccaaacangaagacatannaatccatggctgcctccgtctccactgtcggagcngtcaacagancncttttgaacctgaatggttctggagctggagcttcagctcccagttcagccttctttgggaccagcttgaagaaggttattgctcaagggtccccaacagcaaggtttccggtggaagcttcaagattgttgctgtagaagagaagaaagaga

SEQ ID NO: 3094 - DNA, 259 bp, Glycine max
  unsure at all n locations
  Clone ID: 700998943H1
actccctaccgaagaacaaacaagtncctcntacatgcaacacaaacacnaacaatnancacnaaancaatttcaatttcagtatatttngactcccacncannnnnacanagnacctncccctatcnctgtnccgtttcggancgtgccatgggcgcgtcgctgtcttcgaacggntccagtatcggcccgggcatcggggacataccggagagctgcgtggcgtgcgtgtncctccacctgacaccgcngncaatct

SEQ ID NO: 3095 - DNA, 261 bp, Glycine max
  unsure at all n locations
  Clone ID: 700998946H1
cnggaagggtagtttccatcagagctcaagtcaccactgaggctccagccaaggttgaaaaagagtccaagaanncaggatgaaggtgtggttgtnaacaagttcaaacccaagacccctcacgttggtagatgcctgctcaacacaaagatcactggggatgatgctccaggagaaacttggcacatggtcttcagcaccgagggagagattccttacagagaaggacaatcaattggggtaattcctgatggtgttgac

SEQ ID NO: 3096 - DNA, 262 bp, Glycine max
  unsure at all n locations
  Clone ID: 700998947H1
cncgtgtactttcttgcgaaacagaagggcgaaggggcanacacaacttttttgtttttttgtagagcgagacaganaaaaatgttggggatcttcagcagttccgtggtgtcgccgccggangagctggtggctgccggcagcagancnccgtcgccgaagacgacggcggggaagctgctgaaccggtcgtggagaacaaggcgtcggcggtgtcgctgcaggtgggagaacacgtgcagttggcttacacgcaccacaa

SEQ ID NO: 3097 - DNA, 266 bp, Glycine max
  unsure at all n locations
  Clone ID: 700998951H1
tctatcncttgtttcaatttcaacaacggtnacctccnttttcgttttgantttcaatcaagccatcatcatgtctancgcatcgcaacccaaggccaagaaaacggcgtcgtccaagaagcccctctcccaccctcccttcgccgtgatgatagcagaggcgattgcnagtctgaaaganagaaccggttcagccaatacgcgataaccaaatacatcgaagggaagcacaaggngttgcctgcnacctacaagaagcttgtcct

SEQ ID NO: 3098 - DNA, 263 bp, Glycine max
  unsure at all n locations
  Clone ID: 700998953H1
cggcggcaacagggagagaagatgaagttcaatccacgtgtgtcgagcagccgccgcaaganccgaaaggctcatttcacggcgccgtcgagcgtgcggcgggtgcttatgagcgcccctccntcngcggagtgcggtccaagtacaacgtgaggtcgatcccagtacggaaggaggacgaggtgcaggtggtgcgaggaacatacaaggntcgcgaggggaaggtgactcaggtctaccgtcgaaagtgggtgattcacatt

SEQ ID NO: 3099 - DNA, 265 bp, Glycine max
  unsure at all n locations
  Clone ID: 700998954H1
cgaatacataattgctaggcatctctgaaatcaggcaagtnaaaaccaaaaataaaatggtctcacagacagttgaactcttaaagaatganattcctctggagcaggaatcagtggttttagctgaagatgctgtaaatggtctcgttcttgtggacatcataaatggcttttgcacagttggtgctgganatctggctccaagagaatccaatacgcagatttcgggaatgatcagtgaatcagcaaggctggctagngtgtt

SEQ ID NO: 3100 - DNA, 266 bp, Glycine max
  unsure at all n locations
  Clone ID: 700998955H1
cntccaaacaaagtccggtcggacttggataccaaggatggcaatgaaagggcaaatctggttctngcatcacgcagacnagaatgggctgcaaaagatacttgaccccaagggatgttgcagagggtactttaaattttgaatcttgcatttgttgcacaattgtntcatcataggagtggtctatctacagacactaaaaagatgtcctatgctgagatgatgacggatgatgtacaaacatctagagnngngagatgcttcca

SEQ ID NO: 3101 - DNA, 258 bp, Glycine max
  unsure at all n locations
  Clone ID: 700998957H1
aactcgccactgtatttgtaagtggcacattttgagagaaggtcaagaaagattggctcatatttaccttgctcatccttcattctatgggganctatacagctgtatcaatttttctgagactaccgaggattttgaatcancatggaagtctcttctggatanntatgatcttcagannnatgagtggcttcaagcngtgtataatgctcgcnaanaatgggcccctntttactttcatgatactntctttgctgc

SEQ ID NO: 3102 - DNA, 261 bp, Glycine max
  unsure at all n locations
  Clone ID: 700998962H1
ccctttctncttnttnagcnatccctctcttgaaaaatctagataccgttcttccttgatctacgttacgcttttagtgaccggatctgtatggatctgaaccagatctacacgccgatggtggttttggcctggtctttcatagatctgatgcatggaggctcagatctactgtacagaggtgtgcgattcatgttcgtctctcttttggaatctgtttcgtagaaagtcgtttggtcttccatgtcgcatggctcttga

SEQ ID NO: 3103 - DNA, 264 bp, Glycine max
  unsure at all n locations
  Clone ID: 700998965H1
tcgagtttgacacgcccggcctcaccatgggtttctctttccagggtctgactaccantgcncctggtcaagggcgctgtccctgacnagcatgctaccgagaaggatgttgcagatggtcctgntgctgccgatggctcccgtcttcctgatgagaagaatatcggcgctcctaggacaccgtcctccattcgagtgacgcagcgtccgacgaggagatcaacagggtcgacaccaatgncgagcagggtgtccaggctatcc

SEQ ID NO: 3104 - DNA, 261 bp, Glycine max
  Clone ID: 700998966H1
tactctcaaaaacttccgtcaaatttctccggtcgttcagaatcacctcaagcaggtttattttactctgtgtttcgccgtggttgctgcggctgttggggcttaccttcatgtcctcttgaacattgggggttttcttactacagtggcatgcgtgggaagcagtgtttggttactctcgacacctcttttgaagagaggaaaagagtgactttgttgatggccgcatcactgtttcagggtgcctctattggacccttg

SEQ ID NO: 3105 - DNA, 265 bp, Glycine max
  unsure at all n locations
  Clone ID: 700998967H1
ctcaaganaaccattgatggcactccctcactccatctctgccttanccaccacactcacactctcctcgccaacaaccaaaccccagaaagttaacccctntccctttttctcgaaccaaaagacacgatttttaacgaaacaaacgcgacccagaagcagaagangcctctccctaacccctgcacgcgttgcggcgccaccctcaactgttgaagccgatcaatcatacccggagaccgaaaataacgaaactgaggaagag

SEQ ID NO: 3106 - DNA, 263 bp, Glycine max
  unsure at all n locations
  Clone ID: 700998968H1
cncgtcatcatctcacaagggatacaatacaataccaagaagctacctagctacaaganactccactcatcaccacctcaagcaactaattaactagcatagggtgttttggattatagattgtacttggaagaagatncaaaacactactgtgacatatcaaactgatctcaacctcaaggcaacagagcttagactggggcttccaggaacagaagaaagtgaggagaaaacattgtcagcaggtgctagaattaacaaca

SEQ ID NO: 3107 - DNA, 263 bp, Glycine max
  unsure at all n locations
  Clone ID: 700998969H1
cnatctttgaatttcagtcctcaaagattgnnacancaggnacatgtgtactctcacaactgttcctgtgctcccttctaagcttaacaagccttcgctttctccgcaccacaattctctntttccctactgtggaagacgggtcgggaagaagaacaaagcaatngttcctgttgcaaggttgttcgggccagccatatttgaagcctcaaaactgaaggttttgttcttaggagtggacgaaaataaacacccaggaaatc

SEQ ID NO: 3108 - DNA, 261 bp, Glycine max
  unsure at all n locations
  Clone ID: 700998970H1
taaataacaaaataacagaagcaaaataaatttaattgacaacacntgaataatggattataacatacaataagcacaaggcaaaaataaattagaganngacagatatagcctgggttgangcgcgtaaacgctatccttagagagaaaaatgttttagagagaaaatgttttagactttcttcttgcatagtcttttctacagtaacatgatgttgtatcaaaatatctataatggatatgattganttccttttaagt

SEQ ID NO: 3109 - DNA, 198 bp, Glycine max
  Clone ID: 700998971H1
ccaattcccaattcgaaacccttattcctttcaaagaaccaaattgagtgatcgtgatggcaccaaaggcagagaagaagccagcggagaagaagcccgcggaggagaagaagtcgacggtgggagacaaggctccggcggagaagaagccaaaggccggaaagaagcttccgaagagggaggcgccggcggagaagg

SEQ ID NO: 3110 - DNA, 261 bp, Glycine max
  unsure at all n locations
  Clone ID: 700998972H1
taccagctaaggttccagttcgcgtgangtcactgcacacgaacccagcaaccgtaaacnaccccacttccacggccaaggtggctgctcctaagtgggcccagaagacaataactttgcctccccttaaacgtggttgtcatttaatcacttctaagatagtgaaagaagttcggcaagaattgtctgaataccagtgtggcctggcccatctcttcttgcatcacacaagtgcttctcttaccatcaatgagaattatg

SEQ ID NO: 3111 - DNA, 256 bp, Glycine max
  unsure at all n locations
  Clone ID: 700998973H1
cttgaagaagagaatgatggggaattgaggttgtggtgaatgttggagttggagtaacccaataatggcattgagactgagactcaaagtgtcttcaattgggtcaccttttctgcagttaggttcttctgcaactgctgccttctcattctcccaaccatgctctcttcccaaactttcttttctccaccacgcttgcaactcaacaaaaattcacacccaatnaggttccttgttcgggctggtagaactgagt

SEQ ID NO: 3112 - DNA, 257 bp, Glycine max
  unsure at all n locations
  Clone ID: 700998976H1
cngcttagacccctctcttctaaaaccagggtcccctcaaccaaaatctnccttcttcttctgttgttcatatgctgtattttatgataacaacatacatacatagaagcttgttcttctgatctgatttgatgagatcaagtgttggttctttgttcatctaatattattattctttccctgaaatatattctaaactaattcacaggctcttgatccgtttattttgaagaagatcatcggctgttttactagct

SEQ ID NO: 3113 - DNA, 265 bp, Glycine max
  unsure at all n locations
  Clone ID: 700998980H1
cancatatagaacactaccctgaacatagtaaagaagccagtgctaggatttgttagtgaagcaatggctcaaaccatgttgcccatgtctagtgtctctagcagttattccgtggatttgaagaaagaccttttcctccaattgcagagtcaaagtttaaggcctaagctctctcagctctcattcaanccacttccatcatcaacttcttccttttcttcaccccgtacattcacaactctggccctcttcaaatctaagacc

SEQ ID NO: 3114 - DNA, 265 bp, Glycine max
  unsure at all n locations
  Clone ID: 700998981H1
cngcttctgataatgcagaatgcatanatggnaaaatcaaaagaccctctcggagagggaagaaggttgttgatgaaagtnaagannaggagttaaagggcgattggntggtcagaaaccagaacaagaacaagaaacctaaacgattgaatcttgatcagagaatttcattaaagaataacaaaagtggggacgaagtcattccaactcgaaagacaagaaatgttgggaacaaaattgagaagattgaagaacttattccggg

SEQ ID NO: 3115 - DNA, 263 bp, Glycine max
  unsure at all n locations
  Clone ID: 700998982H1
ccantgccatgtttgtngtcccattatgtgtaatcgttgcttggataatgggtatcaatatggacatgaacttcaacctcttagagacaggttcccttgctttggcaataatagtcacaggcttcactttacaggatggaacttctcactacatgaaaggccttgttctcctgctgtgctacattgttatggggcatgcttcttcgtacaaagaacaccctttaataaccaagctgatgttactaacatcacacttaaaccag

SEQ ID NO: 3116 - DNA, 262 bp, Glycine max
  unsure at all n locations
  Clone ID: 700998983H1
acgtataacaatattttcagtcaacttagcgcgattgtggacggtgaacctcctgatctgccagaggaaggctactctgacgcggcgaggaattttgtgcgaggctgtctaaacaagattcccaacttgcngccaacatatgcaatgctcttgcagcacgcatggttggccccacttgccaaaccagacacgattacagaagaagacgaggaggaagtcgaagctgctcacgcagcagatggtggagaagccgctagtgacc

SEQ ID NO: 3117 - DNA, 167 bp, Glycine max
  unsure at all n locations
  Clone ID: 700998984H1
ggttctttgatattattctattgagcaaaaaatgggagtnccagagagagaccctcttgcacaattgagtttgcctcctgggtttaggttttaccccacagatgaggagcttttggttcagtacctttgccgcaaggttgctggccatcatttctctcttccaatca

SEQ ID NO: 3118 - DNA, 261 bp, Glycine max
  unsure at all n locations
  Clone ID: 700998985H1
ctccgtacaccactttctcccctctcaaaggagggaaaagatcggttgcttgantggtgtcagancttcattttgtggtcaagttgtgtgcaattcaagtttctgncggagacanataactagaagccatgnnaaccgtcttgttgttcactcactgcttggnaggaaggtgaagtctgtgaagagcaggagactgtaattcctgaaccagattacaggattccaattgtgctactcggtatagctggtggattggtttac

SEQ ID NO: 3119 - DNA, 262 bp, Glycine max
  unsure at all n locations
  Clone ID: 700998986H1
acnngatgcatcctctgacaatgatgagaagaaaggtcaatattctaagttctggaatgagtttggtaaatccattaaacttggtatcatcgaggatgccaccaacaganatcgtttggcaaaactgctcagatttgagagcaccaagtctgagggtaaattgacatctcnggatcagtacatatctagatgaaaactgggcagaaggatatcttttacataactggaaccagcaaagaacaactggaaaactctcccttcc

SEQ ID NO: 3120 - DNA, 262 bp, Glycine max
  unsure at all n locations
  Clone ID: 700998988H1
ctagctatctccctagttttctgaggctctagtggaaccgaacagacacaagaacaaccgcccaggaatattccatttcctttatcctcggtgcttctgtcccctttctcggatctcagnnnnnnnnnnnnnnnnnnnncacctcaatggccgcngcncgcctccaacgctgtgctcctcggagacgttcacttcgacgacgtcgccgcaaagccttgcggcgttcacttccgcggcgaaacgcggcgaggcgcgctccgag

SEQ ID NO: 3121 - DNA, 256 bp, Glycine max
  unsure at all n locations
  Clone ID: 700998989H1
cnacgcaggactgaatgaactaatggagtctaaaggtgggaaaaagaagtcnnnnnnnnnnnnnnnnnaatcattgttctacgaagctcccctcggatacagcattgaagacgttagaccaaacggtggaatcaagaaattcagatctgctgcttactccaactgcgctcgcaaaccttcctgattccatccagattgatagttcattgcatgcaaccatagttttattaggttttttcttctttgtnttcaatta

SEQ ID NO: 3122 - DNA, 219 bp, Glycine max
  Clone ID: 700998990H1
aacagaagaacaaccaccaccacacacaatgggtcgcgtgagaacaaaaacggtgaagaaatcctcccgccaggtgattgagcgttactactcgcgcatgaccctcgacttccacacaaacaaaaagcttctcgaagaagtggccatcatcccttccaagaggctgcggaacaagatcgcgggtttctccacgcatctcatgaagcgcatccagaaggg

SEQ ID NO: 3123 - DNA, 255 bp, Glycine max
  unsure at all n locations
  Clone ID: 700998991H1
cgggttcaattngcactcagacactgagtatagtggctgagttcccagaaagatttaaagttgtgagccttgctgctggctctaatattactcttcttgctgaccagattcaaacatncnnagcctgaagttgttggtcttagaaatgagtctttaattgatgaactcaaagaggctttggctgatgtggatcacaaacccgaaatcatccctggagagcaaggagtcattgaggccgctcgtcaccctgatgcc

SEQ ID NO: 3124 - DNA, 256 bp, Glycine max
  unsure at all n locations
  Clone ID: 700998992H1
cngacatacaaattttcctttgtatttgntatattgtntctgtcattctgtttccatttaagcatttttnnncttgaagagaganaatgctcanattagcagtaacatatggcatgatcttatgcatagactagttacacatttgtttcttcactcaatgattgatctaaatttcaagtatattagttgagccttaatatctttcttttattatnngtcccttgattttctaattttcaacgcagcttaaaattgt

SEQ ID NO: 3125 - DNA, 258 bp, Glycine max
  unsure at all n locations
  Clone ID: 700998993H1
cngtaactctttcttttcttttctntctttctccgatcgcatcgctcgcaaccacaatcatgccttcccgaagaagaactctcttgaaggtcatcattctcggtgacagcggggtngnngaagacgtctttgatgaaccagnatgtgaataagaagtttagtaatcagtacaaggcaaccattggagcggattntttaaccaaagaagtgcaatttgaagataggcttttcaccttacagatttgggatacagctggc

SEQ ID NO: 3126 - DNA, 262 bp, Glycine max
  unsure at all n locations
  Clone ID: 700998995H1
cnttgatctctttgatnggtccatacctgcagatttgcttgccaacttctctgacattaagcaggagagaatagttactggagatggtttttttagcaagacatctcccgggtacaaaacaattgaagaactctgggatgagtaatggacagtttccatattggccacatccccccctcttgcttaatgcaaaaatgagcctatctttatgattattgtaataatctacgatgtgtttataatttnnngacttnagatgtgt

SEQ ID NO: 3127 - DNA, 284 bp, Glycine max
  unsure at all n locations
  Clone ID: 700999001H1
ccaagactgatcccccgaatccggatctctttctggatcctcctccacaacacactccatctcccaaagtcctaagccctttccacgcagagtgctggntnaacaagtcgttgcaatttcactatcaaaaccaaaacttacacaattttccattacttttcctctaaatcttattattgtcattattattttgtcacattccaagttcagatcctcaactcaattctctctgtgaatcattggagccttcaaacatcaccacatttcgcccctcatnactccat

SEQ ID NO: 3128 - DNA, 117 bp, Glycine max
  unsure at all n locations
  Clone ID: 700999002H1
gttagtctcagctccagnggcggctaaaatggcttacaatctttgctacctaccccttacttnctnctcnttcccatggagctnccttccnnnncttccngcgtcctnccttcntgt

SEQ ID NO: 3129 - DNA, 278 bp, Glycine max
  unsure at all n locations
  Clone ID: 700999003H1
gggatttcgatctggccaaggagggaattttggtgtcttaaggaactctcgtgcacagacaccaccacaatatgttggagggatcctttctgggccaatgcaatcggtgggaaatcatgtggaagaaataaccctgatggggagaggtggcagcgttctgctagcttccagcagaggggtttaattccttctcctacccaaactcctttacagatgatgcncaaagctgagaataagtatgaagtgggtaaacatcagatgtggaagaggtaaagcag

SEQ ID NO: 3130 - DNA, 273 bp, Glycine max
  unsure at all n locations
  Clone ID: 700999004H1
tctcagaggatgtgcagccacctgttgaaggaacgactcttatagcagtctatgttggtttggccattggaagttctttctgcatccttgccagagcgntacttcttgtcacagctggtataaaacagctactatactcttcaataaaatgcacttctgcattttccgtgctccaatgtcatttttcgattccactccaagtggacgantccttaacagagcttcaatgatcaaagtgcatggatacaacattccttatcaaatgcatcgttt

SEQ ID NO: 3131 - DNA, 273 bp, Glycine max
  unsure at all n locations
  Clone ID: 700999006H1
gtctgaaatcgccagacaactcaatttctgaaggtaggccatcatttgtactctcaacttgcagcaatgaaatggcagctggatccatatgcggatcatctgatggctggtcnatgcgaccttttctgagctggttgcatcatcacaaagggaaaggtggtcctttgatagtgagtgttttggatctggtcgtcacaagataagtggatccagtagcaggttctcgtattctccctccatggaactacatcttgtggggttgctcaaagtatt

SEQ ID NO: 3132 - DNA, 277 bp, Glycine max
  unsure at all n locations
  Clone ID: 700999007H1
tgcttgttgtgggtttggaattggattgattcaaacgagttaacgccatgctcagatcactgccgaagctcctcactcctcttttcctncagccaggaatccccattatctttcaagtgtcagcgtttcatatctcaagggagaatagcagcttcaagagtcaagattggagtggtaagcactattcctattcgatccaagttgacttcaacaatttcatcagcaattgcatcaganatggctgcagaagncaagttcaaagggttaacctactaac

SEQ ID NO: 3133 - DNA, 279 bp, Glycine max
  unsure at all n locations
  Clone ID: 700999009H1
taacaacaacacaaggccatcatcatggcagctgcttctcctatggcaagccaactcaagtccaccttccactaaaactcttgtagctcccaagggcctctctgcctcttcaccactccactcctgccttctaagaggcaatttagcttcactgttagggccatccaatcagaaaagccaacctatcaagtgattcaaccaatcaacgntgatcccttcattggaagccttgaaaccccagttacatccagcccttgattgcatggtacttatcgaacc

SEQ ID NO: 3134 - DNA, 283 bp, Glycine max
  unsure at all n locations
  Clone ID: 700999010H1
atgataatgcacagccacacaaaatagaanctccaagagcgatggatgtggcgaagaacggttagcggtgtgggacttgttgacatggcttcttctacactcgctctgacnntcagcctcncaccancancaccacctnccaccacctcctactcctatcaacaccggtttccatgtcctagaataaagttattctcttccaagcaccgctccttctccgtctcagcttctgcttccaccttcaaattcgcttnnagctctcatattcgactgcgatggcgtg

SEQ ID NO: 3135 - DNA, 280 bp, Glycine max
  unsure at all n locations
  Clone ID: 700999011H1
gtcaatcattcattcctattccttctttctctnccaattccaaatcacaacccttcnntttccctctctagaatcttcttctccattcaattcctactccttttttcctctctgtccctnctctctccctctctcatggcttccgatctcgaagcaaaagncaaagagggnttcgtcgaagaccacttngaactcgcngtggaccttctntctcaggccacncatctcgaanccaacaaagcngaattctacgngaccgngcccaagcnaanatcanact

SEQ ID NO: 3136 - DNA, 281 bp, Glycine max
  unsure at all n locations
  Clone ID: 700999012H1
tgcaattgaagttgaagtcttgcccttctctcttcaactccaaacacaagacatcatcatccatggctgcctccgtctccactgtncggagctgtcaacagagctcttttgaacctgaatggtctggacctggggtttcagctcccagttcatccttctttgggagcagcttgaagaaggttattggctcaagggtccccaacacaaagatttccctctggaagcttcaagattgttgctgtagaagagaagaaaagattgaagagacccagcagaccgac

SEQ ID NO: 3137 - DNA, 286 bp, Glycine max
  unsure at all n locations
  Clone ID: 700999014H1
cacaccttcttccgttgttctcttccaattgccttgattttntcggaaaattcttattttccgagaaagttcgtgtttttactgttgaatcgagaattcccaaatcggggtgtctganattccaagctgttgttgttgttggcggctggggttagtctctgtacgaggtttgggtgttttttgaggcagagcttattctccattttgctccaatggagatgcaggaccaaatagaaagcacaagatcaaccatatttggctcagctagtaacatccatccaatgtg

SEQ ID NO: 3138 - DNA, 284 bp, Glycine max
  unsure at all n locations
  Clone ID: 700999015H1
gcttacagaagaataatcaaaatgagatccatggnnaaggatcttgaatgaaggattatacctctagtgggattcagtggttatttgacaatccatgttatagcctaattttggtatattgtccagctgcacctttgacatatagtgctgaatctgatcatagttatccttttatcccacccttgtaagttgtaagcatcttcactggagatgtactactctctgaaaaacaagaagttttctagcttaagaaatgactattttgctatattggcgtatgttga

SEQ ID NO: 3139 - DNA, 290 bp, Glycine max
  unsure at all n locations
  Clone ID: 700999016H1
ttgtgattggtccctatttctaactncaatcctattatctcaatgccttcatcatctcacaatgctttggtgaattgaatnnatggaacttggactcagaagctttgtccatttcactcccatgcccaccatcaccatacacatnnnnnnnnnnnnnnnnnnnnnntttttcaccatttctccaataattctcttctcttccctgcatgtctcaccctcttaaacactacttcttcctctttcatggctacccatttgcaggtatcagaaggtgcacccatgaagcattc

SEQ ID NO: 3140 - DNA, 284 bp, Glycine max
  unsure at all n locations
  Clone ID: 700999017H1
gtccttcgagatggctcgtacgaagcaaaccgctcgtaagtcccacaggaggncaggctcctaggangcagcttgcaaccaaggctgcacgtaagtctgcaccaactactggtggtnngaaaagccccaccgttatcgtcctggtaccgttgctcttcgtgagattaggnaataccanaagagtaccgagcttttgatccggaagctccccttcccagaggctggttcgtgaaattgctcaggacttcaagactgactgcgtttccagagccacgccgtgcttg

SEQ ID NO: 3141 - DNA, 281 bp, Glycine max
  unsure at all n locations
  Clone ID: 700999018H1
gggatttgccaggtgatttggagcaagagagatacttctttagcaccaaagtggccaaatatcccaacggaaatcgctccaacagagccacaaattcgggttattggaaggcaactggctggacaaacaaattgttacttcaaaaggcaacaaccaagttgtcggaatgaagaagacacttgttttctacagaggcaagcctccttnccggatccagaatgattggatccatgcacgagtatcgcctcatcttacgcctctccagtctcagagccatgttg

SEQ ID NO: 3142 - DNA, 274 bp, Glycine max
  unsure at all n locations
  Clone ID: 700999020H1
tttgctactgcagcaaaattatatctcccaaaagtcaatagatcaagtggtgctgttatagacatgtggattaaggcaaantagctagaggcaaatactgagtattacattgagctgtggcaaaagggacagggaaatcaaaggaagaaattgctaaagatgtccagaggcctaagtatcttcaagcacaggatgctatagactatggaattgctgacaaaataattgattccagttcaagggatgttgcattganaagaggattatgatgant

SEQ ID NO: 3143 - DNA, 276 bp, Glycine max
  Clone ID: 700999021H1
gagaaagtcaaactcaagccatcaccaagaaagaacaagaaagtaggcagggaaagggatctctacaagaactcttcacatgcttgtgagacccttctgtccctgatggttgacaagaacaacgtcgtaaaacagcaattctctcactgaagaaatccgggcctgagcttccggagctcctgacacaattttctgctggcattgccggtaccggccttgcagtcctgctatctgtgatgtgtaacctagctgtggaagggctaccttttgtgctta

SEQ ID NO: 3144 - DNA, 276 bp, Glycine max
  unsure at all n locations
  Clone ID: 700999022H1
cttcattcttcaccctcgtcactcgtcatttctgcttaccacgcctccccttcaaaacttgacaaatttgatttgaagctggggaaggagcatcgggtttagattaacgcaatgctgaacaagagccaaatctcattcagcattccatacgtacagaagannctggtgaggttgaggagtacgctggatggtacctggtcctggccagtggcgaaacggcggaacctcgtgtgcctcanattgaagggttggagagtttcaatggaaaagtgattc

SEQ ID NO: 3145 - DNA, 277 bp, Glycine max
  unsure at all n locations
  Clone ID: 700999023H1
gcctgagcggggcnnacangaggaaactctggtggangcncgcagcgatanncgacgtcnnnaatcgttcgtctgacttgggtataggggcgaaagactaatccgaaccgtctagtagctgttccctccgaagtttccctcaggatagctggannccgcgggcganntctatcgggtaaagccantgattagaggcatccnggggcgcaacgncctcgacctattctcaaactttaaataggtaggacggtcggctgctatgttgagccgcgccatg

SEQ ID NO: 3146 - DNA, 281 bp, Glycine max
  unsure at all n locations
  Clone ID: 700999025H1
tgaattaccactaatctgcgttttggttccggtgattaaatttttttgcnctcatttttatttttgaaagagaacataattnnaaccccaaggggttggttgagcggactaagacagggatttaggtttcaaccctcncctcttctcctcgaggttaaataaacggaagttnnctttgtaagtgttctttaaacccggagacttttntnagtcttggattgaagcgccatgccgcatctcctttccgtaaattttatctaccaaaagcaaatttcagttga

SEQ ID NO: 3147 - DNA, 282 bp, Glycine max
  unsure at all n locations
  Clone ID: 700999026H1
agtctttgaagtcataaagacaaaagaaaagacttagtcatagcagcaaacaaggaaaggcacgtacaagnccancgtttacctgttttttgaacgttgaaacaganttgacctgcgcctggcgtgtcactgtttgagagcacacaaacaatgtcctcccaatctgacgccgttggctgtaacttgaaggagacggagctcaccttaggccttcccggcaccaaaactanatgggcacaaaacgtggcttctccgacacccttaacacttctcataataaaa

SEQ ID NO: 3148 - DNA, 279 bp, Glycine max
  unsure at all n locations
  Clone ID: 700999027H1
gaaaaaaggagagtgcttagagagagagcaaaacatattattttcattttcatcttnncttgagtatcaacaaatggcaaccactgtgatgaccactctcccccaattcagtggtcttagccccaattctcagctgcccctgtgaagaacttggttgctgtgcaacccatgagtcgcaaggggaagggtgcattgggagctcgatgtgactacattggttcatccactaatctgattatggtggcttctacaacctgatgctgtttgctggaaggtttg

SEQ ID NO: 3149 - DNA, 280 bp, Glycine max
  unsure at all n locations
  Clone ID: 700999029H1
ggtggacagggtcagtttgcagatatcactgtccggtttgaacccatggacccaggtagtggatatgagttcaagagtgaaatcaaaggaggtgctgtaccaagagaatacattcctggtggatgaaaggattggnagagtgtatgagcaatggtgtgcttgctggctttccggtcgttgatgtacgagcagtactcacagatggttcttaccatgatgtagattcaagcgtgttggctttccagttggcagcaaaggagcttttagggaaggaataaga

SEQ ID NO: 3150 - DNA, 288 bp, Glycine max
  Clone ID: 700999031H1
gtgaatcagcaccacattcacctgagctttttgtgaggattccaaagcatggcttcccttgcagcatccactgctgctgcttccccttggcatgtcagaaatgcttggaaaccccatcaacctcatggtgccacaaggccagctccatctgcctctagccctgcctccttcaagactgtggctcttttctccaaaaagaaggctgcacctccaaaaaaagctgcagctgctgctcctgccaatgatgagcttgccaagtggtatggtctgacagaaggatcttcttgc

SEQ ID NO: 3151 - DNA, 138 bp, Glycine max
  unsure at all n locations
  Clone ID: 700999032H1
gtttccccaagaggaatctttgaacttggtttcttcaatcttggaaatccaaacaaaagctacctngcaattcggtacaagagctatccngatcaaacatttgtttgggttgcaaacggtgccaaccaatcaatgact

SEQ ID NO: 3152 - DNA, 128 bp, Glycine max
  unsure at all n locations
  Clone ID: 700999034H1
cgctaaanccaaaacactattttattatcttcttcgtctgttctttgcattgaagaaaatttctttgaattgaagaaaantgaaatcgaattgtgaaacagaaaataaaccaaaggnatttttacnga

SEQ ID NO: 3153 - DNA, 279 bp, Glycine max
  unsure at all n locations
  Clone ID: 700999035H1
caaagaccnggaaagctattttgaagttccagttgatcaatcancgatgcagatttctccatttgcactattttcaggtggattatccgatcctagacttgtggnaatttcgaatncccaannatttgcaaatnctaaagcanntgtgtatccgcgccttgctctaggaaaatcttgggancgaaatgacagttacatggacaagtggatangacataaatgaagctgtgccttttgttgagtggggaccaaaggaggnaagaaaacacgatctcatgt

SEQ ID NO: 3154 - DNA, 274 bp, Glycine max
  unsure at all n locations
  Clone ID: 700999036H1
gccactttagtggttgcttatggaatcagcatcaatcttgttgaggttacctggaagtctaagctcaaagctccagtttcctagtcccaacgagtactcttcttttatgggtgactntcaactgcaactggaattgccacnctcacaatgatgcttgtcagccaatttatatttgacaagtatggatggggagttgctgccacgatcacccctacagtncctgcttctgacaggagttggtttcttttctcttatatgtttgggggccgcttgc

SEQ ID NO: 3155 - DNA, 273 bp, Glycine max
  unsure at all n locations
  Clone ID: 700999037H1
cagagcgagagagaatcgtaacagaaacggtcactggaagttgtctctaccaccctctcagccatggcaacaattccccctagccgatcatcatcacacgcgtttgttgccatggcaccttcacgactctgttgttgtgcacggcggcggcgaaggagagcgtgtacgagatactccccaagtacgggctcccgagtggtctgttaccggataccgtcaccgactacaaactcgacgaggntggccattcgtcgtcgttttgccgaagccctg

SEQ ID NO: 3156 - DNA, 109 bp, Glycine max
  unsure at all n locations
  Clone ID: 700999040H1
ttgctntatggtggtgacaaagtaaggtttgtttcatcnacaaaagatggtggcacccattgctgtttcctncctcccaaagtaccaccacttttgcagaaggngccat

SEQ ID NO: 3157 - DNA, 276 bp, Glycine max
  unsure at all n locations
  Clone ID: 700999041H1
atttgcgggaaaagaaggggaaaaaaaaagttgaaaanactatgatgatgatgaaaagttttgttctggnaactggttggagaacaaatattggagaaagtgaaaatctgggtcctagggcgttgattgttgttgaattganttcctttttgaacccatatcacttgttataaacaccaancaatttctctccttcttctaaatgaaatttctcactgctttcgtgtttttnttccctctctctttgtagcacaacaacatagttattagttaata

SEQ ID NO: 3158 - DNA, 279 bp, Glycine max
  unsure at all n locations
  Clone ID: 700999042H1
ttcagagggggagaaatgggtcggtccancgttgcgttgcgctccgctggacgctgacccaaaccacanatccaaagagaaaaaaggctgctctgaatgtagaaaattcanaaaccttactacaggccaaggagtaactactagcaaggtatctctctatcactgcaattattgtnacaaagatatttcggggaagattcgcatcaagtgtgctgtctgtcaagattttgcacctctgcttagagtgcttcncgttggtgctgaggtgacacctcacaa

SEQ ID NO: 3159 - DNA, 279 bp, Glycine max
  unsure at all n locations
  Clone ID: 700999045H1
ccaagcacgctctttggtagaggaacatatcggaaagangctgatttctcaacagatgacataattcttggcaagagtcttgttagcgtataaacttttctatttcaattttaagtattcacttgtatttagaaaagctgttcggatttgctacattatgaagtcgtgaaatattcatgagcttttcgttcagtatttttttcaacaaaaaataatggatattggttttgttcnctaaaananaacngnnnaananaanaaaaaaaanggggggggcnc

SEQ ID NO: 3160 - DNA, 282 bp, Glycine max
  Clone ID: 700999046H1
caaagaaagaggcaaacaaggagccagaaaagcccaaagaagaagcagaagaggaggctcccaagcctaaagccaagaatccccttgatcttctccctccaagtccgatgatactggatgagggaaaagactctactcaaacactaaaaccaacttcagggaggttgctatcaaaggattttgggacatgtatgatcccgagggatactctctctggttttgtgattacaaatacaatcaggagaatactgtttctttgtgacttgaacaaggttggtggat

SEQ ID NO: 3161 - DNA, 281 bp, Glycine max
  unsure at all n locations
  Clone ID: 700999047H1
tgcagttgtcattttcaacacattatttggcttagcacaaatttttggatggctgttatcatgagatttcttctggntagtttaaatggtttgcttggaccagtgaaggcctatgcctctaactttttcgagaagaacaccaagctataggactcttaactgtcagtgcagcttggggcataggtttgatcattggcccagcattggggggctatttggctcagcctgtagagaagtacccacatatatttacaaggatctttttgggataagtttccata

SEQ ID NO: 3162 - DNA, 286 bp, Glycine max
  Clone ID: 700999048H1
aaatatttgacagaaggggaaatcaaattctccctccggaattgaacagaaatagaatcatctctctgtctagggtttcattctttttcagctttatttgttctgtagatccatctagcttcgtgctgcaaatggacgtcgcagtcactgccgttcggtcaccgctgatcgtcctgggaagtccggtcaacgggtccgcctcagctcggttgggttccacttttgggttttccagaaagctatgcttgaattcagtattatcccgaagcaagttcgtagaagaggg

SEQ ID NO: 3163 - DNA, 274 bp, Glycine max
  unsure at all n locations
  Clone ID: 700999050H1
ggcagtgaccattgcagctgcgcagaaagtgaaagggcgtggagatggtactgttgggatgtttggttggcttgttgtggctgcaattgctgggtccctgaatgtgttgttcacaacccaatatgggttttggtgactcggatgcagactcatactcaagcncaaaggaaaatcatggagganaanaaagaagctttaagganngctgcttctgaaagcaccatagcagatccaacattgcaagacaaatggctgaatgaatctataaaacctc

SEQ ID NO: 3164 - DNA, 276 bp, Glycine max
  unsure at all n locations
  Clone ID: 700999051H1
tgttgatctcaatcaacttgaaagtagaagggtcccggctctgatccatccgtggagtccactaatggatcagagtcgagaagaaggcacgatnaaaaacagattgttgatctcaanaaattganagtagaagggtcccggctgaaaaatcaactccgggtgggcgcgaanccatgggaaacaagatatacctctcaggtccattaatggtttcgtccaagcaacatggatcagatgctcaaagagctgacaganagatccaagagttttcangac

SEQ ID NO: 3165 - DNA, 275 bp, Glycine max
  unsure at all n locations
  Clone ID: 700999056H1
caacagcanggtttccggtggaagctgncaacagagccgggttgaacntgaatggttctggagctggagcttcagctcccagttgcagccttctttgggaccagcttgaagaaggttttgcctcaagggtccccaacagcaaggtttccggtggaagcttcaagattgttgctgtagaagagaagaaagagattgaagagacccagcagaccgacaaggacagatggaagggtcttgcctatgatatctcagacgaccaacaagacatcacaaga

SEQ ID NO: 3166 - DNA, 128 bp, Glycine max
  unsure at all n locations
  Clone ID: 700999057H1
tccgcctctgtnttnntgatcgaaaaccataaaaaagttgtttccgatcactgccttaatcggattcagctgttgttcctcctcctcaatttcggtaaccacctctctctgtaattcccacgcaattt

SEQ ID NO: 3167 - DNA, 103 bp, Glycine max
  unsure at all n locations
  Clone ID: 700999058H1
tcaatccctcatctcattgctgagatctgcaagctggctatggactcacgaaccctcacgacagtagcggaactgatgatgaccttccacacaacatacgnna

SEQ ID NO: 3168 - DNA, 280 bp, Glycine max
  unsure at all n locations
  Clone ID: 700999061H1
ggtacctgcttggataaggctttttcttcacttcttgttcttggtggaacaaccttgtaagtttgtaacaatgacttcctcggttacttcctcttttcgcatcagcaatttgaattcnnctttgttggtgagacaaataaattcagagtttcaactgttcctggtgctcatgttggtttcattagaaagactgtagaatgtaaggnatcacgaattgggaagcnaccaattcctgtnccatccaatgtcacagtcaaattggaaggacaggatatacaag

SEQ ID NO: 3169 - DNA, 284 bp, Glycine max
  Clone ID: 700999062H1
gtttcctgctgaaactagcaaaatcaatgggtttccaatgatgccagtgtatcagtttgggtttggttcttctggagtgatttcagtccaaggtggcaatggaaacccaatggaagaactcctctgggacaaggaaacgtggaaaaacataatgtgccaaacaaggtctctacagtgtctgatatcatcaccccgagttcttctagttctgccgttgacccaccgacactgtccctggggctatcttttcatctgaccaaagacagacatcatcaagacattca

SEQ ID NO: 3170 - DNA, 281 bp, Glycine max
  unsure at all n locations
  Clone ID: 700999063H1
gctttctcntgtctactccgatnnttcggagccatctagcatgtttgatgaggtgctgctttgtaaggatggtnagagtnccattcattttttatgctggccgtgaaccatcaccatcgcagttgctgncctcaggaggatctaatgggaagaaaacacgatcaaagagaggttccaataaggggacaagggcaagcgtgacgacggtggatttatggatttgctattcaatgtgcacaggctgtggctagtttgaccaaggactgcaaatggnacatgag

SEQ ID NO: 3171 - DNA, 279 bp, Glycine max
  unsure at all n locations
  Clone ID: 700999065H1
caagcctctccaagtcttcctcaaagangacgcatgcatgcgtcagtanccttcaagaccttcgattcgctnggtaaggagctagaagagtctggagttctcagcgaatcagttcgatcaggaaagatttttggggctgcatatgccactggtttgtccagatggcgctgtggttgcgtatgcgtggaaacgacaacttgcaggncaagcaggtgcttcggccgttgacaggaccaggttagctctcaaagcttcactgatcagaaaaggcgttttttc

SEQ ID NO: 3172 - DNA, 275 bp, Glycine max
  unsure at all n locations
  Clone ID: 700999067H1
gtatgaaaacagatttgatataaaaaanattgtnagcgagaactggattgaaccaccaaaaagggagcggaaacgcaattactcggagtctgaatacttcaagcaaacaatgcgcaaggtggtcctaccaaaccaaaagagccccgtattcctaggatgccccagttgcatgatttccagtttttcaacacacaaagattgagtgagctgtatgaaaaggaagtacgctatctcatgcaaacacaccagaagaatcagataaaggattcaataga

SEQ ID NO: 3173 - DNA, 271 bp, Glycine max
  unsure at all n locations
  Clone ID: 700999068H1
ctcttctctgtcgtgagcttccatggtgagggttagtgtgctgaacgatgctctgaagagcatgtacaatgctgagaaaaggggaaagcgccaagtcatgattaggccatccntaaagtcattatcaaattccttttggtgatgcaaaagcacggatacatcggagagtttgagtatgttgatgaccacagggctggtaaaatcgtggttgaattgaacggtagactgaacaagtgtggggttatcagtccccgttttgatgtgggcgtca

SEQ ID NO: 3174 - DNA, 266 bp, Glycine max
  unsure at all n locations
  Clone ID: 700999070H1
acacattgtctatcattgacagtggtattggcatgactaaggccggtaagattaaatattttgttaagttttattgagattatcgctgactgtgcatactagtctgttttcttaatgcttgtgcgatctatgttccagatttggtgaataacctcggtactattgcaaggtctgggaccaaggaattcatggnagccctggctgctggtgctgatgtgagcatgatggacagtttggtgttgtttctactcggcttatcttgtagt

SEQ ID NO: 3175 - DNA, 273 bp, Glycine max
  unsure at all n locations
  Clone ID: 700999071H1
ggnactatgcaatggagaagcaggtcttaaacaagagctgaagagggancttggtgttgatgagaaggcaccagcatcagcaacaagtgacaaagagcaagagttagaggaggatcatcaacaacacagtccttggcaagtgttgctgcagaagatggttttgagaaggaactgatggggttaactggggggtttccggngggtgagaagggtttgaaaaagttcatttcaggaaaaccctcctcctctaaaaccaagtcaagggagcaaaag

SEQ ID NO: 3176 - DNA, 269 bp, Glycine max
  unsure at all n locations
  Clone ID: 700999072H1
gtactggataaggaaatcaattttnagagtggtgntncgatatgctcgaggaattgtaattcctgtatgttcctgatacaaccatgggtgancnattacgtgagcctttagtaacgaaggcaaccaaggaaggtgggggcgtgtttacgtgaggaaaggacattagaagggtgatttggtcataattgttagtgaaggggtattttggggtgtggagttagatattttgccttttgttatctttacggttattagtaacagattggggg

SEQ ID NO: 3177 - DNA, 275 bp, Glycine max
  unsure at all n locations
  Clone ID: 700999075H1
caataatgctattgnttttnnttgttccnntttctccccaaggtttaccatagcatctgcatgatganacgaatgcaaaaagtcacaggctacatctttggcactatttggtggggnttggtctcaatctcatagcttattttattgcttctcatgttgctggagggtgctggtatgtccttgcaattcaacgtgttgcatcctgcctccggcagcnncgtgagagaactaatggatgcaatctttctggtcatgctcagaggagatatgctacc

SEQ ID NO: 3178 - DNA, 276 bp, Glycine max
  unsure at all n locations
  Clone ID: 700999076H1
ggccaagtcagntcctatggttgtntgtaccattgaggagtctggtgaacacattgttgctggtgcaggagagcttcatcttgagatctgtttgaaggacttgcaggatgatttcatggtggagctgagatcattaaatctgaccctgttgtgtcattcagggagactgtcctggagagatcatgccgcactgtgatgagcaaatcacccaacaagcacaatcgtctgtacatggaagcnagaccattggaggaaggtcttgccgaggccatgacg

SEQ ID NO: 3179 - DNA, 280 bp, Glycine max
  unsure at all n locations
  Clone ID: 700999078H1
gggctgcgcttgattgttgacaaggaagaagactgttacaaggccttgacagtagttcatcgattgtngtctgaggtgcctggaaagctgaaagattacatatgtcgtcccaagttcaatgatatcaatctctgcatactgtggtgatgggtgaaggcaaggttccccttgaagtacaaattcggaccaaagatatgcatttgcaagcagattttggatttgctgctcatggagatacaaggaagatgattgtcagcatcttcgtttgtgcttcagatgg

SEQ ID NO: 3180 - DNA, 282 bp, Glycine max
  unsure at all n locations
  Clone ID: 700999079H1
ctgatataagtcacatggacaccggcgctnctgttcgaggatttttggggcagcagcagcttgaggatgcacttataggcatggacttggtgatcatccctgctggtgttcctcgtaaactggaatgacaagagatgatctcttcaatataaatgctggaattgttaaaacattgtgtgaagcaattgcaaagtgctgtcctaaagccattgtcaatgtgataagcaatccagttaactccacagtcccgattgcagccgaagttttcaaaagagctggtac

SEQ ID NO: 3181 - DNA, 284 bp, Glycine max
  unsure at all n locations
  Clone ID: 700999080H1
gctgaaaagatgggtngaggaaggtgctgaacttccagctgaagaagctgctgctctgccancacctccaacaactgntgttnncnagaatggttcaactgaatacaacttgagatctgcatgaagactgaaagttctcctnctattgagggctctaacataagaaatgntagccctgaactcagtccagggnggccaccgataccacncagctcaaatnaattctcggcccggggtcgtttgggtgttaggtcaagtagttgacacttcaaccaaggtggtgg

SEQ ID NO: 3182 - DNA, 274 bp, Glycine max
  unsure at all n locations
  Clone ID: 700999081H1
acgttctctcaacatccacaataacaatgagctccgatgatgatannnttggagagtgatgaggagttcattgaagagcttgtagctattgctccagtattaggtagcactagtgtaatgttacaacaaagcaaggacagatagagattaaagaaaagaagangggaatagtgaaagctaaatggaagtgtaggtgggtgatgataataaaaggttcaattcatatattcaagaactttgagaaaatgagccttatagtactatccactggtgg

SEQ ID NO: 3183 - DNA, 268 bp, Glycine max
  Clone ID: 700999086H1
gggaacagactattaaccagcttctgacggagatggatggcttttctggcaattctggtgttattgttttggctgccactaacagaccggatgttcttgattcggcgttgttaggcctggccggttcgacaggcaagttactgtggatagacctgatgttgccggcagagttaaaattcttcaggtgcattctagaggaaaagcacttgcaaaggatgttgactttgaaaaaattgcaaggaaacccctggattcactggggctgatc

SEQ ID NO: 3184 - DNA, 273 bp, Glycine max
  unsure at all n locations
  Clone ID: 700999087H1
atctcttcaggaaatgtatggagccggtggagaaatgtttgagggcnngctaagcnncgacaaaagaagtgttgatgatgttgtccttgttggtggttctaccagaattcccaagttcaacaactgctgcaggacttctttaatggaaaagagctttgcaagagcattaatcccgatgaggctgttgcanatggtgcggctgttcaggctgcaatcnttnancggtgncggcaatgagaaggttcaggatnttctcctcctggatgtcacccc

SEQ ID NO: 3185 - DNA, 270 bp, Glycine max
  unsure at all n locations
  Clone ID: 700999088H1
caagattccgcaacnnatantanttnaaaatggcgcngttgatcacagtggtgtggtgngcggtggctctantcactgtgcacngcggcgggcgcgtcgtgggtggaggaggcggtnacccgatacgaatggtggcgggggtggaagnggaagtngttcgggtgatagggcantnncgncncgcnctgaantttgctaggttcatgancangttcgggaagagttacgaancgangaanagatnnggcagaggtacnagatattctncgc

SEQ ID NO: 3186 - DNA, 272 bp, Glycine max
  unsure at all n locations
  Clone ID: 700999089H1
tggggatcgaattgtatcgttcctgattggccaattcagcttgctttggattgatcagcagcaacgcctgaagttcaatgttgatgttgttgagagtgaatggggccatggtgcaagcttgatgttctgganncaaagattgcttcagatacttcacacactancaaggcaatttgcattgttcacaatgagactgcaactggggtcaccaatgacttggccaaagtgagacaaattcttgattctaccagcatccagccctccttattgtt

SEQ ID NO: 3187 - DNA, 275 bp, Glycine max
  unsure at all n locations
  Clone ID: 700999090H1
tttgtttgcttctcaagtctctcgaagnctctttctctctcttctagaagctatctgtgtttggtgttactaagtctccaacaagcaaagtacatggnacatttggaaatccaggccccaccccattcgacccgtttgccgaggcgagagaatcggatgcccccggagcaaaggagtatgtgcatattcgaattcagcagaggaatgggaagaagagtctgaccacagtgcaagggctgaagaaggagttcagctacgagaagatcctcaaggac

SEQ ID NO: 3188 - DNA, 273 bp, Glycine max
  unsure at all n locations
  Clone ID: 700999091H1
gatcctggaagatggaagactaacagacagtaagggcagaacagtggatttncagaacacacttcttataatgacatcaaatgttggaagcagtgtgattgagaaaggaggccgcaaattggatttgatctggattacgatgagaaggatagcagttataacagaatcaagagcctggtaactgaggagctaaaacaatacttcaggccagaatttttgnatagattggatgantgattgtcttcagcagctcacaaaactggaggtgaagga

SEQ ID NO: 3189 - DNA, 276 bp, Glycine max
  unsure at all n locations
  Clone ID: 700999092H1
ccgaggcccaatccggtttggtccctaaacgggcttcggctgacgggcttctcgtnttggctcccttcgttctcgctgggcccatggaactctggattcacgacgccaacgacatggactctcccttccccatgacgtggatgctggtgtgttgaagaaagtggtgttggctgagggagcagcggttaccgtcaaaggtgcaagatccgttagtcttcggcaacctcttgatttccctcttccgttaaacgaacggagaatggttttgctaacggt

SEQ ID NO: 3190 - DNA, 278 bp, Glycine max
  unsure at all n locations
  Clone ID: 700999093H1
aagaaagaaagagaagagaagaatcgaagacgaagatggaggacgcatcagcatcaaagttcattccacaccaaatcggagnggtccaaaacgacgcgcttcgattcggtctccatgggtcaagagcgacatcgttggttctcaccctcttcaatcttcactccaatctacaaggagaatggatgaagcgatnaagaggcaatgcaaagttaacctgtacggaatgcttttcccatgaaggaggngcttgacggcaaatctgtccaggttccagcggc

SEQ ID NO: 3191 - DNA, 287 bp, Glycine max
  Clone ID: 700999096H1
gtgacagttgatgttccagatataaggggaaggactgaaatcctaaaggttcatgctagcaacaaaaagtttgatgctgatgtttctcttgaagtgattgcaatgagaacacctggctttagtgagctgatcttgcgaatctgttgaatgaagctgctatattagctggtcgccgtggaaagacagctatttcatctaaagaaattgatgattctattgataggattgtggctggaatggaaggaacagtgatgacagatggaagagcaaaagtttagtggcatatc

SEQ ID NO: 3192 - DNA, 288 bp, Glycine max
  unsure at all n locations
  Clone ID: 700999101H1
cctctttctcaggttttntanaatctccntgtctgttcaaagctttcttattctctcgtattcatccatncaccaacgccaaatcacaatagcccttcaggaacaccgntgtcccaatttcacatcttgtgggttttagttggatgttttcaagggtttgattctagggttacttatgcagtttttggnaatttnggctcagtnganatcnctgtgaaacgggtttggaaaattttttnatcttgaacgnttatganatntaactgtggaagananatngtnggtgng

SEQ ID NO: 3193 - DNA, 284 bp, Glycine max
  unsure at all n locations
  Clone ID: 700999102H1
agaagaaccaaaccagaaaccaatttgaaactgcctccatctccccccaaaattccaattcatcggcaatattncatcagtttggaacactancacatcgatctcttcggatctctctctcaaatatggtgaaatgatgatgctgcagttggggcagatgcaaactccaaccctagtggtgtcatctgtagatgttgccatggaaataatcaaaacttacgacctagctttttctgaccgaccacacaacactgctgcnaaaatcttactctatggatgcgcgg

SEQ ID NO: 3194 - DNA, 278 bp, Glycine max
  unsure at all n locations
  Clone ID: 700999103H1
gtttaatggcaggtccaacaataactgattcattggagttgaagaagcagctaaggaactggtgaagaattggccttcagagctattgaacatggttgattctacccagatgacactgtcattaagactccattggtagataggtggctttggccagccataagtctgcttctgcaggaagagttgtggtggttgnagatgcttggcaccaaangcctcccaantctggggnnanggnnctnntggncccnnggagacnacggggntncnnaaanana

SEQ ID NO: 3195 - DNA, 276 bp, Glycine max
  unsure at all n locations
  Clone ID: 700999104H1
tncttggatttgtaggttccactatntgagagnncgcnatgagagattgctngatgctatatgtgaganantgaaaccgtgnttattnacggacannacttacatgttcgggaaggagatcctgttgatgagatgctgttcatcatacgtggtcgcctgagagtgttaccacagatggtgggaggagtggatttttcaaccgcggttttctanaagaggctgactcngtggggacgagcttttaactgggccctggatcccaaatctggntcnaat

SEQ ID NO: 3196 - DNA, 169 bp, Glycine max
  unsure at all n locations
  Clone ID: 700999105H1
acaactatancctatggggttccatatttgatccagtcctgccgtcgaatatgcatgacatcaactacacacaccccatctagtaacatggggtgtgtcatcggtcattcgacgcagattggtttccacaggcctaatcatttgtcattgagcctttccacacaacata

SEQ ID NO: 3197 - DNA, 252 bp, Glycine max
  unsure at all n locations
  Clone ID: 700999106H1
ccttagccgttgctctgcttcaacattgcggaagcagaagaagcgccgcagctatngtgaagtactccagagaacccgacaatcccaccaagtcctgcaaggccagngcgctgacctcagagttcattttaagancactaggganactgcctttgccatcaggaagttgccccttgttaaagtaaacgatacttagaggatgttttngcccacaaacaggctattcctttcgacgtttngtggnngnttggg

SEQ ID NO: 3198 - DNA, 106 bp, Glycine max
  unsure at all n locations
  Clone ID: 700999107H1
ggtntttccgatgcatcagtacaaggtgacatgaaattntgngccgttcaaggtgnttcctggcncctgatcgagacacacctatgattgtngtgaactacaaggg

SEQ ID NO: 3199 - DNA, 279 bp, Glycine max
  unsure at all n locations
  Clone ID: 700999109H1
atcgtgtcttcttggctttctctgttcaggatcaacatggntattgtatcacgagctttgctatttccgttggctatacttgtgctcatattaagcacaccttgccaggtgcttttgggaagagtggaactaatgtgaaaacagctatttttctgtcccccaagtttgaacttggaccaggatcggtagccaataaatatgattatgacgctgattttccaagaggtcatatagcactaagagtttcaatgctgaggtagtngatgaagcagggnaccc

SEQ ID NO: 3200 - DNA, 274 bp, Glycine max
  unsure at all n locations
  Clone ID: 700999111H1
tggtgatgataacttaattagtgttcatgaatatgtcaagccttactttagtggttctaaattganaagctttctcgctggtccataatatcaccattactgangtattgacaaaactagtgcaatttgcaatttagaaagttagcagattgtgattttctcaagaganactttaagcagatgtctaangtttngtggggggctccgaggannggcnttttngggcccacaccntcatnnngtnncgngaaaaancgggaatgncanaaanctt

SEQ ID NO: 3201 - DNA, 281 bp, Glycine max
  unsure at all n locations
  Clone ID: 700999112H1
anaataatgttgttaccttcctctctctaacctgcaatttaacaactccttcgtttcttctttcttttttctaanacntcaaaaccaaaaanacaacancaacttcgtaacgngtctctcccttcntnccctcctctctccggttccctaattctgccctcactgcancnaattnnaattccccctnagcncncanttcgggganttagggtntggccccattcantcatggtggcgcnncnacaangggcgcnnggntttgcttgagggngatntgnagg

SEQ ID NO: 3202 - DNA, 275 bp, Glycine max
  unsure at all n locations
  Clone ID: 700999113H1
tctgtctattgcacaatggatgcagatgcagctcctttgcacatagcaatgtatccatggtttgctatggggcacctcaccccatttctccaccttgccaacaattagccaaaaggggacacaaaatctccttcttcatacccagaagaacacaagccaagtnagaagacctcaatcttcacncaaacctcatcactttgtccccatcatgttcctcacgttgatggtcctccttatgatgcngaacccattcagaggtcccctcctcttgtncc

SEQ ID NO: 3203 - DNA, 82 bp, Glycine max
  unsure at all n locations
  Clone ID: 700999114H1
ccgacgtagaanaatccctgcagttgtggactatgtccttagtggccatccgtncttaacttgtnaattactcagnngnnct

SEQ ID NO: 3204 - DNA, 112 bp, Glycine max
  Clone ID: 700999115H1
cttgctgtagaggcatggggtttgaagaattgcacccaaaaggaagagtggtacagtgacactgtgactgctgttcttgttcctgcttacattgatagtactgaatagttag

SEQ ID NO: 3205 - DNA, 282 bp, Glycine max
  unsure at all n locations
  Clone ID: 700999116H1
cacgctgtccattctttgccaccctcaatctctgtcctttggcgacctccatccatccatgaacttctccgacaacctccttcggtagacattggagtaacataatagatggaccagcaaaaccaaaataacactccagatggttcaggagaggtgcctttgaagcgtaaacgtcgtcgtccacggaaatacccaaagccagattcagaggagngttcctatatcctagttagtcanaatagaaggcagaatcctgttcgtgntgaacaagtccagtacctc

SEQ ID NO: 3206 - DNA, 266 bp, Glycine max
  unsure at all n locations
  Clone ID: 700999117H1
ctcgagcnngaagaaancnctaggncagagagctcttcctccctttctacacagcaatggaccgccgcagcacgcnctctngtcanngtgccggccctcganggtganatggcaacngatgcntccnctacngtttccatccctgangtcatgaaggcctctatccgccccgacatcgtcaatttcgtacactncgaanatctccaagnacagccgccagccatacgccgtcatcgtcgcgttngtcaccagactccgccgaatct

SEQ ID NO: 3207 - DNA, 100 bp, Glycine max
  Clone ID: 700999118H1
agaaaccaaaaagcaatcctttttttaggagttgtgccctacattacatactgaatttgattgataataaaagagtaaatattcgcccgcgataatttga

SEQ ID NO: 3208 - DNA, 275 bp, Glycine max
  unsure at all n locations
  Clone ID: 700999120H1
ggatatttcagggnnagaggagcntgtnncaacnaaggttctgatnccnngtcctgcctgatgattcatnaaggngcntgctggtgctccantanntagttgtttnggggatgganacctaaactcaatgtncactatgaganggccgggtgcgaaaacgtcaatgatttgnctcgtgttnacttttaccaggtttnngngtnaggctccttccattatgagaagcaattaaggnttggggctgatatngagngtaggctctggatttnctagnt

SEQ ID NO: 3209 - DNA, 236 bp, Glycine max
  unsure at all n locations
  Clone ID: 700999121H1
gcgctttctgcaaaccnaacatttcatctcccaaagggatcaacaggtcgaaggagaaaggggctgacattcacgaagcttttcagccggcttttcgcgaagaaggaaatgcgaattctgatggttggtcttgatgctgctggtaagaccactancctctacaagctcaagctcgnanagatcgttcactacaattccctaccattggtgagttgctaaatttccctcttttnctc

SEQ ID NO: 3210 - DNA, 282 bp, Glycine max
  unsure at all n locations
  Clone ID: 700999123H1
cagcaacaacaacaatataagtaaaagaatctctgtgttgtcatcacacttcgctagatccagccccatccatggcttccagagaagcaagcggctcttgccgtcactccctctgatgctgatgctcctaccatatttgacaagatcatcaataaggagattccttctactgtggtttatgaggatgacaaggtgcttgccttcagggacataatcntcangctcctacacatannttatcatncctaattcaagancgggttnaagtggnctanccagggt

SEQ ID NO: 3211 - DNA, 281 bp, Glycine max
  unsure at all n locations
  Clone ID: 700999124H1
gttaaaagctatcctagagagtgttcggttgaattatcttctaccacagggagggaagnaactgggatgcgaatttnanatgggnagacatnctttctcttggagacagcaaagattggggatggnacgcttgttctttcataagcccaaatttggtattcttgangagtgcaccaatgcaactagtgttgntgttgangaaganctatatgggcttgcnaaaganangggnatcacggttgtnacttcctcacaacgtcctgctnctaataccatttact

SEQ ID NO: 3212 - DNA, 283 bp, Glycine max
  unsure at all n locations
  Clone ID: 700999125H1
ctgaatttcatagcttgaatccaagttgggaagaaaacaatggnttcagcttcgctccaattctggtcttggatagcacctactcctatatcccaccgttacaccctaaatttgcttccctaacctcactcanattagccactcctgtttcttctactaataccgtttatcttcccaagcctctagttgtgcgttttgctctaactgagtccgattcgcccaaatccatagaactgnaccctcaaactcttctcccaagaaattgctgacagttttgatcttc

SEQ ID NO: 3213 - DNA, 277 bp, Glycine max
  unsure at all n locations
  Clone ID: 700999127H1
caacacaacaattcactaagctaaaatcacttcatcatggcttcctcgtgtgcttcctctgccattgcagctgttgccatctccacaccaagttcccagaagaatgatcactcttgggaagcacaaaagcttcttttcttagtgggaggaaactganggtgaacaantttacagcaccagttggagcacgatccagnactacagtttncgccagttgctgagcctgataggctctggggttcccaggcagcacccttcctccanggtaganggcgtt

SEQ ID NO: 3214 - DNA, 270 bp, Glycine max
  unsure at all n locations
  Clone ID: 700999128H1
ctcagaacccaggatttggtgaaacgatgaacagtgataggaaaattggggttgccttggacttttccaaaggaagcaaaatcgctctgaaatgggctattgacatcttatcagcaacggtgacactctctacatcgtccacaccaagccttccgnaggagtgaaccaggaanncttcttnnggtccccanggtccaccncngttncnnnntngnnttnccgaaaaaggggnntgcantnattntnagggngatcactgntccgaggttt

SEQ ID NO: 3215 - DNA, 283 bp, Glycine max
  unsure at all n locations
  Clone ID: 700999130H1
caaatttctgccctatcaactttcgatggtaggatagtggcctaccatggtggtgacgggtgacggagaattagggttcgattccggagagggagcctgananacgctaccacatccaaggaaggcantaggcgcgcaaattacccaatcctgacacggggaggtagtgnccaataaataacantanccaggcttattatntggctcgcccttccccaattgataaggcccccactaagataaatngcnaagttaatangtggggtgaagatatngntncnnt

SEQ ID NO: 3216 - DNA, 278 bp, Glycine max
  unsure at all n locations
  Clone ID: 700999131H1
anaaactgcaactgntatatcagatatacataacttattttctcacgatcanataactactaaanctaaaaactgtattctattagtnttcngtttgtgaaatagagtgaaacaagtgtgaggttgaaggtcctttgctagcagttaccatggtcctttttccatcttttgtgaatggattngtaaganctgtgtcaatcanganggagnagattgtcaaagggagnnggaagnnaacnctgggaaantggncaaggnnccnagcagtttgatttntt

SEQ ID NO: 3217 - DNA, 279 bp, Glycine max
  unsure at all n locations
  Clone ID: 700999134H1
aggtcatccgtaagaacttggtcaagangtgncttgagctcttctttganattncagagaacaaggnggattacaacaagttctatgnggctttctctnaganttaaagcttggtatccatgaggattcccagaacaagggaaagattgctgaattgctcaggtaccactccaccaagagtggtgatgagctgacaagcctcaaggattatgtgaccaggatgaanganggtcagagtgacatctactacatcaccggtgaaagcaagaaggctgttgt

SEQ ID NO: 3218 - DNA, 279 bp, Glycine max
  unsure at all n locations
  Clone ID: 700999135H1
gntttctgntacattgagcgaaggaaacaaaaaacaacacagtcaattggcaaatgtctaacntctaagcccgttacccctcaagagacaaggngaacaatcgtcgatgatggcgcctctgccattaaaccttctcgcctcaaaatcgcantaccctctgaggattccgacaagaagaatgcgncacaggaggctcaaagatgttgaaatncngtgtcccaatagtgtatgggcccatggnttcctatctggngggaangnccagnacgtcnnnnnnaa

SEQ ID NO: 3219 - DNA, 279 bp, Glycine max
  unsure at all n locations
  Clone ID: 700999136H1
aaggcaccagcctgtttggnttgcttggggtnggatggaatggaaggaacgaancttgantanaagccagaccaattataccanaaaactttatcaattgatcaaacagtgaaactgctgccagatgtctccaggcttggggtgttctggagcatagggttggcaatctttcagctgctcgtcgattatntaaatcatcgtngantataaattctacagagttacgtgacatggatgacttgggcctcagtggaggnagctcaaggnanttctgtgcgt

SEQ ID NO: 3220 - DNA, 279 bp, Glycine max
  unsure at all n locations
  Clone ID: 700999138H1
gancntgcntaacatcaaggttcctctcattnttggtanntggggaggtaaaggtcaaggaaantccttccaattgcgagctcntctttgccaagatgggaataaccccatcatgatgagtgttggagagttngaaagtgganatgcaggagagccagcaaagttgatanggcaanggtaccgtgaagctgntgatataatcagcaaggggaagatgtgctgtctttccataaacgatcttngatggcangagctggtcgtcttngtggancactcatt

SEQ ID NO: 3221 - DNA, 275 bp, Glycine max
  unsure at all n locations
  Clone ID: 700999140H1
tgtataatgaaaattgctcctagttgggttggtatgatgtactaaataagttagaagttgctgtaaatcacgtaagaatatcatggcctgaattgtgtgtacacagacataaataacgatcatatattgatagttcatagttacatattgtattgtattgtattgatgcgccccgctttaattatcagttataagaattaagatagcatgtcttgctactttgcactaaaaaanaaaaaaaaanggggggccgccgnnnagtgagcccntcgccc

SEQ ID NO: 3222 - DNA, 281 bp, Glycine max
  unsure at all n locations
  Clone ID: 700999141H1
accncgtgaaattctctgtcaacgaatcgctggcgaaggaaaatcgtttatctcttgagatcaagctncatctccgaccgcaccctcggcgacaccgtcatcggcccgtccatgttcctctcagggaactcctggataaccccggcgatgacagctccttccgccaagtcagttatcaggtgatgaagcaatcaagaaaatccaagggatccttgaatttctcctacaaattcggcgaacatgttcccgccccggcngccaagacacccaaagcggccaag

SEQ ID NO: 3223 - DNA, 277 bp, Glycine max
  unsure at all n locations
  Clone ID: 700999145H1
ggagtacaatctagtggcctngcagatgttttgtcaagagccttggatttcttggaagatgctccatactggcaattgttcctgctgttagtctaatatgagcattatcactgagttcatcacctccaatgatgctactgccacccttcttgtcccacttctgtatcacatagccagaatatgcatgtgccacccncttctgcttatggtccntggaggattagcaatgaagtttggcctccnggntnngattttgnaccaccanacnanggtgngg

SEQ ID NO: 3224 - DNA, 274 bp, Glycine max
  unsure at all n locations
  Clone ID: 700999146H1
attatttatgaaggaattgaagaggagaggtatgacccctacttcattgcttgatgattacaaacaaagcgactatggacttgatgaagaggtgtatgtgaagaagaagatagaggtttcccaaaaanaaaagctgtctcaaccaatgttgagaggagtctagacaatcagagggaacgttctatggcactgnaacagtgaaggtcttgagggttggnacctcgtgctaanttcttttgacattggaggaacntcctnntngggatngggccat

SEQ ID NO: 3225 - DNA, 271 bp, Glycine max
  unsure at all n locations
  Clone ID: 700999147H1
tggggatcgaattgtatcgttcctgattggccaattcagcttgctttggattgatcagcagcaacgcctgaagttcaatgttgatgttgttgagagtgaatgggccatggtgctaagcttgatgttctggaatcaaagattgcttcagatacttcacacantataaaggcnctttgcattgttcacaatgagactgcaactggggtcaccatgnttggccaanntgagacannttcnggatncctacngcnncnncccccttcatgtggag

SEQ ID NO: 3226 - DNA, 280 bp, Glycine max
  Clone ID: 700999148H1
gccttttcttgtgtggccatagacccagagctattcctcaattatcaatatcttctgcttctctctctcgatgagaaacaacaacacatacagcaaaacatgaaaccaaaggaacaactcactctgaacccaacaacactgaatgttgcatgtgtggggatcttggcttctctgatcagctttttcaatgcaaagcctgccaattcagatctcaacacagatactgcagcaatctctacccgaagccagagtctcttggaacctgcaattggtgtttgag

SEQ ID NO: 3227 - DNA, 281 bp, Glycine max
  unsure at all n locations
  Clone ID: 700999150H1
tttnttcctggttcgcgttgcgcaccggcctctatagcgagcttgaaccatcttcagcttcagctnactttgcactaacaaagcgccccacgttctgagacaaaccagtatgctatctgccatgggggatcagaaagtttcgatttttcattgattgtgtataactgcacaaagaaggtagtgaagcaatgcgtagagcgatcgcgtttctcgttcacccacgattcctccttctcttccttgttctctcaatttnccccatttcnacatttccngggtcc

SEQ ID NO: 3228 - DNA, 118 bp, Glycine max
  Clone ID: 700999151H1
gcacagcatcgaaatttccctatacttgcttccgcaaggaaagaattctacagtactcgccgataaggggttttccaaagcaggagcaatgtcttcctcttatttccacacaacatac

SEQ ID NO: 3229 - DNA, 275 bp, Glycine max
  unsure at all n locations
  Clone ID: 700999152H1
gaagcgacttgaccagttggagaaggtgnagacggtgaagaccgagaanagnaaaccggttgctgttcctgccataagagaactcnancaagcaacagcaaggaggtccaatgccaccagccaaagctgggcgtttgactaatgcatatgtatcatctttccctgnngctcctacatttgtcaggtctccatcacacgggcaatacccaactgctcttccaccttanccttggccncccnacatntatngcagcagaagtccccgncaaatnctt

SEQ ID NO: 3230 - DNA, 275 bp, Glycine max
  unsure at all n locations
  Clone ID: 700999154H1
anttataacccttataatgggagcaaacctccttaaaggcttgaagggagcaaatacttctatttggacagttataggaattatagtagttcgatatattttctgccaattttgggtattctagttattaaaggagcaacacaattgggtttggtgcaaccagatcccttgtatcagtttgtgcttctccttcaatatgnattccacctgcaatggctataggcaccatcgcgcattgtttggagctggtgaaggtgcatgtcctgttancatgg

SEQ ID NO: 3231 - DNA, 276 bp, Glycine max
  unsure at all n locations
  Clone ID: 700999155H1
agggattattattatttaactgtaatttgattgatatatcaatcctttcgaagagaggatgttggaagcttgtaatatgataagcataagcctttcgttttttaagtgcgggccagtcagccaggcattctagcaccttataaccaatcatccatgaacacatttattagctagcttctcgatttaggttccatttaattagaagacgagtgccttgactacaaatnatttganttattttatgacgcaagtattnggtgtatgtattggaagatt

SEQ ID NO: 3232 - DNA, 255 bp, Glycine max
  Clone ID: 700999156H1
agtgagcgtgaaagatgccttcggcgaggctttcagggtcaccaaggctcgacgttgctattgacatgggcaatccatttctcatctcactgttgatggtttccttaagatcggagctgtcgcagccacgcgatcagctgctgaagatacttatcatattatccgaaacgggaatatctcaagtcatgatttcgagaaaacgttgaagaagatgtgtaaagaaggtgtatattggggaatttagctggtgtttat

SEQ ID NO: 3233 - DNA, 277 bp, Glycine max
  unsure at all n locations
  Clone ID: 700999157H1
cgaagtgatccactccaggtgggccatgctcggggccttgggctgcgtcttccccgaactgttgtcccgcaacggggtcaagtttgganaagctgtgtggttcaggccgggtcccagatcttcagcgagggtgggctggactacttgggcaacccaagccttgtccacgcccagagcatcctcgccatctgggccacccaagttatcctaatgggtgctgttgagggttatcgtattgctggtgggcccctcggtgaggtcatgacccaatctaccc

SEQ ID NO: 3234 - DNA, 281 bp, Glycine max
  unsure at all n locations
  Clone ID: 700999161H1
ctgatatcaagaacagatncacactgccaccatttttgacattgaagaactttgaaggattggaccttgnnaagatggannaagctgatgactctggacttgttcatatgttgccggtcaaattgatcgtactcttagctggaaggatgtgaagtggcttcaaacaatcaccagactgccaattcntggtgaagggtgtgnnggacngctgngggacncaaggananctgtacanagtggtgagactgggaattaannaggncnaatccncggagtangcc

SEQ ID NO: 3235 - DNA, 279 bp, Glycine max
  unsure at all n locations
  Clone ID: 700999163H1
gcaccacattcacctgaggcttccaaagcaatggcttcccttgcagcatccactgctgctgcttcccttggcatgtcaganatgcttggaaaccccatcaactnagtggtgccacaaggccagctccatctgcttctagtcctgcctccttcaagactgtggctcttttctccaaaaagaaggctacaccaacacctccaaaaaaannnnnnnnnnnnnnnnnnnncaatgatgagcttgccaagtggtatggtcctgacagaaggatcttcttgcctg

SEQ ID NO: 3236 - DNA, 279 bp, Glycine max
  unsure at all n locations
  Clone ID: 700999165H1
gaagcatttgctagcgngtgaagctgaagcagcaaggtggagtcaanggaaacaattgttggcagcagcnnnnnnnnnnnnnnnnnnnnnnnncaagagagagtgaacccttggcttacaccaaccatgggtttccctcccatgacatcaatgcaccattttagacctttacatgtatgggggcatcaaaccatggaccagtccttcatgcacatgtggcctaaacatccaccatacttgccgtcaccgccggtatggccgccacaaacagctccgtct

SEQ ID NO: 3237 - DNA, 274 bp, Glycine max
  unsure at all n locations
  Clone ID: 700999169H1
cacacacacagctagcagatattacatacacgtgaatcactaattaagccatggagaagaaatcaatagctgggttgtgcttcctcttccttgttctctttttgctcaagaagttgtggtgcaaactgaggcaaagacttgcgngaacctggctgatacatacaggggtccatgcttcaccactggcagctgcgatgatcactgcaagaacaaagagcacttgctcagaggcagatgcagggacgattttcgctgttggtgcaccaaaaactgt

SEQ ID NO: 3238 - DNA, 270 bp, Glycine max
  unsure at all n locations
  Clone ID: 700999171H1
gtgggggagattgacaaggaagcttgctagtggtatcatgaaagggttgttcacatcctactaagtgctgtgagtctagtgtgaacatcattgaagagggaatcancataagaatgttgatcctcctttgccaccatcttctaacaatgngggtggtncgtggagttcctttaagtgttngnagatantgnctaganaggggaaaggncngtgttcnacnannncgggnncctttagtgnccncaantnggttnanntgcccccccccnc

SEQ ID NO: 3239 - DNA, 276 bp, Glycine max
  Clone ID: 700999173H1
cacaaagggcgcctatacaactggatgtgtttttccctttcatttttggctcttggactgtttctggcattaataggaattcctctaaataaatcgctgtaccagtcagttatatgctactaacttctgcagcttctggtctcacattcattgctttatattttctggtagatgttcatggtcacaggcgtttgacagcgttgttggagtggatgggaaaacactccttgagtatatttgtcatcgtatcttcaaacttggccgtgatgctgttcc

SEQ ID NO: 3240 - DNA, 250 bp, Glycine max
  unsure at all n locations
  Clone ID: 700999175H1
ctganaagngttaatcatagtagcngtagagctcgagcaatagcaagcgaacangaggctaccggtatncctcaactggatttctgctgcagaatacttgnccttngnaaaactggagttggtnaaagngctaccatnaaatnccnntatttgntcangccaaaanccaccnctggngcttttcaaccngcnactagttncntcccgngntgttgtgggnaantnncatggggncttaactaaccattat

SEQ ID NO: 3241 - DNA, 277 bp, Glycine max
  unsure at all n locations
  Clone ID: 700999177H1
ggcagaaagcaagctcatcctagagttttaaaaatggcagcagcctcctcccatggctctctcttccccnncccttggctggcaaggccgtgaagctgggccatcagcccccgaagtcgggagggtcagcatgaggaagaccgtcaccaagcaggcctcctccggaagcncatggtacggccccagaccgcgtcaagtatttgggcccattntcctggcgagccccgtcctacntnatggcgaatncccaggtgactagggntgggaanntnngggg

SEQ ID NO: 3242 - DNA, 272 bp, Glycine max
  unsure at all n locations
  Clone ID: 700999182H1
anaaagtgagttcatagaaggttttggatcttggtcttggcgtgttgttgtggtctggttttttaggtttacgaatttttggntaaaaagaaaaganaggaacaatccacctactatttgtcacttttcttcgtttctctggattttggatcaatattgtgatgccaacggaganggtcgantgananncagancaagatttntagacanaggctttttnagaanaanagnctttnccccnngnttnatttcgganaantgaacctttttnt

SEQ ID NO: 3243 - DNA, 273 bp, Glycine max
  unsure at all n locations
  Clone ID: 700999183H1
gcgccctcatttccgaagagctttcttataaagtcaaagagttacctggagttctttgggtgctaccagattcatatcttgatgttcccaacaaggattaggaggatttcaggtgatttntttgttgatgggaaagtaattcctaggccacagtatagatattcggataggcaacccagtaggagtagacctcggccacggcatgacagacagcggcaaacaatgcaggttgaaaggagagatcaacagaatggaaccaaggtccgggggntt

SEQ ID NO: 3244 - DNA, 271 bp, Glycine max
  unsure at all n locations
  Clone ID: 700999184H1
ctgatgtgttggcgttcagtgggccagcacctgagaggatcaatggaaggttggccatgattgggtttgtgggtgcaatggcagtggaagtagccaaaggcaaggtgtgtttgaacaaatatccaatggtggtatcccatggttcttgggaacaagtgtggtccttacccttgcttccttgattccactcttccaagggatcagcgtggagtctaagtccaaagggttcatgtcctcagatgcagaatgtggaatgggagattnctatgtt

SEQ ID NO: 3245 - DNA, 274 bp, Glycine max
  unsure at all n locations
  Clone ID: 700999185H1
ctcccccananccccacctgagagaatcacattcaccttgcctgtcatcaattctgcatccaatgttgcagtagttgtcacaggcgaaagcaaagcggaatcgtacacttggcaatagacgatgttggacctgatggccccttaataccagtgagaatggtccaaccagcgatggggaagttggtgtggtttttggataagctggctgcctcaaaacttgaagattccaatttgaacaagtaggacatgttgagtttgtatgtagtgttagggg

SEQ ID NO: 3246 - DNA, 275 bp, Glycine max
  unsure at all n locations
  Clone ID: 700999186H1
gggttatgcttggttccagtgtcatgcacgctgcaagttggaagtgacaatggagctgactattgggctcctgcttttggtgggggatttcggtagattgttaacttactattaataggttatcatatgcagcatacagagagagaaaatatattcatggagattgtataacatcattagcagtcaatctgctgcaaaacctaattaaggcgnattgcccatgatgctatacgcantccccngaanaaattgtanccgccaccnagnttntnttt

SEQ ID NO: 3247 - DNA, 278 bp, Glycine max
  unsure at all n locations
  Clone ID: 700999188H1
ctctcctcctcgatcccaattccactagggattcaattccgatncgattccgagcttgtnnagatccaggacaacgtntcgtncncccagattctgttgtannnaaaataatcttcctttgcccaacaggtaagttggnaaaaaatggnccatgacaagactgggtgccnagctcntcctgaaggtcctnnattgtgcatcancaactgtggatnttttggaagtgcaggtanccatgcaanatgnggtctaaatgccacaaagnacatggtgctgaa

SEQ ID NO: 3248 - DNA, 277 bp, Glycine max
  Clone ID: 700999189H1
cctggttctattgggattttcaagagggagtttggtgacgatgccaaggtttgggaccgtgaaaagcttgtaataatacccgaccattatatattcacaaggatgaacgtgccaatcgcaatgtagacatattaagagatttctgccatgagcagaatatcaagtacttttatgatattaaggatctcagtaattttaaggtaaatccagactataagggtgtttgccatgttgcccttgctcaggaaggtcattgtaggcctggagaggttctctt

SEQ ID NO: 3249 - DNA, 272 bp, Glycine max
  unsure at all n locations
  Clone ID: 700999190H1
catcttcacaaactagtaatattattcttcgaatccattttattattcataatgggtattttcacatttgaggatgaaaccacctcccctgtggctcctgtaccctttacaaagctctagttacagatgccgacaangtcatcccaaaggctgtcgaagcttcaggagtgttgaaaaccttgaggggaanggtggccctggacccatcangaggatcntttcgttgnggatggnaganagcaagtttgtgttgcacaanatagatcagttga

SEQ ID NO: 3250 - DNA, 272 bp, Glycine max
  unsure at all n locations
  Clone ID: 700999191H1
gaattctcaaaaggtctcatttcaaagtgggttgatcttgaagccttctctttcattcggatctttgtactgctgaatctgctgncatcaaggattcagtgcttaacaggaagcaattttctgttctgaaggctactaaagttgaaaattccaactctgcccctgnaacggncannggacnnactntggcttnatcaaaagaaaaccaagtgcanaatggaaaactctctgatactactatccnagatgagcttnattntggcttcaggtcc

SEQ ID NO: 3251 - DNA, 272 bp, Glycine max
  unsure at all n locations
  Clone ID: 700999192H1
cgcagagccaagacgacggcaaggactaccaggagccggcgccggcgccgctggttgacccgacggagtttacgtcatggtcgttttacagagcagggatgcagagtttgtggccacttttctgtttctctacatcaccgtcttaaccgttatgggagtcgccggggctaagtctaagtgtagtaccgttgggattcaagnaatcgcttggnccttcggtggcatgatctncgccctcnttnnaccccngngcnggnctttcngggganana

SEQ ID NO: 3252 - DNA, 272 bp, Glycine max
  unsure at all n locations
  Clone ID: 700999193H1
ccggtcaatatcctcttgacgtttataataggctctgccttaggatggatccttatcaaattaacaagggctcccaaacacttggaagggctaataatggtgtctgttctgcaggaaatttaggaaacttgcctataatcattatcccggctatatgtaaagacaaaggtagtccttttggagactccaatgtctgctatcatatngnaatggcttangcttcactttctagggggntgggagctgttaatatatggnacttatgtctanac

SEQ ID NO: 3253 - DNA, 120 bp, Glycine max
  unsure at all n locations
  Clone ID: 700999194H1
ctgatgtcctgcaagctctggaagctntanagacatgcagccttananatcctanaaaatgcttncaacttcnaaggctgaagcgaannaggttgtncatgaatnctanatangngggcc

SEQ ID NO: 3254 - DNA, 51 bp, Glycine max
  unsure at all n locations
  Clone ID: 700999201H1
ggctcagntattgtcaccagtatgcatggagnngtctganaatccanantc

SEQ ID NO: 3255 - DNA, 86 bp, Glycine max
  unsure at all n locations
  Clone ID: 700999203H1
ttcaattcagaaactgatgtacattgttgnananttctagcaagtngnggaganagtgctgatgctcggggacgtagattctgagc

SEQ ID NO: 3256 - DNA, 115 bp, Glycine max
  unsure at all n locations
  Clone ID: 700999207H1
tncgatgttctggnaggnactctgcttctcagattgcntttgggagtctcttgtcagaaacagatggccctcactctcttccttccanttnccttcttnttcttccaganaagat

SEQ ID NO: 3257 - DNA, 274 bp, Glycine max
  unsure at all n locations
  Clone ID: 700999209H1
ctttgctgttcaagctttgcttgccactaacataattgaagananctngncctacgtttncaaaaggacatgatntcatgcaagaagtctcaggnttgcttnatatgtntntgagnatannaaagaatcccagntcttcttccttctagttatggagcngaaattncctaataaacctaggtttatccagattgtacagttagctggtngagancnttaanatnccgaaatcttanttgncagggtgntncgatgaacnacggagngancnggt

SEQ ID NO: 3258 - DNA, 107 bp, Glycine max
  unsure at all n locations
  Clone ID: 700999213H1
gtggtgccttancgctgtggttttcatcgtcttccttctcgccatatctcttnntntntttngtncttcgnngtaggcngaaacaatggcnggaaaagganagggtc

SEQ ID NO: 3259 - DNA, 274 bp, Glycine max
  unsure at all n locations
  Clone ID: 700999214H1
ctcgtcgccggcggantgttggatgagaacgaccggctgagganngagaacattctgttaacgaaggaattggagganatgagatcgcnctgcaanantatattcaatctcctgtcgaattacgctaacgttcangcggaacggtgnttccncgggngtngcggcgctgtgacatcggcgagnatacngtggagnagattaatccgaagctgtttggggtgntgntagtacgaagcgagcgagacncagagantnatatcgtttnnantctncc

SEQ ID NO: 3260 - DNA, 275 bp, Glycine max
  unsure at all n locations
  Clone ID: 700999215H1
aattgattgcctgcnagcntggtagcccactgctgctaggtgttaaagaattggcagaaaataaagaacatggttcagcatttgaggataacaaattcctatcaaaagatggaaagcccaggcnaattgtntttgtccagtgatgccatgctgtggttgagcatacaaagaaagtgctagttattgaggatggngaagtagtnncatctcaaggatggtggggttnctatttggnantttgaagatgncagggaaancntggtnnttctctttcc

SEQ ID NO: 3261 - DNA, 209 bp, Glycine max
  unsure at all n locations
  Clone ID: 700999216H1
attagtgcatcctgcccccattcatgtcaattatatgtttgctccttcaaaattaattttagaaaccttacagttataggcttacagcttttatcgtatactacaattcgtgtatacatattatgatgtatttggatatgtgccagattgtcacttttgttagtcaagtgttgatccctactttctattganaaanaaaaaaaanangg

SEQ ID NO: 3262 - DNA, 77 bp, Glycine max
  unsure at all n locations
  Clone ID: 700999219H1
acagacacaancaatgggcctgatttggccacaggcggctgnntaatgtaggaggatncatctanntgttgaggnnt

SEQ ID NO: 3263 - DNA, 269 bp, Glycine max
  unsure at all n locations
  Clone ID: 700999221H1
atcttctctcaaaatatttgtnattccatgcccaacgccctaccctgaaaatatggtagccgagagagaggttaacggtaacggcgtcggagagggaagaacaacgctaatattcacctacggaaccctgaagcgaggcttctcaaccacccccttctccaagacctcattcgctccggcgacgcctccttcgtcggaactaccgcaccgccgccaatatcctctggtctgtgggccctaaaangntccctttccncctnaaaantncg

SEQ ID NO: 3264 - DNA, 277 bp, Glycine max
  unsure at all n locations
  Clone ID: 700999222H1
gttggaggattctaaggcgaataaagaagcaaatccaacaaaaaatagcaactaattaatcctcggacagtgtaaaatcaaatttccacatttccgagagagnggatatggcaaaggaatacgagcaagctattgaagaactccagaaattgttgagggagaagagtgaactcaaagccacagctgctgagaaagtggagcagataaccagcttctnctgggnaacntcatcatctgatggcatcccnntcatcaagaagcntccggnnaggtnnnt

SEQ ID NO: 3265 - DNA, 81 bp, Glycine max
  unsure at all n locations
  Clone ID: 700999224H1
tcctccggagatcgaagacaggaagtcggagattgctgaacaagcggngagaggttgtcttcncgncgctctgtgncggng

SEQ ID NO: 3266 - DNA, 243 bp, Glycine max
  unsure at all n locations
  Clone ID: 700999225H1
cttccattctctctgtgtatntccctacctctcccttcaagatgcngatcttcgtcangaccctcnccggcaagaccatcacccttgaggtggaaagctctnacaccatcgacaacgtcaaggccangatccaggancanggannnatcccccngnaccnncatngtntcattttcnccgnanagnaanttgngnactgccgaaacttgggggggtcntaagatncagagggagagnntgtta

SEQ ID NO: 3267 - DNA, 271 bp, Glycine max
  unsure at all n locations
  Clone ID: 700999228H1
cttctctctcacacaaaacactagnnnctcccttcttccttgtcnctttctcttctcaacaacatgcagatcttcgtcaagactttgactggcaagaccatcaccctcgaggtcgagagtagcgacaccatcgacaacgtcaaggcnagatccaggacaaggaaganctccctcctgaccagcagaggttgatttttgctggtaagcagctggaagatggtcgcactcttgctgattataacatacaaaaggaatcaacacttcacttggt

SEQ ID NO: 3268 - DNA, 273 bp, Glycine max
  unsure at all n locations
  Clone ID: 700999230H1
cctacgaggntttgaccagcgacgccgccgatgttaganacgttgccgtcgccgagatcgttaacatgtctctgcgctccttggatctccaattgcctcctagagcacgganacttagtaanaatctcaaggaagttgagaaaggcnaaggagcaacctccgaacgtgcttagagattagaatgtggagcaaccaaaaggtctgatttacttcaaaaggaaaagggtcatgttaccaaaagttgaganaggcgaagtcatactcggattttct

SEQ ID NO: 3269 - DNA, 275 bp, Glycine max
  Clone ID: 700999232H1
ttgtggtcggaattgcctcaaagcttgttgcattccagatgcaaagctgcctttgtatggtttcaagaaggctaatattgggaaggatttggccctgcatgcatgcgccggggagcctcccctcgcattcctcgactctcttcttcttgagagtgggaagatcgcatgcagagaggactttttcgctatgatgttaccgcctgtgaaaccaaggtgattcctggtgaatatggtttcgttgcccagcttaacgagggtcgtcacctcaagaagag

SEQ ID NO: 3270 - DNA, 270 bp, Glycine max
  unsure at all n locations
  Clone ID: 700999233H1
cgatatctccctggctctctctgacccgnccccgaacaaaggaattatgattttcggcttggacaatgaatcgatnaattaaaaaaaaaggaanggagaaagccccctctatttctccgaaaggaatgtgaaaatccagncgggcacgaaacgacacctctctgcgttaaaacgactgnggnccacgatcggttcttcagttgaggcatgttattcgctgctcatgcctctcctactcttgttctncttcttcgtcgtcttggcttcgca

SEQ ID NO: 3271 - DNA, 129 bp, Glycine max
  unsure at all n locations
  Clone ID: 700999235H1
tccaactccaaatcctcctntttgtctctctgaattccaatagttgttgtgtnntgaagagagaagatgtcaagcaattcagatgcagcancancgnncgntgcatgcncgtngncgtntngncangct

SEQ ID NO: 3272 - DNA, 217 bp, Glycine max
  Clone ID: 700999239H1
cccatggcgtcccgaagaggtggagtctcactcccagaaagaccaagcaacaactcaggctccgtcctgcgcgaagatctcgcgctcctccatcgtcacccgcggcaaggaagccgccgtcgacgccgcattcgtcgccaagaagctcctccgcagcaccggcaaggccgcgtggatcgccggcaccaccttcctcgtcttcgtcgtccctctgatt

SEQ ID NO: 3273 - DNA, 111 bp, Glycine max
  unsure at all n locations
  Clone ID: 700999240H1
ccggattgatagttcgttgcatgcaaccatagttttattaggattntcnctnctttgttttcncttaggttnnnntgttgctctcnttcaaactcnatctttcnaaatcct

SEQ ID NO: 3274 - DNA, 264 bp, Glycine max
  unsure at all n locations
  Clone ID: 700999241H1
cactaacatttccctttacttgctaaaacatggtccaagaaaagaaactagttgacgaggtgtccggttggctcaaaattnatgacgacggttcagtggaccggacatggtccggaccggaccaattcaagttcatggccgaacggccctccccatgaacaattcatagacggcgttgccattcgcgacgtcgccgttatcacggtggtggccagagtggccccatgtccgacttnatctgccagagataaagccggaancnac

SEQ ID NO: 3275 - DNA, 247 bp, Glycine max
  unsure at all n locations
  Clone ID: 700999244H1
cgtgnaatgcgtataanaggaaaacnaagaaattagcgncanaatgttgggtgtgttcagcagctccatagtgtcgccnccggacgagctcgtngccgccggcnnccgtactccgtcgccgaagatgacggcggcggcgctgncgaagcggttcgaggagaagaacccctccgccgtgtcggtggaggtcggagagcatgtccagctcgcttatacccaccacaacgagtcgccgtttcagcncaga

SEQ ID NO: 3276 - DNA, 279 bp, Glycine max
  unsure at all n locations
  Clone ID: 700999246H1
ctctctctcaccaaagccttcctaganccgannaaaaanngangagcaatttgcccttcaccaannnagaannagcaaacaatggccgatcaacttancgnttaacagatctccgagttcanggaagtncgtcancttgttcgananggncggcgatggttgcatcacaaccaagggagcttggaattgttatgcngttcattggggnnaaacccaactgaggcagagctccnggacntnatgcaatgacntggatgntgntgggantgtgtancattt

SEQ ID NO: 3277 - DNA, 251 bp, Glycine max
  unsure at all n locations
  Clone ID: 700999249H1
caaaatcatcctcaggaagcattaccctgatgacaatgccanaagaagcattgtcttcccaccttctcctaatgctggtgggtcaatgatgagaaccacatctcagttgacttatccagatgcaatctttcaaaagaggctttaactgcgattagtgtancnccagtctctaaatccagcntcaactattgctcacatatctggtattggtgtanaagccatccctgctatttcacacttatccaatctcg

SEQ ID NO: 3278 - DNA, 269 bp, Glycine max
  unsure at all n locations
  Clone ID: 700999255H1
ggtgtttcatttgtgaaactaacaacaacacaaggccatcatcatggcagctgctnccccaatnngcaagccaacttcaagtccaccttcactaggactcttgtagctcccaagggcctctctgcctcttcaccacttcacctcgtgccttctagaaggcaatttagcttcactgttaaggccatccaatcagagaagccaacctatcaagtgattcagccaatcaacggtgacccattcattggaagcctggaaaccccagttacatc

SEQ ID NO: 3279 - DNA, 268 bp, Glycine max
  Clone ID: 700999256H1
cctggcgccacggcctcttcctccccctcaattccgctcccttttcctaacctcaccggcgggtgctcgtactgctactgtcatgcctagaagggcggcggtcatcgtgtcggcggcgacggcggagacgccgaagaagaagggcgaatcgaaagggttcgtggaagagatgaggttcgtggcgatgaggctgcacacgagggaccaggccagggagggcgagaaggaggtcaagcagcccgaggagaaagccgttaccaagtgggac

SEQ ID NO: 3280 - DNA, 265 bp, Glycine max
  unsure at all n locations
  Clone ID: 700999257H1
catgatgatccttgccgttccatgcaaacaaacatcttttttcttctgaaatttgccaaaacttgtgtcaatcattggaatcggagtttttgggtgcaggtgaaaagcaattttgcatcaggtcaaattggttccgtttcagtgaattgtgtattccgttagtatccattttcttgtttatttatatctcaaatngcgatattnacngctgccnaagatatgtggtagatttgtgtgacttgaatcaaatgcctcacganngctt

SEQ ID NO: 3281 - DNA, 175 bp, Glycine max
  unsure at all n locations
  Clone ID: 700999261H1
canattcgaacaatgattttntcattttctttttaatactnttttggtttagactccctaagaatctgtcgatatttccaattaaatcttcttgttcctgtgaaggtcctataaaanaaagggctatgccctttctttactcagaagggccttattccaagttccacacaacata

SEQ ID NO: 3282 - DNA, 99 bp, Glycine max
  unsure at all n locations
  Clone ID: 700999263H1
ccctttttctgctctttcagaaattctgtaaaanatatattaccctncntntacagctcctttgaagatgaacgtaacttttctactttcaggcnttaa

SEQ ID NO: 3283 - DNA, 228 bp, Glycine max
  unsure at all n locations
  Clone ID: 700999266H1
catgatnatccntgcccgntccatgcnaacaaacatcnttnttcttctgaaatttngccanaacttgtgtnaatcattggaatcggagtttttgggtgcaggtgaaanncnttttgcatcnggtgaaattggttccgtntagtgaatngtgnattncgnnagtatccatnancntgnngattgatntctcaaattgcganatttagggctgcctaaaganatgtggta

SEQ ID NO: 3284 - DNA, 266 bp, Glycine max
  unsure at all n locations
  Clone ID: 700999267H1
caatgacaacggtagctgcttctcttgatgccaaagaggtgtctacctccaaaactgaccaaaaccaagtgtgtgactgtgatccccaaactagccatgtcttcaaatcaaaattaccagatatcccaatctccaaccacctccctctccacgcttactgctttcagaaactatcccaattctccgaccgcccatgcctcatcgtcggacccgccgccaaaacctacactaatcccgagacacacntcatttcacgcaaattgccg

SEQ ID NO: 3285 - DNA, 258 bp, Glycine max
  unsure at all n locations
  Clone ID: 700999269H1
tggagactaagaccaagangaccctatgtggtcctcgctcattaattctctcatatcattcattcctttttatatcaactatttatatggtcatgttttccttatgtaacttctgagccttttttntcttctcataaccttcttctggatctctctggaagttattatggacacaagcaggnatgagggaaaaagggtcttnaggtacaaaggggaagangcaaatgttnggntggggantaaaaaggggnngggggg

SEQ ID NO: 3286 - DNA, 260 bp, Glycine max
  unsure at all n locations
  Clone ID: 700999270H1
gnnttggtgggtggtgatcaaattgagattttgcaaaatgttgtctgaattgggaagaagacctatgcttgggagtaacgagggttcttttggtgatgaattggagaaggagatcgggatgttgcttcgtgagcaacgcgacaagaggctgatgatcgtgaacgagagcttaatatttataggagtggatcagcgcctccaactgtggagggtnctttaagncctgttngaggtttntgggggnncccctggcccccccc

SEQ ID NO: 3287 - DNA, 209 bp, Glycine max
  unsure at all n locations
  Clone ID: 700999273H1
ccttatcatggtaaagcttctgacacgtgggcagtaggagttactttgtactgtatgatattgggtgaatacccatttcttggagacacacttcaagacacatatgacaaaatagtcaatgatccttagttctgccagatgacattaacccccagttgaagaatttaatagaaggattactatgcaaagacccancaactgagggtgac

SEQ ID NO: 3288 - DNA, 77 bp, Glycine max
  unsure at all n locations
  Clone ID: 700999274H1
cgttgaccttctttcaggatttaatggnanagactattgttccttgccttgggnnactgggcngnagnggtttnatt

SEQ ID NO: 3289 - DNA, 159 bp, Glycine max
  unsure at all n locations
  Clone ID: 700999276H1
cctatggttaacacggtcgctaccgacaaccacataactgtcagaggtagcgactggtacttcgctgtcactgcagtccatggctgttcagcaccatcgtcttcatgggtctgtcattcaagaagganagatacccaacgactattccacnncanntac

SEQ ID NO: 3290 - DNA, 266 bp, Glycine max
  unsure at all n locations
  Clone ID: 700999277H1
agagaagtgcagagagagcgnangnngacnnctgcgtnanacagtgcggtaactctttcttttctnttctttctttctccgatcgcatcgctngcaancacaatcangcnttcacgaagaagaactctcttgaaggtntnatnctcggtganagcggggtggggaagacgtctttgatgaancagtatgtgaataagaagtttagtaatncagtacaagggcaaccattggagcggatttttaacnanagaagtgcaatttgaaga

SEQ ID NO: 3291 - DNA, 269 bp, Glycine max
  Clone ID: 700999279H1
cttgttgggtctgctgagaattcatgttgaaaaaggtgtcaatcttgccatcagggatgtggtgagcagtgacccttatgttgtcatcaaaatgggcaagcagaagctgaagactcgggtagtcaataagaatctaaatcctgaatggaatgatgacttgaccttgtctatctctgaccctcatgctccaattcatctacatgtgtatgacaaggacacatttagcatggatgacaaaatgggggatgcagagtttttcataggtccat

SEQ ID NO: 3292 - DNA, 268 bp, Glycine max
  unsure at all n locations
  Clone ID: 700999281H1
gaaatagaatcgtcgattttctctttctctgactctagggtttcattattttcttctgtagatccatctatctagcttcgganctgcaaatggacgtcgcagtcactgccttccggtcaccgctgatcatcctccgaagacggtcaacgagtctgcctcagctcggttcggttccacttttgggttttccagaaagcaacggttcngttcagtatgtatccccaaacanaagcacaagcaaggtcctagaagangntttntgttcnct

SEQ ID NO: 3293 - DNA, 265 bp, Glycine max
  unsure at all n locations
  Clone ID: 700999282H1
ggnacatggttcgaggcagaataactgtacagacagagaagtccccttaccagtacagaggaatgtttcatgccctgtcaactgtactcagggaagaaggtccacgtgctttatataagggctggcttccttcagtcatttgagttattccttatgtgggtctcaactttgcagtgtatgagtctttganagattggttaattaaatctaatccattaggtctagttcaagattctgagtngattgtgnnantccgccnggctgt

SEQ ID NO: 3294 - DNA, 268 bp, Glycine max
  unsure at all n locations
  Clone ID: 700999283H1
gggananaatcatcacttcagtcattggtcagtctggacaagttgatccaaaattaccaaacanntcaacttggattgtttcctgctacaggggttacttctgatcacaagtctaaaggaaatggaaatgtcttcccttctaagctttatgcaaaatcaggtgtccatcccatatcgactccaaaatcagtgtgccananagagagttctccatttcccacaagccanttcctcccagtcnaatcctaaaattcacaantnnagnggt

SEQ ID NO: 3295 - DNA, 266 bp, Glycine max
  unsure at all n locations
  Clone ID: 700999284H1
catgaacagcatggggaggttcggggaangactttgnntccatgaacatggantagttgctgaagaacatctggaccgcggaggaggttcagacaatggcgtcggcgggagtngncgccgatgacggcngngccggcgttagcatttgcagcggcaggggtcgctgangttnccgcggacnctaaagccataagaccgttgatgaggtttngnaagncatttcgaaanaccacggtgggccnaatttgggcccaaaangcagaagg

SEQ ID NO: 3296 - DNA, 264 bp, Glycine max
  unsure at all n locations
  Clone ID: 700999286H1
gcatgtctctgctggtcaaaataattcgactcccctggccaaaacgaccacgccctccaattaaatctcttagttgacctgaatcattaacatcatcaagaaagaggagaacctttgncccgtttgagtctttcacttgaaatacttatgcctccctctacaagctctttctcatagttgcttcttgtacgttgtattccatgtctttctatttcttccggaacatttaaaacaagactgctggaacagaactgtgacgccaat

SEQ ID NO: 3297 - DNA, 263 bp, Glycine max
  unsure at all n locations
  Clone ID: 700999288H1
gcttgtagcaaagtctgatggggtggagttcacagtcagagagggtcattattgtcctgcattgtcaaaagctgttaaaaccatgaagaagggagagaaagtgcttttgacagttaagccacaatatggatttggtgagaggggaagccagaacaaggtgatgaangtgcagttccaccaaatgcnacnttncagantactcttgnattagttnctggaaaactgtttctgaagtacctgatgacaaganggtcatnaagaag

SEQ ID NO: 3298 - DNA, 261 bp, Glycine max
  unsure at all n locations
  Clone ID: 700999289H1
gcaattgaagttgaagtcttgcccttctctcttcaactccaaacacaagacatcatcatccatggctgcctccgtctccactgtcggagctgtcaacagagctcttttgancctgaatgggtctggacctggggtttcgctcccagttcatccttctttgggagcagcttgaagaaggttattggctcangggtccccaacacaaagannnnctctngaagnttcaagattngngntgtagaagttgagagagnnannnac

SEQ ID NO: 3299 - DNA, 260 bp, Glycine max
  unsure at all n locations
  Clone ID: 700999290H1
taaccaggcaccggaatcagttgtgantgtcanactgaatggttggncaagatccatactacattgcgagcagaagctgtagctgatagtttacatgcaatgcagactataaacatatgtagataatgtgctagggnanacttaaccttatctttgatttanccgggntaanatggtnnntcccnggnnantttngggggncccccnncnaaagntttgtttgtggggggggcnccnaggggggtttgncnccnggggcg

SEQ ID NO: 3300 - DNA, 266 bp, Glycine max
  unsure at all n locations
  Clone ID: 700999291H1
gcttganctcacnatcgatatcaccccaaactcgancccactaatagttgaagnagcgagaatgcctctgggagaaagagcaggggatnagagcgngtctcgctactgcggtgtagagaccgncttcaacgatgacatggnacacgtcntccatttcaacctttattctggaagcttcgatttcgttgttgctcctctgatggatcattcttatcggccaagtttagtgcnaaaaggatgctttggggtctggtgttctgccattt

SEQ ID NO: 3301 - DNA, 211 bp, Glycine max
  Clone ID: 700999292H1
cattaatggaatttcgtttgttgattcgagcaaagttcaccaaaatattgtccaccccattatttgtcttctcattctcatcactaacacacaagtgtgtgttgtagatttctcagcttgcaacatggcttccatcatcatgtcatttgctccagcaactggtagagtctttgcagccacagcggcaaagggtgctggtggaagcaaagaa

SEQ ID NO: 3302 - DNA, 266 bp, Glycine max
  unsure at all n locations
  Clone ID: 700999293H1
ctcattctcattctaacattaccagacagccatgtacgnagagaagaagatgggcgaggagctggccccagtggtcacctccagctgtggcgatgtcgaggacttgaagcctacgacagaggtcgacgctgtcttcggcganatcaacgaggatggcccaaactacaaggatgtcggagcggtttggcaccgtcatcttgatgatgaagacgcaaatcggatgggagtcttgggtatccccgctgccctgcacacccttggtatga

SEQ ID NO: 3303 - DNA, 109 bp, Glycine max
  unsure at all n locations
  Clone ID: 700999294H1
cacactttctagatagctagcctgtaagatatatatatagatatttcatatatatcctatggnccgngagtgcccttgttctgtaccaaccctttctnccacacaacnt

SEQ ID NO: 3304 - DNA, 295 bp, Glycine max
  unsure at all n locations
  Clone ID: 700999301H1
tgcagagacatgagaattaggacattggatcagtcgttctcnaggcaangtggcgctgccaagagcgcngancctccgggcagaaattnggcaacggcaancacgtggaagacgggtagtagtactccatntcncattctctcatttcctttnctaattaaagatcatgaacagcgagagacagtcgacgacgacgacgttgctgcacggcaagtacgagctaggtcctgtgctggggnacggaagcttcgccaaggtctaccacgcgcggaacctgaagacggngcagcacgtg

SEQ ID NO: 3305 - DNA, 284 bp, Glycine max
  unsure at all n locations
  Clone ID: 700999302H1
catttgcgagttgttcctgtcatcaaagatngagattatacccttatatggttacactttgtgcttattngttctgnntttctacttatngtttgtntnttggttanacgtantattcacttgctncttatatctcttaagtctagacgtctttgtaaganaactatccgttttagcgttaganattcttttatggtgttagcatgattttgaattgcgattgcggtcgtggcggtggttgcgttacggtaagtcagaaaacctttatagttcaggtaatcgcc

SEQ ID NO: 3306 - DNA, 282 bp, Glycine max
  unsure at all n locations
  Clone ID: 700999303H1
gnttanagngaacgaattcagcgacgngtttnatgcggcntgttttcctgcttccnantttctcacgctcatttnatccaagttgggcatttggnttgtcngcnanngtgatacaanggttgcngggcatgctatggagggngntcagacaatgtcaatcagtgttnacttggaggntcacnttttggaagtacagaacttgtgcgcatactattgcagnttgctgcaaagcaaacagcttggatgtngatgttganttggcgttgggnttngcctcccatc

SEQ ID NO: 3307 - DNA, 278 bp, Glycine max
  unsure at all n locations
  Clone ID: 700999304H1
gatggctttaggtgttcctgatcttccgttgncatacgtggctcacgttctggcagtngttgccancgtcttngtcgtggtctgggtcgtcaatttcaggggtccttggcttgggattctgatnacaagtcctcatcttnaccattcatgccagttcctattgttattggctactagttcatgggggtgaagctattatangttacaaagcttttcccctaaagaaggnagtgaagaaattgatacnaccttgttttccatggccatcgcataatatt

SEQ ID NO: 3308 - DNA, 279 bp, Glycine max
  unsure at all n locations
  Clone ID: 700999307H1
aacgcagcatcgctattctcttccantccatggctttgcccaaccagcaaaccgtggattaccctcntttcaaactcgttatcgtcggcgatngtggcacaggaaagacaacctttgtgaaaangcatatcacggagaantgnnaaganatatgagccaaccatcggtgtngaggttcacccattggattttttcacaaactgtggaaagattcgattttactgctgggatactgcctggacaggagaatttggtggcctcagagatggatactatatc

SEQ ID NO: 3309 - DNA, 281 bp, Glycine max
  unsure at all n locations
  Clone ID: 700999308H1
tttagagactggagacttgatgttgataacatgtcatacgagcaattgnttgaactgggtgagagantcggttatgtcaacactgggctcaaagaagatgagnatgggactcaacataancncagttaagcctcaagttcanatgataacatcaaagcatcaactagancaaaaagtgcagtgtttgtccaggaggagtatgaatcagatgatgagctggggagattgaagtgtgaccacagctatcattttcagtgtataaaacattggcttgagcatac

SEQ ID NO: 3310 - DNA, 280 bp, Glycine max
  unsure at all n locations
  Clone ID: 700999311H1
ccactttcccccatagagctgatggngattatgcnagcggcaaangtgatnattananctgcttctcccggtactggggttattgcaggtgggtctgtganaattgntctcgaaatggccacnagttgataatgctttgggaaagccaactaggggagtaatantgcaactcaacaatggccagancgactgttgctgctgtgcagaaaatgaagcngtttcgtgaggttgctgaggagcgtgggattccaatggaagaattgtggaagtnatgaatttg

SEQ ID NO: 3311 - DNA, 292 bp, Glycine max
  unsure at all n locations
  Clone ID: 700999318H1
ctnaatataatnttggttggancaatntgcttgacgcagttnnttatgtattttggtgcaagaagacgcttaccaancnttgggaaaagtggnactaaatgtgggaaccaatttgcgttgcttacacttatggaggaattgcagnaccnacncaatgggctttgagaaagtgctaggaaagggagcttttggtattgtgtacgaaggagtgnatcaacatgggttcacttactctcgtgggcantaaaaaggttgaacacttttctcttggaagaggttcaaaaggaattcc

SEQ ID NO: 3312 - DNA, 285 bp, Glycine max
  unsure at all n locations
  Clone ID: 700999324H1
gtgcanacaggnnttaacatgagacagatggntgaattaanaatacttggttttcacagtnaatttaaaaaaancttataacttcgatgccattaggagctcctttgttctatgctccaaanttttttggttttcaagnagnaacnggattcnnagngattatncggttgtttagtgantagcaaaatntcagtgttcacttaatgggagtcctacaagtaagantggggtgtnctaanggnctaggatacgangacccncttgctcctttntgttcaatanagc

SEQ ID NO: 3313 - DNA, 279 bp, Glycine max
  unsure at all n locations
  Clone ID: 700999325H1
agttgancctcaaaacctcctntgctgcagagggaaaaanggcttagtcccacaacattttccacacatacaacaanttncttaccaaatggattctacntcngttcagcnaggacattgatgaacctttgctgtnttnnagaaccnttcacccgagccagcttcttgtatnnantcattcagcncaaagccatggnatcagatggtgaacttgcgcgaatactctcaaacactaggcgtcctttcgcgaagtcttgnannggcaacntgggtggagtc

SEQ ID NO: 3314 - DNA, 291 bp, Glycine max
  unsure at all n locations
  Clone ID: 700999332H1
cnctcgcctgctttcggagattgagtgagtnattcggtatcaggaactcccctccncgtncgncgacagcagcttcgtcaatatttnnggacacnccggntcgtaacgatctggcgaaactacttgcaagntatcaccatcatcgtcnganagctcgnactccaagaagtncctcgcgatcgtcccttctattcgaaatcgcatggaatatattttacggcgatccttcgcggccagtttggactacgtccgggagaaagcgttattctcgacgagaagaaaggaacctnc

SEQ ID NO: 3315 - DNA, 162 bp, Glycine max
  unsure at all n locations
  Clone ID: 700999339H1
acaaagtttcagtttttggtgtnccattnntnttcctcgatcttnatnttaaacataacttgaaatncttccattccctnaaatnttaggtcaagagctagntnccgacacngacaaagcaatggcaaaagaccgagttagagcgactgttganngcaagac

SEQ ID NO: 3316 - DNA, 161 bp, Glycine max
  unsure at all n locations
  Clone ID: 700999340H1
anaggaanaacaagacgaaggnnaagaaagggctganagagaagattcgnggagacaatagagggtgatcattcatcatcacaaggntgancgacacaagtgtcccctgttgagcaagttcgacgttgctgaaacagcactgcctnaggnaaaagaagggc

SEQ ID NO: 3317 - DNA, 277 bp, Glycine max
  unsure at all n locations
  Clone ID: 700999344H1
gagaganagnagananagatggangngaagacggaganggtgnagtctgaggncagttcanntcaattncagcgtttgaggttctgcnaaagctcgnggttttcgatctcggattacactctctggcctnnctactgtgatgtcgatccgaagcgcgnnattccntctctgtatccccacgccanaggcatattgttagctctcaaagagaaaggcntcgacattgccatcgcttctcgntcgccaacggcaganatcgcaaccgntttcctnaaca

SEQ ID NO: 3318 - DNA, 275 bp, Glycine max
  unsure at all n locations
  Clone ID: 700999347H1
gttgaagattgacanacanattagcaacaattctgtgttgntaacaatttgctagctgctacncctactcacngaatgganacatttaaaaatcttntatccttgtcttttgaaancaattcctnccactgggagnttacatcagaaatangagcactacatgatctagagcgattgnatntacagcaaccgattgtcaggggaattccagacatttttggcaatttcaccaatatggtttcctgcaatgggaaataatcagttctcgggtagat

SEQ ID NO: 3319 - DNA, 278 bp, Glycine max
  unsure at all n locations
  Clone ID: 700999349H1
gcaccggtaacgatttctcnacaatctatncgcntctcatncgtnatgggcgtatggagaagttctactgggcaccancaanggatgaangcattngtgtctgcactggaattttcgcaccgcttcaatncatgaannncccttgtcaagattgttgacacctncccgggccaattccattgntttctttggtgcactgagggccagagtatatgatgacgaactgaggaagtggatttctngtgttggtgttgacggcattgggaagaagcttgtna

SEQ ID NO: 3320 - DNA, 276 bp, Glycine max
  unsure at all n locations
  Clone ID: 700999350H1
taaaatccatcttgccntgntcactaatttntcctctctacaacagcncaccanaatccttcangtgttcttnttcttccacatcaatgcctcctcacanattatacatatagcngttntgcttncttcntccaaagcaccgtngcaaatgaaaaaaggagatatttttcattagcanaggttgtgttanttgtgtttgtgggggcactttacgttatggantgcttgngctcaatttatgtaacgaaggctttgaatgttatttagtttgcgtgg

SEQ ID NO: 3321 - DNA, 278 bp, Glycine max
  unsure at all n locations
  Clone ID: 700999373H1
gggcactcanttcgcaatcgnagtgacgccgcnaagacacggtttctgaagtgncagancaatatagaaactgntcagggtngcagaatgtctatccngctgcnacagcccantgctaattcatcaagggaaagttcttagggatgcttctaccttggaggagaatnagagtagttgaaaatactttcattgtaattatgntatcaaagagtaagancccatccggtgaaggatnaantacttcaacngctcantnaaaccagggcccacaggncaat

SEQ ID NO: 3322 - DNA, 150 bp, Glycine max
  unsure at all n locations
  Clone ID: 700999375H1
ggtggagtattttggaaggatgtcttacgttgcncacaacgttaancancgcccaaganacagatttgttggagggaaatttntcctntgatananatctngntcctagatnggannaagtttctctacaaagcacaatttgttagtggc

SEQ ID NO: 3323 - DNA, 260 bp, Glycine max
  unsure at all n locations
  Clone ID: 700999376H1
agcaaagntgatancacctcatctgnccaagaagacccctgtgaaagatgccaagagcattgannaaactaaaaaganaccaacttcaaaaaagggtgttgctgagctgacagtgttctgccnctgtttccaantcgaagcaacctgcatccaagaaacagaaaactgcaagtgaaaagcaggacactaaggggaaggctgcaagcaaaaaacgaactgacaaatcttcaaaggctttggttaaggatcaagggaaaagc

SEQ ID NO: 3324 - DNA, 277 bp, Glycine max
  unsure at all n locations
  Clone ID: 700999378H1
gtccaacgcnaattnacttagacnttttatnctatggtaaatatnangtcagatctcatatcctcagtataccctcatgcaagantttgggaaangccatttgtcnatggctcccntgatggaccttntgggatcancnattgcacagtgacncagttgcttcctggnattcattttcaggncaattctcgtggactcactggattatggnaagnttagggngtgnaatcattattggagcantttggaaaggaangaatgtatagggtaatncctg

SEQ ID NO: 3325 - DNA, 158 bp, Glycine max
  unsure at all n locations
  Clone ID: 700999380H1
taaaagtattctcaaaagtattctaagcctaacgaaaataanacaatttttcaaattgctatttatnaaatttaaattcangaagatagatgnattgagcgnaaataanacagattcaacaatttagagaataatccanggatttccngnaacaaccc

SEQ ID NO: 3326 - DNA, 269 bp, Glycine max
  unsure at all n locations
  Clone ID: 700999384H1
gnacaagactgccttcactacaaagaaagactatggtaaagaagagagggaagctcaatgggcggntgcacagaggacattcacggtcttcagcctccggaaagttcgaaccttttcantgacaanaatnctacagggagctttcagagattgcagaacaagccaagagacgtgctgaagttgcaaggcttagggancttcatactctaaagggaatgtcgagttcagtggtngaagctgaaggggcttgacatngacacgattcagcc

SEQ ID NO: 3327 - DNA, 270 bp, Glycine max
  unsure at all n locations
  Clone ID: 700999386H1
gaagtcatgatttggctctctgctcttggcggcgcaggacccatntcctccaccggcagtgncatcgccaccgtcacantcgccggcaagcagtttaaggctgtataaagggccccaacggaagatgancgnttctcgtttgttgctgtccagcccgatcaacagcttcaacggcgatctgaatgcgttcttagtataccttcgtagcagccnagggcctgcccgtcagccagatcctccnagtctgtcggtgcaggtactgagccgtnc

SEQ ID NO: 3328 - DNA, 271 bp, Glycine max
  unsure at all n locations
  Clone ID: 700999387H1
gtagattcnattctcctcaagcaaaacctntangctnacccacactcntanagtnacttggntaanagctagatncatattanagcctttccttcatncaaggtactgtttgatctttganttncagtcctcaagattggnacaacaggaacatgtgtantctcacaactgttcctgtgctcccttctaagcttaacaagccttcagntttctcncgcaanacaattctctcattccctactgnggaagacggggtcgggaaggggaacac

SEQ ID NO: 3329 - DNA, 288 bp, Glycine max
  unsure at all n locations
  Clone ID: 700999389H1
gtccctgcttctgcttctgctcattcttctccttccacagggatggcttatntnccacatggaaatgcaanttgcaactnctttattccacaaatttgcaaattcccatgtgggtatntcgnttnggantgtactgcnaaccggggaactaaaaatcttgtagcgtttttcaagcagaggaancactcattgcccctgtggcntaaaatggganagaggnagcctttgccttatcagganaaaggcntttaattggcaaagttttccaaagagaanagcagtttcacc

SEQ ID NO: 3330 - DNA, 267 bp, Glycine max
  unsure at all n locations
  Clone ID: 700999390H1
caattatcagattancaggtcagantgctctctgcaancaaggaacntgaatatcacaagactagcagggaggtgtgaatgtcaggcagtagtgacaatcncaaacctaagnagtttaggtcanaaagtcaaatggttcagcccatgtggatcatccatctagagagttccagattgcnagttagcagcaataggaaggtagtgaacgggagtacctgtagttctgttaggncaacagtaaatgcaatttngtganngggaaatgcc

SEQ ID NO: 3331 - DNA, 267 bp, Glycine max
  unsure at all n locations
  Clone ID: 700999391H1
ctcataanacaaagcacaaagcaaagctcatccttgagttaaaaaatggcagcagcttcttcnatgggctctctncatccccatccttgggctggcaangccgtgaagctgggcccatcagcccagaagtggaagggtgagcatgaggaagaccgtcaccaagcaggtctccctcaggaagcccatggtacggcccagaccgagtcaangtacttgggcccattctctggcgagccccgtcctacctaaccggtgagttcccaggcg

SEQ ID NO: 3332 - DNA, 152 bp, Glycine max
  unsure at all n locations
  Clone ID: 700999392H1
caaagaatctgccaattttgcgntcgtgatatttaggntgganagnagaacagatgccgttgaaggtgtnagaggcgacagtatcnagtttcgcatgtggcntttgagaattccnatcagaggcnccacaaanaaggcccnatctccatccc

SEQ ID NO: 3333 - DNA, 274 bp, Glycine max
  unsure at all n locations
  Clone ID: 700999395H1
gctttcnnagattgcagaanaagccaanagagcgtactgaagttgcaaggcttagggngctttcatactctaaagggacatgtcgantcagtggtgangnnganaggggcttgacattnacacgattcagcagcacnataacagtttaaggagctggacaagtttcancaagaaccgtgcttttttgagaaaaatnacatataaagacggagaaagaccatgntcaattcgtcnttaagttacataaaanaatgngtcctgtgaaattcgatgg

SEQ ID NO: 3334 - DNA, 283 bp, Glycine max
  unsure at all n locations
  Clone ID: 700999396H1
tgctaacatggttccaccatatgacaagacgangtattcaggagctggggctgccattgaatatgcagtattgcatttaaaggtggagaatattgtagttattggacacagttgntgtggnangttaangggtcatgtctatcccaagatgacgggaccactgcaagtgaattcatagnagcaatggggtccaaatttgtactcccaggcaaagttccanggttaaaancanggaccaagtggacttaagtttctcagagcatgtnctnaactgtgaagnaag

SEQ ID NO: 3335 - DNA, 284 bp, Glycine max
  unsure at all n locations
  Clone ID: 700999401H1
aacactcataacacaaagcacaaagcaaagctcatccttgagttaaaaaatggcagcagcttcttccatggctctctcatccccatccttggctggcaaggccgtgaagctgggcccatcagccccagaagtgggaagggtgagcatgaggaagaccgtcaccaagcaggtctcctcaggaagcccatggtacggcccagaccgagtcaagtattgggcccattctctggcgagcccccgtcttactaacgggtgattcccagggataggctggacctgntggg

SEQ ID NO: 3336 - DNA, 287 bp, Glycine max
  unsure at all n locations
  Clone ID: 700999402H1
ctacaatggcatctgctctacgactgtcgagcgctttccgcgctgccgcccctctgcggaccacagccttcaatggcctccgctgctactccagcaagacttcagtcgctgaaggagaccttcgccaacaagctgcccggcgagatcgagaagatcaagaagctccgcaaggncaacgggcaacactgttgtcgcgaggtcanctcgaccaggtntaggtggtgcccgtggatcaagtcctcgtctgggagggttcattcntnantctgaggggggtntcnnctccc

SEQ ID NO: 3337 - DNA, 284 bp, Glycine max
  unsure at all n locations
  Clone ID: 700999403H1
cgccacctccaaacacagacccttcattcttcgaatcgttgacgcctgtgaaaagctcgaaggggcttattctattgttttcgtcaccgaggacaagcttgtcgccgttcgagaccctttcgggtttaggctttggttatggggagaaggagcaacggtgctgttgttttcgcttctgaaacctgcgcgcttgactaattgaagcgantatgaaagggaggtttaccctggtgaggttcctgtggtggataaaaacggtattcagatctctgcctcatgtctca

SEQ ID NO: 3338 - DNA, 290 bp, Glycine max
  Clone ID: 700999404H1
ttcacttgtatatgtatctcagtctcaggtggtggtgcatcgctgagttgtgtgagagtgagaaagagagagtgtgtgtgtgtgcagaagatgtggccattcagcagaaaaggggcttctggtttttcatcatcatccacgggcagagcaagtcactgaaggaattgatggaactggtcctcactgccattgttcacaggagcatccagtggtattggcactgagactacacgtgtcctttcattgcgtggtgtccatgtgattatgggtgtgagaaatatgcttgctgc

SEQ ID NO: 3339 - DNA, 289 bp, Glycine max
  Clone ID: 700999405H1
gtttggtgaggagattcggcgtgaaagagaaaatgctgcaataactggagtgcctgcttcaggttctgagggtaatacaaaatctggaaggggtaatgaaagtggtactggtagaggagggcgaaaaaaaacacgccaaacgactgtcacacccgcagcaacagaagcacaagccactggcaaacccaactggcatggatttagagttaccagttgatccaaatgaacccacatactgcttttgtatcaagttagctatggagcgatggttgcatgtgataaccccatt

SEQ ID NO: 3340 - DNA, 291 bp, Glycine max
  unsure at all n locations
  Clone ID: 700999406H1
agtttttgggcttctcacttctctctttctatctttctttcagacaaagccaaataggaacacgctctcaaacgcagtgatttgatttttggtaacagagttcaattgaaatttgaaacatggattgggttcgaggagacgcccctcgggcgaggaagcttcgctanccgttagtttagcgattccgactacaaatccgaatcagtttccgtctctaaccgcgttaagtccgcggaggctcaaacctcgtgctggctaagaaacgagaaacagtgctggatcgctaaggtt

SEQ ID NO: 3341 - DNA, 201 bp, Glycine max
  unsure at all n locations
  Clone ID: 700999407H1
cgaatgaagatggcgctgctcaaggtacangcatccacacncatacncanatgctgnctctgnntcaactgcaatggcgctgcagtgtaagtgtgggnanctcaccactnntgggcgtttcccaattcctanttcgatactgncncgaagnncgnagaagagaaggaattganagggtgnaatnncagcnggaggcnnatc

SEQ ID NO: 3342 - DNA, 287 bp, Glycine max
  unsure at all n locations
  Clone ID: 700999408H1
cagcagagtacaagagaagggtccgccagcaggcaaagcaatatccacctcttctctagggttgcatcagctaaatttatgaactatttttactatggcagatgtttcttcttttgtcccgtgttaaaactgtgttgtcattgtgattaatggctgccataacattaaacatgaatgtttagctatttatgatactcccagatctggaagaagtgttaatatataaaanaaatgtggaagtcaacccatgaatactgtgggtgacatgttcggtgttgctgccacct

SEQ ID NO: 3343 - DNA, 294 bp, Glycine max
  unsure at all n locations
  Clone ID: 700999409H1
ttgaacctggtcttgagcaacagattgctcttccacgggattcctacctnccagggttatttcagtaacatatccgagtaccttagagttggaccacccttatattttgttgtaaaggattacaactacagtttggaatccaaacacacaaaccagctatgctccattagccactgtgattcaaattctcttttaaatgaggatatctagagcatcattagtggccacatcaagtacatagccaaaccagctgcctcatgggcttgatgatttcctgtatggatatcacctgag

SEQ ID NO: 3344 - DNA, 294 bp, Glycine max
  unsure at all n locations
  Clone ID: 700999410H1
cattatcagaagcagaaagaaagaataagaggttgcagcaacaatggcagccatggctgcgcttcagagctcaatggtcggtctctccctctcctccaactctttcttaggccaacgcctttctcccatcaccctcccctctcttcttccgggtaagtcaacagagaagcaatgtcctattgtaatgaggccttaaacgatgggaacggaaggagtgtaaaccaaacagccntcctatcttgcacaaatgcatgtnaaacttgggagatacngtgcagtcatatctngacgnga

SEQ ID NO: 3345 - DNA, 290 bp, Glycine max
  Clone ID: 700999411H1
tctttttaaagctcagcagaccaacaatgaaaaactgttagagaatccttaccttcaaatgtgtggcatacttcaattggcaaatgatcttggatttgacttgtgatgttaaactcttggcttttcggggtgcgatattggtttggagtagattcatgttggtctaaggtgtcattgcaactgattctgaggatcattcatcatctatcctcaaatgactaagattgccacattagctgggacatattctttgaaagcttccttacaggaacaaagttgtgatttatttc

SEQ ID NO: 3346 - DNA, 293 bp, Glycine max
  Clone ID: 700999413H1
aaagcacaaagcaaagctcatccttgagttaaaaaatggcagcagcttcttccatggctctctcatccccatccttggctggcaaggccgtgaagctgggcccatcagccccagaagtgggaagggtgagcatgaggaagaccgtcaccaagcaggtctcctcaggaagcccatggtacggcccagaccgagtcaagtacttggggcccattctctggcgagcccccgtcctacctaaccggtgagttcccaggcgactacggctgggacactgctgggtttccgcagaccca

SEQ ID NO: 3347 - DNA, 360 bp, Glycine max
  unsure at all n locations
  Clone ID: 700999414H1
ttccattctctctgtgtataatccctacctctcccttcaagatggcagattntttcgtcaagacactcancgggcaatgaccnatcacccttgaggtgggaaagctctggacaccatcggacaaacggtcaagggccaagattccagggacaaaggaagnnaatncccccccgggaccaagcaancgtctnatttttcggncgggaaaagcaactttgaagggacgggccggtaaccctttnnatggattannaacanttccagnaagggagttgtaactcctttcnaccntnggtccnttccggttntccggtnggtggggcattgcaagaattctttncgttaaagnancccttccac

SEQ ID NO: 3348 - DNA, 293 bp, Glycine max
  unsure at all n locations
  Clone ID: 700999415H1
gctgttcttgtgggtgttgttggattggaatcggagagaaatggagagcagcgccgtctacggaagcattcgaccaagttacccgatctgcccctttcgacgttcttcctctcttctctctcaccaanctcccttcctattcgagccttctctttctctcaagcttcgcaagcagtttcctctcatttcgcagaattttctggaagcngcttctcctctcaagccttcnncnattntntnttctgattcctaccgtnagacgattganttagctgatatagaatgggacaacc

SEQ ID NO: 3349 - DNA, 287 bp, Glycine max
  unsure at all n locations
  Clone ID: 700999417H1
atgttcctcactctcacttgtctctcccatcaaactcacttccaagtccttcttatctccaacaccagtcagttggcatggcatcttgataaagaataacacctcaacaagattcttgctgaaagctggttttaatgagattgaacctgacctcagtgaagatcctagagaccaatttgccancaatngcgttgacgctgatgattttgtggtaatggaatatatgatgaccaccacacttaccatggaaggagaacagaaaggaacatttgggggctcattaagag

SEQ ID NO: 3350 - DNA, 299 bp, Glycine max
  unsure at all n locations
  Clone ID: 700999418H1
gaccgacnncggacagatgggcgggtcttgcctatgatatctcagacgaccaacaagacatcacaagaggaaagggtttggttgactccctttnccaagctccacaggatgntggaacnncantatgcagtcatgagctcctacgcggtanctcagcactggattcgccagtattnggganaacaaaatggntggattccnacattggctccagttttangggacaagcttgntggtgcacatgcnccnnggngcttcatggnccgcggcccaancatnagggnngctcncntngtggg

SEQ ID NO: 3351 - DNA, 284 bp, Glycine max
  Clone ID: 700999419H1
tatgttcctcactctcacttgtctctcccatcaaactcacttccaagtccttcttatctccaacaccagtcagttggcatggcatcttgataaagaataacacctcaacaagattcttgctgaaagctggttttaatgagattgaacctgacctcagtgaagatcctagagaccaatttgccaccaatggcgttgacgctgatgattttgtgtatggaatatatgatgaccaccacacttaccatgaaggagaacagaaaggaacattttggggctcattaaag

SEQ ID NO: 3352 - DNA, 282 bp, Glycine max
  unsure at all n locations
  Clone ID: 700999421H1
gatgctgcaagacctatcgaagaggtatttgagacagtcaaagcaatttttggtccaaagaatgacaagggctgattgagcatgttcatcttgactccatggtggaaatttagaggtcatatcagtattggtggcttgttctattgtgtcacattttgttattatagtatagaaaatcgtagtttatacctgngggttttacctcgtattctaatgttatatctggttgactcattcattgatattgcataaagatttccggtgggattctttctaaaaaaa

SEQ ID NO: 3353 - DNA, 286 bp, Glycine max
  Clone ID: 700999422H1
tggcatcaagctagcgctctcaattttagtagctggcattctttgcatatacatcaactatgattgtgacaggcaaaggcaagaatttcgtaggacaaatggaaaaggcacagtctggggaaaagctccttcaaagatagaggccacatatactactacttctggggaaactaaaagaagcctcttttaacctctggatggtggggattatctcgtcactttccattaagtcccggaatactggcagttcctcctggcagtccccagctctttcggaacatttttg

SEQ ID NO: 3354 - DNA, 289 bp, Glycine max
  Clone ID: 700999423H1
agtttccagatatggttcatgctcttaaacccaatcccaagaaccacatccaggagaattggaggatccttgacttcttctctcactttccagaaagccttcacatgttcacctttttatttgatgatttgggtgttccacaagattacaggcacctggatggttttggagttaacactacacactgatcaacaagggtgggaaagcagtgtatgtgaaattttcactgggagaccactagtggtataaagtgtctattggaggaagagggcattaaggtgggagggcc

SEQ ID NO: 3355 - DNA, 130 bp, Glycine max
  unsure at all n locations
  Clone ID: 700999424H1
tttcagtttttggtgttccatttttcttcctccatctttatcttaaacatnacttgaactctccattccttaaattttagcnacgagctagttccacacaanatacgantntnnnnanngnggantgnag

SEQ ID NO: 3356 - DNA, 287 bp, Glycine max
  unsure at all n locations
  Clone ID: 700999426H1
gttgatttctgatcccaaattgagtttgagtttcagccatggtatctgtttctctgctcttattcctatctttctttgccttctttgcaccctctgaatctcacgacaaagtctcgttggaattgtactacgaaagcttatgcccctacagcgccaacttcatcgtgaatcacctcccaaaaatcttcaccccagatcttgcccccaatcgttcacctcaaactcgttcctggggcaatgccaaactcgtgccaaggcnactttgactgccgcatgggccatatgag

SEQ ID NO: 3357 - DNA, 55 bp, Glycine max
  unsure at all n locations
  Clone ID: 700999427H1
atcattccnntggtatttgggttgataattntgtatcagatnnactgtttganat

SEQ ID NO: 3358 - DNA, 268 bp, Glycine max
  unsure at all n locations
  Clone ID: 700999429H1
cgagaattagcgatgggaattnaaagaggaggcttcaanggattcaggagcgcctggangcgtgccgcccaagccgtgcgattcctgcaagctggcctcggcggcgcttttctgccgccccgattccgcgtttctctgcatcgctgcgattccaacattcactgctcgancaaactcgcgtcgcgccacgagcgctgtggatgtgtgaggtgtgcgagcaggcacccgctgctgtcacgtgcaaggccgacgccgccgcctctgcgtc

SEQ ID NO: 3359 - DNA, 268 bp, Glycine max
  unsure at all n locations
  Clone ID: 700999430H1
aatggaagaagcatcatgtgactgcttagttgtcatactgatacttgcttctaacattangcatggagggtgctgaactggttatggctaaggccaaagaggttagagaggctcctaagagagcaaggccttcaaggaaatccctacaggcttttggttggggatttaaaggagattatgaatatgcaaaaggaagtcacatccaaaccctgaatntctccccatgatatagtgcctcgtgtctttctttctccaacacatnctcaac

SEQ ID NO: 3360 - DNA, 291 bp, Glycine max
  unsure at all n locations
  Clone ID: 700999431H1
cagcagagtacaagagaagggtccgccagcaggcaaagcaatatccacctcttctctagggttgcatcagctaaatttatgaactatttttactatggcagatgtttcttcttttgtcccgtgttaaaactgtgttgtcattgtgattaatggctgccataacatnaaacatgaatgttttagctattnatgattnctcccagatctggaagaagtgttnatatataaannncctgtgaaagtcacccagggattacttgttggtgacatgtttcngatgtttgccgccac

SEQ ID NO: 3361 - DNA, 285 bp, Glycine max
  unsure at all n locations
  Clone ID: 700999435H1
tttcaccaatggctgctgcggttagtgctgcagtctcttttccatccaccaagtctacatctcttccaagcaggacctccctncattgccccagagagagttgngttcaagaaggcttcattgcaaaacagagatgtttctagcagtggacgggtagtttccatcagagctcaagtcaccactgaggcaccagccaaggttgaaaaagagtccaagaaacaggatgaaggtgtggttgtgaacaagtttaaacccaagaccccttacattggtagatgcctgctc

SEQ ID NO: 3362 - DNA, 284 bp, Glycine max
  unsure at all n locations
  Clone ID: 700999438H1
ctgacccctggtcgtgttcgacttttgctccatagaggaactccttgtttccgtggatatggaaggcgcaatggagagcgtagaaggaagtctgttcgtggttgcattgtcagtccagatctctctgttttgaacctggtaattgtgaagaagggtgagagtgatttgccaggtctcactgatgttgagaagccaaggatgaggggtctaagagagcatccaaaatccgtaagcngttccaactgtccaaggaggacgacgtgagaaagtatgttaacacatac

SEQ ID NO: 3363 - DNA, 281 bp, Glycine max
  Clone ID: 700999439H1
gtcaagtttgctcagtatttgggcatcaaggtcgtctccattgttggtggacagtccattgaggagcaagggtttaagattaggcagggctgtgagattgtcattgccactcctggacgtttgattgattgtttggagcgccgctatgctgtgctcaaccagtgcactatgttgttcttgatgaggacacccatcacctggggctcaaaaccccatgtgatgggtgtcctcgatgccatgcctccagcatctcaaccggagaatgaggatgaggacttgac

SEQ ID NO: 3364 - DNA, 269 bp, Glycine max
  unsure at all n locations
  Clone ID: 700999440H1
aaattcttatttaaatacgnnccgctcanttcaacccaatatttatagncnctntttatagtannataaaagtgatttntacttcataggatctcatgtctcaattaagangagtcatgnaaagaactggttcaaaatctcgatcaatccttttcaatctgcggcantgcgcgantcttcncgcgtgccatanatggctacaaataggagatcnagnacaaatgagagtagctaaccactccnaggagaactaatgctgcataacnctg

SEQ ID NO: 3365 - DNA, 285 bp, Glycine max
  Clone ID: 700999442H1
gtttcattggaccaattagcagaattgggtgtgttatactggaagctcaatccaactatctatgagaacgatcaagagttgaccaagattagacaagataggggatacaactacatggacctgcttgatttatgcccagaaaaggtggaaaattatgaacagaagttgaagaacttctacactgagcacattcatcaggatgaagagattcgttattgtttggaaggaatggctactttgacgtgcgggacaaggtgatcgctggattcgcattttgatcaaggc

SEQ ID NO: 3366 - DNA, 288 bp, Glycine max
  unsure at all n locations
  Clone ID: 700999444H1
gtctgagagtgtgtgtgtgacttatggagtccaattcagagttcgacgtgattatcatcggagctggcgtcatgggcagctccaccgcctaccacgccaccaaacgcgtccttaaaacccttctcctggaacagttcgacttcctccaccactgtggctcctcccacgggcgaatcccgcaccatccgcctcactatccccaccantactactatcctttagtcatggactcttaccgcctctggcaagaggggcaggcccaagtcggntaccagatctattcaaggc

SEQ ID NO: 3367 - DNA, 288 bp, Glycine max
  Clone ID: 700999447H1
cgaagtactactacaagggaagaaaaacttagctactaaggaaggatcaaagagaatggctcaagcaatggcatcaatggctggcttgcgtggttcctctcaggctgtgttggaaggtagccttcaggtgagtggctccacacgcttgaatgtggggagtggaagcagggtggcctcagtcacacgtgcagggttcacagttagagcacaacaacaacaagtgagtggtgaggtacaaagcagccgtagggcagtgctttcacttgttgctgctggtttggccactgg

SEQ ID NO: 3368 - DNA, 285 bp, Glycine max
  unsure at all n locations
  Clone ID: 700999448H1
ctcgtcgccggcggagctgttggatgagaacgaccggctgncgnaggagaacattctgttaacgaaggaattggaggagatgagatcgctctgcaacaatatattcaatctcatgtcgaattacgctaacgttcaagcggacggtggttccgcgggggtggcggcgcggtgcttcggcgaggatgcggtggaggagatgaatccgaagctgtttgggtggtgattggtacgaagcgagccagagaagagaatgatacggtttgagtctgcatcagcgttccatgc

SEQ ID NO: 3369 - DNA, 278 bp, Glycine max
  unsure at all n locations
  Clone ID: 700999449H1
ggcgatcaccggaatatcggtatccttgtgcctatgatgatggctggtctgcacttaactgggttaaatcaaggacatggcttcagagtggaaaggattccaaggttcatgtgtacttggctggggatagttcaggtggtaacattgctcatcatgttgctgtgagggctgctgaggaagatattgaggtgctaggtaatattcttctccacccatgtttggtggggagaancccaccgagttcaganatgnactggtgggaanttctttgtgaggcc

SEQ ID NO: 3370 - DNA, 280 bp, Glycine max
  unsure at all n locations
  Clone ID: 700999451H1
ttggaggccctgaattccttggaagaagggcttaaggataatatcaagagactaagttcttttgntatgtacaagcaagaagttctccttgggccatctggattggtctcccatgcacaaagatcccatattctggcgagaaaatataaacaactttgaagaaaangatttccagattctaagggtcctactaacaattttggacacgtccagtgatccaaggactctggctgttgcttgctatgacctttcacagtttatccagcatcattctgctgga

SEQ ID NO: 3371 - DNA, 282 bp, Glycine max
  unsure at all n locations
  Clone ID: 700999452H1
ccaaaacctagcatttagccaagacaatgcaaacaaatgggtgcaagacaacatcaaaaactatgccaataatgtcagattcnnatacatttcagtgggaaatgaagtgaagccggaacactcatttgcacaattccttgtgcctgcaatgcanaaacattcaaagggccatntcctaatgctggtcttggaaaccaaataaaagtttccactgccattgagactngagccttggcagattcatacccaccatcaatgggttcctttaggtctgatatagac

SEQ ID NO: 3372 - DNA, 279 bp, Glycine max
  unsure at all n locations
  Clone ID: 700999456H1
ctcagaattcaatcagggttgctcaggtatgcactttcttttacatgttgtaagctgngtctggagtagttgtgttacttgtgtagttaattatttgccttcacttcataattctggatgcttcaagcaccaggtgccacaagttacataggtcgctaggaaaggacaatttgggagaggagatgaagaagaaatgtacacttgatggtgtaaaggtaactattatgaaatcgacatacacctactggaacttgtgctgtttgtntggttggcgtgaaa

SEQ ID NO: 3373 - DNA, 230 bp, Glycine max
  unsure at all n locations
  Clone ID: 700999458H1
agcagcaaagttatttgcctcntgattcantcatganatggtatcttgctcttgagactggcaatttctggtttcctgctcaggtctataaccgtgagaatggccagttggatttatgtngtcagcaangagctgagctagcatgatctcaacgacactccagcagaatcacaaggagaggattcataacaggatcaggaagtagacacangtgtatctcaagntcaatt

SEQ ID NO: 3374 - DNA, 285 bp, Glycine max
  unsure at all n locations
  Clone ID: 700999461H1
ctttgacaggtatcccggagatcaaagagtcggagcccaagaagccctttgagaggaagagnnnnnnnnnnnnnnnnnnnnnnnnnnnnnnnnnnnnnnnnnnnnnnnnnnnnnnnnngcaagccatagataattcttgtacatctactgtctatttctgttgatgtatttattgagattctgtaccggctgagttctagcttgatgtgcttggggatatatgttgcttttcattgtggtctattaacacatnttttcttattagcacttaaaagttgtttggaa

SEQ ID NO: 3375 - DNA, 268 bp, Glycine max
  unsure at all n locations
  Clone ID: 700999464H1
ctcgttttcaatatgcagatcttacgtcaaaaccctaaccncgtanaacgattacgctagacgtcgagtcctccgacacaatcgataacgtgaaagctaaantccaagacaaggaaggcattccaccggatcagcagcgtttgatcttcgccggtaaacaactcgaagacgggcagaactctcgccgattacaatatccagaaagaatcgacgctccactcgtcctccgcttcgcggtgggcatgcaaatcttcgtcaaaaccctaac

SEQ ID NO: 3376 - DNA, 283 bp, Glycine max
  unsure at all n locations
  Clone ID: 700999465H1
cctcgctctatttctcagtctctgtgtttgcggctgaggattccgaacgagtgaccttcttcgnttctcgcaaagtttaagtaatcatgggtaangaaaaggttcacatcaacattgtcgtcattggacatgtcgactctgggaagtcanctaccactggtcacttgatctacaagctngaggtatgacaagcggtgtgattgagaggttccganaaggaggncgccgatatgaaacaagaggtcattcaagtatgcctgggtgccccgaaaangctcaaanc

SEQ ID NO: 3377 - DNA, 277 bp, Glycine max
  unsure at all n locations
  Clone ID: 700999466H1
ggacttctggtgccgcaagtgcacttcttgtccttagccactgggaagcacttcctgaggatcctttctttgtacctaaaacggaagaggaaattgaagagtttggagatggttctagtgttcttccaaatacggcaagaaaattgattaatgcagttcagacggcgtaagggccttcctgtggaggaaaaggtagtgcagcatggaacaaagcagaggacatggctcgtaaaagtctgatactttncannccnagtgngaanaagaactgttttnt

SEQ ID NO: 3378 - DNA, 146 bp, Glycine max
  unsure at all n locations
  Clone ID: 700999468H1
agaagatgatgagtcgctcgtaggtgatggtagctaagtgactcatttatttaagtgaaatgaatgacaccaacattttancgtaattctgtaaaaacaaatgttggcaatttcatnttatttatatgtatgggtgtgctgnatgt

SEQ ID NO: 3379 - DNA, 224 bp, Glycine max
  unsure at all n locations
  Clone ID: 700999471H1
aaacccttgaatgatagagtcctcataaaggtttaagatcctgatgtcatcagtttcgaggataccaacaatgtcatcaaggatctaaaccctngaatgatagagtctcataaaggttgctgaagtgagaaaaacctctgcgttgtgttacgagcaacaggcaacctgntgacggatagtgttggcggcttgngagagcacaaacgtgcggatcggacngttga

SEQ ID NO: 3380 - DNA, 274 bp, Glycine max
  unsure at all n locations
  Clone ID: 700999472H1
tattatcatcctcaatccaaattcaacctttgagataactgcaaagtcccaccactccaaactggacacaaatgtctatgagggaaggagtggaaagggaaaaatcgaattgactattgcaggaggaagagttgtttgggaaaataatgaactgaaggttgctcctggtactggcagatatataaaaatggccacccttagtnatctgtttaacggattgacaaaaaggtgcntttatctaattccctcaagccccataagcgagccaattcta

SEQ ID NO: 3381 - DNA, 280 bp, Glycine max
  unsure at all n locations
  Clone ID: 700999474H1
gtcaagcaaggatcagacagacctttgtggtttgcatcaaagcaaagtctttcttacttggatggcagccttccgggtgactatggatttgaccctctgggactttcagaccctgaaggaacaggagggttcattgagccgaaatggctagcatatggtgagataatcaatggtcgttatgcaatgttgggtgcagtnggtgcaatagcactgaaattctaggcaaggctggtctgatccctcaggagacagcaatccccatggttcagaacgggtgtgt

SEQ ID NO: 3382 - DNA, 283 bp, Glycine max
  unsure at all n locations
  Clone ID: 700999475H1
ccacatccatctttgccttctgcatgttggttctctgtaaacagatactgcaaaagaagaataatattgaatatttggttgggttgaatccctgggttgaagcgttgcagacatcacggctattctaagagtgtctcncctctctcattcatgtcccaactgtacgacggaggacaggttgcgtaactggccaccaacccttcgccgcacggtgggcgtggtgctttgccttctgaaagtggtagcccttcagattgctcttcttagctggtggtgggtctgc

SEQ ID NO: 3383 - DNA, 283 bp, Glycine max
  unsure at all n locations
  Clone ID: 700999476H1
cgagtccnnacgcgttgtttgtgtttgcgtcggnaggaagagaagatgagtganaatttgatggagaaagtgagngcactgggagancgcctgaaaatcggaggcgtggaagtggggagaaagatgagcgaggggatgagctcccatgagtttcaagcttcaaggagttcttccagcctgggcccaatcaggccgacaagcttgtggagggacgctaantccgaggccctggacgagccgaatgggccctcaatctcgatctctgcgactcgtcaacacggac

SEQ ID NO: 3384 - DNA, 93 bp, Glycine max
  Clone ID: 700999477H1
ctctaataatcggtgacagtatctccgttttgttaatggcaacttctgtacggaagactaagtaggagaaacatattcccacacaaccatagc

SEQ ID NO: 3385 - DNA, 278 bp, Glycine max
  unsure at all n locations
  Clone ID: 700999478H1
caatttcnntnnatgncatnaancancntnnatgaatacnnantttantttnngaaanncacggcattggctcnacggtttnaatctgtttgggttgatgagccgantgnggatgacgcaatcaagatacttatgggtctacgtgaganatatgaggcacatcacaaatgcagatacactgcagagnctataaangnngcagttgatttgtcagcgagatncatagttgataggnatctacctgataaagcnattgacctcatagatgaagcaggaag

SEQ ID NO: 3386 - DNA, 282 bp, Glycine max
  Clone ID: 700999479H1
atttatacaagatccccaatttctctatttttcctccgtttctattgcaatttctcaattactacatcgtattctgcaaattcaaactgggtcttggttttctgaaagatgggaggtggcaaggacaagcaccatgatgaatctgacaaaggaatttttttcacagcttgctcatggggtagctggtgcagcacatggtggacatgggtacccacctggggcttacccaccaccacctggggcataccctccgcaccaagggtaccctccacaacatgggta

SEQ ID NO: 3387 - DNA, 282 bp, Glycine max
  unsure at all n locations
  Clone ID: 700999480H1
atttcactcttgagcaagagcttgcacgtctgtgggaaaagatgagacgtcacaagattgctaaagaggacagngctaagctagtgactgaagctttacgaaagatgaaggggaagatnccagagattgtgggctctcacatctcatctcgggttctcagacttgtgtcaagcattgttcacaagctgaaagagatgcagtatttgaagagcttcggccacattttctaactctagcatcagcgcttatgctgttcacttagtgaagaagatgctcgacaac

SEQ ID NO: 3388 - DNA, 276 bp, Glycine max
  unsure at all n locations
  Clone ID: 700999484H1
gacccatctccnctaaaatcagggtcccctcaatcaaaaaacttcttcttgttctgttgtgtccancatgttatatnttattttatgatatacatagaagcttgttcttctgatctaattttatgagatcagtgttggttctttcnccanctagtactangatttttcccctgtannnnnnnnnnnnnnnnnntattctaantaaactaattcacagggctacttgatccgtttgttttgaagaagatcatcgcctgtttntggttaactgtntaa

SEQ ID NO: 3389 - DNA, 275 bp, Glycine max
  unsure at all n locations
  Clone ID: 700999487H1
gttactggatgaggagagtttgaggaaggacacagcacttccttcacctgaatggtcctcagatcacatagctctcttagccgaatttcgctgctgcaagaataaatctaggcgttgacagttaaggtaggcaccatcctccaacccccccacccacatatagcttgtttgagaattantattggaaaagatcaacggaagtgaactttcttttggtgctggtcctttaaaattctaaagatgagattgtgtgtctcaggtttattagcagaaaa

SEQ ID NO: 3390 - DNA, 275 bp, Glycine max
  Clone ID: 700999488H1
agactacaacccctgtgttggctctccccgccccggatggatccgtgcagccagttaatcaggatccatttgccgcatcgctgagtgttccaccaccgtcctatgtccaaatggctgatatggagaagaagcagcacttgcttgtgcaggagcagcaggtgtggcatcagtatgctagggatgggatgcaaggtcaatctagcttggccaaatgatggcgctggatactatgccggaggtcctatgcccatgatgccttatggatgcccccatca

SEQ ID NO: 3391 - DNA, 280 bp, Glycine max
  unsure at all n locations
  Clone ID: 700999489H1
agcagcaaagttatttgcctcctgattcactcatgacatggtatcttgctcttgagactggcaatttctggtttcctgctcaggtctataaccgtgagaatggccatgttggatttatgttgtcatgctatgatgctgagcttagctatgatcctcacactgacaccttccaggccagatatccaccacatggaagaagggcagttgcagtagagcatgggcattccaggggnaaggctaagagcaccanctgttggatatcctccacatgatcttcant

SEQ ID NO: 3392 - DNA, 281 bp, Glycine max
  unsure at all n locations
  Clone ID: 700999490H1
tcactgtgtatgaagagagagaaaggaagagagaggaaggaagagcacagcactacacagctccgaaataggagggggagaaattttgtatgcgttggatttcgtagatctgaataaatgacaaatgtatcattcaaagaatgttcctagtgcaagtttaattggtggtattcattaagtcatggtcagcacatagattgtggtggcagcacaatggatcctggcatgggaggganatgggtcttagcaacaactctaatctcacctcaaaacaacgtttt

SEQ ID NO: 3393 - DNA, 279 bp, Glycine max
  unsure at all n locations
  Clone ID: 700999492H1
aattttcttttccaaagaaaaacaaacgaacaactcaacgcgttctagtttttcttatagacaccttctagaaaaaaataactcacaccccaacattctcgtacgcttgatccttcctgggctgtcaacaattntccctcttttcattttctgtttctgaaaaatcataccttgaaattgaaagtccttgttttttttttattcctggtgttttttttgttgctgtgagagaaatgtggcccttaaggtttatcttggtgttcttctccgcggggcggg

SEQ ID NO: 3394 - DNA, 276 bp, Glycine max
  unsure at all n locations
  Clone ID: 700999495H1
ctttctacctcatcataatcctcgtcgtcaccatcttcttcttttaccttcatcctctggctgcacaaagtgaagcttcaacctcccatcttccctgtgagcatgcagaaactcctgaatgggtgtcttacttccttaaggacaaaccttccattatccctataagacatgaagctaacacaaggcttcccantctccctatgctcgaaatcggaggagggtattccaccccatnatnatnactaaccctattgacgacttgtcctccattcanac

SEQ ID NO: 3395 - DNA, 297 bp, Glycine max
  unsure at all n locations
  Clone ID: 700999502H1
ccttaatttctctcttcacttatcatcatacttatatattatataacccaatnattaaattaaatacatgttagcacttaacattcctttctctaacctcgttcccactctcatatntncccttctgctgatattcagctaaactaagtcaataagatgactcagggnaagatagttgaagctgcagaagctcataagacacttgangatttcgatcctccaaagaagcgcaaaagganccaagtatgcntttgcttgtgctggtgctggcctcccaggnctgcccatgttgttggc

SEQ ID NO: 3396 - DNA, 295 bp, Glycine max
  unsure at all n locations
  Clone ID: 700999503H1
ttcanaatgccgttcctcagcgtcttngcgttccgcggggctcgctggctncttcgcactcctttgtactgggcccggctactacgaaagccacgagcatcaacttgccttcatanccactcgcggtcaaacatccatacctctcgacatgggtgccagaaaaccagctgggcgatatcgcaactgcgaggccacaattctgggctggccaaaacttgtcatggccggtggtggctcgtatcgatggctctgcttatgctctctttggagtgccgaatcccattaatggnctcga

SEQ ID NO: 3397 - DNA, 146 bp, Glycine max
  unsure at all n locations
  Clone ID: 700999505H1
cncaataatttctgtctttagatataaatnatanaaagananaaagantaaataanagtngaggnggagggtgtaggtttggttgatttgattgtngtgcatccatcgttaagccagtggcgatcggatccagctacagcatagag

SEQ ID NO: 3398 - DNA, 288 bp, Glycine max
  unsure at all n locations
  Clone ID: 700999506H1
gaaattgataaataacacaaatttgtntttacgaancatcataaaagctatcaggttttnggtttcaaaataatganntnggaatgagatgagagcattattaatgataaanccttgtatccacgatacattggnggaagantaagagagcgatgagatgagagtgatagtncctctacaaggagttgtccaaggcacagggggtcttttctggggttctgtcattccttgtgctctattctnntntctgcagntctanttcaaancnaggnnangtaagtnncttgt

SEQ ID NO: 3399 - DNA, 146 bp, Glycine max
  unsure at all n locations
  Clone ID: 700999507H1
aggttctcccttcggccactgccacctccgncgccaccggcaatcccaccgcttcgcctcntccgctcgctgatcttgtcggtgctcccganctngntgctgcctcggacgacgtcgttacccaacctgaaattcacgcgctgatt

SEQ ID NO: 3400 - DNA, 279 bp, Glycine max
  unsure at all n locations
  Clone ID: 700999508H1
ggcagatagaaaaaaaagagcgacttttgagttcaaaagatgactaacttcccattgatcaacttggagaagctcagtggtgaggaaagaaacgataccatggaaaaaattaaagatgcttgtgaaaactggggattctttgagctggtgaatcatggcattcctcatgacatattggacactgtggagaggttgaccaaagagcactacaggcccntgcatggaagagaggttcaaggaattagtggcaagcaagntctagntgctgtccaaactggg

SEQ ID NO: 3401 - DNA, 148 bp, Glycine max
  unsure at all n locations
  Clone ID: 700999512H1
caaaaccttcaatagctcccccncctgccaaaaaacctgttgtcttgaaggacaggggagcagccgagacaacatntgtnaaatctaaaganaagangtcgcccatcttgattgataagtttgcttccaagaaaccggtagtagatct

SEQ ID NO: 3402 - DNA, 290 bp, Glycine max
  unsure at all n locations
  Clone ID: 700999513H1
ggcggagagtgcaatacttatagtctccctgtcctgaaacgcagagcattcaacatctcgcaaaactattnnnnnnnnnnnnnnnnnnnnnnnnnnnnntgaatctctcgtcgttctttttatttgcggtttcttcttcttctcacgttctacctaacattttctaaaacatgtctggggaagaggaagaaaacgccgcagagctcaaaattggagacgagtttttgaaggcaaagtgcttaatgaactgtgaagtttcattgattcttgagcacaagtatgagcagctt

SEQ ID NO: 3403 - DNA, 290 bp, Glycine max
  unsure at all n locations
  Clone ID: 700999515H1
caagaacaagagaatgtcaagagagtccaattggctgacaagtacttgaacgaggctgcacttggaaatgctaacgaggatgctattaacaggggaactttcttccaatcttgaattggaggcaaagcaaacttggcaagtaaatatttctgttcctgaaggttgtgctgatccaagtgctagaagtcgtgatgggacttgcgtgtaacattccttagaatncncantgtcttnggtncaangagaggncnccanttttgagatgtttcaccacatttncgnggggnccc

SEQ ID NO: 3404 - DNA, 292 bp, Glycine max
  unsure at all n locations
  Clone ID: 700999516H1
tccgtacaccactttctcccctctcaaaggagggaaaagatcggttgcttgantcgtgtcagaacttcattttgtggtcaagttgtgtgcaattcaagtttctgtgggagacaaataactagaagccatggaaaccgtcttgttgttcactcactgcttggaaggaaggtgaagtctgtgaagagcagagagactgtaattcctgaaccagattacaggattccaattgtgctactcggtatagctggtggattggtttacacagataatttggtacctgcagtacctgtng

SEQ ID NO: 3405 - DNA, 294 bp, Glycine max
  unsure at all n locations
  Clone ID: 700999517H1
catctcttcatttctttctctctctcaggcgttctactgtggaataaagttgattttgaagatgaactgttatggtcttcagcagaacgcctttgcagcctgtgaagagatgagaggccctgtgaattttgttgaacagaaggngcctgtcatttgccctaagccgcgccgagttggngttgtatctaacatgcctatgaggcatttgagatggcatttcaatccacaggctgagggttctgactcaaaagctggggcagagctattagagataatgtttaagaaggagagcca

SEQ ID NO: 3406 - DNA, 127 bp, Glycine max
  unsure at all n locations
  Clone ID: 700999518H1
ccttctcanaaacancgcgtngtctcttctgcttcgtatctattctgtgctgntggcttgggtggattcaaggctttcanagcatncggtgnggcntnntaatcgattnatnnaagcaggncgnatg

SEQ ID NO: 3407 - DNA, 286 bp, Glycine max
  Clone ID: 700999521H1
cccacttctcaaatgcagtggccgaagagacaaaggcaattttggaggactcaacatctttcttagaaactgatgaaattagtgaagctaatgaggaattgaatgcgtccacctcagtcttctcttctgaactggagctcagtttattgaatgctatattagctctttggacccaatctgcatcggtgcttcctccaaggacagaaccagcagcagatagatcattcttttcaagtgcttgaccaactgcgcttagcttgtacaccagatcttgaagataccctgt

SEQ ID NO: 3408 - DNA, 284 bp, Glycine max
  unsure at all n locations
  Clone ID: 700999523H1
ggttgtgaaagcagagaagtgagatacactaagttatcctcataaatacactctaattaggtggcaagataagtgtctaaccttagtaacattgccacatattgtgttcattttggaattgtgccactaaaattctattcaattcatctatggctgcctcttcttatgctatgcaatcaatcctggcaaaccctttgatccgcattnccagcgggtctagggtgnaaccaattgggcgttccgcttngcacagggagngggattttggcctgatatcngggccc

SEQ ID NO: 3409 - DNA, 272 bp, Glycine max
  unsure at all n locations
  Clone ID: 700999524H1
caactacaaaggttgctgtaggagataagatattgaagtagtgctaagtgcctaacacctgcagtgaacaatggcctctgcatcagcatctcttctcaagtcttcacttgttcttgacaagtctgagtgggtgagggacaaacacttcgccaacttctgtgatcagttgtgagatgcaacccaccaccccatcaggntcacatcagaggggttctatgcngatgactcgttaagaccggaaaacagttgctcacaagggggggttttggcat

SEQ ID NO: 3410 - DNA, 287 bp, Glycine max
  Clone ID: 700999525H1
ctccggcgttcgttctcaattcctggtttcgcttcaacgactcaccgaatcggcgcaaatcttgctcgcggagttcgagtccacgatccagaaaggcacttcaaagccggcggtgaacggcggcggcgtgcactcgctcacgattcagacgatgaattacctttcagtcctcgccgattatctcaacgtgctctcggatatatttccgcgcgactggcttccaccgcagaagtcgtcatctctgccggaatcttatttatacagtccagaatctgattactcggcgt

SEQ ID NO: 3411 - DNA, 250 bp, Glycine max
  unsure at all n locations
  Clone ID: 700999526H1
aacagaagaacaaccaccaccacacacaatgggtcgcgtgagaacaaaaacggtgaagaaatcctcccgccangtgattgagcgttactactcgcgcatgaccctcgacttccacacaaacaaaaagttctcgaagaagtggccatcatcccttccaagaggctgcggaacaagatcgcgggtttctccacgcatctcatgaagcgcatccagaagggtcccgttcgcggatctccctcaagctccangg

SEQ ID NO: 3412 - DNA, 281 bp, Glycine max
  unsure at all n locations
  Clone ID: 700999530H1
caaaantttggtgggaaganaattgacattgtctcnagggaaatgaaaactnccagaggagaaagatgaagctttgaatgctgctaagaacaccatactagaaatctttctggtcgttgncttcggttcaatttgcactgcacttcgagctnggcttttttatactgctagtgaaagggttgttgcacgactganaaagaatttgttcagtcatcttgtaaaccaggagatagccttctttgatgttactcgaactggggagcttttaagtaggctatctg

SEQ ID NO: 3413 - DNA, 294 bp, Glycine max
  Clone ID: 700999532H1
tttgcttcttcgagtttcacagccaagtcgtaaaagggtttcaagggatggaaaacatgcagagcttctggcaattgggtgatgaactccgtgggcactcaaaagcatcggaggatcacaagtggttaatggttgcctcgaaactggccgaacagacaagattgaagggggagcgtgtgaacaaccttgatctttcaaagggacccattgaaacaaggtcaagggataaatttgggttccaggaagagaacaaatttgattctcttaacttgagcatgttgaacctggactcta

SEQ ID NO: 3414 - DNA, 149 bp, Glycine max
  Clone ID: 700999533H1
ctctctttctctatggcatctgcgacgcgtctggtgcactgcgagctgcgctcggcgaggcccgcggttcggccgagggaaccggccggtccggttcaggttacgatccccaaacccaaacccaaagcggcggaggcggaaggcgcgaa

SEQ ID NO: 3415 - DNA, 284 bp, Glycine max
  unsure at all n locations
  Clone ID: 700999535H1
aataattgataaattaatatgattatttaaaggtgtgaatgagttaangcgattttatttataggaacaaatgtagtatttataaatagagtntaaaggtcacgaagtaatttgtttggatacaggccgatatatattgaacttacttcattaaggggattgctcttgtagtatcacaattgttgttgacactatccaggtgggtgtcttttggnttatcctataattgttccttggaaatcgcanagggagttagatctatgaccttcaagccgcaatggtgg

SEQ ID NO: 3416 - DNA, 277 bp, Glycine max
  unsure at all n locations
  Clone ID: 700999537H1
cgnaattgantagtgtntgtnttgcntttgantgttatgctgtgaatcgatgaagagttgggacaattgggtgtgttgaaacaggtacaaggatcatgcntggnaacggggttgttgggatcttggcagaatctgtgaataaatgggaaagaagggcacctttgaccccatcacactgtgctcgattactccatggtgggacagnngttctaggtcattgggnacctttccattangcnnntccnccaggngccctntataaaaatttgggngaaaa

SEQ ID NO: 3417 - DNA, 98 bp, Glycine max
  unsure at all n locations
  Clone ID: 700999538H1
cnatataacanggttggtcttgtaattggnaaaggtggagaaacaatanagaatatgcaancctcaactggagcaaganttcaggtgattcctcttca

SEQ ID NO: 3418 - DNA, 237 bp, Glycine max
  unsure at all n locations
  Clone ID: 700999539H1
ctgctttcatactttaactttgatggaagcatgcttcattttttcgtngccaatgtttagtgttaatcttggttcctttgtgtaggtgagttggntgtttaaggaaattgggcaattagagcttatcttatatgaattgcggtggacactgtattttatatatgatatgatgaaagcaaattattttagtgaatgttttgncaatttgncacggataaaaatattcantgaatcttt

SEQ ID NO: 3419 - DNA, 243 bp, Glycine max
  unsure at all n locations
  Clone ID: 700999541H1
ctctcctctctgcctaganagtagcatagcatattgagaganactncttttttctctatttcgtttctncctcctccaaaccataacntagtgtatcataagaggtcaataaaccccccaccataagagaatcaaacccaaaagtnatcaccaggcatgggggtgagacgtncatggggganggctcatgagtgtgtgtgtgtggaagatgagagaaacagtgcacatgnttggcatctcaac

SEQ ID NO: 3420 - DNA, 286 bp, Glycine max
  Clone ID: 700999542H1
cgatgcgctcctgtccttaactgggccgggtcgtgcctccggtgctgttactttgaagaaattagagtgctcaaagcaagcctacgctctgtatacattagcatgggataacaccacaggattctgatcctattgtgttggccttcgggatcggagtaatgattaacagggacagtcgggggcattcgtatttcatagtcagaggtgaaattcttggatttatgaaagacgaacaactgcgaaagcatttgccaaggatgttttcattaatcaagaacgaaagttg

SEQ ID NO: 3421 - DNA, 144 bp, Glycine max
  unsure at all n locations
  Clone ID: 700999546H1
ccagttttggaaccaacagtgactcatgttcaccaacacgcttttatccagaatcgttttactggtcttggcaaagattctgctgttctgggttgggtgaaatcattcttcaagcaattttatggatctgtgaccanattagat

SEQ ID NO: 3422 - DNA, 249 bp, Glycine max
  unsure at all n locations
  Clone ID: 700999547H1
tgaaaggaagaaaattagcttcttggcatcaaaggggaggaaggaagcaagtacacaccatcaatctttgtatatgactcacaataaagatggtgattcgatgtatcacagcaagcttgcttccttttgttcttaacagtgctggaattcggcttgcaaacatgtaactgatacattatactgtagtgtgagtgatccaccatttttnggccgattttganattnccaatnccggattncctttgactc

SEQ ID NO: 3423 - DNA, 285 bp, Glycine max
  unsure at all n locations
  Clone ID: 700999550H1
aagacaagaccgagcgagacgatggtatgagccgcgagagcattcccaccacctgcacgcgcccccacgcggaggacgaggacgacgtgatccttctcgaagcggttgacggggtgattttgcgagtngagaggtgtcatgttgcgtcgcagctgtgagtngggtctgtgctgtccatatgcatgacgatcctcgatagatcgtttgtncggcngggccaactggcggatggggtgcacgaatctagtcagccattcgtcgatgtcctcnaacctgacttccggc

SEQ ID NO: 3424 - DNA, 280 bp, Glycine max
  unsure at all n locations
  Clone ID: 700999551H1
anacaaacaacttttctttcnttctaatattattatgccacaggtggatttggaaacgttggtttccgcctgcnccggcggttgctccgaccagaaaatcgcctacgagcctcacgtcgacgacggagaccaccatccggactctccgccggcgtcgttctggctctctggcgacgccgagtacgactggtgggaccgcaacgccgtctancagcggaacgantcgacgaaagaaantcgattgtttcntcaggaacctgaagctannggaanatnttct

SEQ ID NO: 3425 - DNA, 284 bp, Glycine max
  unsure at all n locations
  Clone ID: 700999553H1
caaagtttcatggaggaacactctgactcacggtatcataaaggtttcttgtatgagcacatctcggaagcctctcatcaagagacatgataggacattcaagcttacagatccatcgtcagagcactgcccccctggagagttcgtccgagaaatccctctttcaactcgaattcntgaagatgccaacatagaagcatactacgatgggccaggatcagtgcttgagatcctggtgccaaaacatcgcgtgggaccagaagagcatgaagtccgggtntgcc

SEQ ID NO: 3426 - DNA, 144 bp, Glycine max
  unsure at all n locations
  Clone ID: 700999555H1
cgaganaagagaggaacgaagactgaaaaatggcgtcatggaattcatttccgcttcaanttacctacgaggctctgggttggttcgccttcgtttcctggtccatcagtttctatcctcaagtcatcttgaattttcgcaggg

SEQ ID NO: 3427 - DNA, 222 bp, Glycine max
  unsure at all n locations
  Clone ID: 700999556H1
gctcagcgataagcagaaagtggaaatcgcgaaatggttcctcctcaattctcctcccggagaaatccaatacgttgccaaagatgtgaaatccattctcaacaacgacgatttgtacaaggaagccgcttccgaggcttttctcttttacaacaaatcgcacttgatttcccttccaatgtccaaccgaagcggagacgtacnggnnacttntttgggggg

SEQ ID NO: 3428 - DNA, 284 bp, Glycine max
  Clone ID: 700999557H1
taatcaaccacaaacctaaacaaccccttttgcctaaagctccttccttttctccaatggcaacctgggttttatcagaatgtggcttaaggcctcttccaccagtgtttccacggtcaacaagacccatttcgtgccaaaaaccttcaaagtctagatttttaagcacaaacaagggtgtgccagatctgaatctccaagcaagagggttaacatgctgtagttttagggatagaaagtgggaattgggagtgagtgctccactgaaagttgccaccaatgag

SEQ ID NO: 3429 - DNA, 144 bp, Glycine max
  unsure at all n locations
  Clone ID: 700999558H1
canacaaacaacttttctttcttnctaatattattatgccacaggtggatttggaaacgttggtttccgcctgcgccggcggttgntccgncnagaaaatngcntatgggcctcangnngacganggnnagcagnancngnact

SEQ ID NO: 3430 - DNA, 291 bp, Glycine max
  unsure at all n locations
  Clone ID: 700999562H1
gtagcnnanacttcaganacatagggctgctgttattatacaaaagcggatgaaaacagtacntgcaangnacagaatganaagtagtaatggttgctgcagncagtcatacaatcatttattccgtggntggntagttcagaagatgcncaggagatataggactatcaaaacctcggggcantangactaatgagtcagatgaggttctggtgaagtcatcttncntggctgaatnacagcgcngggnacttaaggcngaagctccctgagagagaaagtngagganat

SEQ ID NO: 3431 - DNA, 148 bp, Glycine max
  unsure at all n locations
  Clone ID: 700999564H1
gctgacttcatgtgaagtgttattgtttcatcacgaagatatgggaattccctgggaaattgctaagcttggagttcgacagggtatgtggggagctgtcaagaagtttgatccaggactacggacatatgaganacaaagggtttct

SEQ ID NO: 3432 - DNA, 281 bp, Glycine max
  unsure at all n locations
  Clone ID: 700999565H1
ggagtttgtggttctgggctagatcttgatttattgggtcttgacattgatgacaacgacattgatcccaggactgtctgttgcgtcttctaattctacagcattggcagctttgataaatggattggaggnttgcgcggtggaagcggatactgctcgtgctcnccctgattctttctagtggaatttctacccggtatatatattccacctataagaaaactcctgagacaactagtgaantgaagcttgggaagctgctaagaaagcttgtggaggtt

SEQ ID NO: 3433 - DNA, 234 bp, Glycine max
  Clone ID: 700999566H1
taatttgttcatcttgaaaatggtggatccatcctatagagtccctctttgacgtggattctccaagaatcagtagtggccggtggcttcaattttcactttttggcataaatgctccagtttgtctgtctaaaatttccgccagtttatgctttctttctgttgtatcattgtatattttttttcagttacaaccatttacataaatttaattaacacaacttctttgacgtg

SEQ ID NO: 3434 - DNA, 282 bp, Glycine max
  Clone ID: 700999567H1
gtcaaacaggtgatttgttcactttgtgggactgaacaagaggttcagcaaaactgtataaattgtggtgtttgtatgggcaagtacttctgtggaacatgcaagctttttgatgatgatatatctaagcagcagtaccattgcagtggctgtggaatttgcagaactggaggaagcgaaaatttcttccattgctacaagtgtggttgttgctactcaactcttctgaaaaacagtcacccttgtgtagaaggagcaatgcatcatgattgcccggtttgt

SEQ ID NO: 3435 - DNA, 282 bp, Glycine max
  unsure at all n locations
  Clone ID: 700999569H1
gtcacggagagagaagggaaggaagagtgggtgttggtggttgtcctcctccctcctccatgggtatggcaaccctctcctcctctcttcctcttttccatcgctaccctaaccntaaccctaatccttcgctctttcgcccctccctttccctctccttctccttctctcgcactaaaccccgtcgtgcnccctttctcnttctcgcttcctcttcccacgatttcacctcnaantncaaganatcanngctcactgnnttgatacaaganatanagcctt

SEQ ID NO: 3436 - DNA, 282 bp, Glycine max
  Clone ID: 700999570H1
cacaaggcagaaagcaagctcatcctagagttttaaaaatggcagcagcctcctccatggctctctcttccccatccttggctggcaaggccgtgaagctgggcccatcagcccccgcagtcgggagggtcagcatgaggaagaccgtcaccaagcaggcctccttccggaagcccatggtacggcccagaccgcgtcaagtacttgggcccattctctggcgagcccccgtcctacctcactggcgagttcccaggtgactacggctgggacactgctggg

SEQ ID NO: 3437 - DNA, 280 bp, Glycine max
  unsure at all n locations
  Clone ID: 700999571H1
ctgctgtaactcttctgccgctgctatctccgccgctgccgtctccgccgctgatgtgtctgtatctgagaagttttctactacttttgatgacttagaagagagtgtgttgtctcacaattcaccatcctctgtgctagagttggatacattggcttccaaatcccttgagaagggtaatgtttcaaccgaggaagctattgaggctaatgatttggtggctgaacttgnagggttagaggtnccagatgtcagtctgtnaannttgtnacccccanct

SEQ ID NO: 3438 - DNA, 141 bp, Glycine max
  Clone ID: 700999572H1
gcaacagcagctaacagcagtgtttactcacagacacagtgcagaccactttcctcggatgttcgaggttcgattccttacttgaatgaacggaagtctcggttggtggtgagggctggtggcggtggtcgtcctcccaag

SEQ ID NO: 3439 - DNA, 142 bp, Glycine max
  unsure at all n locations
  Clone ID: 700999573H1
cttttgtggatccatcactgcagcacaccagaaatataggtattgnccaattctgctggatncagactctctcactgtggtgaaagatactagaaggaatgtttgtnagatcagtaaaccatcttgtgcctgaactaacata

SEQ ID NO: 3440 - DNA, 141 bp, Glycine max
  unsure at all n locations
  Clone ID: 700999574H1
ctcgtcactccttgctcttagccctcctcctcttcgccgcngtnnccaccgccgcgatggcggtggccgcgtccgacgccgacganatcctgatccgtcaggtggtgcnagatgttggcgaancnaagaggaggacaacct

SEQ ID NO: 3441 - DNA, 282 bp, Glycine max
  unsure at all n locations
  Clone ID: 700999576H1
cggagaagcgagctgctcctagtgctacaaattcaattaagttactataaactggtacngaatcgaatgtttggagcacccggacaaaactagacgtgtttcaagccatagatttgttgttgttgtaatgttgaaaagaattgttcttggcatggtcaganatatttaattctatgtattgtagaaaganaggtttaatattgagcggtgattttgaatgtataaagtcataggcagctagattttncggaagttncacgntcttccancctggggggccct

SEQ ID NO: 3442 - DNA, 285 bp, Glycine max
  unsure at all n locations
  Clone ID: 700999577H1
ttggtcccacctgcaaccagttcaagctgaggttctgatnntaaactctcaaactaatcagtacacctttccaaagttcctgaaaganatgagtaaactaaaagttctgacagtcatacattcatggtttccatccttctaaaatgancaattttgagttacttgggctcattatccaacctaaaacgaatcagattagagaggatttnggttcctccctttgtcacattgaagaatctaaaaaagtcatccctcttcttgtgtaatacaagncaggcttttgaa

SEQ ID NO: 3443 - DNA, 282 bp, Glycine max
  Clone ID: 700999578H1
aaaagtgtcgtatctgagaagaatatacattaagcaagtcatgcaggttaattccccagatatttgtaacatctttgcttgttgacgtcttgacaactcacacactacagcactttacacggtgacacttcactcaatgttctttttggttagaatcctctaccggtcaaaactcttcgtaagtagccccttctgaaacttcgacaatttgcttcgacagcttccaggatcaatgattgtcaccacaaatcaacatgagatttcctagggtgtttggtcccc

SEQ ID NO: 3444 - DNA, 285 bp, Glycine max
  unsure at all n locations
  Clone ID: 700999580H1
gaatagtcgcggaagctactcaaggtcttacttacaggcacnccggcgtggacatcgacgccggctccgaactcgtgcgcaggatagcgaagatggcgccagggattggaggcttcggtggtttattccctctcggtgactcgtacctcgttgctggtaccganngcgtgggaacgaaggtgatgcttgccttcgaaactggaatccacgatactattgggattgacctggttgcgatgagtgtgaatgacattgttacttcgggggcgaactttgtttttcctt

SEQ ID NO: 3445 - DNA, 283 bp, Glycine max
  unsure at all n locations
  Clone ID: 700999581H1
cggaacagcaacgttgtagagggagacttttgggggagagtgagtnagagtaaaaagatgtttctgcgtgcggtggcgcggccgttgatggcgaaggtgaaggcttcgacggggatcgtggggctggacgtggtgccgaacgcgagggaggtgctgattgggctgtacagcaagacgctgaaagagatccagaaggttcccgaagatgaagggtaccgcaaggccgtggagagcttcaccangcacaggctcggcntntgcaaggngaggacccttgganaac

SEQ ID NO: 3446 - DNA, 284 bp, Glycine max
  unsure at all n locations
  Clone ID: 700999582H1
tttcatcgtgcattcaatggccaccacagcagctctatccggaaccatggtgagcacctccttcatgaggaggcaacctatgaccaccacaagcctaaagacattccccaacgttggtgaagctctttttggtctgaaaagtggacgaggtggtcgtgtcacttgcatggcctcgtacaaggtgaagctcataaccccagaaggagaagtggagtttgaatgcccngatgatgttttcattgttgacaaggcagaggacgaaggcattgaacttccctactcgt

SEQ ID NO: 3447 - DNA, 144 bp, Glycine max
  unsure at all n locations
  Clone ID: 700999583H1
ctgattctngctagaancgtagcttgctgaggctttcagaagcagtcaagaatcaagatagatttctgagaatcagatcancgtctactcattagtcatggatagcagcaagaagggngccctcatgagtaatgaaagcgcaat

SEQ ID NO: 3448 - DNA, 278 bp, Glycine max
  unsure at all n locations
  Clone ID: 700999584H1
gaggatatttcgtatctcactaaccgcgctgctgtctacttcgaaatgggaaagtatgaggaatgcataaaagattgtnacaaggctgttgaaagaggaagagaactaagatcagattttaagatgatagcaaganctttgacaaggaaaggnaatgccttggtgaaattggcgaagtgctcaaaggattatgagcctgccattnagacntacnagaaagcantcncngnncgngtcanccctgacttttaaagtttttntgncccngatggggaaat

SEQ ID NO: 3449 - DNA, 283 bp, Glycine max
  unsure at all n locations
  Clone ID: 700999585H1
ctnatgaactaaaggatactataattactgataatgtcaaattagaacaagatattgttaagccaganatggtggaaganccatcatccagaaatgatgtacctgtttcttatgntgcatcacattcaatggatgttggagggctgcatgagaaaaaggcatctgttgaagaaaatttcantaatgttttaagtccagacatgaacaagaccaatngcagcgangatgtggggtatcccgaagagttgancttggacagaagttctggtggatgattctatgg

SEQ ID NO: 3450 - DNA, 277 bp, Glycine max
  unsure at all n locations
  Clone ID: 700999586H1
cctgcaccccaacagatgcagacttggtggctactgcaggcggtgatgacagangatttctctggaagattggccaaggggattgggcttttgagcttcaaggtcacgaagaatctgtatccagtttagcttttagctatgatggacagtntttggcatcaggaagctnagatggaattattaaagtctgggatgtatctggaaatttggaaggtaaannattnganggacctggagggggcnntgattggcttngntntcatccaagagganantt

SEQ ID NO: 3451 - DNA, 278 bp, Glycine max
  unsure at all n locations
  Clone ID: 700999587H1
actgagctcataatagcaatatttgcccttagcagtaacaaaattgccgtggtcaagtattctctgttgggttctattctttcaaaccttcttctggttcttgggacctctctattatgtggtggcattgcaaacgttggagtggaacaaaaatatgatagaagacaagcagatgtgaactcacttatgctgttgttgggattgttgtgctacttgcttccaatgctgttcaaatacagtggtgcntcagctgctctcatgtagacccttnattanat

SEQ ID NO: 3452 - DNA, 279 bp, Glycine max
  unsure at all n locations
  Clone ID: 700999588H1
cggagagaaggagaagaggttccagatcttcaaggacaacctgcgattcatcgacgaccacaactcccaagaggaccgaacctacaagctcggactgaaccggttcgcggatctcaccaacgaggagtacagggccaagtacttgggaaccaagatcgatcccaaccggaggctcggcaagaccccgagcaaccgatacgcgccacgtgtcggcgacaaactacctgaatcggttgttggaggaaggaatgtntgttcctnagtcaaagaccggggggg

SEQ ID NO: 3453 - DNA, 282 bp, Glycine max
  unsure at all n locations
  Clone ID: 700999589H1
cacacaacacaagacattcattcttaatttcttatccttatactaatgtcatcgacagcagaagcacccatccatggggatatcttagaggccatattctcgcacgtgccactcatccaccttgtgccggcctctcacgtgtcaaattcctggaagcgtgcggtctcctcctccctcgctcacgtcagacccatcaagccatggctcatagtcctcacccagagcctccgccactcgcacgtgacaactctccacgcctacgacccccnctcgcacgtgtgg

SEQ ID NO: 3454 - DNA, 280 bp, Glycine max
  unsure at all n locations
  Clone ID: 700999590H1
ggatcaactgaggagagtgagagaaaagagaagagaagatgacaacacgcttcaagaagaacaggaagaagaggggccacgtcagcgctggccacggtcgaatcggaaagcacaggaagcaccctggaggacgcggtaacgccggaggatgcaccaccacaggatcctcttcgacaaataccaccctgggttcttcggcaaggtaggaatgcgctattttcacaagcttcgcaanaattctactctcggatcctcaatttcgaaaagntgtggncctggc

SEQ ID NO: 3455 - DNA, 280 bp, Glycine max
  unsure at all n locations
  Clone ID: 700999591H1
agaatccccacgcactctccctgaagaaagaacaaacaaatcaagcattccatagttcttagatagggcacgcttctctcccttgcgccgcctcacaaaaggttattggcctattattgtctgaagatggttgatggccatgagactgataagaacattgaggtgtggaaaatcaagaaattgatcaaagctcttgaggctgctagaggaaatgggacangtatgatttcccttatcangcctccaggtgatcaantatctcgngtcataggnngctngg

SEQ ID NO: 3456 - DNA, 284 bp, Glycine max
  unsure at all n locations
  Clone ID: 700999593H1
aaaagccttagccttccctacaactccaaacncgaagacatcntcatccatggctgcctccgtctctactgtncggagctgtcaacaganctcttttgaacctgaatggttctggagctggagcttcagctcccagttcagccttctttgggaccagcttgaagaaggttattgcctcaagggtccccaacagcaaggtttccggtggaagcttcaagattgttgctgtagaagagngaaagagattgaagagacccagcagaccgacaaggacagttggnagg

SEQ ID NO: 3457 - DNA, 291 bp, Glycine max
  unsure at all n locations
  Clone ID: 700999596H1
gacgaggaagagggcngaggacctgtggcaacattgagcagttcaacttgncctacggtgccaagatcctcttgcaccacgccaacatgcgtctcaagcgtggccaccgctacggtctctgtggcgtaacggttcgggcaagtcgaccctgatgaacgccatcatcaactcgcaggtcgagggcttcccgccacccaccgaggtccgtaccttctacgtccagcacgacattgacggttccgaggccgagatttccatcatcgactgggttctcagcgacaagcgtctctt

SEQ ID NO: 3458 - DNA, 289 bp, Glycine max
  unsure at all n locations
  Clone ID: 700999601H1
ggaattgttgtaactttttgattcctaaattctctaaaatnccgaaattctaatttcgttaggggaaagagattgtttgtgtgtgagtgagtatggctggaaaaggcgagggtcctgctatcggaatcgatttgggaacgacgtactcttgcgtcggcgtgtggcaacacgatcgtgttgaaatcatagccaacgatcagggtaacagaactaccccatcctacgtggctttcaccgacacagaacggttgatcggcgatgcggcgaagaaccaggtcgtatgaaccca

SEQ ID NO: 3459 - DNA, 284 bp, Glycine max
  unsure at all n locations
  Clone ID: 700999602H1
caagaataaaaagttgaggataaggaatataattatgtctaaaaattatttttcctcaaaaatatattatttgaattattgattcttgtttgtngtgtacgcgaatctccgtttatgataagaaaaataaaagngattnttttcttcagcatgattcgaatgtaggtggatgatgttttccgttatgggtgatttttggtcggaaagtcaatatgaatgaatgagaagaaaaacccaatacgaattcttcctctgttccacacctcgtcactcnccacgttgct

SEQ ID NO: 3460 - DNA, 279 bp, Glycine max
  unsure at all n locations
  Clone ID: 700999603H1
gaagaaggacccctcctactctatattggactgcatctttcacgaggcggatcaaacttattacgttattgacatggnttgttggcggggttaccctctgtctgattgcaccgcggagtttaggttcttctggttgacctcgaagcttgcagaaactgatgcctttgaacctccctcgcattatcacaagtacaggtttagtttggttccggtgtttaattgtgattcgaatggtctctatgctgcttattcagcaccagtgccttatgtcaaagacgg

SEQ ID NO: 3461 - DNA, 75 bp, Glycine max
  Clone ID: 700999605H1
aacaacttcgtttcaactgttttcactgtaaaaaaaagtggaccttatatattcataacttgtgtcaaacaagag

SEQ ID NO: 3462 - DNA, 275 bp, Glycine max
  unsure at all n locations
  Clone ID: 700999606H1
ctcataacacaaagcacaaagcaaagctcatccttgagttaaaaaatggcagcagcttcttccatggctctctcatccccatccttggctggcaaggccgtgaagctgggcccatcagccccagaagtgggaagggtgagcatgaggaagaccgtcaccaagcaggtctcctcaggaagcccatggtacggcccagaccgagtcaagtacttgggcccnnnnncnggcgagcccccgtcctacctaaccggtgagttcccaggcgactacggctg

SEQ ID NO: 3463 - DNA, 270 bp, Glycine max
  unsure at all n locations
  Clone ID: 700999607H1
aattgtgaacagtattgttcttgcgttgtttcngagggtcaattgtttggntgagcaaaaatctganattcaatttcagttgaaagcnaatggggaatcttttttgttntgtgaaagttgatcaatctacggtggctatgaganaaggatttggacgatttgagaaggtacttcagccgggatgccattgcatgccanggttccttggnaaacnacttggctggtcatctctctcttcggctacagcaactggatcttcgttgtgaganc

SEQ ID NO: 3464 - DNA, 272 bp, Glycine max
  Clone ID: 700999608H1
gggttgtgaaagcagagaagtgagatacactaagttatcctcataaatacactctaattaggtggcaagataagtgtctaaccttagtaacattgccacatattgtgttcattttggaattgtgccactaaaattctattcaattcatctatggctgcctcttcttatgctatgcaatcaatcctggcaaaccctttgatccgcatttccagcgggtctagggtgaaccaatttggcgttcctgctttgcacatgagaaggaatgttggcct

SEQ ID NO: 3465 - DNA, 273 bp, Glycine max
  unsure at all n locations
  Clone ID: 700999609H1
cttaattgccttaaggaacgttcgagaccacagaggtttctctagtcttcttctgtggagagcttgttttctcttgttcatncatctcacttccaattaaggaacaagctttccaccaatttgaatcaccaatggctcgctctttctccaacctcaaggttctctctgctcttgtcgccgacggattctccaacactctcaccaggcgtgggtacgcagtagcgacacaaagcgcnacaagaggaggagcagcctccatcagcggcaagtcag

SEQ ID NO: 3466 - DNA, 270 bp, Glycine max
  unsure at all n locations
  Clone ID: 700999611H1
ttatggacagctggaacttaggattctggcacaccttgcagactgtaagagcatgttggaagcttttgaagctggtggagatttccattcaaggactgcaatgaatatgtacccacatattcgtgaagcagttganaaaaaggaagtgcttcttgagtggcatcctcagcctggtgaagataaacccccagttcctcttttgaaggatgcctttgcttctgaaagaagaaaagctaaaatgcttaacttctcaattgcatatgggaagac

SEQ ID NO: 3467 - DNA, 268 bp, Glycine max
  unsure at all n locations
  Clone ID: 700999613H1
ggaatccaaaaatgagaganatcatcagcattcacataggtcaggccgggatccaggttggcaactcctgctgggaactctactgcctggaacatggcatccagcccgatggcatgatgccaagtgactcctccttcggtgtagcccacgacgccttcaacaccttcttcagcgnnaccggatccggcaagcacgtccctcgcgccgtcttcgtcgatctcgagcccaccgtcatcgacgaagtccgttgtggcacttaccgnggctc

SEQ ID NO: 3468 - DNA, 275 bp, Glycine max
  unsure at all n locations
  Clone ID: 700999616H1
gnagcttcttctntcctnttctctctctcacctcttcttcttctcnatctctgtccttagccacnacagccanactttgttctccaaaaccananccgnccanagttaacgcctttccctcngtctcgaaccanaaaccntttcgtgacccttgcatgngtngcgatgctcatcccagnaataaataatcatgnnagcnagactcaataaagttgattntnggcgtatntatgtgattggggttatacgcctggctaataaggnatgcgcncctc

SEQ ID NO: 3469 - DNA, 285 bp, Glycine max
  unsure at all n locations
  Clone ID: 700999617H1
cgaccactgagctggacgctgtgtcctccttcagcgagatcgttcccgacaccgtcgttttcgatgatttcgaaaagtttcctccaactgctgctacngtcagttcctcgctcctcttgggaatatgtggccttccagacaccatttttagngtcagancttcagtctttgatatacctaacatctgcactttggtctgagtccgagttacattttntattgttgctgtagnatgccgtggaaatggtttagctgagtctgnntgttatggacttgnaaatccta

SEQ ID NO: 3470 - DNA, 283 bp, Glycine max
  unsure at all n locations
  Clone ID: 700999618H1
cacttctcatggaattgangtggctgtggagtttaagccagttgaacatccgattgaaccacttgacaatgataggccnattcagtgcccgttgccagaaccatctattcttaacgatggaagaatatggaaagaacgagtatctgctactgtggggagaagaggggacctgccagtgatgaaggaagggggaacacttgaatctgaagatgctggagctagaccacgaacatcccggtctaaccgaatgatcttaccatctgttagtgctccggagcataat

SEQ ID NO: 3471 - DNA, 182 bp, Glycine max
  unsure at all n locations
  Clone ID: 700999620H1
ttcgttcttgtaactcgaattggcgtcgagtgaagtgaagggcntcnnaaaccagagggaaantatgagcaatcncagaaccctntntagacctnagacggtgttctctttcattagtttccaanancaatttcgtnctagggttncctttcnnaatntaatcncnaggccncgnttnccat

SEQ ID NO: 3472 - DNA, 275 bp, Glycine max
  unsure at all n locations
  Clone ID: 700999622H1
cacagtcactgcatttaaactccaattggcctgngccctggagcagataagtacggtgtccagccactttccatatggctacctggtggaaattatggcactgtgcatcatcatgaaaattctaccaaccagaacctatctgttccaaagggatggcgcaatggggactggatctgtaactgtggcttccacaattactcatcccgctctcagngtaaaaagtgcaatgcttttcctcctgcacttgggacaaagcggttagcttcagaagagtt

SEQ ID NO: 3473 - DNA, 272 bp, Glycine max
  unsure at all n locations
  Clone ID: 700999623H1
cgcatactatctataatgcagaanggaaaaagtttgccctacatcttgttccttctggnattctcaatgaggatactctctgtgttattgggaatggggttgtagtgcacctgccggggttgtttaaagagattnacggtcttgaatcaaatggggtctcttgcaagggaaggatattgatatctgatcgcgctcacctgttgtttgattttcatcaagtagtggatgggctaagagaagccgagcttgctaaatctttcattggcaccacc

SEQ ID NO: 3474 - DNA, 270 bp, Glycine max
  unsure at all n locations
  Clone ID: 700999626H1
cttatgcatcaaacatggagagttctaatggtcattctttggnacctgnggccttgaaaacaaatgcnaatagagaanagtctctatcattgctgtnatggaaccctgttaagtagtaatttcaaaaatgagaatatgccanatcaaatgccatttcacagtctgggctcagctnagcaagtaggtcatcagtntgaaaatnaaaatgaaggtcatagtgangtcaaggagttggcctaggcttttcaccaggntanattcatcancagt

SEQ ID NO: 3475 - DNA, 266 bp, Glycine max
  unsure at all n locations
  Clone ID: 700999627H1
ctntcaacctaacccatcgttcgcacgganccgtggtgnttctgnctctgtccttttttcctttctctcgttaccagaaccagaagnaccatttgnngcnaacatggattnngaccantggatctccaaggtcnangagggccngcatctncttgnagacgagcttcaacttctctgcgaattgtaaaagngctcgtatcgnggngtccaatgtnnagttgtcaatagtccagtgactgtttntggtgatattcatggnngntcnt

SEQ ID NO: 3476 - DNA, 272 bp, Glycine max
  unsure at all n locations
  Clone ID: 700999629H1
ccanattcacctgagctttttgtgaggattccaaagcatggcttcccttngcagcatccactgctgctgcttcccttggcatgtcaganatgcttggaaaccccntcaacctcagtggtgccacaaggccagctccatctgcctctagccctgcctccttcaagnctgtggctcnnntctccananagaaggctgcanntccannaanagctgcagctnctgctcctgccaatgatgagcttgncangtggtatggtcctgacagaangatc

SEQ ID NO: 3477 - DNA, 271 bp, Glycine max
  unsure at all n locations
  Clone ID: 700999630H1
cgcagtgaaactaaccgctggctactacaacacacgaaataacnatggatatctgcctatagcaaggatgctcgcaaaacatggagttgtcttcaatttcacctgcatggaaatgaaggncaganagcagccagactttgcaaactgctcanctgangggttagttcaccaggngaanatggcaacaacancagctagagcagagcttgcngggnaaaatgcattgganagatatgntgcagatgcatatgctcaagtttatcaacnagtt

SEQ ID NO: 3478 - DNA, 285 bp, Glycine max
  unsure at all n locations
  Clone ID: 700999633H1
ttcaattagttcgaatacaatggagagtgccggagtatggttggaccacgcagaaggtctttcactttctcaatttcattgtgaatggggttcggtgttttgtntttgtcttccgtcgggatgtgcagaagttgcagccagagattgtccaacatatctnacttgacatgcctagtcttgctttctttacaacttatgcgcngttggtactgttctgggctgagatttattaccaggcacgtgccgtatctactgatngtctcagaccaagtttctatacgntta

SEQ ID NO: 3479 - DNA, 276 bp, Glycine max
  unsure at all n locations
  Clone ID: 700999635H1
agaacttcagtatgagctctcgcacgctcagtcacgccctccgtggcggcctcagcgttaatgtgcgtcgccagacgtgatcactcgtggtggccacgcgcatcgtccacctcctccaccttttgcacgtatcaaggcacnngaacagccgctacacgaggaggcggactggtttggaatgacggcgtctccnccgagacgctcatcgactttgacgcgccgcatattcccaagtatcaggcgttgcgacattggntttgtggattggcatgcttg

SEQ ID NO: 3480 - DNA, 278 bp, Glycine max
  unsure at all n locations
  Clone ID: 700999636H1
cccctcacaccagaaagagtggnttgtgcggtggtgaagaagcgttcggaatagaagaagaagatgtcgtcggtttacgttctagagcctccgacgaaggggaaggtggtggtgaacactacgcgcngtcctttggacattgagctgtggccgaaagaggctccgaaggccgcgaggnacttcgttcagctctgcctcgaaaactattacgacaacaccatcttccaccgcatcatcaaggcgatcctcgtccaaagcggcgaccccaccggcaccgg

SEQ ID NO: 3481 - DNA, 269 bp, Glycine max
  unsure at all n locations
  Clone ID: 700999640H1
tcaggcttcttccaaaccagcttctattttggatacactttgatgttttgtcttgggctgggaattctgtgtggagctgtgggttatcttggttcgaatttgtttntgaggaggatctacaganacatcaagtgtgactaaggcntttgtangantctgagaccagancacttccatatgtttgtngccggagacaataaatttcntagaggaagcctctggtcatgtgtggggaccaaacaatgtntgcaggtagtaagtatcacagg

SEQ ID NO: 3482 - DNA, 270 bp, Glycine max
  unsure at all n locations
  Clone ID: 700999641H1
ccannntactcacattttcananntntgngattnnagngcattctgnagatganctaacttatagacnaattaaanaccaattnctattggaaaggnttgcagaaagcagtaaaaaaatgggtgcagnagtgtatcacntgtcaacagaacnanccattattaaggatgccagctggnttactttnaccattatccattccngntagggcttggaagtctatttcaatggactttatagtnggtcttcctaagtcgaatganataatttt

SEQ ID NO: 3483 - DNA, 272 bp, Glycine max
  unsure at all n locations
  Clone ID: 700999643H1
cgngaaagcnaaaatgggacttgggactctgccactgaccccttcttacagcagtttctcttcaaagtcaggagggcttttacatgacatcaccaatcacagcagggttaatagaagcatgaaattcagagtttcagccaaacaagagaagcaagaagagaagaaaaagcaatctttgttcagcagtgtgactgaagctcttgatttttctcaagtgagatcngctgaggatgctcagcttatagaagaggctagagaagccacaagatcgg

SEQ ID NO: 3484 - DNA, 232 bp, Glycine max
  unsure at all n locations
  Clone ID: 700999647H1
caanatttggctctggcatgtcttcattggattntatactcntggaaccagctgaagttgcaggggtnaatggtggaaagtggactgatcaggagactctcctgctccttgaagcattagaactgtatanagaaaactggaatgaaattgcagaacatgttggaacaannacaanagctcagtgcatatngcactttgttcaaatgccanttgaggatacctttgttgactg

SEQ ID NO: 3485 - DNA, 229 bp, Glycine max
  unsure at all n locations
  Clone ID: 700999650H1
tcttcttcgtccanacaacataaaatangananncagggtttctccaantcactggccatgaccattctctctnagatcggtgacaaaacgttttttgcagctgcgatactggctatgcgacaccctagacgcctagtcttatcaggttgcttatcggctttgattgtgatgaccattctctctgctcttgttggctgggcagctccaaatctgatctctcgcaatgga

SEQ ID NO: 3486 - DNA, 279 bp, Glycine max
  unsure at all n locations
  Clone ID: 700999651H1
ggattctcgnaanggngcagaacgaaatgcacgcgtccttcgtgtggctgttccagcaagtnttctctcacactccgactctgatggtgtatntgatgattctcctagcgaatttnacggttcactcaatggggancancgccgncatcgccgcngtggctccgccgccggtaacatcagtcgtngaggctcacgaccaaaggggtcatattcagagtcataacnttgattcctcttccatcnagacgttctctntttcgaacggtaaaannacagcct

SEQ ID NO: 3487 - DNA, 273 bp, Glycine max
  unsure at all n locations
  Clone ID: 700999653H1
cantagtagtagtagtaaatcattgntctacgnagctcccctcggatacagcattgaanacgtnagaccaaacggtggaatcaaganatncagatctgctgcttactccnactgcgctcgcaaaccttccttatatccatccagattggtagttnattgnatggnancntagttttattnggngtnncttcnttgtgctcaattnggnttttgctgctctccttcaaacnccggctttccggntcctctcgtngnggnngtgaccggtgctgc

SEQ ID NO: 3488 - DNA, 273 bp, Glycine max
  unsure at all n locations
  Clone ID: 700999654H1
attgcttcagatacttcacacantatnaaanantaaaancattgtccacaatgagactgcaantggggtcaccaatgacttggccaaanngagacaaattctcgattcctaccggcatccagccntccttattgttgatggagtgtcttctatttgtgctcttgatttccgcatggatgaatggggagttgatgtggcaataactggctctcagnaggccctttcccttcccactgggataggtattgtggttgcaggacctagagctattga

SEQ ID NO: 3489 - DNA, 271 bp, Glycine max
  unsure at all n locations
  Clone ID: 700999656H1
ggcagatagaaaaaagagctgagtnttgagttcaaaagatgactaacttcccagtgatcaacttggagaagctcaatggtgaggagagaaacgacaccatggagaaaataaaggatgcttgtgaaaactggggattctttgagctggtgaatcatggcataccccatgacttattggacactgtggagaggttgaccaangagcactacaggaaatgcatggcagagaggttcnaggaatttatggcaagcanaggnctagatgctgtcca

SEQ ID NO: 3490 - DNA, 269 bp, Glycine max
  Clone ID: 700999659H1
caaaaaaaaaataataaataaaaaaattaagagccataattagaattctgtatgatatttacgtttacggcgtgtgataaaaagatactatatagaactaaaggagattcccgtttcagttacattcaattcaacgattgaccaaaagagaattcaaaaaataacatttagatcacccaaattccaatatttctatgaaacaataattaaatctaacgaatttatttcgattgattgtatccatatggggtaataataaaagggggagg

SEQ ID NO: 3491 - DNA, 268 bp, Glycine max
  Clone ID: 700999661H1
gaaggcattcctcttagacggcaagaatccatgagattgccatgatatattctttgcatcacatcttgcatttctaaatgagcttgaggcgctggggagggattttgccaaggtcgtctgtaatttactgattatttccctccccatcatattttttacctgatacagctgggtcgaaggatgagagtttcctatcactgttcttttggcctcctgatgattatgctttctgatcttgccttgcatgcccatctacactccataccgg

SEQ ID NO: 3492 - DNA, 243 bp, Glycine max
  Clone ID: 700999663H1
agatgttgatggttggctgcgcaatatcagctggtgtcaggaacaattcctactgaaagcatacatgtctcaagatgatcttattgtcttgcgttccttagttgtcaaaggtgaaagaatgagagagcaaatgctggaaggagaggttaaagtgtctcctagtctttgaacaatgtagcacactttctctcatcaacttacctcgagccgaatcggctcgagctcgagccgaatcggctcgag

SEQ ID NO: 3493 - DNA, 270 bp, Glycine max
  unsure at all n locations
  Clone ID: 700999664H1
acncnttcttcccancttcctctccttcttttctcttctttcttcttcttccatctctntttttctgnttaaggtctacaaaagttctcttctnccttctcctcctattgaactttggtcatcanacgagaaaacccacgtctggatcttctggtgtaaaggccattagaagccttttagaaattttcaaattgagttggtgtatagtgttgaagggggtganatttggagcccagtttgttacttcatttgaaaggtcatagtttgaac

SEQ ID NO: 3494 - DNA, 282 bp, Glycine max
  unsure at all n locations
  Clone ID: 700999665H1
cgcggcttcaaccttgncagttattctctttctnctttnttagctatccctctcttgaaaaatctagatctcgttcttccttgatctacgttacgcttttagtgaccggatcngtatggatctgaaccagatctacacgccgatggtggttgtggcctggtangataaatcttccatcggagttntgctctgtataggttcgattcatcgttattagcgtcttggatattgtcattntcattgtcatataggtcttcatagatctgaggtngggaggcncag

SEQ ID NO: 3495 - DNA, 283 bp, Glycine max
  unsure at all n locations
  Clone ID: 700999666H1
cagcattttggggcatctggattccaaccttatcatntatnngaacttgcacagccaaaataacactctcatangncactgaaatgccttgagaagtgtattccaagttgcacattttatgttcatttcagaatcttaatttancaaancatccacatttgacntgtccaatatcaacaaatatctgctactttnnttttatctgatganttaatgtgnagagctaaagtacacctatttatgganatacgtccatcaaagtgaagccaggctgantgagntt

SEQ ID NO: 3496 - DNA, 273 bp, Glycine max
  unsure at all n locations
  Clone ID: 700999669H1
caaacgtagataacgttttttcacgcatagttgaaaccacaaggcatccagctgctgcagcgtcatttgcttcaatcatgnctgctcctcaaggagaactatcctttaatgaaacattatccagatgtcgagcaaacaatgtgccantctgcctcatgtatggaaaagaagatccctgggtggggccaatttggggtctccaggttaaaaggcaggtgcctgaagctccatattatcanatcagccctgctggtcactgccctcatgatgaag

SEQ ID NO: 3497 - DNA, 272 bp, Glycine max
  unsure at all n locations
  Clone ID: 700999670H1
cgctgttccaaaacggcgtcgtttctctaactcctctgggttccgtcttgcttcaagtcaaaccgtgaattcggttccgcgtgcgaatggaacttacaccgtttcggatttcatgacaaagaagcaagatttgcatgttgtcaaaaccaccaccaccgttgatgaagctttggaggctcttgtaaacaacagaatcagtggtcttccggtgatcnccccaggactggaatctggttggagttgtttctgattatgacttattggctattgat

SEQ ID NO: 3498 - DNA, 268 bp, Glycine max
  unsure at all n locations
  Clone ID: 700999671H1
aagcatgttgcaattntntnnttttatctttttgtggaattgggagttaaatagtgaaactagatcaaatatttcatctgggtgttgctcacttcttcttcttctattgtgattncngatgtttttccatagggatgttgcaattttgtagctttttatgaaattaggagtgaattaattcatctgctattgtgattnctaatgtttttttcattagggtatgcaaaattttgagttttnatncttcngaaattaggngtgaaacagt

SEQ ID NO: 3499 - DNA, 248 bp, Glycine max
  unsure at all n locations
  Clone ID: 700999672H1
ggggcagcaacaaagataagcaggttcgcaagctaggtgggacttctggtttgtgctacaagtcaatggattcttgtgataaagtgcttggngcttctactgaattagatgctcttgaagttcgaagccaggattcatactgtggaactagcttcctgaaaaaatcagttactgaagtgcactactcggttgcagaagcactatgagtgaaatactctgaatgtcttttcctatttccttgaatgtac

SEQ ID NO: 3500 - DNA, 264 bp, Glycine max
  unsure at all n locations
  Clone ID: 700999673H1
ctttgttcactcttcttctcttgcggcnagggttttagcgcanttcttctagatttaaggaagatgggtaaggaaaaggttcacatcagtattgtggtcattggccatgtcgactctgggaaatccactaccactggtcnnctgatttacaagcttggaggcattgacnagcgtgttattgagnggtttgagaaggnnggtgctgagntgaanaagaggtctttcaagtatgcctgggtgctggacnaacttaaggcngangng

SEQ ID NO: 3501 - DNA, 266 bp, Glycine max
  unsure at all n locations
  Clone ID: 700999675H1
cgcaattgangttgaagtcttgcccttctctcttcaactccaaacacaagacatcatcatccatggctgcctccgtctccactgtcggagctgtcaacagagctcttttgaacctgaatgggtctggacctggggtttcagctcccagttcatccttctttgggagcagcttgaagaaggttattggctcaagggtccccaacacaaagatttcctcnggaagcttcaagattgttgctgtagaagagaaganagagattgaagag

SEQ ID NO: 3502 - DNA, 265 bp, Glycine max
  unsure at all n locations
  Clone ID: 700999676H1
tccagtcgttttcagaggagagatgtttatggtgcttggnagcagtatcttggcttggngcatactgacaatgctcctaaaagatcatatgctgttaaccagaatcgccacactttcgagaacccagtnaagatttataattaggaaactggtattgatgagtactcatcttgcgaggnatgaatttggcatattctgctacatctatgggcatttgtaaaaacagggaaaaatagcgaaaggctactctgtataggccataatt

SEQ ID NO: 3503 - DNA, 267 bp, Glycine max
  unsure at all n locations
  Clone ID: 700999677H1
cttggcaattccacagccatgccaagangaatgccaatgttgcttaccaccgcttacgttgagccctattcagtggtctaaacaagttcccagccgccantacgaaccttgtgatgggattgggacccaacaaaatctataaacagccaaactactacaattcacagttacggggatgctgccaaattggcaaattccctgtatacaaattaaatattcgaaacccatttcaatgtaaataaggaagctcgtatttgcaanctctnc

SEQ ID NO: 3504 - DNA, 267 bp, Glycine max
  unsure at all n locations
  Clone ID: 700999678H1
gaaaaggaaggaaatagcagctgggagccaccctatgagcaaaatcaaggaccttgaatcgtcgtagtaaaaagcaaagtagagttgtgtaatgatggctccactgagaccaacgtagcctttgaggatgcccagcacaaccccacggcttnctgggaagttcttcacgcaagtcacaagggaaccggtgttggcgaaggactgagaattcgagcctatgcagatgtagaggcacatgtgccacacgtgcggcttgggtattttttt

SEQ ID NO: 3505 - DNA, 266 bp, Glycine max
  unsure at all n locations
  Clone ID: 700999679H1
tgatctgcaagctacgatgggtaagggaacggggagtttcggtaagagaaggaacaagacccacaccctctgtgtgaggtgtggccgccgcagtttccacctccagaagagtccttgcgccgcgtccgctttccccgctgcgcgcaccaggaaatataactggagcgtgaaggccattaggngaaagaccaccggaactggnaggatgaggtacttgcgtaacgtgccccgtagatttaagagtggcttcagagacggtaccgaag

SEQ ID NO: 3506 - DNA, 267 bp, Glycine max
  unsure at all n locations
  Clone ID: 700999680H1
gataacattaggtgggattcttggggaaggtttacagaaaggagtgttgcttatcaaccatggatatggactgcangaaaccatnaaattgattttgctccagaaattggtgaaactgtacctttcaagccttatacccaccgttaccatgttccttataaagcatctcaaagtacttcacccttcnggtattctatcaagagagcttcagcacacatcattgttttggcctcatattcagcgtatggaaaatatacaccacaatat

SEQ ID NO: 3507 - DNA, 283 bp, Glycine max
  unsure at all n locations
  Clone ID: 700999681H1
gaananagcactccagtgctatncaataattacganaaaccaacagccgagtgttgtttttgtttngtccaggctggaccagggaatgaatagagatgagaggctttcggttgaagagaactgagttaagcggcgaaccanacgcagaatcggcggcagaaattgccaccggaagcacgtcgaagagggtgaaccaaacacaaaattccatccaccacttctcttttcaatccccaactcaaatctgtgaagaaaatctcaatttctaaattgtaattcttag

SEQ ID NO: 3508 - DNA, 277 bp, Glycine max
  unsure at all n locations
  Clone ID: 700999682H1
caatattttaccaggttcctctcattcttggtatctggggaggcaagggacaaggaaaatctttccaatgtgnccctgtctttgccaagatgggaatcaaccccatcatgatgagtgcnggagagttggaaagtggaaatgcaggagagccagcaaaactgatcaggcagagataccgtgaagccgcanacttgatcaanaagggnaagatgtgtgctctcttcatcaacgatcctgatgcagnanctggtcntctttgtggnaccacccaatacat

SEQ ID NO: 3509 - DNA, 273 bp, Glycine max
  unsure at all n locations
  Clone ID: 700999683H1
ttcatcagttttttgaagggtttgcgcttggaggttgcatttcccaagcgcagtttaaagcctcgtcagcaactataatggcttgtntttttgcactgactacacccttgggtgttgggattggaatggctatctncncggggtataacccttacagccccggtgcactcatcgccgaaggtatcttggattccttgtcgtcggggattttggtttatatggctttggtagatttgatcgctgcggattttcttagcaagaggatgagttgta

SEQ ID NO: 3510 - DNA, 270 bp, Glycine max
  unsure at all n locations
  Clone ID: 700999688H1
ttccataaccttagtcatcttcttctttcatctttctccctaacggtatcgagggaaaaatatggcggaagaacacagatgccaggcaccgcgcttctgcgcnaacnattgcggtttctttngcagccctgccacgcagaatatgtgctccaagngctaccgcgatttccanctcaaggancagcaatctttncaacgcnaagatggnnctcaatcagtcgtggttcnttcatcgccaccggcnttnttctntnagncgtcgtcttctnc

SEQ ID NO: 3511 - DNA, 267 bp, Glycine max
  Clone ID: 700999689H1
gagctgccgcttttggagtgtacagtgtctcttcttactgactatgaagctgctaaccattacccttgactgggagatagaaaagcatggtataattattgaattttctgatcctgtctataacacaaggcgtactgctacatacctgcctgaagtggctgccaatgaaggttggacaaaaacagaagccattgattccttgatacgtaaagcagggtacaatggtccaataaccgatgaacttaggatgcaaatacaactaaccag

SEQ ID NO: 3512 - DNA, 226 bp, Glycine max
  unsure at all n locations
  Clone ID: 700999690H1
caaaaatnagacattgtttggtacacgttacttgctcgaacttgcncgaatcgcttaatttgtatttgattagttaaaccgcaacgcggaatctcttttctcgaactggctaactctcaggcaagtggttcggacgctgattccagcaacaagcggctggtgctcgcactgtatgacgccctaaactccggcgatccgacgccgtcgtcaagatcgtcgccgcgac

SEQ ID NO: 3513 - DNA, 266 bp, Glycine max
  unsure at all n locations
  Clone ID: 700999691H1
ccaacggnaaatttggatttggattttgctctaaatcacattctntcgcttctnttttcttactttcttgttccttcttcagcttggatntttggcgtaacgaggaaggggttattgttgagaaaccctagcctaaacctaaaccatggcgcataggttgctgagagaccacgaggccgacggctgggagcgctcagatttccccatcatctgcgaatcctgcctcggcgacagccctacgttcgaatgacaaaagcagagtatga

SEQ ID NO: 3514 - DNA, 267 bp, Glycine max
  unsure at all n locations
  Clone ID: 700999692H1
caactacaaaggttgctgtaggagataagatattgaagtagtgctaagtgcctaacacctgcagtgaacaatggccnctgcatcagcatctcttctcaagtcttcacttgttcttgacaagtctgagtgggtgaagggncaaacacttcgncaaccttcngctgcatcagttntgagntgcaancccagcannccatcaggcctcacaatcaganctggttcctatgntgatgngctcgntaagaccgcgnaaacagnggccncacc

SEQ ID NO: 3515 - DNA, 266 bp, Glycine max
  unsure at all n locations
  Clone ID: 700999693H1
tcggagttaacgttcaacattagcctcagctccactctcctgaagtctttatcagaacccttagccagctttcgaagcaacttcatggtctcgtcctttcctcgagccgttttgaagagaaagatctaactggagatatctctggtcttggaccgtttgagcttgaggccttgcaagactgggaatacaaatttatgggcnagtatgtaaaagttggaaccgtaacanagacagttccagtaactgaaccagaatccactgctgna

SEQ ID NO: 3516 - DNA, 266 bp, Glycine max
  unsure at all n locations
  Clone ID: 700999695H1
ctggattatactgttttcagtacagtctgttatgganattgctcaatcntatatagtagtttcctagtatcatctatacgtagatattacttctgganccactgcatttccttctgtttcaacatctaatatcagtattgtccagtgctgaataaccaccctctacgtcattatggtctanaataattntatttntagntccattannttgtactgcatgcgnattnnattttttaagtatnttnaattaatgaagttnttctctt

SEQ ID NO: 3517 - DNA, 267 bp, Glycine max
  unsure at all n locations
  Clone ID: 700999696H1
aaaaagaaaaaagaaacatattcttgcaatttcgttgtacaaacaaaattcccctattttcggcncgcctttgttgaatttccaannnnnnnnnnnnnnnnnnnnnnnnnnnacgtaataattccaaaaagcctaacgcgaganattcatcagtttttcaattattcctcgaattttgaaggaatcatacaaacgcttgaaatattcgtcatcggcnacaacctcacgctnctatagattttttttttctcttcttacagtccaaac

SEQ ID NO: 3518 - DNA, 289 bp, Glycine max
  unsure at all n locations
  Clone ID: 700999701H1
gctgnagggaggttgagaagtgtttctcaggatggtctaangtgggatgagggagctaatacaatgactgaaagtgaaattgaggttaaaggtttgattgatgctcttggacttcaagaaaagcagcagtttccaatatcacagcataagcgctatattgtgaaaaatggggcaccacttctggtacccacaaatcctgctgcactactgaagagtaaactgctttctgcacaatcaaagatctctctcatttttgaaccatttatgtggaaaagaagtgacccctcta

SEQ ID NO: 3519 - DNA, 287 bp, Glycine max
  unsure at all n locations
  Clone ID: 700999703H1
cggatcggggataacaaaaaggttgctctttttgattccaagggagaccccgttgcaattctcaataatattgagatttataagcatcctaaagaagaaagaatagcccgaacttggggaaccattgcccctggcctaccttatgttgaacaaactataaccaatgctggnaattgggttgattgggggnncactagagggcattggaanccaattccgtacaatggtgggctttgatccatttcgnctatctccgacacaactccgtgcagagttcacaaggcgca

SEQ ID NO: 3520 - DNA, 274 bp, Glycine max
  unsure at all n locations
  Clone ID: 700999706H1
cgctcttcattntaagttacgattttcaggatggttttgtttacagntctggttgtnttanggnnncatgangtatcattgntntgtattatttaattgtagtagacgcaaaatctataatatttagaagagcagtctcaagatgttgattgtgtgcttgtnaatcccttggcatttgtatggaaatgttaatccaaaatgtaacatagttttgtattaagccaaggattagtggggcattggctcaaactctaattgtccttagggtggaaga

SEQ ID NO: 3521 - DNA, 271 bp, Glycine max
  unsure at all n locations
  Clone ID: 700999707H1
gctcgagcaacaggatgtggggaactgtgaaaggcggaggaaatgatgaagatggtttaagnnctttgaacattagccaatgcactgcactcaccccatctgctgttcaagctgtttgtgactcattcccttctctccacacatgctcagggaggcactcactcatcatgagtggctgcctcaacttgacatcagtgcattgtgcctgtgctgtccatgcgcaccgtgcattcaccactttcccttatcctgcccattaagaagctcatgc

SEQ ID NO: 3522 - DNA, 272 bp, Glycine max
  unsure at all n locations
  Clone ID: 700999708H1
cttctcttctgtgtttcttagnagaattaagatggctaccttgacctgtacctccagttcctccttcccccagagatgatgccatgcagctttaccgtgcttttaagggatttgggtgtgatacaagtgctgttatcaatatacttgctcatcgagatgctacacagcgtgcctacatccagcaagantacaaagcaatgtattctgaggaactttccaagcgcttagcttcggagcttagtggaaagttagagactgcagttctgctctgg

SEQ ID NO: 3523 - DNA, 272 bp, Glycine max
  unsure at all n locations
  Clone ID: 700999709H1
cgngaganagtagcagatcctccatggcctccaccaaggaacgtgaaaacttcgtctacgtcgccaagctcgccgaacaagccgaacgctatgaagaaatggtggaagcaatgaagaatgtggcgaantaaacgtggaattgacggtagaggagcggaaccttctgtcggttgggtacaagaacgtggtgggtgctcgtagggcttcgtggaggattctttcctcgattgaacagaangaagaagctaaagggaacgatgtgagcgtgaaga

SEQ ID NO: 3524 - DNA, 263 bp, Glycine max
  unsure at all n locations
  Clone ID: 700999710H1
aactctnggaggtntnnnnnntnatnatgagtttatcaaaagtggngatacatcgcgtttngannccaangcaagaattttgcagcacagttggacacgagtnacaggttcaaactggccaagtccatcaccgcagatcagattctcccgccaagaaacgcactgcccactacaatgcaaganaaagttcgatattatcctggcaaccgcgttgccgtggcaaacaacaacgtccccttccccttcgggggcccaagganatt

SEQ ID NO: 3525 - DNA, 268 bp, Glycine max
  unsure at all n locations
  Clone ID: 700999712H1
ccaaaccttcttcctctctctatatactgaacaaaaacaaaaagagagntcagaatttttagatctcacctatttaactacctcgtaacattctcttctgtgtcctaatcggaactcgcaaagattttgttatagtgatctgatgccatcttagggtttttgaattgcgatgggtctgggaaacgatgacgatgacggagacacgctcaagtccttcggttcagtgtgttgttcgatttgcctcgaggctgttaccgatanngtgatt

SEQ ID NO: 3526 - DNA, 273 bp, Glycine max
  unsure at all n locations
  Clone ID: 700999713H1
cttctacattgctccagcttttatggacaagcntgtngttcacatctccaagaacttcatgaccctgcccaacatcaaggttcctctcattcttggtatctggggaggcaagggacaaggaaaatctttccaatgtgagcttgtctttgccaagatgggaatcaaccccatcatgatgagtgcngnnnagttggaaagtggaaatgcaggagagccagcaaaactgatcaggcagagataccgtgaagctgcagacatgatcaagaagggaaa

SEQ ID NO: 3527 - DNA, 273 bp, Glycine max
  Clone ID: 700999714H1
ccccggttaaatcctaaccccttgttcctttcactggttcttagaactactaggaccttgccaccaccatggctgccaaaaaggcatgtgagacattctcaaagtcattgattgaggaagtgaatagatggggttgcttgaagcagacaggggtgagtctcaggtacatgatggaattcgggtccaaacccactaacaagaatttgctgatctctgcccagtttcttcacaaggaacttgccatcagaattgccagaagggccgttgaattga

SEQ ID NO: 3528 - DNA, 277 bp, Glycine max
  unsure at all n locations
  Clone ID: 700999715H1
ctttggtgcagtggcatattggcttctgtaaacattgcngtgtntctatttgaaatagcaagtcctataaggacttctgatttagagctgttttctattccactactatatggagcgccagataaatcatttgatcatggttggagaatggtggaggcttgtaacaccaatgtttctggtacacaattganaattggcatgcaggaatatttcacatggctgtcagttgttgggcccttttaacatttgggcctcaagtttgcaaaggctatggttc

SEQ ID NO: 3529 - DNA, 281 bp, Glycine max
  unsure at all n locations
  Clone ID: 700999716H1
ctttcgccaccggtggttatgctgctatgcagagggttactcannggaatttggacttccncggatcacagcgaacagggagataggtaccgagagcttgctaaccgagttgatgaggctcttggattcatggctgctgctgggctcacagtggaccatcccataatgagaacaactgaattctggacatctcatgagtgcttattgttgcctatgaacaatccctcaccaggttggattcaattctggtctctactatgactgttcagcccatatgctct

SEQ ID NO: 3530 - DNA, 257 bp, Glycine max
  unsure at all n locations
  Clone ID: 700999717H1
cttagtgggagcaatacatatcattcattcagaggcaacanaggngttgtaaattaagagcatggctgcanaagctcttgtatcatcatcatctcttaccttctcagccgaggctacaagacnaagtcttggaccaagatcactccaatctcnatntggcttctcaagaaaagctcttcttgttaagnagtgtatcccctgncagcaggtcagcagacttgtggttnanaancaagcttctactgntgcacctcggt

SEQ ID NO: 3531 - DNA, 288 bp, Glycine max
  unsure at all n locations
  Clone ID: 700999718H1
cnacgccgccgcctccgccaccaacaacaacctccacnctctctnccgaaccnnnnnnnnnnnnnnnnnnnnnnnnnnnnngaacctccccgcaatgtttctagatccttcctcgcagatcgcccaacggcaaacacnaaccctaatcggtaaacgtacctaacggaatttcnaagcctanaaccaaancaacaacaanccaaaccacgtcttttccaaacttcctgcttcgtaccgttaaagccccgaacnactttctcccataaccatatgggctttcccgttctt

SEQ ID NO: 3532 - DNA, 277 bp, Glycine max
  unsure at all n locations
  Clone ID: 700999719H1
ttgatttcaaggaggatatacaaggagtaggaatggattctcttcaaaaacagcaagaggtttcaatttggtaccagtgaaaatgcgaagagggaaactcgtgtatcacggacttttattgtgtcattaaagagggtcatgtgaaagtcccttgactcaaaaagcagttaatgcatttttcttcccatgtaatagtttaggtctagatattttatgctttgggaggtctggtctggtctggtggcattatatatgggttaataaatcagggnttccc

SEQ ID NO: 3533 - DNA, 277 bp, Glycine max
  unsure at all n locations
  Clone ID: 700999721H1
cgaagatacccttagtggagcaaaccctcagacanaggagggtagatgcttggnagcaggtcaacctacggatactgaaaccanagagttattaccacagaaaggtggaaatgttcacaattcanattttgttggcgaanctttaatatagctaaggaggaacgtaagancaggcatatcccttcagcttcatcagcaatatttataggtggcatccttggactcatccaggcaatatttcttntatctgcagcaaaacctttattgaacttcatgg

SEQ ID NO: 3534 - DNA, 273 bp, Glycine max
  unsure at all n locations
  Clone ID: 700999723H1
cnngcagaancncctcgtcanngncntcntctnctccntcttggtaagtgnctcaatcgctntttagncactgaaaaaccctagaaaaggccggcgttatattctgctccatctccgaggccattaaggaatctcctgatttggtgaaaaagtatttggggaaagttgtcccgtcagacgacaactactacgccgcgttgaacgctgcggtcttcagcgacgggtcgttttgctacattcctaaagacaccaagtgtcctatgcagatttcga

SEQ ID NO: 3535 - DNA, 267 bp, Glycine max
  unsure at all n locations
  Clone ID: 700999726H1
cngtgagatttgcgaatctgaganatggcggattcttctcgggaggagaacgtttacatggcgaaattngcggagcaggccgagcgttacgaggagatggttganttcatggagaaggttgcaaagactgtggaggttnangagttgacggtggaggagaggaatctcctctctgtggcttacaagaacgtgattggtgcgaggagggcttcgtggaggatcatatcctccattgagcagaaggagganagcaggggcnatgaggac

SEQ ID NO: 3536 - DNA, 271 bp, Glycine max
  unsure at all n locations
  Clone ID: 700999728H1
cttaaattttcccttcagtttatgcatgtttggatttcctnttattttttccaattatataggtanccccttaaattttcccttcagttttttgagtttatatatgtattccctgaatcgatctaacatgaatagctttctaagggtactcttctcgggatgaggcaaaccatttttgagtttatatttgattccctgaatcaaaggtacccatccttcagttttttgagtttatatatgtattcccttttgtgatcacaacaattnggtg

SEQ ID NO: 3537 - DNA, 276 bp, Glycine max
  unsure at all n locations
  Clone ID: 700999730H1
anaaatgtaacagaaggttaaagcagtgaaacaacanaaactatagcgatatatgttttcccggatattaatgatacanganataatatccgggaaaacatatatcgctatagttttcccggatattatttcttgtatcattaatatttttctttaattgtgtaaagacttcttgtgtatttgcacagagacttcgatctattgttngctatttcataanaaanannaaaaaaaaaangggggggccncnaannagnnttccgccccccnggaaat

SEQ ID NO: 3538 - DNA, 282 bp, Glycine max
  unsure at all n locations
  Clone ID: 700999734H1
agcatgcaagcgacgtcgttctgggtagccaagtttccanttggcgtaagggcgcagagcacccaaccgtgaagagagactccatggccgagtgcaccgtccccaagtgggcccaaaaaaccgtcagcttgccccctctccggcgcgggctgtcatcttgtcacttccaagatagtgaaggaaattgagcaagacctcttccgggcttcaagtgtggctagctcatctcttcttgcagcacaccagtgttctcttaccatcaatgagaattatgactcagnt

SEQ ID NO: 3539 - DNA, 261 bp, Glycine max
  unsure at all n locations
  Clone ID: 700999740H1
cnaaaaaaacagataatacaatttccattgctcatcatcattattattcgtgcagaaatttcccgaaggaggaggaggttctgatcttctttcntttttgnctggttccctttcttccttcaaccaatttcgagatccgaaacnggantcngnncgatcgaaaatgtanggtttgaagcctttaacntcaanatccaagggggntcctagagggccatgtccgggggcaanggncggcctnctaaaaagggggantaaaaa

SEQ ID NO: 3540 - DNA, 236 bp, Glycine max
  Clone ID: 700999741H1
ggcatgagatcaaggttccctggtgggatgtttggtgatgatatgtttgcatcttttggggaaggaggaggaatacatatgagtcaaggtgcacctcggaaagctgctcccattgagaacaaattgccctgcactcttgaggagatatataaagggactacaaagaagatgaagatctctagagaaattgcagatgccagtggaaaaaccatgccagtagaggaaatcttgaccat

SEQ ID NO: 3541 - DNA, 267 bp, Glycine max
  unsure at all n locations
  Clone ID: 700999742H1
catggactacggttttcatgcaccaacaatgtcatggcctgtgcctggcacactcatgattgagcctactgagagtgaaagcaaggccgagttagacaggttctgtgatgctcttatttccatnagacaagaaattgctgagattganaaaggaaaggttgacattaacaacaatgtacttaagggcgcccctcatccaccatcactgctcatggctgatgcatggacaaaaccatactcnagggaatatgcagccttccccagctt

SEQ ID NO: 3542 - DNA, 265 bp, Glycine max
  unsure at all n locations
  Clone ID: 700999743H1
ggcattctcttaacacttcgggaggngctggtgcaaagaatgctattctcatgaatatgccaaatgctgttctttcaatgtggagatattttgttggagatctcgtctttgaagtttctaagatgacttctccctacattaaatgtacagtctctttcttcatagcatttggaaatttggctgatgacaccatcaattttgaggcttttccccacaagctggtgcagtttggagagattcaggaaaaagttgtattgaaattttc

SEQ ID NO: 3543 - DNA, 271 bp, Glycine max
  Clone ID: 700999746H1
gtttctgtaaccatggcatccaccactctatcccctacaaccccttctcagctatgctcaggaaagagtgggattttcagtccctcacaggcacttcttgtgaagccagtgaagaggcagatgatggggaagagcaagggaatgagaattgcatgccaagccaccagcattcctgctgatagagtccctgacatgggcaaaagacagctcatgaatctgcttcttcttggtgccatttcactcccctctgctggaatgcttattccctaca

SEQ ID NO: 3544 - DNA, 286 bp, Glycine max
  unsure at all n locations
  Clone ID: 700999748H1
ctttctcctaaaacatctccagtgggttcttcttcttctattacaacaacgnccgtnnaagaccatgaccatggccatggccacgatcctgctcctgttcacggtcttcgcggtttcatcggccctagacatgtcgataatctcgtacgacaacgcccacgccgccacgtcgcgcaggantatgggagctgatgtcccatgtacgagcagtggctagtaaagcacggcaaggtgtacaaacgcgctcggagagaaggagaagaggttccagatcttcaagggacac

SEQ ID NO: 3545 - DNA, 271 bp, Glycine max
  unsure at all n locations
  Clone ID: 700999749H1
ctgtgatttgattgatggttggctgtctgaggttaacgtaacttgtgcaggttttgaagcatatgctaggaaggagcgttcaaaactttatttgtgttgcattactgaattaattcttatgatataaaattgtnctatgtttgaatatcaattattgataaatgtcttgttttcatgaatgaatgcaggcattgcaacttctgctcgagttttnctttgctgaagtttggacaagccaactgttacgggactacaaagagttttaaagncc

SEQ ID NO: 3546 - DNA, 276 bp, Glycine max
  unsure at all n locations
  Clone ID: 700999752H1
ggatcaaaccctgcaatggttganaataaaataagaaggtaacaagagaatgatctatcttggtgatggtagtggtgactattgcccaagcttgaggctcaaagagagaaactttatgatgccaaggaagaactttccagtgtgggacttgatttgcaaagaccctttgcttgttaaggctgaaatccatggctggagtgatggagaagagttggagcaagttttattgcatttaatcaacaaaatttcaatggaggaaaatgttcatgagcagtt

SEQ ID NO: 3547 - DNA, 274 bp, Glycine max
  Clone ID: 700999753H1
caggttcatccgctcccacaacaagaaccgcttgccctacactctctctgttaatcattttgctgattggacttgggaggagttcaaaagacacagactaggcgctgcccaaaattgctctgccactcttaacggcaaccacaagctcactgatgctgttcttcctcccacgaaagactggaggaaagaaggaatagtgagtgatgttaaagatcaaggcagctgcggatcatgctggacattcagcacaactggggctttagaagcagcctat

SEQ ID NO: 3548 - DNA, 263 bp, Glycine max
  unsure at all n locations
  Clone ID: 700999756H1
ctttttgttattatcggtttgataaatagctttctgattgtctcctattacctttnttagaattatgatcctgtaataaaattgtttatttgatcatcattgaatatgtncntnncttctcnctctntactctcagtgatagagtgctgctcgncttatttnaatngtgncngattgagcattcactcaagngctaggatttgatgnatcnaatgggaagcagtnccgtaagngacgaagncactnaaatngattgaagantt

SEQ ID NO: 3549 - DNA, 265 bp, Glycine max
  unsure at all n locations
  Clone ID: 700999757H1
cgntttgggaccagtggatctccaaggtgaaggatggccagcaccttctcgaagaggagcttcaacttctttgcgaatatgttaaagagatccttattgaggagtcaaatgtgcagcctgtcaacagtccagtgacggtttgtggtgatattcatggtcagtttcatgatctaatgaaacttttccagactgggggtcatgtgccggagacaaattacatttttatgggagactttgttgatcggggttacaatagtcttgaagt

SEQ ID NO: 3550 - DNA, 265 bp, Glycine max
  unsure at all n locations
  Clone ID: 700999758H1
cgcttggggaacaatcagaagaacaagccatggctgcccaacctaaacctcagaaccgacgacccatttctaacatcgtcntcgtcgttgctatgcagacggaggcacttcccattgtcaacagatttcagctcaccgaggaccctcactctccgtttccgcgaggggttccttgggttcgttatcaggggacatacaaagatcttaatataagcttgatttggcctggaaaagatccaactntgggggttgatagtgtaggcac

SEQ ID NO: 3551 - DNA, 266 bp, Glycine max
  unsure at all n locations
  Clone ID: 700999759H1
cttgggtttaggtttggaccaagacatcatcaaaggcctcgtgtcttactgtgaccttgccgagccacgagatgccaaagagtaccttgacaatataatcggtcaggatgcagggaaaactgtgattgaagaatatttacgacggagaggttactcagaatccagcatcggctcaaatgttccaactaccaaattacatgcgtatgtcaaaccgccttcagttgagacatctgctagtggaactaagaaatcatttaanacaccga

SEQ ID NO: 3552 - DNA, 268 bp, Glycine max
  unsure at all n locations
  Clone ID: 700999760H1
cataacacaaggcagaaagcaagctcatcctagagttttaaaaatggcagcagcctcctccatggctctctcttccccatccttggctggcaaggccgtgaagctgggcccatcagcccccgaagtcgggagggtcagcatgaggaagaccgtcaccaagcaggcctcctccggaagcccatnctacggcccagaccgcgtcaagtacttgggccnattctctggcgancccccgtcctactcantggcgagttccnaggtgactacg

SEQ ID NO: 3553 - DNA, 271 bp, Glycine max
  unsure at all n locations
  Clone ID: 700999761H1
cagaattcatgttacctgtgcattagtacatgataaaatgcccactggaaggattcacaagggagtgtgttcaacatggatgaagaattctgtgccattggagaaaagccaggactgcagttgggctcctatttttgttaggacgtccaactttagactccctgctgataataaagtgcctataatcatgattggtccaggcactggattagctcctttcaggggtttcttgcaggaaagattagctctgaaaggagggggagcnganctt

SEQ ID NO: 3554 - DNA, 166 bp, Glycine max
  unsure at all n locations
  Clone ID: 700999762H1
caaactaaagttgctttagcctttaggctactcacagaaaanaagacagtcctcttatatcatactctattatttttcagatccatattgantgtgggtcatgacttttttgaaaatgcggaaatttcatgtaattactgttagcagtataaatggacaaggtagt

SEQ ID NO: 3555 - DNA, 277 bp, Glycine max
  unsure at all n locations
  Clone ID: 700999763H1
ctgagaaggctgtgcaattagctgttganacatggggcaaganatccttaactgagcttgaagcagaggagcgcctatcctatacctgtgaaaagggtcctgctcaagatgaagtcattgccaagctganaaatgcatttctggaaatcggaaaagaatataaagtcttcactgaggaagagaggaagaaggttgtggaagctggcggactacatgtagtaggcacagagcgtcatgaatcacgtcgaattgataatcagctgcgtggtcgaagtgg

SEQ ID NO: 3556 - DNA, 279 bp, Glycine max
  unsure at all n locations
  Clone ID: 700999765H1
tgactccgccctcaacactctgacctgtggtntgccncatgtgacaattcgggagctgcaaggtttcggtcttgggttggaatattgggagaacccctccttcgaaaaatcaaggtgtgtattcttatgaaaacgaagaagctcgttgattggagaagttggtttaatggctaaagtttgttggccatattttgatcctgagtatgagancttcagcaatagaatgaaccctccaagggtctctgtggacaatgctagttgccatgattgtacactgat

SEQ ID NO: 3557 - DNA, 280 bp, Glycine max
  unsure at all n locations
  Clone ID: 700999766H1
ctaggggactcccattccgactcttagccgccgatctctcagggcttgcatcttctcaggtaagctgtgaagatgtacacatcaaggaagaaaatccacaaggataaggatgctgaaccaactgaatttgaagagtcagttggacaggcattgtttgatctggaaaataccaatcaggancttaaaagtgatctgaaggatttatacataaactcagccgtgcaagttgatgtttctggaaaccgcaaggctgttgttattcatgtcccttacagattaa

SEQ ID NO: 3558 - DNA, 269 bp, Glycine max
  unsure at all n locations
  Clone ID: 700999769H1
ggaaaagggagagggagaatccttgtggcgtgtgtggccactatcacaaatacgaagaaggggaagtgtgttcaatttgcggtcaccggattccggttggatcggagaaaacttcgatacaagtcantgcttttccttccgttgccctgccggaattnctttacctaggaagctacgacaatgcgtcccgctccgagcttctcaagactcaggggatttctcgtatcctcaatactgtncctcttgtcaaaatctctacaagaactcgt

SEQ ID NO: 3559 - DNA, 71 bp, Glycine max
  unsure at all n locations
  Clone ID: 700999770H1
cttaataatagtactctaatatcccacctacgtttgtnatgaatgtgtgaaatatgaaatgattaattgtc

SEQ ID NO: 3560 - DNA, 267 bp, Glycine max
  unsure at all n locations
  Clone ID: 700999771H1
cgtaaagtacttcttcacttcttctcctccttctcgctagctcatcantttnctctntgtctctcattcagaatgaccaagaaggtgctatgcatgaaccctggccccatcgagtttgagccacgtgtactcaagtcctttgccatggagggcatttctcacgtggacaagacggtgattgagatttntggacaatgtcttgagaagacgcgcaaggttttcttggctccagacgggcaaccacttgtggtggcaggctctggcacg

SEQ ID NO: 3561 - DNA, 262 bp, Glycine max
  unsure at all n locations
  Clone ID: 700999772H1
ggnagtggagaggcaagtggctgtgactaggcctgtgagaatgcattggactggctgccccaacacttgtggccaggtgcaagttgctgacattggtttcatggggtgcatggctagggatgagaatggtaaggccnctgaaggtgtggatattttncttnnagggaggnntttnggantcnacntcacatctagctgaggtgtataagangggtgtgccttgcangaactcggtggcntattgtggnnaacnnactagtna

SEQ ID NO: 3562 - DNA, 267 bp, Glycine max
  unsure at all n locations
  Clone ID: 700999773H1
ggcaataccataagcactacgtctcagaggaacttcattctactgacggccaaaacataggatcaaaatcttcacatnctcaagactttcctttcatttgtagatgaaaaagaagagacctttaagagccggtccaagagaaggaaaatggagaggatctcatacagaaacagtgaaggaagcttatccatcagctccaaccagggatatgcttcacgcagaagtgaatgtgctagcgaagtatgatcatatttctacatcattttc

SEQ ID NO: 3563 - DNA, 276 bp, Glycine max
  unsure at all n locations
  Clone ID: 700999774H1
caatatttggcagtaggtgaaaacgcgattctcctggttcagaacgcgcatttccatatctcaattctcaagcaaacaaagtcggtgatgttgatcagagcggaaaacgtcgtacgtttgagagaaactgaacttcgaaggtgacaccctggccaacattttcgaccaatncctagattaaaaattgtctctntactctttttgtttttntttttttgccgtcccnggtgcngtccngtncgggaantngaattggggggcagngtcatgtctgtt

SEQ ID NO: 3564 - DNA, 263 bp, Glycine max
  unsure at all n locations
  Clone ID: 700999775H1
ctcccgcttcttacgcatcgactgtagtccgagtcgccggaattgcaaccgatgacaaacttcttttcgccaacaccgaangcgacgtgaagcacaccgagaccaagcaagacgagaccggctggccggagcccacctcggcgagctaccactgggtgggaaagaccgaggatggcaaggaagtcactgcagacctttctggtgctctgggaaagaccatcgaccgtgtcgatgttatggctgaagtgccaggtttcatcaag

SEQ ID NO: 3565 - DNA, 264 bp, Glycine max
  unsure at all n locations
  Clone ID: 700999777H1
cagattggnatcatccgtgtncctcnctctcatctcnccntctcnctgtncccacggtttccttactttgaagtttaatccaatccaataatccaanaactacatacaaagtngaacaataccaccatcataggcgtatcancatcagaatnccaaggnggattagctncancangnaacgggcttcatgcngcatgagtaaaggccgttatgttatgctcanggtggatttgtgcaactggggtaggggaattgatgatgtgg

SEQ ID NO: 3566 - DNA, 270 bp, Glycine max
  unsure at all n locations
  Clone ID: 700999779H1
cnaagttataactgacagannactctggnagatcaaggggatttggatttgtcaacttctccaatgatgagtctgcaagttcggcactctctgcaatggatgggaaggatctagatgggcgaanattagggtatcctatgcaaatgatagaccttctggacctcaatctnnnnnnnnnnnnnnnnnnnnttatcgcagtgggggttttggcggcgggtggtgattttgcttctcgcaatggtggttggtgattcaatttntgtgtctctg

SEQ ID NO: 3567 - DNA, 279 bp, Glycine max
  unsure at all n locations
  Clone ID: 700999780H1
tagttatctactcttttctgcatgtttgttctctncnacgncctcctccncngaaagagtattattcaatattttggttgggttgaatcccggggttgaagcgttgcngacatcacggctattctaagagtgncctcgctccctcattcatgtccgatctgtaacgacggangacgggtagttgncgtaactgccgttaacccttcggncgcaggtgggcgtggtgtttgccttctgaagtggtagccctncagattgctcttcttcggtgggggggnt

SEQ ID NO: 3568 - DNA, 279 bp, Glycine max
  Clone ID: 700999781H1
tgcttttgggaagagtggaactaatgtgaaaacagctatttttctgtcccccaagtttgaacttggaccaggatcggtagccaataaatatgattatgacgctgattttccaagaggtcatatagcacttaagagtttcaatgctgaagtagttgatgaagcagggaaccctgtgcctcttcatgaaacttatctccaccactgggttgttgtaagatactatcaacctaaatatgtgacgacacacacaaactatgatggacataggatacttcacat

SEQ ID NO: 3569 - DNA, 274 bp, Glycine max
  unsure at all n locations
  Clone ID: 700999783H1
gcaaaaccaaagttgaggtgcgccaaagacgaaanatggtcgctccatgacagccagctctagtgacaggaggcactcgaagcataggtgagagcgcttctccatccagagatagaaaggttttttctacatcatcaaccccaaagagtccagtattggcctctgaaacggtattcttctgctacccagttcttttttccttaattattttcttggttttgttctttttcagtgaaagtganaagatattctttacacatagacggtattattt

SEQ ID NO: 3570 - DNA, 273 bp, Glycine max
  unsure at all n locations
  Clone ID: 700999784H1
cacctatttaactacctcgtaacattctcttctgtgtcctaatcggaactcgcaaagattttgttatagtgatctgatgccatcttagggtttttgaattgcgatgggtctgggaaacgatgacgatgacgganacacgctcaagtcctttcggttcagtgtgttgttcgatttgcctcgaggctgttaccgataacggtgatcgatcctgggccaagcttcaatgcggacatcaatttcatctcgattgcnttgggctcagccttcaatata

SEQ ID NO: 3571 - DNA, 265 bp, Glycine max
  unsure at all n locations
  Clone ID: 700999785H1
cgntctgatatgcaagangcaaacatctataatactgtgattttnctgcatcttactgcttttatgaaaaggagggcgtgaacaataatgtgtacaaagcggtggagatgatgtctaagtactagatgtctngatgagagatgatgtattgtgtgtcttcntgtttaaaaaaaaaatatacccctgtatttttgtcatttctataatttacttcctttnangttttaaaannnaaggctgnaagtcnagtggnggngggnggggg

SEQ ID NO: 3572 - DNA, 267 bp, Glycine max
  unsure at all n locations
  Clone ID: 700999786H1
ctgatttcgttatcagaacaagaattggaccgattgtgatactggatataaccaangatgcaatggaggacttatggactatgcatttgagttcataatcaacaatggcggcattgattctgctgaggattacccataccgtggtgttgatggtagatgcgacacatataggaaaaatgctaaagtcgtttctattgatgactacgaagatgttcctgcctatgatgagttagccttgaaaaaggccgttgcaaatcagcccgtgag

SEQ ID NO: 3573 - DNA, 263 bp, Glycine max
  unsure at all n locations
  Clone ID: 700999787H1
acgatttctccacactctatgcgcctctcatccgtgatgggcgtatggagaagttctactgggcaccaacaagggatgaccgcattggtgtctgcactggaatttttcgcaccgattcaattcctgaacaggacgttgtcaagattgttgacaccttccctggccaatccattgatttctttggtgcactgagggccagagtatatgangacgaatgaggaagtggatttctggtgttggtgttgacggcattgggaagaagc

SEQ ID NO: 3574 - DNA, 259 bp, Glycine max
  Clone ID: 700999789H1
cccctttgccgctgttgttgttgctgcaccaccgaacaacttcccctgtaaatcgcgtttcgtttgtgcaaggttttaaaagatggctgatgctgaggacattcaacctcttgttgttgataatggaactggaatggtcaaggctggttttgcaggtgatgatgctcctagggccgtgttccccagcattattgggagaccacgccatactggtgtaatggttgggatgggtcagaaggatgcttacgtgggtgatgaa

SEQ ID NO: 3575 - DNA, 263 bp, Glycine max
  unsure at all n locations
  Clone ID: 700999790H1
gcaaaaccaccgaaaagcaacatcgccacctatatgtcgctgtctcacaacaagtctaagtgtgtctctgagagaganagacatctttatcatcatttttaaacacaccaacaacacatgttgcaccaccaaccatnnnnnnnnnnnnnnnnnnnnnnnnntcttgtttttattgtgtctctcaatgagagattgtaatggnaaaggatcatcaaagtctgtccaaggaanatagtgactctgcagtgtgntgtnggcttata

SEQ ID NO: 3576 - DNA, 264 bp, Glycine max
  unsure at all n locations
  Clone ID: 700999791H1
gagagaacaagaacataagggaaccacagcggcggtaacagaagaacaagcagagaatgggtcgagtgagaacgaagacggtgaagaaatcctctcggcaggtgatagagcgtcactactcgcgcatgaccctggacttccacacgaacaagaagcntctggaggaagtggcgataatcccgtcgaagaggctaaggaacaagatcgcggggttctcgacgcacctgatgaagcgcatccagaagggccctgtgcgcggcatct

SEQ ID NO: 3577 - DNA, 276 bp, Glycine max
  unsure at all n locations
  Clone ID: 700999795H1
aaaaacnaagcancnaaaannatctcaaantaaaacaaccaaaccacacacntcacaccctcttcaacatcctcagcnnnnnnnnnnnnnnnnnnnnnnnacantgtcttgctccaatctgacaatgttggtgtcctcaaaaccttccctttccgacccctcgaacctctccttccgctctgtctgaacccttttcagctccctncacaaaacccagcttcatgnacnccttcacgctcntcaagcacccaaattcggtgtggtctgagagnatga

SEQ ID NO: 3578 - DNA, 285 bp, Glycine max
  unsure at all n locations
  Clone ID: 700999801H1
agattgcaaaattctcttccgtttcaggattagngtttcaccgttacagtgaaacatggcaaaaccaaagcgaatctctctgcgtatctttgcgctgctcctcttgatttccacctcttcgtttcannttctccgcgcttccgatgacgccgatgatgatgcgatcttctatgattcgttcgacgaggattttgaagaccgttgggttgtgtctcagaaagatgagtacagtggtgtctggaaacatgccaagagtgagggacatgatgattatnggcttcttgt

SEQ ID NO: 3579 - DNA, 280 bp, Glycine max
  unsure at all n locations
  Clone ID: 700999802H1
gttaatgttttatattccaattttgaaaaccttttaacagaatatacatgcattccctctgagcacagcttgctgggaaaaattctcatcatattattgaggcaaccttcaaagcttttgctcgggctcttcgacaagcaacagagtatgatgcacgtcgccgtggaactataccaagttcgaaaggggttctgtcccgtagctaatatttttctggcggtggaccttcatggctcnacaatcacagtccttagatgctgtgtgatggataatgcttgtg

SEQ ID NO: 3580 - DNA, 277 bp, Glycine max
  unsure at all n locations
  Clone ID: 700999804H1
cttgacttcaaaaaagttgatgctcatgtgcaccagttaaagggtagcagttcaagcataggtgcacaaagggtgaaaaatgcctgcattgctttccgcaacttctgtgaggngcagaacacagatgcgtgcgtcagatgtctgcaacaagngaaacaagagtactgccttgtcaagaataagcttgaaacaatgttcaggcttgagcaacagattgtggcagctggtgggtcaatccctacggaactgagtttcagtngatgatgggnggttgncc

SEQ ID NO: 3581 - DNA, 274 bp, Glycine max
  Clone ID: 700999805H1
gagtacaatctagtggcctagcagatgttttgtcaagagccttggatttcttggaagatgctccatacttggcaattgttcctgctgttagtctaatatgtagcattatcactgagttcatcacctccaatgatgctactgccacccttcttgtcccacttctgtatcacatagccagaactatgcatgtgcaccctcttcttcttatggtccctggaggaatagcaatgagtttgccttctggctccaattcaacaccatcaaatgtagttgg

SEQ ID NO: 3582 - DNA, 272 bp, Glycine max
  Clone ID: 700999806H1
gagaagtttgatgcttcaataacaaaagactacgattttcaccttcttaatggcagttcagtcaaggttcccttcatgacgagcaagaagaagcagtttattatggcttttgatagtttcaaagtccttggtcttccctacaagcaaggcgaagataagcgccaattcaccatgtactttttccttccagaaacaaaagatgggctgttagctttggctgagaagttggcttctgaatctgggttcttggaacgcaagcttccaaccaaaaa

SEQ ID NO: 3583 - DNA, 271 bp, Glycine max
  Clone ID: 700999807H1
ccatcatcctctcccgacttcaatggaaagcaggatcaacctttatagtattaaaaaaaataaaatgtttttacatgatggagcatatacccaacaaacctatacctgtaacccacctgtatagtgcactgtacagttttgttatctagttgctcctgggttaactgggaagcatgcgcaattttctctagagttattcgtttgtgtaaagaggggatcttcaccttcccttccttttttccttgtaaattggatgatgtattactattgc

SEQ ID NO: 3584 - DNA, 273 bp, Glycine max
  unsure at all n locations
  Clone ID: 700999809H1
aaaaatcagaacaaaaataaaatanaaaggaaacgtatagaaaaagcttttccaagaattggcaaaaagagaagaagggagagagattcatgttcatattttccccttcgtgcccgtcaagtttctgattctctttttcaattcctttctctttcaggtgattttntctccacgataaagttgcgatttcgccggtgtcgttttgccgcaagatggtgtcgttttcgggaatntagaatcagggttgaagttcttcttcagcatgaatctttg

SEQ ID NO: 3585 - DNA, 270 bp, Glycine max
  unsure at all n locations
  Clone ID: 700999810H1
cagaaatctagaatggctttgaagcttgtaaatctagggtttcactcatcgattccgtgttctccgaggcccttgaaagatcggttcgtgcttcggtcttctaaagtggagcanatatcgtttacggaatctganaactcactcatcgaagcccttcttgncnatccaaggacgcggacgttcttcttctcgtcagcagctcaatgctgttgagcgtgctgttcaagtcctggagcggttagggggtgtactgatccgacaaatcaaact

SEQ ID NO: 3586 - DNA, 268 bp, Glycine max
  unsure at all n locations
  Clone ID: 700999811H1
ccaaaattttatttatccaaacctttctatttttagcaacttgttcttactgaaaccaaacacggtgtcatgttggttgatgtgtttagccttcgtcttgtatctgatgagagtttggtgtttcacacatgataaacactcancctagccttaatcttcactttctgcagagcttacctgttctcacttgatgctncaagtagcctaatcatgaatgcanagggacataaatttgtgaggnttgaggatggaatcagagcatctttta

SEQ ID NO: 3587 - DNA, 272 bp, Glycine max
  unsure at all n locations
  Clone ID: 700999813H1
cacattacacaagaactctcncaaggatcctcctntgcacgaaattcatttgnngggaaaatccaagaagagggtggaatntcaagccagggaagatggattatttcaatgcaccaggaagaaaccatctctttgttccggggccggntaacatcccggaccagatcattcgggccatgaacagaaacaatgaggactaccgttctccagcaattccagctcatgaccaaaacactgcttgaggatgtcaagaagattttcaaaccataact

SEQ ID NO: 3588 - DNA, 271 bp, Glycine max
  unsure at all n locations
  Clone ID: 700999814H1
gaagaagcagcaatggcgccgaagataacacgtaaggttagcagaaaccctgaattgataaggggaatcggaaagtactcgaggtcgcagatgtaccacaagaggggcatttgggctatcaaggccaaaaacngtggcgttttacctcgccacgaccctaaacccaagcctgaagctcctgctgaaaaaccacccaaattttaccctgctgatgatatcaagaagccccttgtcaacaagcacaaaccgaaaccagctaagtcagggctag

SEQ ID NO: 3589 - DNA, 253 bp, Glycine max
  unsure at all n locations
  Clone ID: 700999815H1
tgnctgattttggcctttcaaggncaggtcctcttgataaccaatcctatgtcagcactngtgttaaaggcacttttgggtatcttgatcctgagtatttcaggtcacaacagctgacagaaaaatctgatgtatattcatttggggtggttcttttggaagtgttgtgtgcaagagcagtgattgacccatcacttccaagagaccagataaacttggctgagtggggaatgctttgcaaaanaaggagata

SEQ ID NO: 3590 - DNA, 156 bp, Glycine max
  unsure at all n locations
  Clone ID: 700999817H1
cnnngagcctgcacaaacttttgctcacgttaacttaacaggaacggccnttaaagaattgcctttttcatttggcaatttggttcatcttcaaaccttgcgcctgaacatgtgcactgatctcgagtcacttccacacancatacgaacnnnnaa

SEQ ID NO: 3591 - DNA, 277 bp, Glycine max
  unsure at all n locations
  Clone ID: 700999819H1
ctaactcactcactcacaactcagtgaaagngaatccgnggcgaagagaagagaaaaattaagatggaggggaaggagcaggatgtntcgctgggagcgaacaagttcccggagagacagccgattgggacggcggcgcagagccaagacgacggcaaggactaccaggagccggcgccggcgccactggttgacccgacggagtttacgtcatggtccttttacagagcagggatagcagagtttgtngccacttttctgtttctatnatcatgtc

SEQ ID NO: 3592 - DNA, 275 bp, Glycine max
  unsure at all n locations
  Clone ID: 700999821H1
annaagaaatattactcttgggaggagtgtgtaaacctgagagaagtcaagtcattacggnaaatgaatcatgcaaatattgtgaagctgaaggaagttatacgagaatgtgacactctgtgccttgtttttgagtacatggaatacaacctgtaccaacttatganaaacagggaaaagtngttttctgaaaatgaagttagaaattggtgttttcaagttttccaaggtttagttacatgcaccagcgtggatatnanntaannatcntaaga

SEQ ID NO: 3593 - DNA, 271 bp, Glycine max
  unsure at all n locations
  Clone ID: 700999822H1
ttggttgaagatcagatagacataccttctgtggctgtagaagtngctagagactttccaacagttgtcagggatctcctactttcatggagtgaatcaatcttgtctgatagatagctaaatctttggactacctgcacatagcaaatacaatactgtttcagtcagatgagtatactgnacacatgttctatatttcctcttcattntttcttttgccttttctatagtgccgaangtttactatatganattttgaatgatgtgtagg

SEQ ID NO: 3594 - DNA, 272 bp, Glycine max
  unsure at all n locations
  Clone ID: 700999823H1
gctgtaatngcatagggacacancatctctatagctatatgcagctaggagactcaagtgtgttggagatctcctcccatacncagcctgagatggcggtgacggcagcagtgttgccaccagangaagtagcccatgatggcagcgacaacannnnnnnnnnnnnnnnnnnnnagatgattgngatngacttggatgcaaattcaggtgaaggaaatgaaggtaataataagatgagctttggagggaaccgtggccccgcanncaaactt

SEQ ID NO: 3595 - DNA, 271 bp, Glycine max
  Clone ID: 700999824H1
tgaattgaaggcaacgtttttccccatgttgacggccggatggaagctatggccatttgcccatctcattacttatggtgtgataccggttgaacaaagactcctctgggtggataccattgagcttatttgggtgaccatactttccacattttcaaatgaaaaatcagaagcaagaaactctcagtctatggtgccttcagaggtgaaatccaccacatatgttcatcctcctgaggagtaacgagtggagatatgaccaaagcagtgg

SEQ ID NO: 3596 - DNA, 273 bp, Glycine max
  unsure at all n locations
  Clone ID: 700999825H1
cacgcgaagagagagattcccagattcgaaattcgattcccatttctcactctttctttcccccatggcgaagctncgcaagcccaagaacaacgaagaccccaagcccgaaaactccggcgccgtagttcaccaccaaaagctatgcctctccatcgacatcgacaaacgccaagtccacgggtacactgaattggagattgcggtaccggagattgggatcgtagggttgcacgcggaaaatttagggattgagagtgtttngttgacggc

SEQ ID NO: 3597 - DNA, 267 bp, Glycine max
  unsure at all n locations
  Clone ID: 700999827H1
tcaatttctgcagtcggcaactcttcctttctcttgaagcttctattctgtgctgttgctgaatcagaatgganggtgctgtgttggcatgtacagatggagcagttcttcccgtcagtcaagtgtttgatgcaattagagagcttgggaatggagggcttgagcaatgggatcctcttgnccttacttctgcctcactcttaagcaagttgcctgtggattcttcctctgttgattttgtgattttaatctggctgcaattgattg

SEQ ID NO: 3598 - DNA, 267 bp, Glycine max
  unsure at all n locations
  Clone ID: 700999828H1
gcaaatgacaaaaagaagaggtgatcaggaagttcacaaagtgacagaggagaaaccaggatggtgttctgaccctcatttgcctccttgtgcagcgtttgttgagattntggctccagtgttctcgcgagatgcatggcgctgtgtgtggcatatgattcagaatgacttngtccatgggtggggtcttgattttgctcttagaaaatgtgttgagcctgcacatgagaagattggagttgttgattctcagtggatgttcaccaa

SEQ ID NO: 3599 - DNA, 273 bp, Glycine max
  unsure at all n locations
  Clone ID: 700999830H1
cgccaaacaaaacaagcaatggctgcttctacttctccaaacttcacaacatctttgcataagaactcccacaaaacanagtatctgnctntaccagggaagaaaactctgcacaccaaacttagtttctcattttcttttccgttcaataaatcgatncgtgtgaaatccattggcacggcgaagtatgatgaagttgtggtggatgaagagttggacaagattagaaggctgcagaatggttcagatgttagaggagtggcttggagggtg

SEQ ID NO: 3600 - DNA, 274 bp, Glycine max
  unsure at all n locations
  Clone ID: 700999831H1
gtctaagcagaaatggcctcttcagtgatggcatctgtggccctcaaacctgcccctttcactgttgagaagtcctcagttagaggccttccctccctctcaaggaactcctcttcattcagagttgtggccagtggtggcaagaagatcaagactgacaagccttatggaattaatggtggcatggctttgagggaaggagttgatgcatctggcaggaaaggaaagggaaagggcgtttaccagtttgtagacaaatacggtntaatgtcga

SEQ ID NO: 3601 - DNA, 273 bp, Glycine max
  unsure at all n locations
  Clone ID: 700999832H1
cnaganatgaggttgatgagtctggtaagtgtttgancttggttggacaagcagccaccttgttcagtgttgtatgtttcttttggaagtngtggaacactctctcagaaccaaatcaatgagttagcctcgggtttggaattgagtggtcaaaggttcttgtgggtnttgagagcaccaagtaattcagttaatgctgcttaccttgaggctganaangaggacctttgacattttaccaagtgggttttagaaaggacaaagggaaggttt

SEQ ID NO: 3602 - DNA, 286 bp, Glycine max
  unsure at all n locations
  Clone ID: 700999833H1
caagtagggactgtcataccacaaagacctcatggtcnccagaacacacaacattagaagtgtttcccaaccgatttctcaaagttaccatccctatagtaatccttatcatcctcaacaattcaactcgattccaagcggttacacctcacctatgattagaacaagtggttcaatagacaacacatttggaatctttggagagatgatatatgcaagggtatttggtaaccacgtgtcaaacntccatacatatggccaatcctttcggggacagtaacccaag

SEQ ID NO: 3603 - DNA, 262 bp, Glycine max
  unsure at all n locations
  Clone ID: 700999834H1
ttattagtaattgtnttgtgttgtgttgagcagagagaaggatcaagaaaggataagaagaaagagggaatagggttagggttagggttagggttaggttgaggatgccgaagaacaagggaaagggaggtaagaacaggaagaggggaaagaacgaggcggacgacgagaagcgagactggtgttcaaggaggacgggcaggagtacgcgcaggtgctccggatgctgggtaacgggcggtgcgangcgattgcatcgacg

SEQ ID NO: 3604 - DNA, 276 bp, Glycine max
  Clone ID: 700999835H1
gagaatccttgtgtctggaaaatgggcttatgagttttgagaaaactgcagacaagtggggacgaaatgttaatggtaatgagtggcaggaaaaatggggggagcgctacaatgctgctggtcaaacagaaaaatgggcacacaagtggtgcagtattgacccaaacacaccgcttgaacctggacatgctcatgtttggcatgaaaggtggggtggcaaatacgacgggtacggtgggagcataaaatacaccgacaaatgggccgagcggtttt

SEQ ID NO: 3605 - DNA, 251 bp, Glycine max
  unsure at all n locations
  Clone ID: 700999836H1
tcatatgcttgtctcaaagattaagccatgcatgtgtaagtatgaactaattcagactgtgaaactgcgaatggctcattaaatcagttatagtttgtntgatggtatcttctactcggataaccgtagttaattctagagtaatacgtgcaacaaaccccncttctggagggtgcattattagtaaangncacacagntctgctgtgcttgatgttccattgtactcgcgntcnacgccttggcgcgnna

SEQ ID NO: 3606 - DNA, 225 bp, Glycine max
  unsure at all n locations
  Clone ID: 700999838H1
ccttatcatttatttgtcatccaatttcgctctttcggtctctccaaattgagttcagagtcaccaccgaatccgttcctacaatggcgacggtgacgtttccttttccgtaaaacttaactctacctatcacccaaaactcaattgagttcgcncggaacnattngctcctcatcangcaccgaccgaatgtacgatcggcgcntgatggatnngggaagagac

SEQ ID NO: 3607 - DNA, 268 bp, Glycine max
  unsure at all n locations
  Clone ID: 700999839H1
ggagaaaagaagagaatagagaatggtcaaagtaaaaataaaatgaaggaattanaaatggaaggcgtgcttctcccacaactccgcgtacgcgcagccttttcaccaaattgtcgaccaaccatcttcgttatttgcaaatttcgtttcctttgaattacaatttacaagacaaggaaggcagcctcgnnnnnnnnnnnnnnnnnnnnnnngttcttaggttttgttctgagacgcagtttttcattcttctaatggcccagtcctt

SEQ ID NO: 3608 - DNA, 269 bp, Glycine max
  unsure at all n locations
  Clone ID: 700999840H1
acaggctttgagagtgtccggattcttgnttatggatgaatgggcacgagtaatttctggggaagaacaaggcatctcttcttgggttgctgtaaattatgctcttggaaacttgggacgtgagcctcaagaaacaactggaatagttgaacttggtggggctctttgcaggttacatcagctaaacttaatgcagatatagctcaatctttgcacactataagattgtnctggggttatgtacaacctttacactcggagtttgccca

SEQ ID NO: 3609 - DNA, 270 bp, Glycine max
  Clone ID: 700999841H1
gaaactctgcaccaacaatataaattggttaaagagaggactatatctggagattcatactatggctctcacgtgatgcagtatggtgatgtagggcttagcagagatgttctcttccattatttgggtacagatcctgctaatgataatttcacttttgtggatgaaaactccttatggtcaccttcaaaaccagtcaaccaacgtgatgctgatctcatccatttttgggataagttccgcaaagctcctgagggttctctcaggaaa

SEQ ID NO: 3610 - DNA, 59 bp, Glycine max
  unsure at all n locations
  Clone ID: 700999842H1
cgcagaagccacgatgagtngcagagccatgatctcctgtttcttctcctccttcaaca

SEQ ID NO: 3611 - DNA, 264 bp, Glycine max
  unsure at all n locations
  Clone ID: 700999843H1
gaacaatggcgtctctctctcacctcaacaaactcctctgcatgcccccgctcaactcttcaccctctatttcgccaccacgcagcagcgtcggaatttggaccaaacctgtcggaaggccgaggctactggtgcgtctccgagcggtcacgagcgacgacgagtgggggccggagaaggaggaggcgtacggcggcggcgtacggtggaggagaaaccgacgaatggagnacggagacggagaagtgaagaagncttggtggt

SEQ ID NO: 3612 - DNA, 271 bp, Glycine max
  unsure at all n locations
  Clone ID: 700999847H1
ctggattatactgttttcagtacagtctgttatggaaattgctcaattttatatagtagtttcctagtatcatctatacgtagatattacttnctggacacactgcatttccttctgtttcaacatctaatatcagtattgtccagtgctgaataaccaccctctacgtcattatggtctaaaataattttatttttagttccattaatttgtactgcatgcgaatttnattttttaagtattttaattaatgaagtttccncttctctnt

SEQ ID NO: 3613 - DNA, 276 bp, Glycine max
  unsure at all n locations
  Clone ID: 700999850H1
ctcatttagtttaaataaatttaattttcacaaaaaaatttactatgtctgtngcttcagcaanagttgtgtattggaaacctgaaattttgttactttgaagaatagatacaaaaacaatactgtatattattgattggngtaggtgatggtgttgagggccctaatcttaggtgataaggttaggtgagagntggatggatccagcagatccctcttgttggttgaggaaatgcccctttggttgtctggtagttgtcttgagatgcccagccc

SEQ ID NO: 3614 - DNA, 238 bp, Glycine max
  unsure at all n locations
  Clone ID: 700999852H1
cgnataaacataggtatgaagggtgttgtggtagtggtgagtgtgaatgaatgtgaaatgaatcccttgaagcccttcaattattaagttggaagaagatagagaaatcaggtggttttgagnatggtagtagttgtgtgtgaagaanagtgagtatatgcgcataagnaaacaaatgntgatagccatgctggggtagagaananctacntgcangggtggnactgatntatttatt

SEQ ID NO: 3615 - DNA, 98 bp, Glycine max
  unsure at all n locations
  Clone ID: 700999853H1
gcttcattgacttgaagctttaagtgtgcgcgctagttatctttatcaaagtactttggttccacgtatctaaaaaaaanaaaaaaangggnggccgg

SEQ ID NO: 3616 - DNA, 269 bp, Glycine max
  unsure at all n locations
  Clone ID: 700999854H1
ctcaaatagcatggcttccaatctgattagagtgagcacaagcttggttctagtagttttagtagctctcacagttcaaattttctacatttcncccatagatccagtnttgctggatataaaacctgctccttcaaccaaagacaatcaattacagaatatcattaagcttggagaaggacttttgaaggaaccagaagatgttgttgtagataaagaagggactctctatacagctactcgagatggttggattaaaaattgcgcag

SEQ ID NO: 3617 - DNA, 269 bp, Glycine max
  Clone ID: 700999855H1
tctactgctagaaaattctctcccttccaatgatcatctgaaattacataggattatatttatagggtcatcaagaactcttcagcattaaaaaaggtgatttataatcagaaaacaagggacagccacacagaagttatcttgaatcagaaaacatgatgctaagaagctcttcaacaccagttcttggatccctcctctcatccttcccagatagtctaacaacaatattcactcagaaacctgtcatgcacttaaaactttccacc

SEQ ID NO: 3618 - DNA, 269 bp, Glycine max
  Clone ID: 700999857H1
gagtttgcgaaatgcatttaagaatttggtcaacttgtggaagtcaagctggtgatggatagaattgctaatagaccaagagggtttgcttttcttcgttatgcaactgaagaagagtcgcagaaggctattgagggaatgcatggaaagttcttggatggaagggtcatatttgtggaagttgccaaaccgagatcagagttagcgccaaggaaacaggaagacactagattgtaatgaagatccaatcaaaggatacagtagccatt

SEQ ID NO: 3619 - DNA, 271 bp, Glycine max
  unsure at all n locations
  Clone ID: 700999862H1
accggccctatcccgctctcccttcggatgcttgaagagcattcagtttcttaatttggcgcaaaacaagctctacggttgtgttccggacaacctttgtcaaattccttctatccggaacaatgggaatctctctttggcggataattatttcaaggaaattggaccttcgtgttggagtttgatcaagtccaaggttttggatgtgtcaaganactgcattccggggcttccagaccaaaaatcacccaaagaatgctacagttttaca

SEQ ID NO: 3620 - DNA, 194 bp, Glycine max
  unsure at all n locations
  Clone ID: 700999863H1
caaaacgtgtgtttaggacttttcccatacacttagtctctgtagtctgtacagattagtaataatttgatgatcgcctagctagaaatctagattgccttttctctatttctgtacttagaaaaatacatttaattgtttggcccttcgtgtatccaaaataaagataaatatatataaatttatgtaaaana

SEQ ID NO: 3621 - DNA, 269 bp, Glycine max
  Clone ID: 700999864H1
ccaaaaccagccaaccttcccagaatcccttgtttgtaaggcaagaaggttctcttcttcatatcctcggactctgctttcttcatggcgtagtgcaactcatgcgccgaaatagttccctttcttgacctcgacgaatccgaggatctaaaactcgacgaccctttaacttcttcgttactattcttcttgttgtagtacttcttcaatgcatccttgcttgaacctctccttcggaggcataggaacaacaaaaagtcttcagtgac

SEQ ID NO: 3622 - DNA, 274 bp, Glycine max
  unsure at all n locations
  Clone ID: 700999865H1
atcatcttttgtttgttcttcagtactttagtgtgtgatttaattccaagattttgagaatgtctagctgtgggtgtggaagtagctgcaactgtggcagcaactgcggttgcaacaagtactcttttgacttgagctatgttcagaagacaaccacagagactcttgttttgggtgttgggtctgtgaaggcccaattggagggtgctgaaatgggtgttgcagctgagaacggtggctgcaactgtggatcnngctgcactggacccatgca

SEQ ID NO: 3623 - DNA, 274 bp, Glycine max
  Clone ID: 700999866H1
ccagaggagttgtaaattaagagcatggctgcacaagctcttgtatcatcatcttctcttaccttctcagcggaggctgcaagacaaagtcttggaccaagatcactccaatctccatttggcttctccagaaaaggctcctttcttgttaaggcagctgctaccccccctgtcaagcaaggatcagacagacctttgtggtttgcatcaaagcaaagtctttcttacttggatggcagccttccgggtgactatggatttgacctctgggact

SEQ ID NO: 3624 - DNA, 270 bp, Glycine max
  unsure at all n locations
  Clone ID: 700999868H1
ttgacgtgttagatatttcaaagaagataaagaaaactccagtggtggttggaaactgcacaggatttgctgttaataggatgttcttcccatacacgcaagcaggtctcttgcttgtngaacgtggtgcagatgtttatcaaattgatagaataataaccaaatttggnatgcccatggggcctttcagattggctgaccttgttgggtttggtgtggcgattgctactgggcacccaatttattcagaattttcctgaggaacttata

SEQ ID NO: 3625 - DNA, 270 bp, Glycine max
  unsure at all n locations
  Clone ID: 700999869H1
catccttnngctggggatgaganagccatggannaagctgctgccatttttnaactcatccccatccttggctggcaaggccgtgaagctgggcccatcagccccagaagtgggaagggtnagcatgaggaagaccgtcaccaagcaggtctcctcaggaagcccatggtacggcccagaccgagtcaagtacttgggcccattctctggcgagcccccgtcctacctaancggtnagttcncaggcgatacggctcggaantgctgggt

SEQ ID NO: 3626 - DNA, 266 bp, Glycine max
  unsure at all n locations
  Clone ID: 700999870H1
ancgaggaaagtttgccgagatgatgaaagttnttgatgatatcaagctctgnaattgctcccctgatattnttacttggaatacccntttggcngtctttggacagaatggaatngactcncaggtctctggaatatttaagnaaatgaagagagcaggcttnntggccgananggacaccttcaacactcnaatnaaaacaanagcaggtgtggntcctttgaccaggctatggctgtttacaagagcatgcttgaagccggng

SEQ ID NO: 3627 - DNA, 268 bp, Glycine max
  unsure at all n locations
  Clone ID: 700999872H1
gaatcaatagagaaatactaaatcgttccatatcgaatccagaattttggttcttttcaaaatttgtgatattttatgacgcatataggggtaactcgcaggttataccaatcaaattacttttttnttcttctaatgtaaatcaaaatgttagtgaaaataaaaagaacattactagaaagaaaaaaaatgaatctcttgaattggagttagagactcgaaatcgggcaaaagcagaataccctgatcaacgaaatcttgaatcatc

SEQ ID NO: 3628 - DNA, 265 bp, Glycine max
  unsure at all n locations
  Clone ID: 700999874H1
ctaagagttgctgcttcttccgccactcagcacttcnctccctctgtgcttcaccaaccatggccgaaatcgaagctaccgttccagatccctctcaaatcgacgtcaaacttttcaaccgctggagcncccgacgacgttgaggcacttcttcancctttccccctttttattcactctctgtatcgacgcttctttaaactatagcaaatttgattaattattaagtttgtcttagttattaatctagttatatgtgaaatta

SEQ ID NO: 3629 - DNA, 263 bp, Glycine max
  unsure at all n locations
  Clone ID: 700999875H1
tttttaaaatatgtgtaanaatcagtganaaacagataataataaaaccttgtttttaattaaggtggtattttttanaaaattataagtnaaaaaaatganaacaaatatttngcagaaatatatacctctccttcttaatcattantcgtacttgccatttagtcacttgctgnattatggtgtgcttggagattttactgtgtccatgtttgatgatttgggcatttcatcnncgctggctaataaattggatgtattct

SEQ ID NO: 3630 - DNA, 264 bp, Glycine max
  unsure at all n locations
  Clone ID: 700999876H1
catcaatctcttttcatttgtttaataatctcaactttgatgctaaccacaaaaacacagcacaacacaactccgtnccatttcagtcggcaattctggaaaaagtcaaatcattctggaattttcattcatttgagaganaagagaaaaacaagtgttctttgaatctgttgaaggtggtgatttgatttgatttgaataattcacataaccaattcatctattcattatctctccgatctttcaatggattctgacttctgg

SEQ ID NO: 3631 - DNA, 263 bp, Glycine max
  unsure at all n locations
  Clone ID: 700999877H1
ttcttgcaggttctctccttggntttatanggcagatggggtcctctgctagagcaagccactttcaggaaccgtcaccgtctctatctttccgaacagactgatggcngtgttcccaatactcttgttaaacccanggttgctgcagagtttaatgaagaagctcgctctccctttttcaagaagtacaaaactgtattacatcctggcgaggtgaatagaatcagggagtttcagcaaaacagtaagatagtgctactcac

SEQ ID NO: 3632 - DNA, 267 bp, Glycine max
  Clone ID: 700999878H1
caaacacctaccaccaaaatggccttcaaaatgaacctatggagcttgactcttctcccaggggagaagtaccctatgtacattcgacgggactttgtcctcaccaacgctgctctcggcgaagagctcaggagcaaggacggacgatccgtcgtcaaggtcacccatcagcccttgctgccctctcaattcggggatgacagcgactctgagttcgatagcgacctcgacatcagcgacgaggagggagatgaggatagtacgaga

SEQ ID NO: 3633 - DNA, 272 bp, Glycine max
  unsure at all n locations
  Clone ID: 700999880H1
cttcccctctcatcattttaatcacgcgcacatcagcacaacacnncnattcacncaagctaaaatcacttcatcatggcttcctcgtgtgcttcctctgccattgcagctgttgccatctccacaccaagttcccagaagaatggatcactcttgggaagcacaaaagcttcttttcttagtgggaggaaactgaaggtgaacaactttacagcaccagttggagcacgatccagcactacagtttgcgcagttgctgagctgataggctt

SEQ ID NO: 3634 - DNA, 271 bp, Glycine max
  unsure at all n locations
  Clone ID: 700999881H1
ancacaaacgcgagaactagaacagcgtcatggttttctaccccattctttgttatcgttctcccggtggccgtggctgcgcttctctaccggctcgaaccattcaagccggttcttttgccggtccagctgggccggtccaccgtggcggttccggctcgtaacggccacatgcaagatggatcggaacgtgtgggtgagggacattggagggcccggaagacttggcctacgacgctgcggcacgtgtnttttataccggtgtgaggat

SEQ ID NO: 3635 - DNA, 268 bp, Glycine max
  unsure at all n locations
  Clone ID: 700999882H1
tcccaatattttctgcncgaatnttgctaganaccgttagtgggtatcctcaaaatactagattttcgattcgtttggtgaacggatttttaggtgtgattatnacgtttttcttttgttcaacaagctanggaggtttcggtgattggaagctcacaagcgaactggtgcgcgtctgaattggcttctagggaagttggatttgtaatctgaagaacaatttangggttttgaatgacagagttagttttggcaggaatatatacgg

SEQ ID NO: 3636 - DNA, 271 bp, Glycine max
  unsure at all n locations
  Clone ID: 700999884H1
gtacccaacatcaattggntccattgaccacattgaaggcacgtgtgaacaactttggcaggacaagtgctctgatccagcatgagtggcgtcccaaatcgttctttaccatatctggtgaggtagacaccaaggccattgaaaagagtgctaaggttggattgggtttggttctcaaaccctaagaattttgatccatcctggcaagagcattgagtaggtgttaggaagcgtatagtctgtgagactaaattatttccttaagttggtt

SEQ ID NO: 3637 - DNA, 264 bp, Glycine max
  unsure at all n locations
  Clone ID: 700999886H1
aaataaganagtggggggnaaacctggaagaagaaaacaccaaaatgtttcgtttcgagcaggaaaagatccganaacgaatttgatncgtaaagttaatttcttttcgacaatcaaatagtttccagcttgttgggtgttgccatggccgacgctctctcgttgattccggcagccgtgcttcgcaaccttgctgacaagctctacgagaagcgcgaaaatgctgctcttgatattgaggggatagtgaagcagtagctactg

SEQ ID NO: 3638 - DNA, 266 bp, Glycine max
  Clone ID: 700999887H1
gggacgatgctcgcaaggcgctgaaacaccctcaaaagaagatcggaaaccgcaccacctcgtgccagctggcctccgccggccccgttccggctccaccgccgaacgtgaccccggtgtctgagtacacccagaggaagatttttgtgagcaatgtgaatgctgagattgatcctcagaagctgcttgaattcttcaagcagtttggggaggttgaggatggtcctcttggtttggataagaacactgggaaacctaagggtttg

SEQ ID NO: 3639 - DNA, 268 bp, Glycine max
  unsure at all n locations
  Clone ID: 700999888H1
tgctgtgctgtgtngctgnnnactgcttancctaaaatanatgactttacnaaaatagagacacacananacacaaacacanttacncaancacacggtcaggnggcattntatcgtacccacataggtaatctaggttgtgtgttgcttaagaaggnnnactanatctcacnaancataaaagatggatgatccaaagggtagtncctcatggttanaattntaantataagtgncatatttggctggaangatcatgggagtatng

SEQ ID NO: 3640 - DNA, 263 bp, Glycine max
  unsure at all n locations
  Clone ID: 700999889H1
cttcttcatcgtcccacgtggatgacatgctgggatcgttgccggagataaatgaccggtgcttcaccctgccacgagtgaactcactcagaacaatgcaccagnaggatgagaaattcgggtctccgnacatgggatccgggtttttctcggantgggttaactcgaccgatctcgattcgatttccgaattcgagtcgggttgccaaacccaaagaatggtgaattatgattgcaatgacttttttgttctctctgccgcc

SEQ ID NO: 3641 - DNA, 210 bp, Glycine max
  unsure at all n locations
  Clone ID: 700999890H1
ctgggccttttgggctcttgggtatcaagccttgtgttggctgtaatagaataagcttcaattggaaacgccaganctccatcaccggaacaagacccaggcaggtgtcgcagtacgcggagaaaggacgcnatataaatatatttgtccccgatgctctctatttcagccactcgtatattcttcctccgctcaacaactataagatta

SEQ ID NO: 3642 - DNA, 262 bp, Glycine max
  unsure at all n locations
  Clone ID: 700999891H1
caaaactgcaactgatatatcagatatacataacttattttctcacgatcaaataactactaaaactnnaaactgtattctattagttttctgtttgtnaaatagatgtgaaaaaagtgatgaggttgaaggtcctttgctagcagttaccatggtcctttttccatcttttgtgaatggattggtaagaactgtgtcaatcaagaaggagaagaantntcaaagggaggacggaagaaaagctgtggaagaatggcaaagg

SEQ ID NO: 3643 - DNA, 129 bp, Glycine max
  unsure at all n locations
  Clone ID: 700999893H1
cagtctttaacactcgaagattctctccttttcaaatttcaaaccttttcccccaaaactaacaganccctcttcttcttctctctctgcncatctcaatcgtgcatgggtcgtcttcactgattcgat

SEQ ID NO: 3644 - DNA, 268 bp, Glycine max
  unsure at all n locations
  Clone ID: 700999894H1
ggatcagaattgatagtggtgcaacagaggtagctgctctaatagccatggtttttggttaccgtttcttggcatatctttctctaaggagaatgaaacttcaatctggagcttaaattcaacttgatcactctttgcatgtgggtgataatattaattaaacaaagaatcacatgtactaagaaggaccaataattgaagtacctagcacattagagatagtggcttttttntattttgtcttgtgaatatttatatgccatttaat

SEQ ID NO: 3645 - DNA, 272 bp, Glycine max
  unsure at all n locations
  Clone ID: 700999896H1
aggnaaccctacacgattaccangtccagggagagctggactgagcaggagcacgacaagtttctagaagctctccaattatttgatcgggactggnaaaagattgaagcatttgttggttcaaaaacagttatccagatacgaagtcatgcacagaagtattttcttaaagttcagaagaagggaacaagtgaacatgtacctcctcccgggcccaaagagaaaagctgctcgcccataccctcaaaaagctctaaaaactctactgttcc

SEQ ID NO: 3646 - DNA, 109 bp, Glycine max
  unsure at all n locations
  Clone ID: 700999901H1
cgctgattgttggtggtggacgagcagctganantcccgagtcaagaggatctgtnattgtgggtnttaggacactaagtgnaacgnangtcgtnntcgccaacttctc

SEQ ID NO: 3647 - DNA, 105 bp, Glycine max
  unsure at all n locations
  Clone ID: 700999902H1
attnnattcttcatccaatgactatacattcattatatttttgtgtaaatagaggaaaaactcgatggaaaaatggtngccnaattctatgttgtttaataggga

SEQ ID NO: 3648 - DNA, 96 bp, Glycine max
  unsure at all n locations
  Clone ID: 700999903H1
tgcaattgaagttgaagtcttgcncttctctcttcaactccagacacaagaccatnntcatncanggatgnatgngnnngtactgtcggagntgtc

SEQ ID NO: 3649 - DNA, 104 bp, Glycine max
  unsure at all n locations
  Clone ID: 700999906H1
gcgaaggtggtctcgattgcaagtnatccacgatacactctacgcttcacaaaaccttcaaaacccaattccacagaanttngacnnanaagtnaacacanant

SEQ ID NO: 3650 - DNA, 148 bp, Glycine max
  unsure at all n locations
  Clone ID: 700999907H1
cttatctcttcagtaaggtcgtgaatgtnactgttggagtanatgaggacagacagatgctcactgggatgcatacngtggctgacattttctgtgtgggctgtggatcaattgtgggttcggagatatcanactgctcanggaaaaa

SEQ ID NO: 3651 - DNA, 124 bp, Glycine max
  unsure at all n locations
  Clone ID: 700999909H1
acacaatcgnccttcagccagtganttattggaccaccnttttgtaaaatatgctgcacntttagaaagacctnntctggcgtcctgagtctccttcagacccaggcannatcagggatcacac

SEQ ID NO: 3652 - DNA, 270 bp, Glycine max
  unsure at all n locations
  Clone ID: 700999911H1
aaaaaaaagagtatctcgtagcctatcaaatttnatgcctcgtgcttcttctcaagggcattgcatacccatggaactgccactacagccttcagagttagcacaaccatgtgcgcctcctgttgtccttgatccatcatcaattcctgtaattcaagatccggtttcatcatctgatccatcatcaattctgtaaatcaagatccggcttcaccatctgatccatcatcaattcctgcaaatcaagatctggcttcaccatctgatcca

SEQ ID NO: 3653 - DNA, 271 bp, Glycine max
  unsure at all n locations
  Clone ID: 700999912H1
cacaagccaagtgaaagtgcaganaaaataaaaatcaaagagcanaatgttcagggatcattcacaagattggggagaccttcatgtgggagggcacaagaaggaggaggagcataagggtgancaccatgctggagaatacanaggggagcaccatggtgaacacagtactgagtacaaaggagatccatctggtgaacacnaagcctggagantaccatgtgagnaaacccagagcacaaagatnggttcctagncaaagtcaangccc

SEQ ID NO: 3654 - DNA, 146 bp, Glycine max
  unsure at all n locations
  Clone ID: 700999915H1
gagaagtgangatacactaagttatccctcataaatacactctaattaggtggcaagataagtgtctaaccttagtaacattgccacatattgtgttcattttggaattgtgccactaaaattctattcaattccatctatgggcg

SEQ ID NO: 3655 - DNA, 147 bp, Glycine max
  unsure at all n locations
  Clone ID: 700999916H1
aatacttggtcaccatcaagcttggtgncaaaaaggctttggttatcagcaactgggnaatagctaaggaatgcttcaccacaaacgacatcgtcgnttcgtctcgnccccaggcttgntgcngctgaaaatatgngcctacaaccc

SEQ ID NO: 3656 - DNA, 154 bp, Glycine max
  unsure at all n locations
  Clone ID: 700999918H1
cttcaaacccccactttcttctctgttgatacacattgatccactcataatacccaatggncacacttgttctgcatcagaatctgatccatcacccactttctcagnaccatcagcaaggangnagcatncncnnagancgctggccttccaa

SEQ ID NO: 3657 - DNA, 125 bp, Glycine max
  unsure at all n locations
  Clone ID: 700999919H1
cacaaagcacaaagcaaagctcatccttgagttaaaaaatggcagcagcttcttccatggntctntcatncccatccttggctggcaaggccgtgaagctgggnccatcagccccagaagtggga

SEQ ID NO: 3658 - DNA, 129 bp, Glycine max
  Clone ID: 700999920H1
cactcataacacaaagcacaaagcaaagctcatccttgatttaaaaaatgggcagcagcttcttccatggctctcttcattccccatccttggctggcaaggccgtgaagctggggcccatcagcccca

SEQ ID NO: 3659 - DNA, 144 bp, Glycine max
  unsure at all n locations
  Clone ID: 700999921H1
ttctacacagccaacatgttcgtcaccacaacaaatccgcaccaagctgacagatctgcttaagatccagcacccggtcatgcntgcgggcatgaacgtggctgtggacctaaggttgccgagatgncataacggtggcggttt

SEQ ID NO: 3660 - DNA, 101 bp, Glycine max
  unsure at all n locations
  Clone ID: 700999922H1
agaatatcgaaaccaaggactggngttcatacttnaagcanttanttgnccctanccttcatagaggatgtcagtggagtgacagagnngntganatcggc

SEQ ID NO: 3661 - DNA, 144 bp, Glycine max
  unsure at all n locations
  Clone ID: 700999925H1
gccanantatatgatgacnaatgaggaagtggatttctggtgttggtgttgacggcattgggaagaagcttgtgaactccaaaagatggacctcccaacctttgagcagcccaacannactctggagaagctcttgacgtatgg

SEQ ID NO: 3662 - DNA, 276 bp, Glycine max
  unsure at all n locations
  Clone ID: 700999926H1
ttgaagttgaagtcttgcccttctcctcttcaantccanacacaagancatcatccatccatggctncnctccgtctccactgtcggagctgtcaacagagctctttgaacctgaatgggtctggacctggggtttcagctcccagttcatccttctttgggagnancttgaagaaggttattggctcaagggtccccaacanaangantttctntggaagtanaagnntngtngctgtagangannaagaaagngttngcagtncncncaacagc

SEQ ID NO: 3663 - DNA, 144 bp, Glycine max
  unsure at all n locations
  Clone ID: 700999929H1
gttgggatgtcnctgtgtgananactgaagccagttctttacacagagnacaagttacatagttcgtgaangggatccanttgatganatgntgttcataatgcggggaaaactagctactgccacaacaaatggtggaagaat

SEQ ID NO: 3664 - DNA, 267 bp, Glycine max
  unsure at all n locations
  Clone ID: 700999931H1
tctctccagaatttcctcctcccactgcttctttcttccttgcagcgcgattgctgcatcctcnnccaataagagctcgntgctagcgaaccctaacacggcggcaacgtgaggtgttcggttgaagttcagatcagccatggccgcagcaacccccacttctctgcggttcctcctctncgtttccgtaaccctaacctaacctgnttaacctcgncggctcaaattccgaagcgacgctctctacacgctgaanggagctctcgg

SEQ ID NO: 3665 - DNA, 272 bp, Glycine max
  unsure at all n locations
  Clone ID: 700999932H1
ctgaaccaaatcatcacacacacatactaanaagcaacaattcttctacaatggatctcctccttctggaaaagaccctcataggtctcttcctcgctgcggtggtcgccatcgccgtctccaccctccgcggccggaaattcaagctccaaccgggcccactcccgtcccaatcttcggcaatggctccaagtcggcgacgacctcaaccaccgcaacctcaccgatttggccaaaaaattcggtgacatctccctcctccgcatggggca

SEQ ID NO: 3666 - DNA, 148 bp, Glycine max
  unsure at all n locations
  Clone ID: 700999933H1
tgattactacttattttcaagggatcaatacaatataatggttcaaacatgctaacggtgtatgctcccagagcagttctaaagtgccatttacaccaggattcagcttcttctcaacaaccatattcatatccatgcangatccata

SEQ ID NO: 3667 - DNA, 145 bp, Glycine max
  unsure at all n locations
  Clone ID: 700999934H1
aaaatgaangagaagagggaagctgaagagatgggagatgctatgaaatcgttggaaaatagaaccctggattctaaganggagatggacatccttgctgcattggatganatgaagtcaatgaagtctaggcatgcaactgtca

SEQ ID NO: 3668 - DNA, 131 bp, Glycine max
  unsure at all n locations
  Clone ID: 700999936H1
ctatttnctgttcccaatttgttttcgggatctctgttccacgnaacncntaaaatctgacgttaattnaccatgatntggaacacaacgtggtttcccatctggatccactgcatggtcnttctnaantg

SEQ ID NO: 3669 - DNA, 142 bp, Glycine max
  Clone ID: 700999941H1
ctgaaagtcatggcagttagggctgcatctggaaaatatttttattttaccgtgctgaatgttttcattggagttactattggtggaaccttgttcaaagcattcaagagaattagggagcacccgacgttggatgaaattt

SEQ ID NO: 3670 - DNA, 269 bp, Glycine max
  unsure at all n locations
  Clone ID: 700999943H1
ttacagatctcaaggggttgagttgctgggaaaaacaatagaanannaggggtctagtggagcaatggctagaagttgaagcacacaactttcatccacaagcctacaacttgtgtcttcatggtttgtttggttcactatttggtgtgactccanatcccaaggtgattgaggagagtgaagcaaagcnggtacaagtgttgaacatctatgangagaggctctcaaagactaagtatttggctggggatttcttcagcattgctgat

SEQ ID NO: 3671 - DNA, 262 bp, Glycine max
  unsure at all n locations
  Clone ID: 700999945H1
ggcagtttgtacgacaacataatcatccattcgctgaggctggtggtgattcatgaacattgttctctttaggtttcctgtagtattaaattacagttgactgtaacaccgattgtgtcaacaaggattagctgtagggtggtatctgtgtgttgttggaatctgtttatccattangcaaaagaagagtaggccagtagggagatagctaaagggtagtgctaaanatncttaggngttntcnncgggtttacatttggac

SEQ ID NO: 3672 - DNA, 186 bp, Glycine max
  unsure at all n locations
  Clone ID: 700999946H1
gaaaggagggagatggggaagggaagaagaganagangcatgaaagcacaggncgccnncgttgctgttcctgctaagaaggtgaaagtggatgaagtggaagaggttgnaaagcnagaaaaggtgaaggtgaagaaggtanctgaagagnctgtggaggttgaagttgagaataaggagaagtcc

SEQ ID NO: 3673 - DNA, 140 bp, Glycine max
  unsure at all n locations
  Clone ID: 700999953H1
aattgatcgtactttaagctggaaggatgtnaagtggcttcaaacaatcaccaaactgccaattctggtgaagggtgtgctgactgctgaggacaaggatagcnatacaaagtggtgcagctggaattatagtgtccatc

SEQ ID NO: 3674 - DNA, 195 bp, Glycine max
  unsure at all n locations
  Clone ID: 700999957H1
ggnaattgattgaggtgtttgctaagggtgttganaaagantatgttatccttcttgcagcaagagcttctaggactgaaaatcaagatgccatagatgctgcaattgttggcatgcttgctgacccaaaggaggcacgtatggtgttagggaggtacatttccttccattcaatcctgtagacaagaggactnc

SEQ ID NO: 3675 - DNA, 268 bp, Glycine max
  unsure at all n locations
  Clone ID: 700999967H1
cagaatcgtcctgtgaaaaanatgaaattagtcaagactgagaaatgtggttctggaattgtggcggatgaagatatcaagcttggggagtttgtcattgaatatgttggagaagtcatnatgaccaaaaccatgtganggaaagctttggaacatgaacatcgtggggaaacaaacttctacttatgtgaatncacccgagntatggtgaagcntncncttttaggggaacaaattcagntncatcantcnnnctgctgccccatac

SEQ ID NO: 3676 - DNA, 274 bp, Glycine max
  unsure at all n locations
  Clone ID: 700999969H1
cttcacattttagaagaataccccctcttttgctgcatcagaggagttgtaaattaagagcatggctgcacaagctcttgtatcatcatcttctcttaccttctcagcggaggctncaagacaaagtcttgggaccaagatcactcaaatctccaatttggcttctccnagaaaagcctcctttcttgttaaggcagctgctaccccccctgtccaagcaaggatcagacagacctttgtggtttgnatcaaagcaagtctttctaactnggag

SEQ ID NO: 3677 - DNA, 93 bp, Glycine max
  unsure at all n locations
  Clone ID: 700999972H1
caantattgaacacagataaacaagtagatctggtacactgtgtntcgttactgatnccagagattcctngatgcatgggtcggggctgtagg

SEQ ID NO: 3678 - DNA, 260 bp, Glycine max
  unsure at all n locations
  Clone ID: 700999975H1
aganaagaaaganattgaaganacccagcagaccgacaaggacagatggaagggtcttgcctatgatatctcagacgaccaacangacatcacaagacganagggtttggttgactcccttttccaagctccacaggatgctggaactcantatgctgtcatgagctcctaccggtaccntagcatggacttcgcagtactnggtcaancaacatggatggatttacattgtccagcttgtatgganaacnntngttcac

SEQ ID NO: 3679 - DNA, 262 bp, Glycine max
  unsure at all n locations
  Clone ID: 700999976H1
cgagttcgaagagggtnagtcggcggagcacccgagtttggaggagttgttaccagaagggtttttggatacggactaagcagaagggaatggtggtgagggactgggccccacaggcggcgattctgagtcatgactcngtgggtgggttcgtgactcactgcgggtggaacncggtgttnancccgatttntnaaggggttccaatggtggcgctngctttgtacgccgaacagaaccncaatagggtgattttcgtgga

SEQ ID NO: 3680 - DNA, 205 bp, Glycine max
  unsure at all n locations
  Clone ID: 700999978H1
attttgtgcatgcatgggggncttttcatcaatcagtggctgccaaaggaaggcaattgaagcattctgtaaatgnnttccatnaccttacattgaaccttcgtttacactcatcataaaatccatatatacggttantagaagcacattcatggttacccctcaaaaggcgnaaattctccnggntattctattttatatgcna

SEQ ID NO: 3681 - DNA, 265 bp, Glycine max
  unsure at all n locations
  Clone ID: 700999979H1
ttgaactctccattccttaaattttagctacgagctagttccgacacagacaaagcanncggcaaagaccganttagaggtnactgttgagagcaagaacaaagacctcaagcacctggggtttgtgaggattgctgctattcaaacatttgtgattgtgtcaaatctgtatgagtacgcaaagcagaattctggggccttgagatccgtcgtaggaacggttgagaacatgtaaccaccattctcggtcctgtctgcancaaat

SEQ ID NO: 3682 - DNA, 106 bp, Glycine max
  unsure at all n locations
  Clone ID: 700999980H1
attcttcattgnaatcatggaatgaccccccaacatgaggcgantgcgggtttcgccgcnagtgtctggggaacaggccagcgnnagacggnagacccacgntgta

SEQ ID NO: 3683 - DNA, 273 bp, Glycine max
  unsure at all n locations
  Clone ID: 700999982H1
ggattgttgctgtagaaganaagaaagagattgaagagacccagcagaccgacaaggacagatggaagggtcttgcctatgatatctcagacgaccaacaggacatcacaagangaaanggttggttgactccnttttcccaagctccacaggatgcgggaattcactatgctgtcatgagctcctacgagtaccttagcactggacttngccagtacttggacaacaacatggtggattttacattgctccagcttttatggacaaacttgt

SEQ ID NO: 3684 - DNA, 96 bp, Glycine max
  Clone ID: 700999983H1
atcatgactttgtcctcatgggctacttccagtgttgaagaggtggcttcaacaggacctggcatttcgctttttccagctatatgtgtatagagg

SEQ ID NO: 3685 - DNA, 252 bp, Glycine max
  unsure at all n locations
  Clone ID: 700999985H1
acaatccctccgttctgtataggaagatttacngcggtcaattccggttcccgatantgnctatnacatgatctgagattcctcttatcacgactttggacacgaattcccaagacaaggataacccgtcgatgnagatntataaggaacacgtggttaaatgcggatggccgagtatcgttcaaccgggtttgggtcagcgagantgaatgttaaangcattgggtcnaaccggattcaatcttngaatnt

SEQ ID NO: 3686 - DNA, 137 bp, Glycine max
  Clone ID: 700999986H1
ttctgactttgagtcatgtcttactgattatggtctcactgtgttccttaatcctgacacaatggatgagcctagtgcaacttctttgttctatagagcacctgaatgccgcaactttcaaaggtcacaaactcaac

SEQ ID NO: 3687 - DNA, 114 bp, Glycine max
  unsure at all n locations
  Clone ID: 700999989H1
gttncccacgtaggggcantgataaatcttgnnaagttatccctctacatgtnnagtaacataagttagatgnttgataanggtaccatcccagttncnnattcattnccaana

SEQ ID NO: 3688 - DNA, 261 bp, Glycine max
  unsure at all n locations
  Clone ID: 700999990H1
gttatacacaaaaatttgcanaagaggaaaactaaggctaggtttgggctaatgggggcctcaagctccaaaatggatgatgataaggcactccagctgtgccgnganangaagaaatttgttaagcaagcattgatgggcgatgctctttagnannttctcatnttncatntgtccagtcatgaacagtacaggaccagctttganaggttcatggnacctggaagccccaatggaatcttccttagacacttccacana

SEQ ID NO: 3689 - DNA, 261 bp, Glycine max
  unsure at all n locations
  Clone ID: 700999991H1
acacaagtacattcattctcaaaaggtttaatttcatcctttctttccctctcttttcattggtgtgcactttcacttgtggagctagctgcaccaacagcagtggaaattgccttgttcttgagatgtctggngttcttctttgggtgagttctggacccaaagagaacatcaactccttggtnagtttttcatgcangagtggtggtggnggtgaaaaacacnaaagagggtttcgggaatcagttttncaagngtccc

SEQ ID NO: 3690 - DNA, 263 bp, Glycine max
  unsure at all n locations
  Clone ID: 700999993H1
tggaaccctccgtgagcatatctacngcaccgataacccttctctttcatggaagcacaggcttcagatatgcataggtgcttcacgaggactgnattatntgcatacaggtgcgaanacatggatcattcaccntgacgtcaagagcaccaanatcttgttggatgaaaaatgggtagccaagggtttcagacttcgggttatcccgnatcgggncnattggntctgcggtnattcntgtagtaanncgggcnnaggnanct

SEQ ID NO: 3691 - DNA, 117 bp, Glycine max
  unsure at all n locations
  Clone ID: 700999994H1
cataatcatggaggggtctcacatccgggntgttggancntnnccgngttcttccatgctttnncgctgccttcgctggctgcctcctcnagaaacttggacanaataccctttgat

SEQ ID NO: 3692 - DNA, 95 bp, Glycine max
  unsure at all n locations
  Clone ID: 700999996H1
gtggagctgagaaaagaaacatgnacccattaaaccgcttttncnaaatttttgtttgaaggaccncaatgacntantgtgcanaannaaaanna

SEQ ID NO: 3693 - DNA, 280 bp, Glycine max
  unsure at all n locations
  Clone ID: 701000001H1
aagtagttgagaactaagaaggagaagcaaatggcttcctcaatgatctcttccccagctgttaccactgtccaaccgtgccggtgccggaatggttgctccattcactggcctcaagtccatggctggcttccccaccagaaagaccaacaatgacattacctccattgctagcaacggtggaagagtgcaatgcatgcaggtgtggccaccagttggcaagaccnatttgagactctttcctactgccagacttgatgatnnacaattggnaaggaac

SEQ ID NO: 3694 - DNA, 125 bp, Glycine max
  unsure at all n locations
  Clone ID: 701000002H1
aattgagtcctatctggggaagttttttnagaaatgccaaaatatggttggatttctgagggcaaacaacatggcaattggctacctttgagggtaagaagctggaaaatttgccaatatgatcc

SEQ ID NO: 3695 - DNA, 272 bp, Glycine max
  unsure at all n locations
  Clone ID: 701000003H1
cactgccaatgtggttgctgatggaggtggcatattttatttctacactcagtggacatttactttggtcactatttactttgggcttggatcttgtgtctcaatatatggatgtcgctataaacacaataaaattgatagcagcacagtcaatcgtgctgatttagatactgaagaaggcacttatgtggctcctacacttgatgggactccagattacctaacctgtacaagaattccaatggcaatccaggagtttacnncggaaanng

SEQ ID NO: 3696 - DNA, 272 bp, Glycine max
  unsure at all n locations
  Clone ID: 701000005H1
tgcaaatatgatttgtaaatatgaactcatgcaagctatccaagttcctcaccactagttcaatccctagtggtttaacttctaatcttttaaaacatcttgtaggtcngagccttcaaanccnggtgacacactttatgtaaccggtctatcttcaagggtcactgaaagagacctagagnagcatttctccaaggaaggaaaggtttcttcatgtttcttgtggtggagccccgtacacggatttctcgtggttttgcttttgttacaac

SEQ ID NO: 3697 - DNA, 275 bp, Glycine max
  unsure at all n locations
  Clone ID: 701000006H1
aanaaaccctanacatagcatcctaagatagcagagactatcancatcgtcctgctcatttgggcacatgcttctcccactgaatacttngtccgcctggagaacacaacttacaaagacgctctatatttaaggaagaggacaaggatgcgtcggtggctttgttgtacttgtcaggtggaagagtcttacccatcaaatgaaaatgancacctgaaagcccaaggaattatggagatggcaaccaaaaaggcnnaaaggtgnnagcccctgcc

SEQ ID NO: 3698 - DNA, 213 bp, Glycine max
  unsure at all n locations
  Clone ID: 701000008H1
gaaaaaaatcgacttgggatgttttgtttcctcgtaggttgtggttgccgacgtggacgtgtgatcagaggaaggaggggaagttgaacttaaaggtgcagtgcggtactaggaaanaagggtgggttgaatctncnggaaaaagcgcgtttgggtttggcgtttcggccgcggttttnttcctctgcgttctgctactcgcccgcggcgctt

SEQ ID NO: 3699 - DNA, 157 bp, Glycine max
  unsure at all n locations
  Clone ID: 701000009H1
ctatggcctcaaatgcaagtnatgtccttgcagtagagcttttacaganggatgcacggcttgctgctattggggagttgggaaaagcatgtcctggtggaacgtngcgggttgtccctctgtttgaaactgtgaaagacctgagaggagctggttc

SEQ ID NO: 3700 - DNA, 277 bp, Glycine max
  unsure at all n locations
  Clone ID: 701000010H1
ctttttttggtctctggagttacaccacagccacggagctctagggactgctccattaggtagttttttatttagaggctaacatgagcnttgctgcgccatcacttggttctgctggtggtagatctgctagaagagcatttgagtttgggagaacctatgtngtcaggcctaaaggtaaacaccaagcaactatcagtctggttgcatggcctcggggtnatggctccagttggtcccaggctnttaganacccttcctctcccaaatatnaacc

SEQ ID NO: 3701 - DNA, 221 bp, Glycine max
  unsure at all n locations
  Clone ID: 701000011H1
attatgcttctgacagtagtttgggggacctgtgttttcattggcagacaaaagttgaaaaatgactctaactatggtggcacaaattcatcaagtggaggaataaaagaatcactaactggttatggtatcactatggatgtagatactagaaagatggcaagaatcatggtttcctcagttataccactcccccanaanncagatccccnagtattccc

SEQ ID NO: 3702 - DNA, 178 bp, Glycine max
  unsure at all n locations
  Clone ID: 701000012H1
ggnaagccaacctttgcaattttcaacccgaaatcgtcgatttcttctaaaatatatactgtgcattggtctccttttcgaattgtggttgagggattaaagtaccgttattggtagagatggcttgtagggggtgctgggagtgccttttgaagctgtttancttcatactgncccc

SEQ ID NO: 3703 - DNA, 271 bp, Glycine max
  unsure at all n locations
  Clone ID: 701000013H1
accaacttgaggcacacgtgcagctagactacaccgttgggttttanganggtttcattcaggttcgtgcacgtgtcgataatatacgcctccacctcgcgaggttaggtttcagccaaaacgacnncgtggatgatttcgttgaggagaagcactttccgtcacgggttcgggtttgggtgggcccggagataggatccacttattgcgccccccagagcttgggccggtccacggagaacaaagagtgcgnatggaaacaaagnggttg

SEQ ID NO: 3704 - DNA, 113 bp, Glycine max
  unsure at all n locations
  Clone ID: 701000015H1
gttgagagtgaatggggccatggtgctaagcttgatgttctggaatcaaagattgcttcagatacttcacacactataaaggcaatttgcattgttcacaatgagactgcnac

SEQ ID NO: 3705 - DNA, 195 bp, Glycine max
  unsure at all n locations
  Clone ID: 701000016H1
gtgcttgtttccaaagtgttgatcgatgaaggctttgagtttgagtgccataaactcttcaaatccatgtcttcccaaaacccatttgctcaaagtccctatctttcaccccttcttcaaattcaagccattctcatactcanacagcgcccttcatggccatggtgcaaagagagctcacacttttctttcacc

SEQ ID NO: 3706 - DNA, 276 bp, Glycine max
  unsure at all n locations
  Clone ID: 701000018H1
ggaggaagagagaaaaaccatggcaataacactcaacaatggcttcaagatgcctatcattggattgggcgtgtggcgcatggaaggnaacgaaatcagggacctaattctcaattccatcaaaattggttatcgccattttgattgtnctgctgactacaaaaacgaagcagaagttggagatgcgcttaaggaggcttttgatagtggccttgtgagagagaggatctcttcattaccaccaagctttggaattctgatcaaggccacgttctt

SEQ ID NO: 3707 - DNA, 236 bp, Glycine max
  unsure at all n locations
  Clone ID: 701000021H1
cgaatagattatcctaagtctttgggaatagtgctgcaatggcttcaagtcaggaggaggtgacccttttgggagctactggaagcccatttgtgtgcagggttcatattgccctcaagttgaagggagttcaatacaaatatgtcgaagaaaatttgaggaacaagagtgaactgcttctcaaatccaacccagttcacaagaaggttccagtgttatncacaatgagaagcccc

SEQ ID NO: 3708 - DNA, 272 bp, Glycine max
  unsure at all n locations
  Clone ID: 701000022H1
anatcttctggttganggtatcattgatcgagcagaggctaatgatgcagcttcaganaaagccagaagatgatgattctggagcagcaataccgtgatgatttgaaaaaagaacttcaaggtattacatgtacctcagcaggttctatagaaacatctactgaagtggtacagactggagaatcaactaccagtgttcatgaaaatgttgatcatgtgacatgggtaaacttatgttgtcacgtaaaaggagggggctagtgaaagccntc

SEQ ID NO: 3709 - DNA, 234 bp, Glycine max
  unsure at all n locations
  Clone ID: 701000023H1
tgaaacaaaacaacgatctaattcaagtttaaattttcagttctgttctgcttctaatggcgagtttcagaaacgctgcgatcaacgtcttcagagcgatcaatactaacaaagccaccatcgctgcttccacaaactctcttcantnntctcaggccccttttttgttattctaggtctacccctttctcttcccacantgaagcgaatnctgcaaatcgntnnaagnaaaga

SEQ ID NO: 3710 - DNA, 192 bp, Glycine max
  unsure at all n locations
  Clone ID: 701000024H1
gagaaaggcaaatggggtgtgcttcctcgaagcgtgttgatgcggcagcagttcccctaccgtcccgcacccacaagcttggcggtgttcgacatcaacaccatcgaggagccatggctgaagcanctcaacaacaccatcgaggagtcatggntgaagcacctcaacaacaccanccctctccnccaanac

SEQ ID NO: 3711 - DNA, 268 bp, Glycine max
  unsure at all n locations
  Clone ID: 701000027H1
attgctgctggtaactatcctgagtggaaactgttcgttcagacaatagatcctgagcatgaagacaaatttgactttgaccctcttgatgttactaagacttggcctgaggacattatacccttgcagcctgttggtcgcttggtcctgaataaaaacatagataatttctttgcngagaatgaacaacttgcattttgccctgccatngtggncctggtgtananactcagatgatangatgcttcagaccaggatttctcttatc

SEQ ID NO: 3712 - DNA, 275 bp, Glycine max
  unsure at all n locations
  Clone ID: 701000031H1
anaccattgaagtctagtggtgttcggactgctgaatctanagcttctccactggctcgttcanccntcttggtttgacatgaatggaggacacttgcctctgaccttcagaactcctccagtcagtcctcctcgnccaagttatataactcgaatgcgtcgagtttgttcattggagtttaggccccacctgatggnttctccagactcaggattagcgatccactcttaggttctggtggagcttctgggactcagatcgaagcttcnncnnt

SEQ ID NO: 3713 - DNA, 209 bp, Glycine max
  unsure at all n locations
  Clone ID: 701000032H1
ccctcactaggagctcttctccattggttctncatctgcatgcacacacttgcatagttttggaaaccaagaatttttgaagggtagcatcaacaagaagttctggaaatggagatcaccaatgtcagcgagtatgaagctattgcaaagcagaagttgccaaagatggtgtttgactactaacgcatctggtgcaganggccagtggc

SEQ ID NO: 3714 - DNA, 102 bp, Glycine max
  unsure at all n locations
  Clone ID: 701000033H1
cgttcctctcaaatggatgcaccaatggagttttggggtgttgaggttaaggttgggcagactgtgacggttgacccaatggatcctgtggatncatacanc

SEQ ID NO: 3715 - DNA, 177 bp, Glycine max
  unsure at all n locations
  Clone ID: 701000034H1
cgcttcttctctggtntctgncttncttggtacgggaagaactcaatcttgtccatttccctttggttttnctttcttcgatctcttcaccttcctttcgaccactctcttatcaccgntcgctttcttaactagagccctctccgttgagggtttctccaggtgnggtttgattna

SEQ ID NO: 3716 - DNA, 197 bp, Glycine max
  unsure at all n locations
  Clone ID: 701000039H1
tttgaaacctctcttgaganagggacacctctgcaagaagcctccaagaagtcaatgatcttatttttgaagccattggctgtggtgaattggaggatgtcaacgttgaaagtgtcaaagaagttgatgcagtcagcacaagcgaacaccctactgtggtggtagctggttcacaagaatgtgtgattccacacaac

SEQ ID NO: 3717 - DNA, 132 bp, Glycine max
  unsure at all n locations
  Clone ID: 701000040H1
catcttcacaaactagtaatnttattcttcgaatccattttattattcataatgggtattttcacatttgaggatgaaaccacctcccctgtggctcctgctaccctttacaaagctctagttacagatgcc

SEQ ID NO: 3718 - DNA, 147 bp, Glycine max
  unsure at all n locations
  Clone ID: 701000049H1
ggaatcggccaaggtttcgattcttgactccggcgcctcgatgttctccggcatggaggtggctgcgcggacgactctgccggtgncggggacgtgntgccgtgaagttccggtggggagttaggattccggcggagttcaagggga

SEQ ID NO: 3719 - DNA, 140 bp, Glycine max
  Clone ID: 701000051H1
ctcatcgctacctccgcttggaagcttccctcctccagcgagtctagtggcttgactcagtgaatgtaaaactatagattaattggacttgttccagtgaactgagtcagtgaccgagtcagtgagcctccacacaacat

SEQ ID NO: 3720 - DNA, 125 bp, Glycine max
  unsure at all n locations
  Clone ID: 701000052H1
ctatcctgggttgcagaatgataagcaacgtattcctaaagccgcaagtggttgggcttcttccctcaaaattggtcttccctcacagaagcaaancttcttcttccctttcccttcncaaacaa

SEQ ID NO: 3721 - DNA, 268 bp, Glycine max
  unsure at all n locations
  Clone ID: 701000054H1
ggttacntgtgatcacaacacgaggaaacaatgtttatgggcncaatcagtttcnnngagaagttaattcnaaagttcattctcctngncatgcaaggcaagcctnttnnaatcnacggggatgggcnctaatgtgaggagtnatttgtattgnaaagatgttgcagaggcttttgaagttatccttcacaagggagaggtcgggcatgtttacanatggtactaagnaggaaaggagggttatgatgttgccaaagatatatgcagg

SEQ ID NO: 3722 - DNA, 193 bp, Glycine max
  unsure at all n locations
  Clone ID: 701000056H1
cacagaagntccnactnctcnancctcccccaaagcaacntcgannctacgcgtncctatantcgaccagtcttcccgtcgnccccctcttacacttcttcccaaaccagttacaatggccggtggtgctgtcgtcgccggaggttcccgaggaaaccccctcaagaatggtttcatcactcgacaatacctc

SEQ ID NO: 3723 - DNA, 270 bp, Glycine max
  unsure at all n locations
  Clone ID: 701000057H1
gtttgaagtagtgcttcgcgtctacattcagttcaatggcttcttccatctgtgctctctcgccttccgtccaatcacagctcctaaaaccaccctcgttgctccaatccctctctatcaacgaagcaagtgcgaaatgagcaggaggagttttgcgtttaagggaattgtggcctctggcgtttcggtcgcggcttctactctcacagccgagcagaaccatcttccaaaggttttgaaannttnccgtacaagncggaagngtanntt

SEQ ID NO: 3724 - DNA, 215 bp, Glycine max
  unsure at all n locations
  Clone ID: 701000059H1
gnggcaacaaggaactgccgccgagtcggtaccagtatncgntacgcccaagtactatcgcggccctctgcacccgcaccagccgcctccagcgtccgatccgtcgtcgcgcctcttccagcctggcccattcagcctgccccgcatcgagacagacgtaccagagcaccatagcaggtgatntgctcgccntcacataccaanatatcccnggg

SEQ ID NO: 3725 - DNA, 270 bp, Glycine max
  unsure at all n locations
  Clone ID: 701000060H1
tgcatgtntgttctctcaacgactcctccgcgaaagagtattattcancattttggttgggttgaatcccggggttgaagcgttgccgacatcacggctattctaagagtgtctcgctccctcantcatgtccgatctgtacgacggaggacnggtagttgcgtaactgccgttaacccttcgccgcacggtgggcgtggtgctttgccttctgaaggtggtagcccttcagacttgctcttcctcgctggtggtggttcttctagtttc

SEQ ID NO: 3726 - DNA, 258 bp, Glycine max
  unsure at all n locations
  Clone ID: 701000063H1
gtcagagtctgaaacctgaaacctgaaacgctgaagctgagttggagtcacagttnttgttggtagccatggatgcagtagctacggcgaaaccgcttctgtcactgtcgtttttgcttttgctaccgtcttttcttccgatcgccgtcgcttacagacccggcgacatcgttcccatgagcccgcatgggtcaataccatcctncgcgaaccgtgtggcaggacctcattggccgtcatgccccatcttcgcagtga

SEQ ID NO: 3727 - DNA, 78 bp, Glycine max
  unsure at all n locations
  Clone ID: 701000065H1
gtttttgatgggccagtgtacccaaacgttggagttggattccantctttgagccagaaaaatgannatagcaaaggc

SEQ ID NO: 3728 - DNA, 82 bp, Glycine max
  unsure at all n locations
  Clone ID: 701000066H1
tacatttctanaattcagaagacgtantgccctttcganctcttctcagagccnccntaacattttccatnncaatanttnc

SEQ ID NO: 3729 - DNA, 166 bp, Glycine max
  unsure at all n locations
  Clone ID: 701000067H1
gtatcaccaaactcttccccatttcccgcatcaatgtctctcccacctcggtattagttcgagcctcttcctcatcctctntcgggtctcgcctcgaagacaccatcaagaagacgtagctgagaaccagtcgtcgtttatcccaaaccnggggcacctatnctcc

SEQ ID NO: 3730 - DNA, 93 bp, Glycine max
  unsure at all n locations
  Clone ID: 701000068H1
cacttttcatccttcgatcatacacttagttgcttccaattaagatggttctganaganaagntctgggatgatgttgtggcnggacccnacc

SEQ ID NO: 3731 - DNA, 233 bp, Glycine max
  unsure at all n locations
  Clone ID: 701000069H1
gcagtaatgatcggtgttatacttcatgccgggnatcaccttgcttgtgcattttcctagacttgtaagttcgtctganaaanattataagacgtatttggatggcgtatttggtgatcatagacccagttacggagacctcgttaaaggggttgaaggtgtgacaggnattctgatggtgattttnatggcaatagcatttactcttgcanaaaagggttccggnagaannc

SEQ ID NO: 3732 - DNA, 268 bp, Glycine max
  unsure at all n locations
  Clone ID: 701000072H1
aacactcataacacaaagcacaaagcaaagctcatccttgagttaaaaaatggcagcagcttcttccatggctctctcatccccatccttggctggcaaggccgtgaagctgggcccatcagccccagaagtgggaagggtgagcatgaggaagaccgtcaccaagcaggtctcctcaggaagcccatggtacggcccagaccgagtcaagtnttgggcccattctctggcgagcccccgtcctacctaaccggtgagttcccaggcc

SEQ ID NO: 3733 - DNA, 222 bp, Glycine max
  unsure at all n locations
  Clone ID: 701000073H1
gcaattgaagttgaagtcttgcccttctctcttcaactccaaacacaagacatcatccatccatggctgcctccgtctccactgtcggagctgtcaacagagctcttttgaacctgaatgggtctggacctggggtttcagctcccagttcatccttctttgggagcagcttnaagaaggttattggctcaagggtcccnaacanaaagtttncncgnaanc

SEQ ID NO: 3734 - DNA, 171 bp, Glycine max
  unsure at all n locations
  Clone ID: 701000074H1
cttagctgccaccctcatatgatatttcttgaaaccttgtgttaaaaattgtgtccttttgaacttcaataaaaatttgattttcntttcttagtttcatacccacatacccattgttggattngaactagttttacttgcctcanggcccttcatataagcnggggntgt

SEQ ID NO: 3735 - DNA, 188 bp, Glycine max
  unsure at all n locations
  Clone ID: 701000075H1
atnngaaatatcatctgtaggagatacccaaattacatgntgtggaggaaccacttgctgaaacagtccggcaacaaatcactgncaatagtatttcttcctcaatggaaaagccantgtctattgttgtagaaaacatcagttcttcggaggatctcatcagcagtataagccacaaaagtnataac

SEQ ID NO: 3736 - DNA, 109 bp, Glycine max
  unsure at all n locations
  Clone ID: 701000078H1
ccaaacggtggaatcaagaanttcagatctgctgcttantccanctgcgtcgnanaaccttcctgnntatccatccagattgatagnntcantgncatgcaancatagc

SEQ ID NO: 3737 - DNA, 157 bp, Glycine max
  unsure at all n locations
  Clone ID: 701000079H1
ctcaacttctgctacccactctcttcttccaagtccaaccacgctagntctctacagtcatgggcaaggtcaagatcggaatcaacggatttggaagaattggccgtttggttgccagantcgctctgcaaagagacgatgngganctcgttgccgt

SEQ ID NO: 3738 - DNA, 202 bp, Glycine max
  unsure at all n locations
  Clone ID: 701000080H1
ggnaattgatagatatataanagcttcacttacagacatgattaagaagagagagaaagcaccaaagacaggtgaagctactagggatgacttgttaggtatacttctggagtcaaatcacaaggnaatacaagancacagaaacaatgagaatgttggaatgaatctcaatgangtancggggntncaantcnncccccct

SEQ ID NO: 3739 - DNA, 146 bp, Glycine max
  unsure at all n locations
  Clone ID: 701000081H1
ggcaaaacttcttgcatgcatttatgtcttcacaggnatggctcttgtagggttaattcctagcaaggcngcagattacattgttgaaaagcaggaaatatttctagttagaaccttattcaagggtganaattttggtccangtc

SEQ ID NO: 3740 - DNA, 268 bp, Glycine max
  Clone ID: 701000082H1
atcaagaagaagcaagcccctggagctgctccttcaaaacccaaggttgagaccgaggcagatgctgacagtgagcaaatccttcctgactgagaatctcggttcaacagacattgttttttggtagagttgatgatgtgcaaggttctttatcttccttaaatcttatcactattcttaggagttttgagtcctttattgggatgctgtttttgtgccttctctactgtttgcaagagcaaattgtgtacttgttgatgttaaagac

SEQ ID NO: 3741 - DNA, 143 bp, Glycine max
  unsure at all n locations
  Clone ID: 701000083H1
acgaagtactactacaagggaagaaaaacttagctactaaggaaggatcaaagagaatggctcaagcaatggcatcaatggctggcttgcgtggttcctctcaggctgtgttggaaggtagccttcaggtgagtggcncccnc

SEQ ID NO: 3742 - DNA, 107 bp, Glycine max
  unsure at all n locations
  Clone ID: 701000084H1
acaattganaggggagaaaaanttnccattattggtccaaatggatgtggcaagantacttnactgnnattnattatgggtttggnaaanccaactgggggtgnagt

SEQ ID NO: 3743 - DNA, 71 bp, Glycine max
  unsure at all n locations
  Clone ID: 701000085H1
ggnctcctcctccccctncgcngcctgcactccacaatctccaacctnacaatctancananngacacagg

SEQ ID NO: 3744 - DNA, 268 bp, Glycine max
  unsure at all n locations
  Clone ID: 701000086H1
gtgtttcatcatttgggtttcgcagaagagagagaaacccatttctagagagagaaactcgcagtcgcagacatgtcttccttcgatgccttcgccgacgacttgaacgtcaactcttcttccactcgccagcacganagtgacgaggacaacttctctggctacggcggctactcctccttcaccggaggattctccgccgacggagatgtcgccgtcgatcactccgccgnccgcgtcgccggagatctacggcttcactgattcg

SEQ ID NO: 3745 - DNA, 262 bp, Glycine max
  unsure at all n locations
  Clone ID: 701000087H1
ctccgtttctcactttctctctctntaagttcgttcnaacgcaagngcaacgnaactcaaacgcacttccttccntcgccgcgtttcctattctcctcagatcactcccgctntcccgcaccgntatctcgccgtcgccgtttcaaggaaaaaaggcattaaagaaaagattcccttggntcatcatggcatcaagatcatatgttaatcacnagacttagctggaggnttatgnntcttccacacctnntatnaccnagnc

SEQ ID NO: 3746 - DNA, 268 bp, Glycine max
  unsure at all n locations
  Clone ID: 701000088H1
tttgcagaaanaaaatgaaagagntgctataaaagttgaagtgcctaaattggttttgacttntgggagaaacttaactcnttttacttatgttattctttcataagtatttattgagccaaacaaggccataattgaaggtgttatttagcaacggaggaaatcttacagtaattnggtggaaaggaaagaatagttttagncctatttcnaattttgttggagtaactaagcaatgaaatcaaatttggtctcttttgtcgtagac

SEQ ID NO: 3747 - DNA, 232 bp, Glycine max
  unsure at all n locations
  Clone ID: 701000089H1
gtttcatttacacccttctttcgttgaaattgaaagtcatcagaaccttgcctgtaaacaaattattatttatcattttttctctatgaacttcagattcaataattttccagacacaaaactgttgctctcttcacattccctccctgtcaatttttccctgtctttctttgttcgtgcgaaacttagtgaanttgcctcggggtcgnngntccncnnngttccctttngg

SEQ ID NO: 3748 - DNA, 110 bp, Glycine max
  unsure at all n locations
  Clone ID: 701000090H1
cttctcttgcggctagggttttagcgcanttcttctagatttaagcgaagatgggtaaggaaaaggttcacatncagtattgtggtcattggccatgtccgactctggga

SEQ ID NO: 3749 - DNA, 208 bp, Glycine max
  unsure at all n locations
  Clone ID: 701000091H1
cggtgctgaangacgtgagctgggaggtgaagaagggggagaaggtgggcctggtcggcgtgaacngcgccgggaagacgacgcagatgaggataatcgcgggccttnaggagccggatttcgggaacgtggtgaaggcgaaggcgaacatgaaaatcgcgtttctnaaccagganttcgaggtggcgccgannaggacggtnaggga

SEQ ID NO: 3750 - DNA, 271 bp, Glycine max
  unsure at all n locations
  Clone ID: 701000093H1
ctttctttccattttccttcgttttctctctctttctcagtttctnagtttctcagtcatcaccatcgcagcagcaagatgtggaaccaaccattcggaaaaaccgatttggaaagcggttctcggcctctgtatccgatgatgctcgagagccctgaactgcggtggtcgttcatcagaaaagtgtactccataatcgccatccagttgctcgnaacnatngtcgtcggcgcngtcgtngtnacngtcngccaaaaaagtttnttccccc

SEQ ID NO: 3751 - DNA, 147 bp, Glycine max
  unsure at all n locations
  Clone ID: 701000096H1
ccaaaatatattccttttggcacatttcctaggccacaaattttataacacaccaaattgttcttgtcaggtatccctgaactngctggtagcacaaggcaatgttgtgccaattccaggagccaagacagcagaacaagctgagga

SEQ ID NO: 3752 - DNA, 293 bp, Glycine max
  Clone ID: 701000101H1
gagcgctattgctatcaggattcttagtaacggcgtcgttccactctgggctggtgtcgtcattacagcttttgattgttttatttttctctttcttgagaactacggtgtgaggaaactggaagcgtttttcgctgttctgattggtgtaatggctctctcatttgcctggatgtttggtgaagccaagcccaatggtgttgatgttcttgttggtattttggttcctaaacttagctccagaactatacagcaagctgttggagttgtgggttgcatattatgcctcacaa

SEQ ID NO: 3753 - DNA, 290 bp, Glycine max
  unsure at all n locations
  Clone ID: 701000102H1
gtggctgacgaggaattgatgactatctataccctataccaattacgctccaataactttggtttcttctaatttctcggcgcgattttggaccacagccatctcagtgacagcggtggctncttcctcggcttgctcccggtacctcttgtatatatcccctttgtagaacttaattgtcctagccaccaaaatcagtgaaattaaggcgccaaaaaaggtggctgcagtgataataatgaaggacaatttgaagcaactggacccaacacaagtcaattcggtgtcaa

SEQ ID NO: 3754 - DNA, 285 bp, Glycine max
  unsure at all n locations
  Clone ID: 701000105H1
cttatctcttcagtaaggtcgtgnatgtncctgttggagtacntgaggacagacagntgctcactgggatgcatactgtggctgacattttctgtgtgggctgtggatcaattgtgggttggagatatgagactgctcatgaaaaaagccagaagtacaaggaaggaaaatctgtacttgaacggtacaaggtgtcaggtcctgatggcnnnnnnnnnnnnnnnnnntgggtcagccatgaagcacatgttggtggaagtgatgcagatgatgcttagtcatctg

SEQ ID NO: 3755 - DNA, 289 bp, Glycine max
  unsure at all n locations
  Clone ID: 701000106H1
gccaagcatttattggtcatattgggttcaaggggacttgctgcttnangttcngtngttaatgttctcatacgctttgccaatggaattctgttaggaatggcgagtggnttgtcaacactttgcggacaagcatacggtgcaaaagaatatgtcatgatgggagtgcatcttcaaagatcatggatagttatgtccataacttcactctttcttcttccggtgttcatcttcacgaaggcccgattttgatgctcttaggcccaagatgagaatatagcagaagtgg

SEQ ID NO: 3756 - DNA, 285 bp, Glycine max
  unsure at all n locations
  Clone ID: 701000107H1
ctcagtctctgtntttgcggctgaggantccgaacgagtgaccttcntcgtttctcgcaaagtttaagtaatcatgggtnaggnaaaggttcacatcaacattgtcgtcattggacatgtcgactctgggaantcaactaccactggtcacttgatctacaagcttggaggtattgacaagcgtgtgattgacaggttcgagaaggaggctgccgagatgaacaagaggtcattcaagtatgcctgggtgctcgacaagctcaaagctgagcgtgaaagaggatt

SEQ ID NO: 3757 - DNA, 238 bp, Glycine max
  unsure at all n locations
  Clone ID: 701000109H1
gcatgctcttcttgctttcacccctggtgtgaagcagatgatctgctgctgtaacaagatggatgccactaccccgaagtactctaaggctaggtatgatgaaatngtgaaggaagtctcttcctacttgaagaaggttggttacaacctagacaagattccatttgtgcccatctctggtttcgagggtgacaacatgattganaggtccaccaccttgactggtacaagggcccac

SEQ ID NO: 3758 - DNA, 148 bp, Glycine max
  unsure at all n locations
  Clone ID: 701000110H1
gnaattattanactaactagtgatttggaagggaaaattgctggcataggttttcccgccaactaccaggttctttgttgtatactctaaatgctataacattctcttcctaaattgattctggacacggaaatgcttatcccccncg

SEQ ID NO: 3759 - DNA, 284 bp, Glycine max
  unsure at all n locations
  Clone ID: 701000111H1
aaaaaaagaaattaaaaaaatgtttttaaaaattttgtcaattttcttggcaaagnnnnnnnnnnnnnnnnnttttgattgggatatcctgccaataaaaattgtccatactttggtccctcagaattgatttgccatgggatnttttagtggggatgtaaacaaaattaaatgatagaactagaaactttcttaatgtaagagaaaattagaaaactactccatngtaaagtttcctttttcaattttgancgaatggtggagtcaattgtatagatttcaca

SEQ ID NO: 3760 - DNA, 283 bp, Glycine max
  unsure at all n locations
  Clone ID: 701000112H1
ctctaattaggtggcaagataagtgtctaaccttagtaacatngccacatattgtgttcattttggaattgtgccactaaaattctattcaattcatctatggctgcctcttcttatgctatgcaatcaatcctggcaaaccctttgatccgcatttccagcgggtctagggtgaaccaatttggcgttcctgctttgcacatgagaaggaatgttggcctgagagttaggtccatggctaaggaagaacaaccaagtgagcctgcaaccccagttacaccgc

SEQ ID NO: 3761 - DNA, 283 bp, Glycine max
  unsure at all n locations
  Clone ID: 701000114H1
agtttctccgtcttcctttccccgtttttcttctctctctcaatctctttcatgtgagggtagaaccacaacaaancacaaaccacacactctcctaactcgaggttatttttttctttccccaaagaggcatgagttgcaacgggtgccgcgtccttcgaaagggttgcagcgagtcttgtattctgcggccgtgtctacagtggatcgatacgcccgaagcacaaggccatgccactgtcttcgttggccaaattcttcggtcgtgcggacttcatgtctt

SEQ ID NO: 3762 - DNA, 281 bp, Glycine max
  unsure at all n locations
  Clone ID: 701000116H1
gcctagggaagattctgggaccaagaggactgatgccaaacccaaaagctggcactgtaacacccaatattccccaggctatagcagaattcaagcagggaaaagttgaatacagggcagacaaaactggaatcgtgcacttaccttttggaaaagctgactttccagaagaggatcttcttgngncattgcttgctgcagtgaaatcagtagaggcaaacaaaccttnaggtgnaagtgttatggaaaangncnaattngcnnacnaangggactttaat

SEQ ID NO: 3763 - DNA, 293 bp, Glycine max
  unsure at all n locations
  Clone ID: 701000117H1
gtcgattaccctagtttcaaactcgtcatcgtcggtgacggtggtacaggaaagacaacgttcgtnaangnnacatcttaccggtgaatttgagaagaaatacgaaccgaccattggagtggaggttcacccattggatttcttcacaaactgtggaaagattcgcttctactgttgggatactgccggacaagagaagtttggtggcctcagggatggatattatatccatgggcaatgcgccattatcatgtttgatgttactgcccgactaacttacaaaaatgtcccta

SEQ ID NO: 3764 - DNA, 287 bp, Glycine max
  unsure at all n locations
  Clone ID: 701000118H1
cagcaacggaggcagtcccttactttgaacagtgctgccctgcagttgggtcctgcagtcagccaaatgatgccagttgtggaggcaactcctttttactcgatagctagaaatgcatcaggagatgtgtggaagatgatgttggatgcngttagatcaactctacaggaaaccgagcaggaaatactgaattcattaactaaatttgttgatcagttaccgtcagtaatgaatgaggttacacaaggagtatcagagttcaagccaacaccatctgaaaaccgtga

SEQ ID NO: 3765 - DNA, 286 bp, Glycine max
  unsure at all n locations
  Clone ID: 701000119H1
caaganagaagcataggggaaaatacatcgataganagaaattgaagggtgctacgtccttctattgtattaatgattganattcgtgtgggaattgtcttgttggtgtggtagagataataagagaggatcatagtagtgctaganattgaagtgtgtcnatagannnnnnnnnnnnnnnnnnnnnnnnnnnnnnnngaagggtgcagttgaagaggatcgagaacaagatcaataggcaatgcacgttctcaaagagaaggtctggtttgctcaagaaagcaca

SEQ ID NO: 3766 - DNA, 284 bp, Glycine max
  unsure at all n locations
  Clone ID: 701000121H1
ctcttcttctcttgcggctagggttttancgcagtttcttctagatttaaggaagatgggtaaggaaaaggttcacatctccattgtggtcattggccatgtcgactcncggaaatccactaccactggtcacctgatttacaagcttggaggcattgacaagcgtgttattgagaggtttgagaaggaagctgctgagatgaacaagaggtctttcaagtatgcctgggtgctggacaaacttaaggctgagcgtgaaagaggaatcaccattgatattgctt

SEQ ID NO: 3767 - DNA, 285 bp, Glycine max
  Clone ID: 701000123H1
gttggaatgcccttttagtctcggaatccatcgatccaaaaccctaattgaagttgtcttgtctgcgttctcaaacgttgttgcttgctgctgctgcatagttgatcgaaagcatgacaacatcattgtccagcatccttttcaagggaattgcagctcgttctttcaccgcccctctaactaggtcctgttatcatggaatgagatactttgctactgtatcaaatgatcctgacacacatgatgacttcaagccagctaataaacttgagaattccaacattt

SEQ ID NO: 3768 - DNA, 102 bp, Glycine max
  unsure at all n locations
  Clone ID: 701000124H1
tccancagcnatggcagtntcttcagcaacagcttcctcnaaactcatactantcgcncatgcatcatcatgcngcttcccttaattccacanaananaggg

SEQ ID NO: 3769 - DNA, 148 bp, Glycine max
  unsure at all n locations
  Clone ID: 701000125H1
tgagactgngtctgcccataccataattnacctcatagtgtcgacatggtttgcgagnncagagttgttgattgaaaaagtgtgctcgatctatgaacaaatctcaagcctcgagagtcctcaaacctngnaagaatgtcgacatgct

SEQ ID NO: 3770 - DNA, 282 bp, Glycine max
  unsure at all n locations
  Clone ID: 701000129H1
atccgaacctattcgtttccgtccaccgcaaacacgccatcaacgacctcgccatccacccctccggcgaggtagccctcaccatctcacaagacaagtgtttcgccgttgttgatctcatgcatggcctcgtcgtggactgccggagcttctgccgcccgctcggcaannaagagagtttgagtttggtgaagttcaatgctgccggcgacaggtttttcgtcgccnccactggagaaggtctccgtctacgtcaccaagactgagcggtttttgttagaa

SEQ ID NO: 3771 - DNA, 127 bp, Glycine max
  unsure at all n locations
  Clone ID: 701000132H1
ggcagaacanaataaaccttactccaccatcgttncannctnccnggtagccgactggaaggctgctttgagtgccagggatctggagatgganatnganctgctcggtctagaaagccctgctcgc

SEQ ID NO: 3772 - DNA, 292 bp, Glycine max
  Clone ID: 701000133H1
tatataccaatactagctagtagctagagagtagagaacatggagggcaaaggtttcacggaagagtgccgaagctctggtggtgaaatcatggaacgaaatgaagaagaattctcaagaactcggtcttaaatttttcaagaaaatattggagattgctccagcagctcagcaattgttctcattcttgaaggattcaactgttcctttggaggaaaaccccaagctacaagccccatgccatggctgtctttgtcatggtaacaaagttggcatattggagaccataaaa

SEQ ID NO: 3773 - DNA, 289 bp, Glycine max
  unsure at all n locations
  Clone ID: 701000134H1
gctgttaanatgtctcgcacgtgcnccacagtgcggcaacaacggccacanctcacggacatgcaccgacnngtggcgccgccgggttctccgagggagaacggcatcatgctgttcggcgtaagagtcatgacggaagctaactcctccttcaggaagagcgccagcatgaacaacctctcacagtacgacgcggagttcaacgccgccgacgccggctacgcctccgacgacgtcgttcacgcctccggccgcacgcgcgaggcaagcgaggtgttccttggacgga

SEQ ID NO: 3774 - DNA, 285 bp, Glycine max
  unsure at all n locations
  Clone ID: 701000138H1
ttgcaagannattaacccagntgaagctgttgcttatggtgctgcagtnccaggctgcgnttcttcagtggcgagggtaatgagaaagtgcagganacttcttttgttggatgttactcctctatccactggtttggagactgcaggaggagtcatgactgtgttgattcccagaaacacaancattcccaccaagaaggagcggntgttctcaacctantctgacaaccagnccggtgtgttgattcaggtctatgaaggtgaacgaangaggactcgtgacaa

SEQ ID NO: 3775 - DNA, 281 bp, Glycine max
  unsure at all n locations
  Clone ID: 701000139H1
ttagcacnggacttaaacagtacaacttggataacaacatggacggtttttacattgctcctgcttttatggacaagcttgttgttcacatcagcaagaacttcatgaccctgcccaacatcaaggttcctnncattcttggtatctggggaggcaaaggtcaaggaaaatccttccaatgcgagcttgtctttgccaagatgnnnatcaaccctatcatgatgagtnctggagagttggaaagtggaaatgcaggagagccagcaaaactgatcagacag

SEQ ID NO: 3776 - DNA, 145 bp, Glycine max
  unsure at all n locations
  Clone ID: 701000140H1
cagggattgaagtgnaacctgggcaaaccgtgtccttatcacgctgacaatgtgcgagggaagcttcatgttactcaggctactctaggcattggctcatcatcggagaaaagcattcttcagtgctcttctggacacaaaagtc

SEQ ID NO: 3777 - DNA, 239 bp, Glycine max
  unsure at all n locations
  Clone ID: 701000141H1
atcgtgtttaatgcctttgcttctccctctttctgtgtgtatgtaaaatctttgtttttatcagaggtggtgcagaaagttgtgtctcagatccctatatacaccgaaaacgatanaacggngtnctgtgtanagtgtncncgngcttctctctcnctctnctctccnnaanancnancatttnncatattactactacaccnagctattaccgaatagagtggtcctcaacctcaacc

SEQ ID NO: 3778 - DNA, 282 bp, Glycine max
  unsure at all n locations
  Clone ID: 701000144H1
cccaaattcattttaatcctaattctgcacttcttgatcatnccgattttnnctcctcaagatgcagatattcgtaaaaactttgaccggcaagaccatcacccttgaggtggaatcctccgacaccattgacaacgtaaaagctaagattcaagacaaggaagggatcccacctgaccagcagagacttatctttgcgggtaaacaacttgaggatggtcgcacccttgccgattacaacatccaaaaggaatcaaccctccatctcgtgcttcgcctcag

SEQ ID NO: 3779 - DNA, 283 bp, Glycine max
  unsure at all n locations
  Clone ID: 701000147H1
aaaaccttgatcaagaattgaagcattaatcttcaaccatggccacacccttgggcctaccaagagcaccttccggcggcacccagttggctgaacaaaggtgacaacgcatggcagttaacagcagccaccctcgttggtcttcaaagcatgccgggtctcgtgatcctctacgcaagcatagtgaagaagannnggcactgtaattcncagtttcatggctctctatgcctttgcagcagttctaatatgttgggtgcttgtgtgttaccgcatggccttt

SEQ ID NO: 3780 - DNA, 286 bp, Glycine max
  unsure at all n locations
  Clone ID: 701000149H1
cgaagatgagcttgttgaatgaggagagaaaaccgcacgctgtggttactccatatccagttcaaggacatgtgaaccctttgtttaaactagcgaactgcttcatctcagangctctcacataacctttgttcacactgagtacaactacaagcgtttgctcaagtcaaggggtcctaatgcccttgatggcctaccagattttagatttgagagcatcccagatggtcttccgccattggatgatgataatgttactcagcacgttccctcnctcnntgactct

SEQ ID NO: 3781 - DNA, 281 bp, Glycine max
  Clone ID: 701000150H1
ctgaaggtgaacagttttacagcaccagttggagcacgatccagcactacagtgtgtgcagttgctgagcctgataggcctctgtggttcccaggcagcacccctcctccatggctagatggcagtttgccaggagattttggctttgatcccctaggtcttggatctgatcctgagagcctgagatggaatgtccaagcagagcttgtgcactgcagatgggccatgttgggagctgctggcatttcatcccagaatcctcacaaagattggtatcctga

SEQ ID NO: 3782 - DNA, 284 bp, Glycine max
  unsure at all n locations
  Clone ID: 701000152H1
gncactgctncaatacatcttncaatcnccgagatcttgaattcntcagtntcaagacaataattgaagnntcaaggccatnagttccaacaagaaggaaaatngggttcactagtacaagtgaaaaagaagaganagtcatggcggatgcagaaagagcaaaggagctcaaagcttttgatgacacaaaacttggtgtcaaaggacttgttgatgcaggaattaccaagatcccncgcatanctatcatccctctgataatttcaagagggtctcagaatttg

SEQ ID NO: 3783 - DNA, 282 bp, Glycine max
  Clone ID: 701000155H1
cttgctctagccattgaagttccaaaaataactagcgctcatcttgattggagtttatgcattaatttcattttctagtgctgggtttgtatatgtaagatctctctttactgctcaccttgggttaaaagcttctacagccttcttcaacagtttcacaactgctatcttcaatgctcctatgttgttctttgactcaacccctgtgggaaggattttaacccgagcttcatcagatttaagtattttggactttgatataccttattccatcacctttgt

SEQ ID NO: 3784 - DNA, 280 bp, Glycine max
  unsure at all n locations
  Clone ID: 701000157H1
atcccgtgttctggtcaacttttctcttttctcccttctcccccatttgttcattctccgacaccgcacagcgaccaaatccaccattcattcttttttccctttttgcaacagcgcaatggcacgaagatccctccctctcctaaagcactcctcatctaggggcggntcccggcccgatcggtnacgtanatgcnacggncgggcnacgggtcctcctcggctgtgncgcgnnccggggnaaggggatcnggcccnantgacnggggctntnagaaaa

SEQ ID NO: 3785 - DNA, 278 bp, Glycine max
  unsure at all n locations
  Clone ID: 701000158H1
ggcacnnnccncatctattgangagcatgantgcctgannaccgctaaacacaaaganacccaattncagttatnctatatatgncttgnaagtacagtanagtttcctgattctcaacttagagaaattgctaagggtcttgaggcttcagggcaacaattcatntgggtcgtaagnnnnagngaannagnacgcgacananagggttangganggattgnnaaaagatggaaggcaagggataatcataacagggtgggcgcctcaagtgttgatt

SEQ ID NO: 3786 - DNA, 278 bp, Glycine max
  unsure at all n locations
  Clone ID: 701000159H1
tagnatcaaatgggtancatcttttgtntgattttntacatctngcataaggtggaccttaaaactggcttgcaacaacctatagcttngattnntgaggcagggtgctgttttttccccgaaatctatgctgcttctgatgaaaaaccttataatttnagcaaacaggaatgtggaagaagtccggactcatatgcntctaacgaaataaaattacatttngnagttganattaaatggtgtggatcaatccaggttgagtgagtgcagtggggagt

SEQ ID NO: 3787 - DNA, 164 bp, Glycine max
  unsure at all n locations
  Clone ID: 701000162H1
ctanantctgctcttnnacnccgtcgttttcaaactcttttntnccccttcgcttctctgtctttgtaancgaaaggggggnccaatataattaacaccgatttcgcnaccaattctncttctgcgttgaattgggacaacgagaaattnaancnnatttntgg

SEQ ID NO: 3788 - DNA, 204 bp, Glycine max
  unsure at all n locations
  Clone ID: 701000164H1
ggctntcgcggtgcattgtngcgctngtgtcgaccctaatctcncactcgagcgccaagaagaagcganacaacttctcacgcgctgtctcaatcttggaatctctgctctaaattctaatcttcccgccatagatgtcgtccaacttgtngtgagggattngaaaagggntcccntgttnnaatgngggccgnnaatnccccc

SEQ ID NO: 3789 - DNA, 280 bp, Glycine max
  unsure at all n locations
  Clone ID: 701000166H1
cgatggtataatggcacattatgatgagatatttaggctgaaggccgntgcanctaangctgatgncttccatttgttgtctngaatgtggaagacaccagcagagaggtgttttctatggcttggtggttttcggtcatctgaantcctcaagctcctggnaaatcanttggaacctctgacagagcaacagttaatgggtcattaccaattgcagnaatcttcccaacaggccgaagatgcntgtctcagggcatggaagcattgnaacagtcccttc

SEQ ID NO: 3790 - DNA, 274 bp, Glycine max
  unsure at all n locations
  Clone ID: 701000167H1
agatatatcagcatcattggctcgaggaagcatgagttcagatgggcaaaatttcagagttcctggaagttatataaagggaattgcctgcggaggtcgacacagtgcagtaatcacagatgctggagctgtgcttacgtttggttggggactttatggacaggatcaacatgtaggtaaagtagaatatgatgagcaaaagcaatgtagatgttganctgaagttnagcctaacaagggataatctgttctgttanttacaatatttatcttc

SEQ ID NO: 3791 - DNA, 278 bp, Glycine max
  Clone ID: 701000171H1
gaagcggttatacttatggcaaacatatagtttctcgtgtggagaagctcataaccactggagaaaagcgcatagggttgttggtctaattcatacatcctcaggcatccaatgaaggtcttggagacaagaagtcctcctactgtcccaacttttccttttgtacagctaacatgaatgtttatatcaccaagtttcccctgcaagctttactttatataaagcattggagataaatgcggtcagcttggccattagaataaatacttttcttactt

SEQ ID NO: 3792 - DNA, 117 bp, Glycine max
  Clone ID: 701000173H1
gctggtggagatgggtttagtggcaccttactctgctggaacatgtcttccttcccttcaacgccttccaaccctgcaagcccaaaaatggaacaacttctcagcacctcttagttg

SEQ ID NO: 3793 - DNA, 162 bp, Glycine max
  unsure at all n locations
  Clone ID: 701000174H1
tctcatcctttcttttagttttatttttatttttttatcttgggtaaaaaaaatcatgggtgttttcacttctgaaagcgaacacgtttcccccgtctctgctgcaaaattatacaaagctattgtcctagatgccagcaacgtcttcccaaaagnattgcc

SEQ ID NO: 3794 - DNA, 142 bp, Glycine max
  unsure at all n locations
  Clone ID: 701000178H1
catttttgngacaaagagtntntcagagttgcaatgaacattgatcctcgagtgncaaaatgatncnnnantcaagangggcgaattgagaaatgggcactgaggagggcctttgatgatgaagaacatccttatctgccaa

SEQ ID NO: 3795 - DNA, 276 bp, Glycine max
  unsure at all n locations
  Clone ID: 701000182H1
attgcttcagcactttgcttggttaataaaattgaagaggctgggagtaataaggaaaaagatgtagattttctttcttccatagaggttctgatcnttgatcatgcagatgtaatatcaatgcagaattggtctcatgtgcatacagttatngaccncttaaacngcttaccatctaagnagcttggaacagatgtaatgcgcattagaccatggtatcttgatgatcatgccagattttacaggcaaacaataatacngggtttttncaacncc

SEQ ID NO: 3796 - DNA, 277 bp, Glycine max
  unsure at all n locations
  Clone ID: 701000184H1
gtgcattattcaatggccaccacagcagctctatccggaaccatggtgagcacctccttcatgnggaagcaacctatgacgaccaagagcctaaagacattccccaacgctctttttggtctgaaaggtnnacgaggtggtcgtgtaacttgcatggcctcgtacaaggtgaagctcataaccccagaaggagaagtggagtttgaatgcccagatgatgttttcatgttgacaaggctgaggaagaaggcattgaacttccctactcgtgcagggc

SEQ ID NO: 3797 - DNA, 112 bp, Glycine max
  unsure at all n locations
  Clone ID: 701000185H1
cttttcgcctcacaccatgaaaccccttctccgcttcggaatcgcttcatcctcctcctccattcctcctcgcttctcatatccctaacccaaagcaanntccgattggang

SEQ ID NO: 3798 - DNA, 279 bp, Glycine max
  unsure at all n locations
  Clone ID: 701000187H1
cccatactccatggaatggactggcttggccaatagattactgagcaagggcaacgatattctgtgttgcgattatgctagttttgactggtttgattaccaagcaagttnatgagcaagatggcaganatgataaacagtctttgtggtggtgatgaaaaattgatgcgtganaggacacacctgctgttggcttgttgttcaaggatggcaatttgtaaganagatgtttggagagttgaatgtggaatcccttctggntttccgctcacagttatt

SEQ ID NO: 3799 - DNA, 279 bp, Glycine max
  unsure at all n locations
  Clone ID: 701000188H1
ctcagagacagaagctgctcttgctgccactccctctgatggtcncaccgtatttgacaagatcatcaataaggaaattccttctactgtggtctatgaggatgataaggtccttgcctttagggacatagatccacaagctcctacccatattctaatcattcctaaagttagggatgggttaactggtctgtccaaggctgaggagaggcactgtgagattctaggtcgacttttgtgcactgctaagctggttgcaaagcaagaaggtcttgatga

SEQ ID NO: 3800 - DNA, 273 bp, Glycine max
  unsure at all n locations
  Clone ID: 701000192H1
caagtctgtggttatctacctagctattgttcttgcaagntatgttcgttgtatcaattgctgatagtttgcagctagtgaaatatcaaccaggcttaaaatatcaaaagcaaaagtaatatttactcaggatcttattatgcgtggtgacaaaagtatccccctttacagtagagttgtggatgcacagtcacctatggcagtagttatccctaccaaaggatctgaatttagcatgaaactgcgtaatggtgacgtctcttggcagatttt

SEQ ID NO: 3801 - DNA, 185 bp, Glycine max
  unsure at all n locations
  Clone ID: 701000195H1
tctccttgttgtagtcctttatatataattgtcttaggatttgnctggataaataaatttcttcatgaacaaagaggagaaaacaaggtaaaatgtgttctaaacctctacttaattatgctatggtgcagtatatgttgagtagcttaaaagctgctgctgaagctcacggtaagcctgatggg

SEQ ID NO: 3802 - DNA, 285 bp, Glycine max
  unsure at all n locations
  Clone ID: 701000201H1
gtagttcttcatcatagtcttanacattaaaccttagcaaaactcaacaatgctagacatcaaaggctacctcgtactcttcttcctatggttcatatcaaccattctnatacgttccatcttccaaganaccacagngtctaanactcccacngggtcttcnaatttnaataacccttgctgggaaacgcgcnnatatctcggttcactgttccaccaagcattgtacaagctatcactgcgctatggaccttgatccagtnatgatcggttcgaagcagtggt

SEQ ID NO: 3803 - DNA, 280 bp, Glycine max
  unsure at all n locations
  Clone ID: 701000202H1
caaagatagccattttgaatgcaaactacatggcaaaacgattggagaattattatcccgttcttttccgtggagtcaatggaacagttgcncatgaattcatcatgacctgagaggcttaagaatactgctggaattgagcctgaagatgttgcaaagcgcctcatggactacggttttcatgcaccaacaatgtcatggcctgtgcctggcacactcatgattgagccaactganagtgaaagcnaggctgaactagacaggttctgtnatgctcttc

SEQ ID NO: 3804 - DNA, 282 bp, Glycine max
  Clone ID: 701000203H1
ctataacaagttttatgaagccttctctaagaacctgaaacttggtattcatgaggattctcagaacaagacaaagctagctgaattgctcaggtatcactccactaagagtggtgatgagatgaccagcctcaaggactatgttaccaggatgaaggaaggacagaatgacatctactacattactggtgaaagcaagaaagctgtcgagaattcccccttccttgaaaagcttaagaagaagggatacgaggttctctacatggttgatgctattgatga

SEQ ID NO: 3805 - DNA, 275 bp, Glycine max
  unsure at all n locations
  Clone ID: 701000204H1
gaactttagcagagtcactagctactganaattcaactctgactgataattataatcaacagaggagtgtcgtcgaccaattgaactcagacatggagaatttacaagaagatatcaaagccccgactggttgagtttgaggctatcaagagtgaatatacaaatgcacaactagaatgtaatgcagctgatgagcgtgccagttattggcatcggaggtnattggttagaggagaggnnctgaganaagttcantgagcnaaagctcgagnagc

SEQ ID NO: 3806 - DNA, 276 bp, Glycine max
  unsure at all n locations
  Clone ID: 701000206H1
ggctgaggattccgaacgngtgaccttcttcgtttctcgcaaagtttaagtaatcatgggtaaggaaaaggttcacatcaacattgtcgtcattggacatgtcgactctgggaagtcaactaccactggtcacttgatctacaagcttggaggtattgacaagcgtgtgattgagnaggttcgagaaggaggctgccgagatgaacaagaggtcattcaagtatgcctgggtgtcgacaagcncaaagtgagcgtgaaagaggattaccatgatat

SEQ ID NO: 3807 - DNA, 275 bp, Glycine max
  unsure at all n locations
  Clone ID: 701000209H1
ccctagcttggnttgctccaatggaggatacccaaganattgaggagcaaggacatgaagaagtgatttcagacaaaacattcaagangcagcaggaaactcttgatgaaattctttcacgacacaggaaagagatattgcagctgcagananaggaatngagatgaaaaaggctgcagctagaggtagccaaggtgagcagaaagcnagnngagcagntggngnagaagttctcaacttccgctagccttagggaaaccagcccaagngtggtg

SEQ ID NO: 3808 - DNA, 279 bp, Glycine max
  unsure at all n locations
  Clone ID: 701000210H1
gnagaattgttcctaggttccaggagttatctccagaaaagttgggaaaggctggtatggttcgagaaaagtcctttggtacaacaaaagaccgaatggtgtacattgaacattgtgcaattcaagggctgtaaccatattcattcgtggaggtaacanaatgatcatagaggagacaaagcgcagcttcnacgatgccttgtgcgtggtaggntcttatccgcaacanttcnatgtatntggtggtggttcaactgaagattcttggcccaatagccg

SEQ ID NO: 3809 - DNA, 278 bp, Glycine max
  Clone ID: 701000211H1
ggccttccgcgcgagtgctctctcgaccagagctcccgtcaacaagcgattcttcactccttcggcatacaacatgaccatcaaatcgtacttcgacgtcttcgtgggagggccccgaggtccaggtggacaagtcgggcaatgtcacctcccagggcgcaccaaagactcaatccggtcgcatcaattcgagctgtttgacgacgtcgtgcccaagacagtagagaattccgcgccctctccacggagagaagggctttggctatgccggctccaat

SEQ ID NO: 3810 - DNA, 279 bp, Glycine max
  unsure at all n locations
  Clone ID: 701000212H1
tgnnnacttccaaataggggaggaagtgaagatgaatatgacaatagaagacgcattcagaaaatcaatagagactgtagttgnttggattgccaataaagtagacatgaacaaaacttatgtcctttttcgaattattcccctgtccatttcaggggtggtaactggaatactggtggtggttgtcacttggaaacattacctgatttaggctcctgccaccagtatctgacatccatntcagaatgtcgttgatatctgtcagaaggcngaataaat

SEQ ID NO: 3811 - DNA, 281 bp, Glycine max
  unsure at all n locations
  Clone ID: 701000213H1
atctaagtnagatacacagtagttaggtagcaagcataagtntctaatnttagnaacatatctgctacatatcgtgtgcattttggaattgtgccactanaattctattcatctatgggctgcctcatcttatgctatgcaatcaatcttgcaaaccctatgatccgcatttccagcgggtctagggagaaccattttggtgttcctgcttatcacatgagaaggaatgttggcctgagagttaggtccatggctgaggaagagcaaccaagtcagcctgc

SEQ ID NO: 3812 - DNA, 269 bp, Glycine max
  unsure at all n locations
  Clone ID: 701000214H1
gcattggtggctagctaagcnaantannaaccanactcttcagcagtttgttttngcttagttcttcttctgnttttgcnttctccaccaccacaaccaccatgtattctgccactgcctccaacactttcttccttctctctagtttccttctcttctgtctcctctcagctccttcctgtgtttccatgttctctggtattgagacaggagatttagaaaaaagagatgatttgtttccacagatttaagantnaangcagttgcaa

SEQ ID NO: 3813 - DNA, 279 bp, Glycine max
  unsure at all n locations
  Clone ID: 701000215H1
gtcgagaagacaaaagaagcgatcaaagtcctcaagcagatcggagcattcccggacgccgaaaaggctaaagacagccgcagcattcgtcccggcaagggaaaaatgcgtaaccgccgctacatctctcgccggggaccacttgtggtgtacggaaccgaagtgcgaaggccgttaaggcttccgtaacgtccccggcgtcgaggtcgccaacgtcgagaggctgaaccttctgaagctngcccccggtgggnactcgggaggtttgtnatttggacc

SEQ ID NO: 3814 - DNA, 253 bp, Glycine max
  unsure at all n locations
  Clone ID: 701000216H1
aaccataatagtcatgggtttgaaggaggattttgagcagtatnctcgagaaagcanngactttgnccaccgactcaatcaaacgaagacttgcttatctttatggattgtacaaacaggccaccgttggacctgtcaacaccagccgtcctggaancttcaacatgagggacagagctaaatgggatgcatggnaggctgttgaagggaaatccaaggacgaagcaatgggtgattacatcattancnncga

SEQ ID NO: 3815 - DNA, 281 bp, Glycine max
  unsure at all n locations
  Clone ID: 701000218H1
gacggaaatgcggcagagagtgagggagttcgaggagaggagggagcttcgagaagaaggccgaggagttgcagantcgcgttggagaggaaggcgaggaggaagaaaccgaggaagaaaagacgatgagagtcaggaaagagctcgaaaaggtagctaaggaacaggcagagaggagggccactgctcagttgatgtttgatttgggtcagaaggcttatgggaagggatcctatggacgtgccattgagtttcttgaagctgcattatatcatacccgg

SEQ ID NO: 3816 - DNA, 280 bp, Glycine max
  unsure at all n locations
  Clone ID: 701000219H1
gacccagttcagagaatgctatttgtagtaaggggnccaccttcaaagcagccaagtcctaagggatggtgtgaagagttgttgcatgttaggtccaggaaacttcagtggggacgaactcctctcatggtgtttaaggagacccttcatagaacgccttccaccatcttcatccacactcatcacgttggaaaccaccgaggcttttggccttgaagccgaggatgtgaagtatgtgacacaacattttaggtacacatttgttaaggagaaggtgaag

SEQ ID NO: 3817 - DNA, 283 bp, Glycine max
  unsure at all n locations
  Clone ID: 701000220H1
accgacctaacccaagacgagagaatagaggaagcttggggtttgantcgaattcgaatcgaagcgattcatcgattcgattcgatggctcttgtaggagttgaactgaagcatgcggcggagggcgtaccggaggcgaattgtccgccaagcccaccaagcagggcgagggctcngccactattattctctcaacatccacgagcatcagttccttnttggcnaaaagactcattaactcaaacggtttngaggttcaaangaaaggacctcnatcntaggg

SEQ ID NO: 3818 - DNA, 275 bp, Glycine max
  unsure at all n locations
  Clone ID: 701000221H1
ccgagctcaaagaaaaattcaagcgcatgtgtgataagtcgatgatnccnaagcgatacatgtacttaaacgaagagatcctgaaagagaattccgagtgtttgtgcttacatggcaccttcgttggatgcaaggcaagacatggtggttgtggaggtacnaaagttgggaaaagaggcngcaataaaggcaatcanggaatgngtcaaccnagttccaggattaccanctcnnctttgccaccanantggtgtcnacngcctgggnggnttatc

SEQ ID NO: 3819 - DNA, 277 bp, Glycine max
  unsure at all n locations
  Clone ID: 701000222H1
ctatcttgtgagtgctggccctgcaatgtcacctagcattccaccattgcatccaaaccttgtgaagccattgattcctgaatctgatgctgtggtgaagggtgcaagagagactctaagattgctacttagtggttcaagccagggtaaccaacagatgatgagggacactctgcctgcaattttaactaatcaagangaaantnaaacaatatccnnntggtggaagtcgtggtctttacatggaaccagagatattaatgctattgcaaacagc

SEQ ID NO: 3820 - DNA, 275 bp, Glycine max
  unsure at all n locations
  Clone ID: 701000224H1
agcaccttagtancttgaatcattatcattcgggtaatgganacatcactagtgtttactgtgaggaggagtgatngnagagctgatanntcccggcgaagcnantccctcgtgaagtgaaggtaatctcagacantagatgacctagtagggttacgttnncaaatnccnggtnataaggtctatnggcacnaaccnntcnatggcaggnnaggacnctgtggnnangnnagnaaaggtgntgnaaaacgttgnntttaacatctttaacgtag

SEQ ID NO: 3821 - DNA, 280 bp, Glycine max
  unsure at all n locations
  Clone ID: 701000225H1
acaagtagttgagaactaagaagaaggaaatggcttcctcaatgatctcctccccagctgttaccaccgtcaaccgtggcggtgccggcatggttgctccattcaccggcctcaaatccatggctggcttccccacgaggaagaccaacaatgacattactccattgctagcaacggtggaagagtacaatgcatgcaggactggccacaattggccacgaagagttcgagaatcttncncaattgccnnaacncggatgangccanttggnaaaggagc

SEQ ID NO: 3822 - DNA, 283 bp, Glycine max
  unsure at all n locations
  Clone ID: 701000227H1
cccaaacngncaaccgaaggtctcaacattgctgnacgatgtcacacagctcataggnncaaacgccgatggtttacntcaancaatatcgtgaagggttctgtggccaatattgctgcgaacttgagattatggagccctgtcgtagtgtcaaggacaggattggttttagtatgataaatgatgctgagcagagangagctataacacctgggaagagtatattggtggaacctactagtgggaannnnggaattggtctggcttataacagcttcaanng

SEQ ID NO: 3823 - DNA, 282 bp, Glycine max
  unsure at all n locations
  Clone ID: 701000229H1
gcttcgtgcanatataaggtgtacattgaaggttctgcttggtccgtgagtgaaaaatacattctggcatgtgactctcccaccctacttgtaaaacccccattactatgattttttcacaagaggactaattccggtgcaccactattggcccataaaggaagatgacaagtgcaggtccattaagtttgctgtggattggggcaatagtcacaaacaaagggtaatcttgaagttttgcttattcattaaggctagaatatagtcttaccaagttaatcc

SEQ ID NO: 3824 - DNA, 279 bp, Glycine max
  unsure at all n locations
  Clone ID: 701000231H1
atttaaaggagcaccctggaatcagcaaaagcgaaaagaaaagaatatgcaggttgatgaactgcaggaagttgtcagcagaggcttgcatgcatgctgtgcagaacgancggcttcccatgcgncgttgttgtgcaggtcctcttctctgaacagctgagagtacaacatcatcaggaggcaacgnaacaccncatcattccggctctatcagggcctctcttcccggtggatctcatgggagttcaaggtcggaagaggatgggangccgtgggaac

SEQ ID NO: 3825 - DNA, 277 bp, Glycine max
  Clone ID: 701000234H1
cttgggggatgaggaggccaggaaaagaaaagtgcagaagacaattctcgaaaggaaaggaccccctacattttcatgtgcggttgaaatgatatctaaaactgaatgccgtgttcatcatagattagatgcaactgtggatgccattttggcaggaaaacctccattatttgaaatccgtcaatgggatgattctgacaacgagttgccaaaatatgctccattgcccgaagaaaatcttggagaaacttctgacttaataacaataatatcacga

SEQ ID NO: 3826 - DNA, 107 bp, Glycine max
  unsure at all n locations
  Clone ID: 701000236H1
cgattccgtgcanggctacctccaccattgcttcaaatgctggcgcgacacggtgccatncntnaactncagctgnattcgagatgcgcgattnacgagcaagccac

SEQ ID NO: 3827 - DNA, 225 bp, Glycine max
  unsure at all n locations
  Clone ID: 701000237H1
caccttccaccancaccancactncctctttttcaatggagtagtagcgttcacgnggcttccgccatcgccgaaaactcgaacaacctttcccatgtntcntctgtgggggaaggaagacactgaccttcgtggtntctcttcttaagcaanagcactanggcgaagatgacgcgggcgatgatgaaccaatncttcaggacatnaatacggtggcccaattca

SEQ ID NO: 3828 - DNA, 285 bp, Glycine max
  unsure at all n locations
  Clone ID: 701000239H1
aacactcataacacaaagcacaaagcanagctcatccttgagttaaaaaatggcagcagctntctttccatggctctctcatccccatccttgggctggcaaggccgtgaagtgggnccatcaggccccagnagtgggcnanggtgagcatgaggaagaccgtcaacaagcangtcntcttcaggnangcccaatggtacggcccagaccggtnnagtaacttgggcccaattctcttggnaanccccngtctaaactaaaccggtgattccccagnggantacg

SEQ ID NO: 3829 - DNA, 273 bp, Glycine max
  unsure at all n locations
  Clone ID: 701000240H1
aaacgtcgtcgctccatcccacgatgagattagcgtggtttgccccaagccccgccgcctcggcctcttcaacttccncgtgaangatcaccctgttagncacttctactggcatctnngttgccaggtgagcatgtgatcnanaccgtctggttcaaatcctttggacaattacttancaaggatggtgattttgangtaggagnattnagggcagtngtnaacctcgtnngtccccnttttcctgngggtcgcngcgagtanagccactaa

SEQ ID NO: 3830 - DNA, 284 bp, Glycine max
  unsure at all n locations
  Clone ID: 701000241H1
cttaacatggtgcctcgcatgtaattaaattataattgggcttnntagtntcgtacttnaaacaanaagggcnatcgctacacttgactgncangttttagatatntgttcncagtatggngttatggtctcgtaagtnaaanggnttatttactcgnatgnatncagtttaatgtgntagtgatcagaattggaattgaaagtccgctaccnatgaaatgattcgttaaaacatcgtntcactacacannctcccngcaaagnggncnatgtagcnagccccc

SEQ ID NO: 3831 - DNA, 279 bp, Glycine max
  unsure at all n locations
  Clone ID: 701000243H1
gcgccacanggggangagttgcctcnatagcagncaaatcaggggaagacaaangtgtctcatcatacaaggnttncngggngccanatcacgtcaccggttactacaaaccggaaaacatcanangaggttgatgntgccgatttgcgtgntnccctctccggcaaaanattcaacaactatttcagcaattttnattntttaaccaaaccttgggtgatnnattcgttatggaattaatttgntactcntatgctcngccccacttcnataaaacgc

SEQ ID NO: 3832 - DNA, 275 bp, Glycine max
  unsure at all n locations
  Clone ID: 701000244H1
ttctcttcgagggtttgggtttctcttcctcccttggagnaaaagaagagccaccgctgcgacgccgttcgtgcatttttgaggtgccgctgtcatgtttgggcgtngtggaccaaggaggagtgataactccaaatattatgatattctcgggatttccaaaatgccagtnaagatgacatcaagaaggccttataganaggcggtatgagaaccatcccagatnagggagnagcncccgaaaagtttagggattangtcnagcctatgnagtt

SEQ ID NO: 3833 - DNA, 275 bp, Glycine max
  unsure at all n locations
  Clone ID: 701000246H1
gaatnaaccacgtnatcctctcaatatttctctctctntntctctntctcntctgtaacnaaatcaaaaaanaananaaggagtaactaaacataattctgatatagcagtaaagtatcanccaaaccaacaatccaacaccatgaaactctctgttttccacnatcagcanntcggntgantnncaattgcccccttaccntgacaagaacacacaaaagactaanaacaaaggttcntataggtggtnaccatgncnnagctcacattcttcc

SEQ ID NO: 3834 - DNA, 111 bp, Glycine max
  unsure at all n locations
  Clone ID: 701000249H1
cttccttggtttcatttttnntcctttctctttctgcaactgcaacttgaataggcaggctattttaaccagcatggccaggctcacgctgagaaccagacaattcctgcc

SEQ ID NO: 3835 - DNA, 273 bp, Glycine max
  unsure at all n locations
  Clone ID: 701000250H1
cncatatttgacaggntcatcatcataaccttcaatgaaaagaaatgggctgaggcaagcattngcagcaaaagcagnagatggtctnannggggatgaacagctctcgtcaccggtggatccaaaggaatcggatatgcnatctggaggagttggcacagttngagccaagtgcacacttgcgctcggaangaagctgaatcaatgantccttnnatgaatggaacacaaaaggcnacagagtaactggttccgtctgtgacgtggngtccg

SEQ ID NO: 3836 - DNA, 270 bp, Glycine max
  unsure at all n locations
  Clone ID: 701000252H1
gattttccgcactgatggtatccgnngaacaggacattgtcaagcntgttgacaccttccctggccaatccattgatttctttggngcactgagggncagagtatatgatgatgaagtgaggaagtggattncncgtgntggngttgacagtgtanggaagangttgtgaactcaaaagatggacngccaaccntgagtagcccaagangactctgggagagctctgcngnaagggaacaagctgtnccanaacaagannatggcnaggg

SEQ ID NO: 3837 - DNA, 279 bp, Glycine max
  unsure at all n locations
  Clone ID: 701000256H1
catggctgaatcaattttaggtttcacccttttcaaatcacacactcttagttcatgtctacaaacaaaaaagtttcaagtgaaccattcttcaagattggcanagcagcattcaaagtctaccctttcaacagaccgtggcaggtcttagagggcaagagcgnaaaaaagaggatctttgtgcnaagtgatggctgccagaattggccantgatngcnattatagtagagccaattggaggggccaagaggnttgatccactgaggaaaccgtttccc

SEQ ID NO: 3838 - DNA, 273 bp, Glycine max
  unsure at all n locations
  Clone ID: 701000263H1
aatcagacaaagctttgtattaactaatccgcgtntatcagacatgcctctngntnatgctagtnatgccttcttganattncacaggttatgccaaaactgangtnttgggccgcaactgtagattttaggtggaacagatnctgatacctcgacatacatcngataagggagagcatnaaaacagnacaancctggcaccgtacgtattttgaattacangaaggacaaagcncattttggatttcntcatatctcaccgttcgtgnngct

SEQ ID NO: 3839 - DNA, 276 bp, Glycine max
  unsure at all n locations
  Clone ID: 701000264H1
cagagctnngacgcnanggttgtgtgacggagagcaatccttcgccgcacggnggcgtggcgtctgnnttccgaagtggcagtccctccgacctcctcntcctcggtgggcggtggttcttnccattaacattctaangtagtataagcccantaacattacatcctacaccttcaaaagttnctctattagcggtntctggttccnttgttctnctcttggtagttgttnagtttggtgaggtctaagatgttgagcattaagagggttcccatg

SEQ ID NO: 3840 - DNA, 120 bp, Glycine max
  unsure at all n locations
  Clone ID: 701000267H1
caaantcttggacnatgatcactccaatctncntttggntctncagaaaagcatcctttcttnttaaggcagntgctacnccccctgtcaagnaaggatcagancagacctntntggtnt

SEQ ID NO: 3841 - DNA, 282 bp, Glycine max
  unsure at all n locations
  Clone ID: 701000271H1
caaccatccatgatcggaatggaagcttctggcattcatgagaccacttacaattcaatcatgaagtgtgatgtcgacattaggaaggacttgtatgganacattgttctcagtggtngatctaccatnttccccaggtatcgctgacagaatgagccaaggaaatctccgtnttgggcccaaagcangcatgaaggattaagggtgggtncncccacctggagannaagtacnggtgtctggatggngggncnancctgggttctcccnagcactttccca

SEQ ID NO: 3842 - DNA, 285 bp, Glycine max
  unsure at all n locations
  Clone ID: 701000273H1
ttcagaggcaacnaaggnanttgtaaattangagnatggctgcacaagcttcttgnatcatgcatacatcncttaanntnctcagccgaggctacaagacaaagtcttggaacaagatcactccaatnctccatttggnnttctcangaaaagcctccntncttgttaaggcanctgctnactccccctgtcnagtcaaggnntcnggacaganctttgggnttttgcatnnaagcnaaagnctnncctacctgggatggcngcctttcccggntgcnganggat

SEQ ID NO: 3843 - DNA, 153 bp, Glycine max
  unsure at all n locations
  Clone ID: 701000274H1
ctcaaaggcncacggttcctcactcctcttccatagcctgcggcnttcantctcatctcctggtctccagtgagatgaaccctagctccaattggtncctttaatcaattacctccttaattagtaattacttaatntncaannggcctttcc

SEQ ID NO: 3844 - DNA, 275 bp, Glycine max
  unsure at all n locations
  Clone ID: 701000276H1
cagtattcgtgcnctctctgcttgaaatcagtctgtgacatgtcnaaggtttgggagaaatttgatatagagattgctgctacaccaatgcctgagcaatatcaaaataaaatggtttggatctgtgcaacgattgtggtaaaacttctcacgttcagttccttttgtggctcaaaagtgtccgaactggcaaattcctacaatacacgacaaacatggaggctgagcaatggccacgattattccattggtttcgtcaaaagcctccncttgag

SEQ ID NO: 3845 - DNA, 251 bp, Glycine max
  unsure at all n locations
  Clone ID: 701000277H1
ctctgagtaggactacactgccatgncctgccttcagtctccancgttggagctgtcaacggnactncactgagcttgaacagctctggagtggagcttcagttccccagttcagccttctttggcaccagcttgaagaaggttattgcctcaagggtccctaacgtcagatttcttctggnngtttcaaaatcgttgccgcnnntnaagagantgatgagaaacacagaccgacaggncagatggcaagg

SEQ ID NO: 3846 - DNA, 280 bp, Glycine max
  unsure at all n locations
  Clone ID: 701000284H1
acttaattgccttaaggaangttcgagaccacagaggtttctctagtcttcttctgtggagagcttgttttctcttgttcattcatctcacttccaattaaggnacaagctttccaaccaatttgaatcaccaatgggctcgctctttctcccaacctcaaggttctctctggctcttgtcggcgnacgggattctccaacaactcncaccaggcgtgggtaagcagtagcggacacaaaggcgcaacaaggaggagcagcagctccatcaggcgnnagt

SEQ ID NO: 3847 - DNA, 277 bp, Glycine max
  unsure at all n locations
  Clone ID: 701000286H1
ggggtttgccttgtgccgtttgtgntgttttcgggacgaagaagaagatggtgtcaggttctggaatctgcgcaaagcgggtggtggtggacgcgtgccaccacatgctgggtcgtctagcctccatcgtngcgaaggagcttctgaaacggccagaaagtggtggtcgtttcgctgtgaagagatttgcatctcgggcggggctggtgnngtntcaagatgaaatanntgaggttccttcgcaaacgcatgaacaccaaaccctnccantggcncc

SEQ ID NO: 3848 - DNA, 278 bp, Glycine max
  unsure at all n locations
  Clone ID: 701000287H1
gtaggttaacactcttcttcatcgtcgtcgcaatgggacgtgtgatccgtgcgcaggtaagggagcaggctcggtcttcaagtcccacacgcaccaccgcaaggggcctgcacgttccggagcctggacttgggggagcgcaacggctacctcaagggcgtgtcaccgacgtcatccatgaaccttgggcnnaggcgcngcggttcggccaagtcgccttncggccaaccttttcagatacnagaaagcaggaacgagntttcaattccgccggaggg

SEQ ID NO: 3849 - DNA, 270 bp, Glycine max
  unsure at all n locations
  Clone ID: 701000289H1
gngagatggttcattggttgaagcacagacctgccatattccaagccatgtgggatcgttaaatttttgcatggtttggggaattttggtcagagaacactcgataatttatagatatggaggaacggttcatcattcagagctgcctgcctgttnttnagctgggggggagggagtaagtaattcttaaatncaaaaagcgtcatnccttgtaaccgctttcagtcattctggngtacagttttttgccatggatttgnaatnccagng

SEQ ID NO: 3850 - DNA, 272 bp, Glycine max
  unsure at all n locations
  Clone ID: 701000291H1
gtttcagatgcctgtntatgtcntcagaacaacaacatacctttcaatgttcttatctctgactgtggnaagcaagtctatctgttaccacagtgttatgcagagaaacaagctcttggagaagtggatgcctgagcttcntgacacncaagtgaatcctgctgtgtgggnnattagtgggcacatggttctnaangaggaagnaggattatgatgaggcatctgaaggcatgctggaggntcttggcagaggtgtccctctccnaagagag

SEQ ID NO: 3851 - DNA, 272 bp, Glycine max
  unsure at all n locations
  Clone ID: 701000294H1
ctcatcaagggttgtganagcagagaagtgagatacactaagttatcctcataaatacactctaattaggtggcaagataagtgtctaaccttagtaacattgccacntattgtgttcattttggaattgtgccactaaaattctattcaattcatctatggctgcctcttcttatgctatgcaatcaatcctggcaaaccctttgatccgcatttccagcgggtctagggtgaaccaatttggcgttctgctttgcacatgagaaggaatg

SEQ ID NO: 3852 - DNA, 274 bp, Glycine max
  unsure at all n locations
  Clone ID: 701000295H1
cgcaacgttcagaaaccaaatcggtttgagtcctcattacccgnntcnctctggaaancagcaaaaccacctttctcnannntctatgcgggtccttttgtactctgagtgggtagaagacatggtgagngntcactgctgacttgatctggaanagccctcanttcttnaacgcgattaaagagcntgagttagatcttcgaggcagcaggatagctggaantgagnaatngggtnctantgaggnacaattcgacacaatagacntcggacc

SEQ ID NO: 3853 - DNA, 287 bp, Glycine max
  unsure at all n locations
  Clone ID: 701000303H1
catccataatatctantccatgtaatggagactttgcggttntctcgaacactgagagaacaaatgcacccatcgataatccangttatatgggagnncaangaacacatagcagatgggttgacgcatntgatttacntatctagagagangaggccanaacagcctcatcattacaaagccggngccatnaatgtgttgacaagagtctccggattgataaccaatnctcacctttangctgaacntggantgnggcangcntgtngataatccacanntgttca

SEQ ID NO: 3854 - DNA, 102 bp, Glycine max
  Clone ID: 701000305H1
atttcttcttgtttttctcatcttggccaagctagcctttctctggttcatggtttgaccctagtggagaattcaccttctttggctacaaagccatatctg

SEQ ID NO: 3855 - DNA, 281 bp, Glycine max
  unsure at all n locations
  Clone ID: 701000306H1
gcaaatctttgttaagactttgaccgncaaaacaataactttagaagttgaaagttctgataccatcgataacgtgaaggcaaagatacaggacaaagaggggattccaccagaccagcagaggcttatctttgctgggaagcagctggaagatggtcgtactcttgctgattataatatccagaaggagtccactctgcatttggtgttgaggctcgtggaggtatgcagatatttgtgaagactctgacagggaagaccattaccttggaggtggaaag

SEQ ID NO: 3856 - DNA, 281 bp, Glycine max
  unsure at all n locations
  Clone ID: 701000307H1
tgttagagtggaccgncgcagtaccggagcagaacggtgttcgaagacgcgagtcctgagttggtgagggatttcttttgggatgatgagttcaggttgaagtgggatgacatgcttatacatgcttccaccatacaanagtgaaacctcactggaanaatgatggtgnangggtgcgcaagtttcccttcntttgaagtgncagagagtatataattgggaggcganttngggacgcaggangaatttactactgtgtcactaagggagtaccttgcncc

SEQ ID NO: 3857 - DNA, 68 bp, Glycine max
  unsure at all n locations
  Clone ID: 701000310H1
taacacaacacaaagtgntgccaactnngcngtatcatactcnntggttcatnctaatgantctggag

SEQ ID NO: 3858 - DNA, 277 bp, Glycine max
  unsure at all n locations
  Clone ID: 701000311H1
gactcgacggtgatcgttcttcctttattccacgtgcacggnttgatcacggggctcctgagttcgnttcngcaccggggcggcngtggcganaccggcggcggggagattctccgactcgtcattctggaaggacatgattaaatacagcgccacgtggtacacagcggttcctacaatacaccagatcatactggaccgccactcgaacagccccgaancggtttacccgcgcctccggttcattcgaagctgcagcgcgtcgtcgcaaccggta

SEQ ID NO: 3859 - DNA, 279 bp, Glycine max
  unsure at all n locations
  Clone ID: 701000312H1
caaaacttcgtctctccgattcactacttgtattcttccttctcttttattctattctaaatttcgcattggacatggctttcacacagcttatccctnccaccttcttcttcctccttaaaccctatcacactctccctaaaccctaaatccccaacctctccgccgcagcagcatttcaatctcgatattctccggcaccggcgccggangnctaattccactcttcggtggtccggctcctcgttctcggagaagcaccacacgaactcctcgaat

SEQ ID NO: 3860 - DNA, 278 bp, Glycine max
  unsure at all n locations
  Clone ID: 701000313H1
cgtctcgacaacgcgantatattccgttaatgaaaaagcggtagccgctagagcaggagattgaagggcgaaaaanaagactgagagaagagagntgggcgtgacgaaggaagaagttgaatcatccttgaaggccaaactgaacccttctcatcttgaagtggttggtacatctggagggtgcggtgcaanttttgtggtggngattgtntcagaacaatttgaaggcaaaaaggctacttganangcatccaatggtgaatgtgccttagaggagg

SEQ ID NO: 3861 - DNA, 207 bp, Glycine max
  unsure at all n locations
  Clone ID: 701000314H1
tgattgaagaagatgccgatcagaaacatcgccatcggnaggcctgaagaggctactcaccccgacacgttgaaggcggggttgggctgagttcatctccaccttgatcttcgtgttcgccggttcaggttccggcatcgnctacaacaagctcaccggacaacgcggccgcaatncncgncggcttcatctcngttccatcggcca

SEQ ID NO: 3862 - DNA, 284 bp, Glycine max
  unsure at all n locations
  Clone ID: 701000315H1
ccgttctttaccttcctgaacgacaccgagacccagacacggtttggggcacagttaaggtggtagcagtagcattgttaggccatatctcctttttttctctgccttgtattgaggtaaaactcacaaatattataactttgatctggggaagcaatggcatggagaggacatctttcgaanaacgttnaaaganctncggtttttgatgtgccantcanctcctgcaanctcacctggcaaggcttttgtggngaggaattataaggaactaaagncattga

SEQ ID NO: 3863 - DNA, 280 bp, Glycine max
  unsure at all n locations
  Clone ID: 701000316H1
ctggaaaagatggtgtatgcaaattctcagctgaaaatgttgccgttcaagtcattgactcggtcaatatcaccttgggtgctgagaatgaattaaaacatgcagttgcatttgttcggccggttagtgtggcctttcaggtggtgaatggggtccatttntacgagaatggantttacactagtgacatttgccgtaacacttnccaggatgtgaacatgccgtccntgctgtggggtatggaattgaaatgggtcccaattggctcataaaaaattca

SEQ ID NO: 3864 - DNA, 289 bp, Glycine max
  unsure at all n locations
  Clone ID: 701000318H1
tgattttnaattgcgattgcngtcgtggcggtggttgcgttacggtaagtcagaaaacctttatagttcaggtaatcgcgggaaaatgtggattgcaattgcggcattacaggagtcaaaatactttgatattgcggttgcaattgtggttgcaaaacgctatttaaaaccatgggtgttagcattagaatcaaaacttaacttgtatgtatgtgtagggactaaaactcaacagttttctgaactaaaattaaaaaagatcaaatgattaatagcttaacctattttg

SEQ ID NO: 3865 - DNA, 287 bp, Glycine max
  unsure at all n locations
  Clone ID: 701000319H1
gtatttcagagattgattctaggaattgcagggtcagggactggtctgttgatttctctgctgcttgtgtcaaccttgataattccagaatgccagttgataacctttcacagaggagtcattcaaatgagattgccagccatttgaatttcagagagcactcaggagaaagtgttgctggggacagcagtatatatacaaaancttggattgacacagctggtggtattgcaattaaagaccatcatgccatagagagatggcaatctcaagcagctgcagctgat

SEQ ID NO: 3866 - DNA, 108 bp, Glycine max
  unsure at all n locations
  Clone ID: 701000320H1
ctccgttgcaaactctccgcttcantccaccgccgcatccacacttnncatcgtacgccacttgcatggctgcggnggagccatanataagctcatccaacaccgcgc

SEQ ID NO: 3867 - DNA, 288 bp, Glycine max
  unsure at all n locations
  Clone ID: 701000322H1
ctcagntctcatncgancccatantagggtttcannttgggaatnttcccnccaattacggtgtttctgaancgnncataatctccgacgcntcgaattcaataanaaaattcccccatgcntcgtgacgggagctccatgtccatatnnatggagacgcagcgaattatcgagtntccgcataggaatatggncaagaggccaaggaagangcaacgnttgaacatnggacatgcagtgcctcctnttcctcctncntcntcccncttctacctncacacnngttcg

SEQ ID NO: 3868 - DNA, 281 bp, Glycine max
  unsure at all n locations
  Clone ID: 701000323H1
gtctctgccgctgaaaatttctttctctgctttgctcgctctataactttcgactttattttcgatcaacatcatcaaactcctcgcatttgggggtttttttttccctcagctattcaccagaaaaaaagcttccatttttgctcagatcttcctcttgctcctcccgttcctgttcctgggtttttattactttaatttgacaagcatatctgtttctatacngaggaacttggccaattgataaacagtgaagaatagctcctccatatagttttatg

SEQ ID NO: 3869 - DNA, 280 bp, Glycine max
  unsure at all n locations
  Clone ID: 701000324H1
ttaggccggaccgccaaactttactcttttctgcaactatgcctcgaaaagttgaaaagttggccagggaaatccttctgntcctattagagtaactgttggagangtggggatggcaaatgaagntattactcaagttgttcatgtaattccttccgnttctgagaaattgccctggcttctgganaagctgcctgaaatgattgatcaaggtgataccctagtttttgcntcaaaaaaggntatgtngatgaaattggatcccaattggctccaagag

SEQ ID NO: 3870 - DNA, 279 bp, Glycine max
  unsure at all n locations
  Clone ID: 701000325H1
cccccgtgttnccatcattgtcaccggtaacgatttctcaacactcnaangcacctcctcatccgtnnatggngcgtatggagaanttctactngtggaccaacaagggaagancgcattggtgtttgcaccggaattttccgcantgatggtattcctggacangncattgtcaagcttgttgacaccntncctggccaatccattgntttcttggngnactgagggccacagtatatnangatgcaagtnagnaagtggattnccggtgttggtgtt

SEQ ID NO: 3871 - DNA, 95 bp, Glycine max
  unsure at all n locations
  Clone ID: 701000326H1
ggagaacgaatagtacacaccatgtttatcataaganaantnaancgttatagaatctgtgtcgggttgcatctctggcaccccactgaatctct

SEQ ID NO: 3872 - DNA, 173 bp, Glycine max
  unsure at all n locations
  Clone ID: 701000333H1
gcagncatggccacccacgcggctctagcttctacanggatcnccacttnacacnangttcccntccaaggcttcanactcttncccanngcagtgcgnctcaaagaganttgaggtgnnagaantctctgggctaagatccgctncangtgtgacatgtgntaangatggct

SEQ ID NO: 3873 - DNA, 155 bp, Glycine max
  unsure at all n locations
  Clone ID: 701000334H1
aagctccagaccttcnaatnctctactntctcacttctttctatcacatttnacttgncnagtnnttaagagcccatgtnttgncatnggnttggatactcttnttgntgnagatggcagcgncatgagcatgccngtagggaatggttnatcta

SEQ ID NO: 3874 - DNA, 283 bp, Glycine max
  unsure at all n locations
  Clone ID: 701000335H1
ctcggaagcgtgcattaaatttcccgaaaggctaaaatatccatnncacctttctcttcctccgatggctaatctctcactcttgttcttcggtctcctcctattctccgctgccgtagccaccgtcgaacgaatcgacgatgaagacaaccttctgatccgtcaagtggtgccggacgcggncgaccaccacctgctcaacgcggagcaccacttctccgccttcaagacaaagttcgccaagacctacgccacgcaggaggagcacgaccaccgttccgta

SEQ ID NO: 3875 - DNA, 280 bp, Glycine max
  unsure at all n locations
  Clone ID: 701000336H1
tcctctcaggaatgtgttcccaggacttattgtgttttaaatccacaaaatccttttgtgttgaataggtggatggggaaactgactttcccccagggcacttcccgaagtgttnanagaatgcctctttctatagggggaggagctggtgcaaagantgcnattctcatgactatnccaaatgctgttctncaatgtggagatatnnngttngagatctcgtctttgaagtttctaagatgacttctccctncattaaatgtacagtctctttcntcat

SEQ ID NO: 3876 - DNA, 277 bp, Glycine max
  unsure at all n locations
  Clone ID: 701000337H1
aaacagtgttttggtgtagctgagaaaacaggtttaaatcacctctgaatttctgctatggcttcaaccagatcagtctttcttcttcttttcattcaattgtgcttctcacttctanccttgtcattcgctcaatcccccgccaccgggtctaccgaagttacaccatttatggtcgagtgaagatccccagtgtgggaacaaaagattatattcttcctggaanaatttcaaatgtcaaagtcatactcaatggtggtcaaagagttattttctg

SEQ ID NO: 3877 - DNA, 278 bp, Glycine max
  unsure at all n locations
  Clone ID: 701000339H1
tatanntaaagtatgaagtagatattatnttcttatgtttatnaataaatgttaatcantaatntccattagtttntattagtaaaggattgtaaattctgngatctgtncttatngtattactagatcaatcttatatnactaaatagntacttctagtnnatttgagtntcttaaanagagatttcaacccnaagaanatcnannnacntacactgcatccangttgntatngtagtngtagtatgactagcnacaatgaaatcntgaaccagaac

SEQ ID NO: 3878 - DNA, 291 bp, Glycine max
  unsure at all n locations
  Clone ID: 701000342H1
ccncatttcntctcagaaccntcgatcanttcncacgcgctcctatatcctnctccttcancgtcgctctntccaacgntgcacaacaacatangtcatancatggcaaacgccgcatctggtatggcagtccatgatgagtgcaagttaaggtttttggagctggagacaaaganganacaccgtttcatnctnnttaagattgaggagcagcagaagcatgtcattgtggagaancntggtgagccagccccaaggctatgaagatttcagtgcnagcctncctgntgc

SEQ ID NO: 3879 - DNA, 298 bp, Glycine max
  unsure at all n locations
  Clone ID: 701000346H1
ggcaaaggnattctacccgncggntcgatggggaattgcncttcaaggcgtcntcgtaagggctaatccggcttcacganggtcaccaaacgggcacgtgcctttgggggggngaggcccccttactgctggtnngcaaacggacggcgggcncacgcgttcgttntagcccggattctgacttagaggcgttcagtcataatccaacgcacggtagcttcgcgccactggtttncaaccaagcgcgatgaccaattgtgcgatcaacggttctcctcgtactaggttgaattactat

SEQ ID NO: 3880 - DNA, 100 bp, Glycine max
  unsure at all n locations
  Clone ID: 701000352H1
atcattncacgcagtcgaagtcgtatgctagacgacntatngttctgtgttcgtgagaagagttcgccaagtagttcgcannttcnananaanatangng

SEQ ID NO: 3881 - DNA, 233 bp, Glycine max
  unsure at all n locations
  Clone ID: 701000353H1
tcggaggagttgagtattgggaagatcaagtttaaagcttttgatctagggggtcatcagattgctcgaagagtttggaaagattactatgcccaggtggatgcagtggtgtattggtgatgcttatgacaaggagagattgtgagtcaaaaagacngtntctctcctgagatcttancatntcctttctgcttggacagtagttcaagtgctcagagagatgcgtacatggc

SEQ ID NO: 3882 - DNA, 278 bp, Glycine max
  unsure at all n locations
  Clone ID: 701000354H1
ccattctgaagcacttgggaataagggaatacttctcgnagnttaacactnacccaggttatgttnacgaagnaggaaggttaaggattttgccttnncatgacttcaacaaagcntcccatggctgcactttgtgnnctccaaatntgtgcgaggggttantcatngctagantccaagatncnntntcacaagagggtaanaagnggangatccatcttggngntggtnntggtgactatgccctagcnttnangcnagaanagaganactatatg

SEQ ID NO: 3883 - DNA, 277 bp, Glycine max
  unsure at all n locations
  Clone ID: 701000356H1
ctccaagtatgtgatagagaatgccaatgtggtagangccatcaagaaatggtaccttggnggctcaagtgccggttcttcctcaaccattcaatctntggctagcactttctcgcaggagttgtccaantgaanataactttgtatggtgtaataatccnngggtctgngttttgtgttgctaagttgcagtaattggaattnttctccncacaatgttttgcggattnctgcttctgaacttttcggaataagttaatcntgtgacttgccaaaa

SEQ ID NO: 3884 - DNA, 292 bp, Glycine max
  unsure at all n locations
  Clone ID: 701000357H1
cnaatggcgcaccagctgccctgcngcaagctgcgagcctccttccgtacctatactgtcgcatacattnctanccgtncacagatgtactacgagattcaaggtaaactacgntgagatcactggtccattcctcacactacgagnanncggctncaattctccctcgatttccagcccgtccnctntgttgncgggcaagatttccgagtcaaagggaggcnaacgcgatgggctcacgtctttatatcnngatctcgtagtgcctgnagatcccanggggnatggntgt

SEQ ID NO: 3885 - DNA, 284 bp, Glycine max
  unsure at all n locations
  Clone ID: 701000358H1
gccaaatatgatgtcataaaatactgcataggaacacttgtttcgatctctgctgttggtcttgctgttttacgcatattgatgtaaatggactgtattccaattaacatccacaaagaggaggtggaaaagaataagggtaactccgtagctgcattgaagatttatcttctgtcagagaaacaagtgcaactttttattttggtccataccagtggagctgaaaggaactagctccaatcaggcatgaattgggcctatnttttaagccccattctatatnc

SEQ ID NO: 3886 - DNA, 283 bp, Glycine max
  unsure at all n locations
  Clone ID: 701000360H1
gctgatgtttctcttgaagtgattgcaatgagaacacctggctttagtggagctgatcttgcgaatctgttgaatgaagctgctatattagctggtcgccgtggaaagacagctatttcatctaaagaaattgatgattctattgataggattgtggctggaatggaaggaacagtgnncgacagatgggaagagcaaaagtttagtggcatatcatgaagttggtcatgctattgtgggactttgnctcccggtcatgtgctgtgcaaaaggtaacctagtt

SEQ ID NO: 3887 - DNA, 251 bp, Glycine max
  Clone ID: 701000361H1
gctccctcggaatcccaatggcggagaacggtgaaggcggcgaggagtacctgttcaagatagtgctgattggggactccgcggtggggaagtccaacctcctctcgcggttcgcgcggaacgagttcgatagcaacttccaaggccaccattggggtcgagttccagacgcagctcgtcgagatcgacggcaaagagatcaaggcgcagatctgggacactgcgggacaagagaggtttcgagtgtcact

SEQ ID NO: 3888 - DNA, 290 bp, Glycine max
  Clone ID: 701000362H1
actcctgcaatgcgtcgggggccagctggaccaaggactttatgtaatgcatgcggccttatgtgggctaacaagggcacactccagagatctcagtaagggtggaaggaatctttctgttgagcaaagtgatctggacactcctattgatgtcaagcctacttctgttcttgaaggggaattgcctggcatccatgatgagcaaggtagttctgaagatccttccaagtccaatgcagcggatggttctagtaatcatgctgtaaaccccagtgatgaggaattgcctg

SEQ ID NO: 3889 - DNA, 109 bp, Glycine max
  unsure at all n locations
  Clone ID: 701000363H1
ctctttcttttccctctctcaattccaagtgggttttatctncttctttttttctttctccaaaagtgttaaaattttaactttgtnttgccttaatttgattgttctt

SEQ ID NO: 3890 - DNA, 106 bp, Glycine max
  unsure at all n locations
  Clone ID: 701000365H1
aaaacnagagcgaatggcananatnggtgangatttattagccattgcagcagaccagccctttcggtttcctgctacattcacattgttgtgagggccttctcat

SEQ ID NO: 3891 - DNA, 214 bp, Glycine max
  unsure at all n locations
  Clone ID: 701000366H1
cggaatgtctctgaacgcgctggttcgtcttcctctctcgaattcacgcntccacgacgatgctgntccgatgattattaggcatctctgttttcnagcnanagcaacagagcagagcagagtataggtcaagcgcacagtgtgnntcancaaggataggtagnngcaatcaccagtctctcttacagtgagagngatcnncgcatcncntgca

SEQ ID NO: 3892 - DNA, 277 bp, Glycine max
  unsure at all n locations
  Clone ID: 701000367H1
atagtctactgcantctgacactatcagatatcaanttcagaggcggagcnngncngctggagctgcttacaagttctncaactatcngannttctgnactcatccattcgttagcgcantagaacganaactgagtaatggaaagtggagggaactcccttccatcagggtcagntggtntgaagagaaaggtttcatatttctatgatccagaggttngaaactattatangggcagggncacccaatgaaaccacacagggttcgatgacccat

SEQ ID NO: 3893 - DNA, 276 bp, Glycine max
  unsure at all n locations
  Clone ID: 701000368H1
gtgttggagggagatggcagtgtgggggagttttattctgtggctttgacgaataactatcaacaggccgatacagggacgaagatgatacacaacagggangaacacaaggagtaggattatatcaaaggggatatcggtggggcattccaggaatgttatagagggctggttcaggttctgtccaaggccgagaatgcccgaaactcctcgcagtgtgactctatgctcattggtgacaatgcagctgcaaatacctatccttacattcaggtg

SEQ ID NO: 3894 - DNA, 273 bp, Glycine max
  unsure at all n locations
  Clone ID: 701000369H1
cagcagttcttgagggtcgtgctgggaggaattgcacggttgatctacctggaggacctcttcagattgaatggagggaggaagataatcatgtttatatgacaggctcagccgatgtagtttattacggatctttgnccctttaatatgttgcccccattgttaaacccantatggnattaggaattgctgaataatatttgtatgagaggtggactttctgcttgttcttactattttgccacatattatatcttcctacccttttttggt

SEQ ID NO: 3895 - DNA, 271 bp, Glycine max
  unsure at all n locations
  Clone ID: 701000370H1
cagcagttcttgaggnccgtgctgggaggaattgcacggttgatctacctggaggacctcttcagattgaatggagggaggaagataatcatgtttatatgacaggctcagccgatgtagtttattacggatctttgcccncttaatatgttgcccccattgttnaacccaatatggaattaggaattgcngaataatatttgtatgagaggtggactttctgcttgtncttaactatttgccacatntntatatcttcctaccctttttg

SEQ ID NO: 3896 - DNA, 271 bp, Glycine max
  unsure at all n locations
  Clone ID: 701000371H1
caatgagattatatgatatttatatttataaagtaacagatgaccttttgcatagacagcaacaatactcttgcatgcagatgtgtgcctttganaaacaaggctctttgtgttagaatctattggctctgtacgnngctcatgtgtctgccatancctatctaatggaacttcctaagtttatttgncgtcaatttgtgatgcnattgttatnatngtagttctcgcacttgcatggatncaaacagatagtgagtcaggtggcttggtg

SEQ ID NO: 3897 - DNA, 128 bp, Glycine max
  unsure at all n locations
  Clone ID: 701000375H1
aaaacaaagcgggcnttccaatgggcgacttctggcgggctcaacccttgctcncgannttcaaaccaaccttggttgcagggncttncttctaacctttcccaccaccaancatancggacanngac

SEQ ID NO: 3898 - DNA, 280 bp, Glycine max
  unsure at all n locations
  Clone ID: 701000376H1
cagcagttcttgagggtcgtgctgggaggaattgcacggttgatctacctggaggacctcttcagattgaatggagggaggaagataatcatgnttntatgacaggctcagccgatgtagtttattacggntctttgcccctttantatgttgcccccattgttaaaccccnatatcggaattaggaattggtgngttaatattgtatgagaggtggactttctgcttgttcttatatttgccanatattnatnncttcctancnnttntggntagaaaa

SEQ ID NO: 3899 - DNA, 67 bp, Glycine max
  unsure at all n locations
  Clone ID: 701000379H1
ggcttgctcgtgtggttnctgtgncattggcnggtgtnggnatgtncacaccaagttcgcagnnaga

SEQ ID NO: 3900 - DNA, 279 bp, Glycine max
  unsure at all n locations
  Clone ID: 701000382H1
ctatgccaaaagatcgaaatggaaagctttcaaaggagtatctaagggtggcactggacacggtggctccatctgctggtttacctcctgttggtgcaattgaagagatggacaaggttattggtgaagtctntaagatggtgaatgcagatgatgcgaaggtggtgaaagaagacgaattcaagaaactattaactgaaatactggggaacataatgttgcagttggaggganatcccatatcagtttcttcaaatcggtagtacacgagccactaga

SEQ ID NO: 3901 - DNA, 268 bp, Glycine max
  unsure at all n locations
  Clone ID: 701000383H1
acaaagcacaaancaaagctcatncttgagttaaaaaatggcancagttcttccatggctctctcatccncatccttggctgncaaggccgtgaagctgggcncatcagncccagaantgggaaaggtgnntatgaggaagaccgtcaccaatcaggtctcctcangaagcccatggtanggcccagnccgattcaagtacttnggcccattctctgggcgagccnccgtnctacctaaccggtgagttccnaggcgactaggctnng

SEQ ID NO: 3902 - DNA, 275 bp, Glycine max
  unsure at all n locations
  Clone ID: 701000384H1
tgaaaagtgaaaagtgaaaatggacttggaagcagtgaagaggtacttagagaaaggaggagaaacagcatcggcggtggatgggttgcctccgncggtttctggaaccgttaataatgaacgctcttaaggtcgatctcatcgaaactggtcgcgttgtctgctccatgaagatacctccgcgtttactcaatgctgggaattcgttacacggtggcgccatcgtgctctggtcgacgtggtggggtccgctgcgattcccaccgttggatatt

SEQ ID NO: 3903 - DNA, 274 bp, Glycine max
  unsure at all n locations
  Clone ID: 701000385H1
attnaacgagatatanggnaaatgattacaaggataaaattaaaaganatacttgtggacaaaaaaaaaagacttatacctgatncataaaaatagattagttcatttaatnannancaactatttcatngttaganaattaaatatggctttttttaagccagtaaatcgtttnacanaacattcatttntcaatttnngngaanaatattttnnntcatacaaaatacctngttatgncnttatacttntaaaaaccttttcnnnttacgaa

SEQ ID NO: 3904 - DNA, 273 bp, Glycine max
  unsure at all n locations
  Clone ID: 701000386H1
atcattgtgcctttaattccacccagaaagctcttngaattgatgacttccggaaaattcctaatggtgtcaatggtattgaagaaaggatgcatttggtatgggatatcatggtggaatcnggccaaatatcnctcactgactntgtccggttgacnagcactgaatgtgctagaatcttcaatatatatccaaggaaaggagctattcttccaggatctgntgcagatattatcatcctcaatccaaattcaacctttgagataactgcaa

SEQ ID NO: 3905 - DNA, 273 bp, Glycine max
  unsure at all n locations
  Clone ID: 701000387H1
cttcaccaaaaggatccctcgacatccattccattcccatggctgccagattacgatctagcagtattgtgttaccactcttggagagtaagctgcgaaatcttcatcagtttggaattcaacgnggagcagcgggggctgagttacttaggagttggggctttggccaggangaattggtggaaatnnaagagatgttgtctaaaatggnagcggcattgcctcctcctcagttgtcatcagattcagattagnatatatgcgtngttcttc

SEQ ID NO: 3906 - DNA, 276 bp, Glycine max
  unsure at all n locations
  Clone ID: 701000389H1
gtgcttgttcgcaaaaccatcaatggcgtcagattatcttctctctcttccacgtcttcttcactgttggcagcacagtttcaccggtaactcgaaggctcctattactcaattccccaacaaaagtgcgcnttttcggtcttcgctcanaagaaggcaaagaaacttcggaagataattttgaaggaagatgtgactgatgtaggaaagcaanggcaacttcttgatgtgagggctggcttttcagaaattacctgttcccatgggaaaggcaca

SEQ ID NO: 3907 - DNA, 283 bp, Glycine max
  unsure at all n locations
  Clone ID: 701000390H1
caaaatcctcctcttncaagatcagatgctggatccagaatactcggaagctcaacaagntcaacatccagcttcaaagtcancagctgccattttatcagattctgagagtggagatgcnaagttaaatacttcatcaaaggctactgatcatgagacgaacaaaacaattcccgagcacctagattccaacanaacaaagggcngaaaaccggttgaccgttcctcatgtggttcccacacgggntctagcagcgatgtggaaactgatgcactagagaag

SEQ ID NO: 3908 - DNA, 220 bp, Glycine max
  unsure at all n locations
  Clone ID: 701000391H1
gctgatgtttctcttgaagtgattgcantgagancacntngcnttantggngctgatcttgtcgaatctgtagaatgaanctgctatattagctgnncgccgtgganagncagntatttcatctaaannaatngatgattctattgataggaatgnggctggaatggaaggancaggcntgacagatggncanagcaanagncnngtgggcatagcatga

SEQ ID NO: 3909 - DNA, 286 bp, Glycine max
  unsure at all n locations
  Clone ID: 701000392H1
gttgctatcaaaaccttcaatagctcccccaccngccaaaaaacctgttgtcttgaaggacaggggagcanccgagacaacatctgttaaatctaaagaaaagaagtcgcccatcttgattgataagtttgcttccaagaaaccggtagtanatcctctaattgcacaagcagttctagcccctncaaaancagggaangcacctcccccggggnaagtttnaagatgatttccggaagaaatgtgttatggctggnggaccangaagacgggattttagagggtg

SEQ ID NO: 3910 - DNA, 285 bp, Glycine max
  unsure at all n locations
  Clone ID: 701000393H1
ggcggaacagcttctggctaggtttgaggaactatatcgacctgtgcatgagaaattcgaaggtagcatagttcatgatcgcgaatctgaggaggaattgcaagccagttcgtggagccaagttgagccagagagggtgaagaaaaaggagaatccgatccctcctgcaaaattgcataaagaacctcccccgcagcaccctgcaagttcttnaaatcctccattggtgcagtctccggtgcgcacaccatccccaatgcgagctcctcctgtgaagcctttgaa

SEQ ID NO: 3911 - DNA, 227 bp, Glycine max
  unsure at all n locations
  Clone ID: 701000395H1
cagctgctttanttcttggtgggtgctgatatnactgganctcatttgcatactatttaacctnatnggtcaacngacacnctngcntttgctangatggatcatgncattgctgnaatgtccgatanagtctaagtnaggaagntggtgnagtnagcgacaagnnnngctanggatggttanctgcggaaggagntcagccgcggnttgcagtgcannagcattgg

SEQ ID NO: 3912 - DNA, 271 bp, Glycine max
  unsure at all n locations
  Clone ID: 701000401H1
gtntgtagagctctctggtggaattaatcgtatttttgagcttgaagaacttctagatgcagcacaatctgagaatttcacgagtgttagtgctatacctccaatgagggatgttcattccagtgatgtaatttccttctcaaaagttgatatcataacccctgctcaaaagatgttggtgagggagttaatatgtgacattaagcgtgggggaagcctacttgttactggtcccaaatggnagtggaaaaagttccattttcagagttct

SEQ ID NO: 3913 - DNA, 267 bp, Glycine max
  unsure at all n locations
  Clone ID: 701000402H1
cttctttttgcacatccctcttcctcttcacactctcccttctcttcttcctattcttctccctctccgtctccgtccacagcggccaccacgacgacggtgacgccgactccgacgccacccccgacctccgtgctcggcccttgattctcgcgaagtgtggtgcctgatcgtgatcttcatcgccacttcgtctcgggcgtttcccctaacattctgaaatggaacgaggggttcttggttctngggacccagtttgctgggggg

SEQ ID NO: 3914 - DNA, 263 bp, Glycine max
  Clone ID: 701000403H1
cttggccttggcttgactgaacgtggcagcacgagtgatgaagcacccttatcaacttcggaagaggaagtttccaatatggaagatgatgatttgtgtcaattttgggaaacgttctggccttcctagttttatttctctttggggataaatttctgacttcccagcttatatggtgtgagtatttggatgtgtagaataagctgattgagcttttagtttgtaaatcagtctaggttgtatagtgataatggcgatggaca

SEQ ID NO: 3915 - DNA, 265 bp, Glycine max
  unsure at all n locations
  Clone ID: 701000404H1
cgttcctttcttcgttccttccccaacccaatcttcgccttcgcccacaacaactcctccttcaggatcgctgccaacgttactttccatttttacccttcatcctcgagaaaaaaatggcgaacgcagcatctggtatggccgtccatgatgagtgcaagctaaagtttctggagctcaaggcgangaggacgtaccggtatatcgtttttaagattgaggagaaatcgaagcaagttattgtggagnagctgggtgaccctgc

SEQ ID NO: 3916 - DNA, 263 bp, Glycine max
  unsure at all n locations
  Clone ID: 701000405H1
gaccttcaccactcgcgcgttggcgcagcggctttcagaacgccgacgaactcatcgactccgtcgagacatttatcttcgattgtgacggagttatatggnaaggtgataaattaatagacggagtgcctganacgcttganctgcttcggtcaaagggnnanagattagtttttgtcaccaataactcaacaaagtctaggnagcaatatggaaagaagnttgaaacacttgggcctgaatgtcagcgaggaggagatttt

SEQ ID NO: 3917 - DNA, 256 bp, Glycine max
  unsure at all n locations
  Clone ID: 701000407H1
caaaaactccattgattgaaganaaagagagcatcatatcatcgtattcatggacacagaacaagaagagatgcagttcatggggctctacggcgtctacagagaatcctacaagatcatattcgcatggagcaaggtcttcaacaagatcaccttaaccctaatcctccctctctccttcatctttctcatccacatcgaagtctccaacatcctcttcggaaaaatcctccacaacacccaacaaatgatggaa

SEQ ID NO: 3918 - DNA, 249 bp, Glycine max
  unsure at all n locations
  Clone ID: 701000410H1
actgacgttcgtgctcaggttgaggctgaggagaagttcaagctcatctctcgtttgaaggaaaagtttgggatgacttcatgtcactaaatgctaccaactgataaatttggttgttggtattttgtgttttaactgaagtgcttttacctcataatagctcatttgttggtattcttatcttnactgtatctattagtctcccctccttttctcccaaaatttacagcagataataggttaatggac

SEQ ID NO: 3919 - DNA, 256 bp, Glycine max
  unsure at all n locations
  Clone ID: 701000411H1
gaaaagcaaaggcagnacgaganccctaactgccgccgtcgcaggcgcagtttccggtgtcgttatgttatcccttactgttgctttcttcctcatcncaatgcaagagcgaacgtngcggtcgatgaaggttccaataaaaaaggtggaacttcnccgaggcggtggctcatcatcggtaaccaaccaanctactgccgtaagttctcaatcnnagaaatganagccgcnacnaanaacttcgangaactctttg

SEQ ID NO: 3920 - DNA, 253 bp, Glycine max
  Clone ID: 701000412H1
ccaatttggctgcgaaagccagaagagatcaccaaggatgaatacgcttctttctacaagagcctcaccaatgactgggaagaacacttggctgtgaaacatttctctgttgagggccagcttgagttcaaggccattctctttgtgccaaagagggcaccctttgatttgtttgacaccaggaagaagatgaacaacatcaaactttatgtcaggagggtgttcatcatggacaactgtgaggagctcattc

SEQ ID NO: 3921 - DNA, 256 bp, Glycine max
  unsure at all n locations
  Clone ID: 701000413H1
ctggatatagcagcagataaagcgtcaganttaaaacacaaacgaggtttttatattgttccattccacctaattcattctgtccacgccttctttaatttctctgatttgattcatggctttagcactttcctccactgcattgtcaagccttccaaacagagaaattcgtcaaaagggtttcccagacagaacacccacatgcttgagtttgaccagaagaacagttgcatatgctacaaaaggggtctcagct

SEQ ID NO: 3922 - DNA, 260 bp, Glycine max
  unsure at all n locations
  Clone ID: 701000415H1
cagattttnggttggccaagcaaggtagtgaggaccantctcatctcactacaaaggttgctggcacatatggttatgtggcaccagagtatgctctatatgggaaactanctgagaanagtgatgtgtatagtnttggtattgtgattcttgaaatcatgagtggaagacaagtgcttgangctttgaattcatctgcggattcaatcacggattgggtatggacacttgtggnatctggaaagnanggggaaattttt

SEQ ID NO: 3923 - DNA, 268 bp, Glycine max
  unsure at all n locations
  Clone ID: 701000417H1
gacggccangatggtaccgtgtntgtntagtttgtagctctttgcaggccaaaaggtcgtataaacttacatggaatgttgtctcttattgctaagcagaagctatacacatatcctggaaactaccgcgtctttaaggtgctcattgctgccgaatttaacggcattgacattgagttgccggaattgacttgccaaggacatcangtccagcggagtttcaaagcccaatctccagctgagaangtgnccattctggagacggagg

SEQ ID NO: 3924 - DNA, 267 bp, Glycine max
  Clone ID: 701000418H1
ttatttctgagcacaccctccttctcattttcattatctagctagcgttaccactttcaatttcaaattcactctcagaaattagaatggctagccaatcaaacactaaatcagttcacgatttcacagttaaagatgccaggggaaataatgttaatctcgccgattacaaaggaaaggtccttctcattgtcaatgttgcctcacaatgcggcttgactaattcaaactacacagagcttaaccaattgtatgagaattacaaag

SEQ ID NO: 3925 - DNA, 264 bp, Glycine max
  Clone ID: 701000419H1
caacagttgccaggtgaatcagacaatgattatgctgatttttcttccaagatcttgcatttgaaaggagacaggaaggactttgactttgtaaaatccagtctctcggcagagggatttgatgttgtttatgacataaatggacgtgaggcagatgaagttgagcccatactggatgcgctgcctaatctggaacagtttatttactgctcttctgctggtgtctatctcaaatctgatctattacctcatgcagagacagat

SEQ ID NO: 3926 - DNA, 94 bp, Glycine max
  unsure at all n locations
  Clone ID: 701000420H1
ggaagctgtggtaagagcaagagagagaagggttaggtttttactttactctctgctttctactttgtgtttttgtncttctgtttttgatcac

SEQ ID NO: 3927 - DNA, 258 bp, Glycine max
  unsure at all n locations
  Clone ID: 701000421H1
gcgcgttctacacgtgttgccgatctcggatgtngnanaattagtnnatnatgtgnagctatngagtggcaaatatgtggatgtnggagatttcgggangaatggcctcaaaacgctttntcgtntgtggttattnagncctgnntgatcttgtcatccgacctttgccatgatcaggtgcgcttgcatggcaggtcaaaaantgttaatacnannagtttcatggtttggggnnagntcgcacgggggtnncccggg

SEQ ID NO: 3928 - DNA, 255 bp, Glycine max
  unsure at all n locations
  Clone ID: 701000422H1
gaatcgtgaaaatgttcagaaaccagtacgacacggacgtgaccacatggagccctgcggggaggctgttccaggtggagtacgctatggaggcggtgaagcagggctcggcggcgatagggctccgatcgaagacccacgtnctcctcgcatgcgtcaacaaggccaactccgaactctcctcgcaccagaagaagatcttcaaggtcgacaatcacatcggcgtcgccatcgctggcctcaccgccgatggcc

SEQ ID NO: 3929 - DNA, 253 bp, Glycine max
  Clone ID: 701000423H1
ggaacctactctactgattttattgaggagtgggtcaaaattggcttgcctgcaaaggcaaaggtgaagacacagcatggggatgccccttttgctgagttgtgctcacactgtgagaaggaatctgtgaatgtttcccttggaaacctgctaacttacccatttgttagagatggcttggtgaacaaaacattgtcactgaaaggaggatactatgactttgttaaaggatcttttgagctctggggccttc

SEQ ID NO: 3930 - DNA, 255 bp, Glycine max
  unsure at all n locations
  Clone ID: 701000424H1
catcttctgagttggctcaaatttntctgaacttaaggtgtaagaattctttcatgtcgaagtcagttgcctgtggacgaatgtgattgcaaggtttgtgcacagaagaatggtttttgcagggagtgtatgtgccttgtgtgttcaaagtttgacaatgcctcaaatacatgtagttgggttggatgtgatgtttgccttcattggtgccatactgactgtggattacgggaatcttatattagaaatgggcct

SEQ ID NO: 3931 - DNA, 251 bp, Glycine max
  unsure at all n locations
  Clone ID: 701000426H1
aaagaaacagatttattctatacccgataagtnacaatacgcaatggtggggagacgagaggggtttacaattttctctatgaatatttaaataagtaaatgcagacatactcacttatcaccccaatgacccattcgtaacaactttactttatttagtattccnttttttatatttagtattcctaaaaaaaaaatgcaatataataaaaataaatcatttttaacacgataagctaattcttacgttt

SEQ ID NO: 3932 - DNA, 256 bp, Glycine max
  unsure at all n locations
  Clone ID: 701000427H1
ccttggcanncgtcatatcagaatatggatgaagagattgattttgagtcgttccttagggcacatttaantcttnaatcncngannaatagntaaagatggtggttcaaaaagttcttcnncattcctgaaggnagctanaanaactgttcatcatgcaattagtgaatctgagaaagcgtcttatgttgcacatattaacaactanttggctgangataaattcatgagtcagtttcttcnaattgcatccatc

SEQ ID NO: 3933 - DNA, 253 bp, Glycine max
  unsure at all n locations
  Clone ID: 701000428H1
ggaagactntggaagagccagagcatacaaccaatgtggggaccctgaattagttcaacaggcgattgacagttgccctgttagctgcattcattggacatcttctgcacagctatcattagcangaagatgagatgcgccgtgtagaaagagtcaatgttgccctaatggtatcaggaatgggaacagcatcaattgatgttttcagaatggcaagttccagatgggaaaagaggcatcaaaagtcttggca

SEQ ID NO: 3934 - DNA, 256 bp, Glycine max
  unsure at all n locations
  Clone ID: 701000429H1
taaaattctctcttcctttttgggttctcctcaatccattccaagcttcaatcttttctctcttctgccctctgcacctcccctcacacccttcctcattcgcagatataggaggtgaagatgtcgaccccggcaaggaagagactgatgagggattttnanagattgcaacangatcctcctgctggcatcagtggggctccccaagacaataatattatgctttggaatgctgttatctttggaccagatgaca

SEQ ID NO: 3935 - DNA, 264 bp, Glycine max
  unsure at all n locations
  Clone ID: 701000431H1
gcagcttattgtactggtctcctgttggcccgaagagtcctcaaaacacttgaaatggatgaggagtacgaaggaaatgttgnggctactggagaggactattcantggaacctgctgagagcaggaggccattccgtgctctccttgatgttggtcttattaggactacaactgggcaaccgtgtctttggtgcccttaagggagctctggatgggggtttngatattcctcatagtgaccagangtttgctgggtttgataa

SEQ ID NO: 3936 - DNA, 263 bp, Glycine max
  unsure at all n locations
  Clone ID: 701000433H1
ttaaatgtaatgcaaatacattcatgcagacacatgaattaacacatgacagaatgttcctcttgcccgtattttttacccttatgcaagtacgaccattaccttctattcttgctaggaattgtcaaagttcttatttgtcatcttctggtgaaatttaatttctagaacatgagatgaactattcttggtttaaggtatataaaaatcattccagttnattgttaananacaancgnngnaannnnnnaggnnggnnnncc

SEQ ID NO: 3937 - DNA, 264 bp, Glycine max
  Clone ID: 701000434H1
caaggttgcaacctcctcccccaccgggttactttggcaatgtgatattcacaaccacacctatagctgtggcaggtgatctcatgtcaaaaccaacatggtatgctgcaagcagaatccacaatgcattgttacgaatggacaacgattatttaaggtcagctcttgactatctagagctgcaacctgatctaaaagctctcgttcgcggggctcatactttcaagtgtccaaatcttggtatcatagctggataggcttccc

SEQ ID NO: 3938 - DNA, 189 bp, Glycine max
  Clone ID: 701000436H1
gaaggaatcaacccttcaccttgtcctccgtctccgtggggggttttaagctcgttgtgtaatgttggatgtgttcccaaaacatttgaagaactttgatgtttaatgggtctgtaataatgtcccttgaaaataagttcggtttgtgttgaactcaattgtgtcccattaataatagtactctaatat

SEQ ID NO: 3939 - DNA, 252 bp, Glycine max
  Clone ID: 701000439H1
aaacaggaagatgctgcccagcttaatggaaatgggacctcccaaggaaatggctctgccactgttgctgacattttcatctcccagaatgtggtcagcttgagcaggtccgggattgagaatttggcaaaattagagaaccgaaaagaacactggcttgttgtgctctatgcaccatggtgccgcttctgtcaggctatggaggagtcgtatgttgatctggcagagaagttagcaaggtcaggagtgaag

SEQ ID NO: 3940 - DNA, 228 bp, Glycine max
  unsure at all n locations
  Clone ID: 701000441H1
ttaaatgtaatgcaaatacattcatgcagacacatgaattaacacatgacagaatgttcctcttgcccgtattttttacccttatgcaagtacgaccattaccttctattcttgctaggnattgtcaangttcttatttgtcatcttctggtgaaatttaatttctagaacatgagatgaactattcttggtttaaggtaatataaaaatcaattccagttaattgtt

SEQ ID NO: 3941 - DNA, 253 bp, Glycine max
  unsure at all n locations
  Clone ID: 701000445H1
aaggaatcaacccttcaccttgtcctccgtctccgtggggggttttaagctcgttgtgtaatgttggatgtgttcccaaaacatttgaagaactttgatgtttaatgggtctgtaataatgtcccttgaaaataagttcggtttgtgttgaactcaattgtgtcccattaataatagtactctaatatcccaaaaaaanaaaaaaaaanggggggnccnccgnttagtnancncgncnncngggganttattt

SEQ ID NO: 3942 - DNA, 256 bp, Glycine max
  unsure at all n locations
  Clone ID: 701000446H1
attactggntctgagtggtcttgcttcagatcangtttttttgctaagaacaactcagattttcagtncagtgttactgccaagcagaagttgaattaacgtggntantgattaccgcgcttgcagagtagaagcnataattcagcagtgtttgtgtcaaaancnnntncagctcgagtatntcaaagaactggctagttctcaatgcaaacatctcagaatcataaaatttcttatggctctgncgggttctatg

SEQ ID NO: 3943 - DNA, 257 bp, Glycine max
  unsure at all n locations
  Clone ID: 701000447H1
tggtacaagtgtttttaacaaacagcaacagtacagagcatttcgatgcatgnaagtggacaaaatcggaaccacattcctgggaattgatcttcccaatagaggtatgtggtcctaataatggttttgaaatgtggagttctgantgggcaaatcaaacttcatggcacttgagtttccttattgacaatcccaaacagtctacagtttttgatattctcttgggaatttctcaagattttnaaattgctggtaat

SEQ ID NO: 3944 - DNA, 267 bp, Glycine max
  unsure at all n locations
  Clone ID: 701000448H1
ctcgaaacttcaccgaacgcattccattcaccaattcgnccaagtctcgtatcaatcagtcaatccgtctcgtggaggttggagagatcggagnnnanaggatccatggcgcatcgagtggaccacgagtatgactatctgttcaagatcgttttgatcggagactcaggtgtangaaaatctaacatcctctncaggttcactcgaaacgagttctgtntagagtccnaatccacnatcggagttgcattggncaccagaactctt

SEQ ID NO: 3945 - DNA, 269 bp, Glycine max
  Clone ID: 701000449H1
ctgtattcggctagcagcagaggtatcgaaagtactgatagaactttccaacagcataaggaatccgccggcattgctctccagaaatactctcggatcatctgcacgaagccttacaggacctaaacactgccataaaatctcaacctcgactcttcttaggccccaaaaacaggcacaaccaagccaccaacatgctcaaaatagctgccgaacaagttggacaagaaagacatggaaagacctccctttcaagtgttaaaaccgat

SEQ ID NO: 3946 - DNA, 269 bp, Glycine max
  unsure at all n locations
  Clone ID: 701000450H1
agntganatnactgntnntnnctgtaaatggggaagatgctattgatgttgancacaatgatgggaaactncgctaaatacttctgatgcttctgatctagcatcngaaacaatggacactaagcaggagcaancaacancttaaatcttcaagccaagtaactcngaaaggatctnaattatcggnagnngnngaagcatatngnncagacancacctgatgctcgggtgcggtatctagaaagatcagctnatgcaggntagggtat

SEQ ID NO: 3947 - DNA, 261 bp, Glycine max
  unsure at all n locations
  Clone ID: 701000451H1
aaaggnagggagtagggagtgagtaattttgaaaataaagaggaaagcttgaagcagaagagagagatgtcatcatcttcagacctggacaggcaaatagagcagttgaagaggtgtgagcctcttaaggagtctgaagtgaaggtgctctgcctcaaagccatggaaatcctcgtcgaagagagcaacgttcaaagggtcgacgctcctgtcaccatatgtggtgatattcacggtcagttttatgactgaaggagcttt

SEQ ID NO: 3948 - DNA, 252 bp, Glycine max
  unsure at all n locations
  Clone ID: 701000453H1
attgttgtaactttttgattcctaaattctctaaaatncgaaattctaatttcnttagnggaaagagattgtttgtgtgtgagtnagtatggctgganaaggcgagggtcctgctatcggaatcgatttgggaacgacgtactcttgcgtcggcgtgtggcaacacgatcgtgttgaaatcatagccaacgatcagggtaacagaactaccccatcctacgtggcttcaccgacacagaacggttgatcggc

SEQ ID NO: 3949 - DNA, 254 bp, Glycine max
  Clone ID: 701000454H1
gggattcgcacagcacttgggagaggtaagaaaattgtttttcttactagagttgatccttttccagtagctttactggctgttctttttggcgttaagaatgaaattctgagttctaacgccactaaccctatgctgacgcgacttcttgagaactgtaagagtctcaaatatctggttgatgagtgtccttttgcatttgtgaactagtatgtaatattttattcacttaaataaagcgcattactatgtgc

SEQ ID NO: 3950 - DNA, 254 bp, Glycine max
  Clone ID: 701000455H1
ggtcatcgttgggatctccatacgccggatctgctaaaatacgcttgatccatatgggcctcctcgaccacttgtgggacgacaccgtcgccggcccaaggccggaaaacggtctcggcaagctccgaaaacaccacaccttcactttccgacctagctccggcaaggaaacggagggcgggagcgtgagatcgtacggagacgaatcgtcggaggaagcgacgagagtgacgcgtagtatcatgatcgtgaaa

SEQ ID NO: 3951 - DNA, 251 bp, Glycine max
  unsure at all n locations
  Clone ID: 701000456H1
agaacagaggagcagaacgaaatattccaccacctggagtttntccgcaactcggttcttgtttcagtttacacagttgtactccattttctatctgagggatttgccttgggtgacatctgtggcnggttgaagagctgcaaagcagatgttggtttccttcatagaggtggtgaacaaacttttcctgtacatttatttctgaaaaatgatccccatagagctgatatttccaggcttgggggatccna

SEQ ID NO: 3952 - DNA, 99 bp, Glycine max
  unsure at all n locations
  Clone ID: 701000457H1
gcnanaganaaaacggaagatctggtaatgaagggagcatcancgagctggcagtggaagcttacagcctgaanttcccttccaacacaacatcaccga

SEQ ID NO: 3953 - DNA, 161 bp, Glycine max
  unsure at all n locations
  Clone ID: 701000458H1
ctcagtttcgtttccaaaataacattcctncccggatagagaatctataagcntttngcncatagcctcacaagcaccttgcntncncttnnncccattgttagtggttttnattgatttctgggtcagtgtggttntancctgttccacgantttggtca

SEQ ID NO: 3954 - DNA, 251 bp, Glycine max
  Clone ID: 701000459H1
cccttcttccgttgttctcttccaattgccttgattttctcggaaaattcttattttccgagaaagttcgtgtttttactgttgaatcgagaattcccaaatcggggtgtctgaaattcaaagctgttgttgttgttggcggctggggttagtctcactggaggtttgggtgttttttgaggcagagcttattctcattttgctccaatggagatgcaggaccaaatagaaagcacaagatcaaccatatt

SEQ ID NO: 3955 - DNA, 255 bp, Glycine max
  unsure at all n locations
  Clone ID: 701000461H1
ccaatatagcccaagccctatacaaccaaaccctaacacacacccatttgattcagtttccatggctagcctcaaggttgcatttttngctgcagtgctctgcatggttgtggtgagtgcacccatggcacatgcagctatcacgtgcgggcaggtgacgaatagcctgatcaattgcatcggttacctccagaacggaggaacgccgccgtcgggatgctgcaacggagtgaagagcctcaatgccgccgccaa

SEQ ID NO: 3956 - DNA, 259 bp, Glycine max
  unsure at all n locations
  Clone ID: 701000462H1
caaccttcgccgttttcttctccacctacttgtatatccttaacctgctcccacaaaacaaaacgctanctctagtctnctagtagtatcagagaatcatcataaaanagagaattagaagaaaaagntgttgttagggaagagacctcgtcctccaattatgaagagaacaacnagcatgtccgaaataaccttcgatctgaacacgaccttggacgatgatccgaacaatcccgtgaagggaccaggaggaaatcag

SEQ ID NO: 3957 - DNA, 262 bp, Glycine max
  unsure at all n locations
  Clone ID: 701000465H1
ctttgtagtagcaagcgagcatggctccgaagaaggttcttctcctntgcggggncttcatggaagactatgaagccatggttccatttcaggcattgcaagccttcggtctcgccgtcgacgccgtctgtcccggaaagaaatccggcgatgtctgccgcaccgctgtccatgtacttgccggcgcccagacttatagtgagacggttggtcacaatttttcactcaatgcaagtttgatgaagttgatgctgcaactatg

SEQ ID NO: 3958 - DNA, 264 bp, Glycine max
  Clone ID: 701000466H1
cgcagacccagaaaccttcgccaagaaccgtgaactcgaagtgatccactccaggtgggccatgctcggagccttgggctgcgtcttcccggagttgctgtcccgcaacggggtgaagttcggagaagccgtgtggttcaaggccgggtcccagatcttcagcgagggtgggctcgactacttgggcaacccaagcctgatccacgcccagagcatccttcgccatctgggccacacaagttatcctaatgggtgccgttgaag

SEQ ID NO: 3959 - DNA, 259 bp, Glycine max
  Clone ID: 701000467H1
gaaacagaagagagtcgaaaacggcagtcccctccctcatcggaagggaggaacacagccagccacgacaggattactccctggaatcgggttctgtcttcttcattgcagcagatctcactacactgcatgcatatgggagcagtggttgtcttggaccctttaaaaagcccccactaattgctactgcagatgttccgccaaaaggattgaggaaacaaggtaaggcagcaaagaaacctagcacatcagaagattc

SEQ ID NO: 3960 - DNA, 258 bp, Glycine max
  Clone ID: 701000468H1
gtcgaatcatgggtctgaaatcgccagacaactcaatttctgaaggtaggccatcatttgtactctcaacttgcagcaatgaaatggcagctggatccatatgcggatcatctgatggctggtcaatgcgcaccttttctgagctggttgcatcatcacaaagggaaaggtggtcctttgatagtgagtgttttggatctggtcgtcacaagataagtggatccagtagcaggttctcgtattctccctccatggaac

SEQ ID NO: 3961 - DNA, 255 bp, Glycine max
  unsure at all n locations
  Clone ID: 701000469H1
tcgaatcatgggtctganatcgccagacaacttcaanttctgaaggtaggccatcatttgtactctcaacttgcagcaatgaaatggcagctggatccatatgcggatcatctgatggctggtcaatgcgcaccttntctgagctggttgcatcntcacaaagggaaaggtggtcctttgatagtgagtgttttggatctggtcgtcacaagataagtggatccagtagcaggttctcgtattctccctccatgg

SEQ ID NO: 3962 - DNA, 138 bp, Glycine max
  unsure at all n locations
  Clone ID: 701000470H1
atccanttcccaattttcgaatctaccctttctctctctacgatggagccttcctcgntctctccaccgccagcnccgcctgcnaccgccgtccccttccccgcngaacccaacggcccaccttccacnaancattcc

SEQ ID NO: 3963 - DNA, 251 bp, Glycine max
  Clone ID: 701000472H1
cactgcccaagaccgcccccattgttgaggatgcgaatgcgcattgcgttgccatggaactgtgttctaagaatgatatatatgttagcagtgctagtaatggttttaagaacgagagtgctgtagttacctctgctcctcagaagaggattgaggtatgcatggggaacaagtgcaaaagatcaggggctgctgcattgatgcaagagtttgagaaagtggtgggtgttgaaggtgtagctgttgttgca

SEQ ID NO: 3964 - DNA, 80 bp, Glycine max
  unsure at all n locations
  Clone ID: 701000473H1
gnanngntttgagatggttttttattagaaaaccatctcaaaancgtggcatanacttcaagttgcagagattgttttct

SEQ ID NO: 3965 - DNA, 245 bp, Glycine max
  unsure at all n locations
  Clone ID: 701000474H1
cttttgttcctctcgtcaattgcttgaggcttttggtcaatggtctctcactggcttctgatgagggactcatcaaatccgtcaccagagaaggagatccactagaattgctaaggggtcccctttattatgttctgatactgattttatctgctcttgtgttctggcgtgagtctccaattggtgtgatctccttggcaatgatgtgtgcaggggatggcatagctgatatcattggtagaana

SEQ ID NO: 3966 - DNA, 248 bp, Glycine max
  unsure at all n locations
  Clone ID: 701000475H1
ctctctcacctcaacanactcctctgcatgccgccgctcaactctncaccctctacttcnccaccgcgcagagtcgtcggagtttcgaccaaatctgtcggaaggccgaggatggtcgccgatttcgcgaggccggtggggcgtgtccgagcggtgacgagcgacgacgagtggggcccnnnnnnnnnnnnnnnnncatacggcggaggngtggcggtggaggagaaaccgacggagacggaaacgga

SEQ ID NO: 3967 - DNA, 250 bp, Glycine max
  unsure at all n locations
  Clone ID: 701000476H1
acagctactcgagatggttngattaaaagattgcgcaggaataatggaaaatgggagaattggaagcatntagatagtcatactttgctaggnatcgcaacannaaaagaaggtgntctcattgtttgtgatacttccaagggtttgctcaaggtnacagaagaagatggttttagtgttcttgtttcanacgtaaatggttcnccagttaaggtttgcagacgatgtgatagaaggctcaaacgggact

SEQ ID NO: 3968 - DNA, 77 bp, Glycine max
  unsure at all n locations
  Clone ID: 701000477H1
cncatcanactcacttccangtnncttcttatcttccaacancagtccagttggcatggcatacttgttgangngtt

SEQ ID NO: 3969 - DNA, 251 bp, Glycine max
  unsure at all n locations
  Clone ID: 701000478H1
tcgaatcatgggtctgaaatcgccagacanctcaatttctgaaggtaggccatcatttgtactcctcaacttgcagcaatgaaatggcagctggatccatatgcggatcatctgatggctggtcaatgcgcaccttttctgagctggttgcatcatcacaaagggaaaggtggtcctttgatagtgagtgttttggatctggtcgtcacaagataagtggatccagtagcaggntctcgtattctccctcc

SEQ ID NO: 3970 - DNA, 77 bp, Glycine max
  unsure at all n locations
  Clone ID: 701000479H1
gcaactggctcatgtctcagccaaggaaggtngtcncttggccagtgtcagttgctgttgcctgaaggcagggtgtt

SEQ ID NO: 3971 - DNA, 261 bp, Glycine max
  unsure at all n locations
  Clone ID: 701000482H1
tcacgagtatattgaggtgattgcnaacacatcaacaatgaagaagattcattttctggtggaattggaattgaaggagcagtttcagattgcaaaagcaagtgaaaattaccagaatctagagtcctgtttgccagaattttatattggaaaaccggaatacttaactgccattgttcgagttatgtgcaatgctgcaaagaaatcaatgaagganaagaaaatgcacgtgggtccgtggaggaagagcagcttcatgcc

SEQ ID NO: 3972 - DNA, 261 bp, Glycine max
  Clone ID: 701000483H1
cattaggtgctttctgtgcaacacatgtcaaaaccttacgcgaagatatctcattggagcatcaatagaggtggttcttccagccaacattaactggaccattggaaatctccctagcaacagaggaatccacagaaagtgctcaagaatgcataacaacctttccctcttgttataacttccatctttctttttttctccttagaatatcttttgtaatagaaaaggttagtgagtaccatctcaggtacatagggaagt

SEQ ID NO: 3973 - DNA, 251 bp, Glycine max
  unsure at all n locations
  Clone ID: 701000486H1
ctcacacacaaggntatagcngcaagagttattgccaaagagattaatcttgaagagacaccagtttccaaagttatgactaggaatccggtatttgtcctttctgaaactctagctgcagaagccctccaaaagatggtgcaagggctgctgagaaaggataagcaattgcagcagctgttgaaggagttgaaaaacactggggaacatcagactccaatacatcattcattgagtctcttcggtagcaa

SEQ ID NO: 3974 - DNA, 252 bp, Glycine max
  unsure at all n locations
  Clone ID: 701000487H1
cgagtatataattgggaggcgaatttgggacgcaggacgaatttactactgtgtcactaagggagtaccttgcccctccatgccaaggcataataaacctaaacgagttgatttattttattcaagctggtgtattcgtgcagttacatcangaaaagatgaccagctgacttcatgtgaagtgttattgtttcatcacgaagatatgggaattccctgggaaattgctaagcttggagttcgacagggtat

SEQ ID NO: 3975 - DNA, 248 bp, Glycine max
  unsure at all n locations
  Clone ID: 701000489H1
gtcgaagaagtgaaggtgttgagtgttttcttcttgtttggatctgagagagaagagcgagcgatgacggtctttcatttcttcaactgcggncattctcaccttcggcccccacgccgtctactattctgccacgcccttatctgagtatganacactcggaacctctatcaaagccgctgttgtttatcttgcaacggcattagtgaagcttatttgtctagctacttttctcaaggtttcggaga

SEQ ID NO: 3976 - DNA, 245 bp, Glycine max
  unsure at all n locations
  Clone ID: 701000490H1
tgcactccctgttattactnnnttgnctantatgacctagtttccttcttaaatacttgtgtattgtgttctccagaagagctctgtgtctgcagatccttngtcagattttgacagaattgaccactatgatgataatactattgttgaaatttctnctctatttgggcatcaactgcaagagctcatgttggaggtcagttctcttaaggaaagaatanacatgcactcaagtttgacacagg

SEQ ID NO: 3977 - DNA, 251 bp, Glycine max
  unsure at all n locations
  Clone ID: 701000493H1
aggactcgaaaatgtgatcgcaaggcacagtncgtttaggcaaagcaaccagacttgctgtagaggcatggggtttgaagaattgcacccaaaaggaagagtggtacagtgacactgtgactgctgttcttgttcctgcttacattgatagtactgaaatngttaggagggcatggaagagatacaatttgagcttaggtcttggactgaacaaagttgctgggaaggttttcagaattggacatcttggc

SEQ ID NO: 3978 - DNA, 256 bp, Glycine max
  unsure at all n locations
  Clone ID: 701000494H1
gcttgagaagggagaaaaaggaatcggagatggaacagttagctatggaatggatgatggtgacgacatttacatgcgctcttggactggaaccattattggcccctataatactgtacatgaaggaagaatttatcaattgaagttgttttgtgataaagactacccagaaaagcccccaagtgttcggtttcattcacgaatcaatatgacttgtgtnaatcatgagactggagtggttgaatcaaaganattt

SEQ ID NO: 3979 - DNA, 275 bp, Glycine max
  Clone ID: 701000502H1
cttcaaaacactcataacacaaagcacaaagcaaagctcatccttgagttaaaaaatggcagcagcttcttccatggctctctcatccccatccttggctggcaaggccgtgaagctgggcccatcagccccagaagtgggaagggtgagcatgaggaagaccgtcaccaagcaggtctcctcaggaagcccatggtacggcccagaccgagtcaagtacttgggcccatctctggcgagcccccgtcctacctaaccggtgagttcccaggcga

SEQ ID NO: 3980 - DNA, 128 bp, Glycine max
  unsure at all n locations
  Clone ID: 701000503H1
ggagaaaaatggaccccaagtgaagcttcttgcttggttttgtttcgtttaaagtaaggtatatgntaccatgttcttactcttcttccacacnacatacnntnaancantcctcactngngtccatt

SEQ ID NO: 3981 - DNA, 128 bp, Glycine max
  unsure at all n locations
  Clone ID: 701000505H1
gtcgaccattaattcgacacacaatgagtanacgacgccgtcaagccgntgcaaaatctgntggaacgcgtttgggcgcgcgtntggcacgtctagagacgcaactgggtatggagggagcgctacnt

SEQ ID NO: 3982 - DNA, 126 bp, Glycine max
  Clone ID: 701000506H1
aatgaaggtttcagcggttggcactagcagtgttaccctttcttccctcttccgatttgaatctggttcggtttcgctgttatcaaaatccaaatcatcatttggcgtagcatgctctttggcttc

SEQ ID NO: 3983 - DNA, 264 bp, Glycine max
  unsure at all n locations
  Clone ID: 701000507H1
caaagtgaggcctctcaaaaaacanacaacagtnacatcaaaatgccccttctccttcntcttattctctnnataccccanccccacttgcttagcttcannnnnnnnnnnnnnnnnnnnnnnnaacaattacttgcaagtcttgagttttctcctccctgttctctggttttggaattgagacaggctttatttataattttaaaaacttgtttccctccctcccttatttttgggttttntcaattgttcttgtcatcttgt

SEQ ID NO: 3984 - DNA, 325 bp, Glycine max
  unsure at all n locations
  Clone ID: 701000508H1
cgcaaacagctgttcctacaatcattccaaatgtgcccttccggtcgcaccctcctcccttcctccgtctccgatttccgaccggcattcgacgtnccttcgatgccgaaccggcgacggcaaaatncagccgcgaacgaccctnccgcgnccttctgacgnccggagtncggcggncggaggagatgaacgtgnattcggggggcaatgcatggaacagtgggctngancacccaaattnagggaacggggtttcgtgggnagttacggagggangtttncgcagncggcgttgggttcttcgggncgggaagnaagaaaaatc

SEQ ID NO: 3985 - DNA, 272 bp, Glycine max
  unsure at all n locations
  Clone ID: 701000509H1
cacttctctcantctaaanttctgaagcaccttgttttcanntgtntctgctttncttttgtagttgagtacttgtccacttcttagctggttggtttcaacttgnaccatttcttnctcagcattctatatangtcctcatcccantgtctgcattgctagctctcatattancccaantctttgattgncatttttattttttnttgtttctatgagttgtggaaaatgttacttagaagntcctccgcaccaattctaanttcnttgtt

SEQ ID NO: 3986 - DNA, 264 bp, Glycine max
  unsure at all n locations
  Clone ID: 701000511H1
ttctttcaatgtggagatattttntnggagatctcgtctttgaactttctaagatgacttctccctacattaaatgtacantctctttcttcatagcatttggaaatttggctgatgacaccatcaatttngaggcttttccccacaagctggtgcantttggagagattcaggaaaaagttgtattganattttcacaagaggaatttcttacagcttggtcaactcaggtgcgtcctgcaacaatctgttggctgatgggtg

SEQ ID NO: 3987 - DNA, 265 bp, Glycine max
  Clone ID: 701000512H1
tttcttcttgtttttctcatcttggcctcgctagcctttctctggttcatggtttgaccctagtggagaattcaccttctttggctacaaagccatatctgaaagcaattcaacttcaacaagggtgtttcagcaccaactttggtcaagatcatgatgacgaaaaaagggtttttttctctggcaaggagtggatggttcatgaggctgtaaaggaaatgaggagtattggattctgggtatgtggggttatgttgtcttgttt

SEQ ID NO: 3988 - DNA, 268 bp, Glycine max
  unsure at all n locations
  Clone ID: 701000513H1
actccctcctcttcacacattttcttagctctctccaacaatccctctcgttcacactttcagattgtgtgaagatgggggctggtggccgaactgctgttcctcctgccaacaggaagtcagaggctgaccctttgaagcgggtaccanttgaaaaacctcagtttagtctcagccagattaagaaggccattccacctncactgtttccancgctctgttctccgctcattctcctatgttgtttatgacnccaccatagccttct

SEQ ID NO: 3989 - DNA, 269 bp, Glycine max
  unsure at all n locations
  Clone ID: 701000515H1
ctctctcantgtgggaagaacgaagcagaagaagcatctcagaacagaaccgaacccactcagaagcaaatccgaaaacccctcatataatagtactggtattcagctgttcatgacaaaagcctgaaccgatcatgtcagaaggtgcagaaattgangagcgtgtggaccttgacgaggaaaattatntggaagagctggatgatgatgttgaagaacaaatagatgatgatggagtggatggaggtgaagatgaaaatgctgaaggt

SEQ ID NO: 3990 - DNA, 268 bp, Glycine max
  unsure at all n locations
  Clone ID: 701000516H1
taaaatagttggttgggcaccccagaagaagatattgaaccaccctgcattggctagcttcattagtcactgtggttggaattcnaccctagaaggtatatgtgccggtgtacctttcttgtgttggccatgcgccactgatcaatatcttgacaagtcatatatatgtgatgtgtggaagattgggcttggactagacaaggatgaaaatggaataatttctagggaagagataaggaagaaggtggatcaactgcttgttgatgaa

SEQ ID NO: 3991 - DNA, 277 bp, Glycine max
  unsure at all n locations
  Clone ID: 701000517H1
ttnntcctaaaacatntcaatgggttnttcttctattannanatcgannanaaagcatgacnatggntgcgatcgtggtgntgttcacggtctttgncgttncctncgnnctagacatgtcgataatctcgtacgacagcgcccacgcggacaaggccgccacgttgcgcaccgaggaagagctgatgtccatgtacgagcagtggctcgtgaagcacgggaaggtgtacaacggcgctcggcgagaaggagaagcgcttgnagatgttnaaggaca

SEQ ID NO: 3992 - DNA, 277 bp, Glycine max
  unsure at all n locations
  Clone ID: 701000518H1
ccagaattcttgttctatgcctccttttgagtgaaaaaaaaaaancatcaanacaanacanttgttctnngntcagntttgaangnttnggatcttaatatacatngnntaaangaaaaataaagggatnaaatttaagttncttgnccnaataagatccttgctttaaattgnantactcatnaagagnnttggcagttcgggtacactgggtgcnntaccacgatttgtccaccaacagangaacacagtccgaggaanaaccangtgnatggga

SEQ ID NO: 3993 - DNA, 272 bp, Glycine max
  unsure at all n locations
  Clone ID: 701000519H1
attgaagattccgcaacagagagtagantagatggcgcggttgatcacagtggtgtggtgcgcggtggcggtgctactgtgcgccgcggcgggcgcgtcgtgggtggaggaggcggcgaacccgatacgaatggtggcgggggtggaggcggaggtggttcgggtgatagggcagtgccggcgcaccctgaagtttgctaggttcatgagcaggttcgggaagagttaccgaagcgaggaagagatgagggagaggtacgagatattctcgc

SEQ ID NO: 3994 - DNA, 274 bp, Glycine max
  unsure at all n locations
  Clone ID: 701000520H1
cntgggggaagataagagaactcacaccatatccgttctcgntcctctacgaattttcatatcccattcatattnttctcatnatggacnttgnccgcgaagttcaccgtttagaccttaccggcgtggtcattttggacgcangaaagccctccgtantccgccaccttccgccacgcatcctcacnngnaacaaacancantttaatntacacgaaccggttctcgggcccatcgaggcccaattncgcttcctcttccanacaacatnngc

SEQ ID NO: 3995 - DNA, 271 bp, Glycine max
  unsure at all n locations
  Clone ID: 701000521H1
ccagtgtccaaaatgagaatgaactggaaggaagggaaactcagantcgcaaagcttttgatgcacaagatcagagtggaggtggtggtttcattagtntggaagggttccatcaagtcctcagagaaacaaatatcaantttccaccagagaagctggaacatctttgctctgcagggttcattgtatggagtgaattctggcaagtaattttggatctagacaaaagcttggggggtttgaaggattcatcaggattgntgggtaagaa

SEQ ID NO: 3996 - DNA, 269 bp, Glycine max
  unsure at all n locations
  Clone ID: 701000522H1
aagaactacttacatgcatgtnaganccttctgtccctaatggttgacaagaggcgacaccggaaaacagcaattctctccctgaagaaatctggtcccgagcttcctgagctcctcacacaattttctgccagcattgccggtactggccttgctgtcctgctatctgtgatctgtaagctagcttgtggaaggggggttcccttttgtgcttataagctcctcaacactgggtttggatttgggctggtttggcttcttgggcagtt

SEQ ID NO: 3997 - DNA, 269 bp, Glycine max
  Clone ID: 701000523H1
cacaaatgaagatgctgcaggagagtcctcaactcagtcccaagtcccaaatgatgctactgtgagcagcaattaaaactcaactcagtttatcttcctcatcccaaaatacttggcccattctagtttttggccctgtgcgactcttgattttgaaagggtttttttggaggggatggtaggataggttgattcctttctacggtgactgagatcgattttggtagcaattgaatcaaatagggaaataataagaattctttggaatt

SEQ ID NO: 3998 - DNA, 276 bp, Glycine max
  unsure at all n locations
  Clone ID: 701000524H1
gttcnngacaagttgncacaccaggtgaagaagatgtcnaaatagtcatgcncaatggctganagaagcagtatctggtacangntagggntccatatactgnttttacaaaccgtgtanaggagnttnactatggaaactcttatttcttccggcctattagaaaaagtgacttacaaaaggttgatccacggaaagcttgtgaattcttcagtacatgtttcanagatccatcaggcatcttantgttgtgattgttggnnacattgaccccac

SEQ ID NO: 3999 - DNA, 266 bp, Glycine max
  unsure at all n locations
  Clone ID: 701000527H1
agaanancaaangcagcacgagaaccctaactgccgccgtcgcaggcgcagtntccggtgtcgttatgttatcccttactgttgctttcttcctcatcaaacgcaagaacgaacgtggccgtcgatgaaggttccaataaaaaaggtggaacttctcgaggcggtggctcatcatcgctaccaaccaacctctgccgtaagttctcaatcgcagaaatcagagccgccaccaacaacttcgacgaactctttgtggttggattngg

SEQ ID NO: 4000 - DNA, 269 bp, Glycine max
  unsure at all n locations
  Clone ID: 701000528H1
aaacatgggctctaacacttcgttcttcaacttcttttattaatcagaaggaaaccaaagtcctcaaaacttctgacaatgcccctgcaatagttagtttttcaaaattcaagccatcatcatcattgttccggctccgggcaaaaaattccatggcaagaagctcatncacactcgtgaganatgggagaaggtgctggctccgtcggtcgcacatagccacaatgattcaaagagagtacctgtgtaggtgatgttgccattagaca

SEQ ID NO: 4001 - DNA, 123 bp, Glycine max
  unsure at all n locations
  Clone ID: 701000529H1
cggaaggagttttattagggattgccagantgggtactcattaacaatatacatcaggctgaagtgcgttttctgaactatttnccnctttnaaaatnnngnaggnncgcggnagncttnttt

SEQ ID NO: 4002 - DNA, 271 bp, Glycine max
  unsure at all n locations
  Clone ID: 701000531H1
ccaattcgcttcaatggcgttccctctctctccctccttcaacccctccatcgctgcgaaaccgaatcgcgtgcttctcgaaganacagcaccgccacgtcatcacaaaggatacggaagtggtggtggtagacagagacacggcgcgtgccacgtcagcgggcgcgatgctggagaggataatgaagcggttgaggagtgtggcggtggttccgatcgtgattgcntcggttcagataagcgcgttggtggcgccgttagttgattacgt

SEQ ID NO: 4003 - DNA, 274 bp, Glycine max
  unsure at all n locations
  Clone ID: 701000533H1
gtcagaatgatgtctgtcacangcanaancnttgattttgtggcaatnacntngtctgcttgtgggctggctcttnnaatgcctntnctgttgnnaggtncnctgtncggcactatgcnaagctgaatngcnanaattctaaagggtgtggcananntcatngggctcgtaaattggtttgttgnaagaagaggaacactcattgtcnggtttcttctntgnngactgcacngcntacggtgaatggggggatcatgctttgnaggccttacca

SEQ ID NO: 4004 - DNA, 95 bp, Glycine max
  unsure at all n locations
  Clone ID: 701000536H1
angctgtattggccacaagacaagtcncatagnatttangcttacacagctggttgtgagtggnntgccangcatncaaagnctgnntcgaaatc

SEQ ID NO: 4005 - DNA, 271 bp, Glycine max
  Clone ID: 701000537H1
ctctcactcagattcagcaattttctattttcttctctcatggcttcagattccaaaaaggatttccctgctgatgacaaagctggaacagcagagaataaagcatccaaagatgaaacgtcatctaaagattctccagcagcacaaagagctactacagctacttctggacctgcaactggttttccaggcaacccttttgacttctctgcaatgtctggcctgctcaatgatccaagtatcaaggaattggctgaacagatagcaaaag

SEQ ID NO: 4006 - DNA, 270 bp, Glycine max
  unsure at all n locations
  Clone ID: 701000540H1
gattgnacaggatgatgatcatatcaaaacattccagtcgtcagattcagntaaaacatccagaaatggtgatgtgaaactgtttgggaagatactaaccaatccttcaaccacacagaaacctncatatgggtgccattttcttcactccctttagcacccaccaaaaacaaaganaaaaanaaacccttngncaananaaccatcntggccacctttggtnttnggnaatcagnnttnnntggtcaaacngntntgaaggngntnaat

SEQ ID NO: 4007 - DNA, 263 bp, Glycine max
  Clone ID: 701000542H1
cagcgctcagctctcagcaatatcttcgtcgatctctacggcgtcgtttgaagggcttcgaccttcggctgttcagtttgcttccgcgggcagaattagaattggcaatctctcccaaaggtctttccggggcttggttgtcaaagccgccaccgttgttgcccccaaatacaccgcgattaagcctctgggagacagagtgctgataaaaattaaggaagcagaggagaaaactgagggtgggatttgcttccatcaactgc

SEQ ID NO: 4008 - DNA, 264 bp, Glycine max
  unsure at all n locations
  Clone ID: 701000543H1
ggtgaataataattttagatgttgtatgtagttaacgaaatgacatttagcgggtataatgtatatagtttggatatcttataccttgttgctatcttattaggtatattcgttattataagtaaaaaccctattgtatctgttttatttttaataggtttattctttatgtatatctgtntatttaattttnacaggattaaactttataggattatcttacttattggtatatataggggcagtatccatcctatttttatt

SEQ ID NO: 4009 - DNA, 264 bp, Glycine max
  Clone ID: 701000545H1
ctcacactctttgtgaaaaaggggagtttcttattctttctagacgcttccattgatcggcgatttcttagacatggcggagcatcacgaacacgaggaagtgaagggtgagtcctgttggagaagatttctgggaagatccacgaccacgattcgtcatcttcgtcggattccgacaacgagaaaaccagcgcttctgactccttgaagtcaaaggttttcaggcttttcggcagagaaaagcccattcaccatgttcttggt

SEQ ID NO: 4010 - DNA, 265 bp, Glycine max
  unsure at all n locations
  Clone ID: 701000546H1
tctatgaatttttcaccctcattttctgtggcaataccaactgactnntcaactcttantattatataaaactctttgcattacatatttatatntgagcacaagtggagtcaagtttactggtgagacactaccagtctgttttgtactatgattgaagatacaacttttgacagcttggatatagcttctgtgtggttacaaattactttatgacatgtcaaaagttacaaatgcgtcaagtaagctcttgtacacccctctc

SEQ ID NO: 4011 - DNA, 270 bp, Glycine max
  unsure at all n locations
  Clone ID: 701000547H1
gaagaatgaaattgaaaagtgaagtttagagatggaagaagaaaaagcagcggcgtactacgacgagctggcccgtaaggnngaggnagctgcgaggttcaagcaaggtctaggcttttcntcttcagcaccaaacgacgacanttccaaaaccctcctcntccttcctctccaaattcgtcaaagcctcctccgagtcggagaagcaagcgcagtnccaatccatccacgacaagcttaagaaaaatccctcttccgagtctagggttt

SEQ ID NO: 4012 - DNA, 267 bp, Glycine max
  unsure at all n locations
  Clone ID: 701000548H1
gtcacaggcttcactttacaggatgggacttctcactacatgaaaggccttgttctcctgctgtgctacatnnttattggggcatgcttcttcgtacaaagaacaccctttaataatcaagctgatgttactaacatcacacttaaaccaaccactaatgcagttttaagcgcttaattagtaggctttggcctatttgttgtcccttcctaagatgaagaaggtggcatcgatccaaaccaaaaatcagattcaaattcaatggat

SEQ ID NO: 4013 - DNA, 116 bp, Glycine max
  unsure at all n locations
  Clone ID: 701000550H1
cgnnttttgctgttgattannatcgtgcagggcaagantatttgttagccttantaaccanagtagtnttcatgaaccaaaagggtcatgagnagaaaattgaaanaccagatgat

SEQ ID NO: 4014 - DNA, 272 bp, Glycine max
  unsure at all n locations
  Clone ID: 701000552H1
ctttgattggnccattttganatatcagcaatcttcaagtgccacncgcccctgcccgtgctattggtccggccgctggaccaagttgcaggtgtgccaccactggttgcaaatggtgatggacagttaggtggagaggatggtagacctaataattggtcttcatcagatcctactcgtaggagaaactctggacctattgttantgacggaatcttatctagacaaaaaggcccagttacatatgactcaaatggatctaaagatgcgat

SEQ ID NO: 4015 - DNA, 270 bp, Glycine max
  unsure at all n locations
  Clone ID: 701000553H1
tctcatccccctccaatgatcttgtcaatttgattgtatctgttgaagatacaggtgaaggtattcctcttgaatctcagccactcatcttcaccccattcatgcaggtaggttcatccatctcccgaaagcatggaggaacaggcattggcctaagcattagcaaatgtttggttggcctcatgaatggggaaattggatntgtgagcatacccaagattgggtccacattcacttttactgctgtattcaccaatggacaccgtagtt

SEQ ID NO: 4016 - DNA, 268 bp, Glycine max
  unsure at all n locations
  Clone ID: 701000554H1
cagaaatgcggtatgatttgtggacacgtggcgagaatcgagcggataaggaaaaanatctggaaggtcaaaacgatgggggacgctagcaataatcttttatagtgattgcagttccagacagtgtcnnnnnnnnnnnnnnnnnnnnnngcattgggtgttcctgctcttcccctgacatacgtggctcacgttctggcacttgttgccagcatcttggtcgtgctctgggtcctcaattttaggggtggcttggcttgggattctg

SEQ ID NO: 4017 - DNA, 268 bp, Glycine max
  unsure at all n locations
  Clone ID: 701000556H1
cgaanaaagaaaaaaaaaaccctaacgcactcgagaccctgagatttttcatcttcgtttctcattctctttttgatcatggacgtcgaggtncggcagatcttcaacaagttcgacaagaacggcgacggaaaaatctcggtaacggagctgaaggacatgctcgcggccctcggatccaaaacgacggatgaggagttgaaacgcatgatggaggagctcgaccagaacggcgacggtttcatcgacctcaaggagttcgcggatt

SEQ ID NO: 4018 - DNA, 265 bp, Glycine max
  unsure at all n locations
  Clone ID: 701000557H1
gtggaacaaccttgtaagtttgtaacaatgacttcctcggttacttcctcttttcgcatcagcaatttgaattctgtttttgttggtgagacaaataaattcagagtttcaactgtncctggngctcatgttggtttcattaganagactgtagaatgtaaggnatcacganttggnaagctaccaattcctgttccatccaatgtnacagtcaaattggaaggacaggatatacnagtgaaaggtcctttgggagaacttgcat

SEQ ID NO: 4019 - DNA, 264 bp, Glycine max
  unsure at all n locations
  Clone ID: 701000559H1
gggcgtgtggcagaatgaccgcgtggagatcattgccaacgatcanggcaaccgcacgacgccgtcgtatgtggcattcacggactcggagcggctcatcggcgatgcggccaagaaccaggtcgccatgaacgcgcacaacacggtgttcgacgccaagcgtcttatcggccgcaagttttcggatccgatcgttcaagccgacatcaagcactggccgttcaaggtgacgtctggtgccggtgacaagccgcagatcacggt

SEQ ID NO: 4020 - DNA, 120 bp, Glycine max
  unsure at all n locations
  Clone ID: 701000560H1
ctcttaataaatctaatcggaatcttcaccagttaatcagagctttgagtagataagactcgtggatgtgtcatctcctttattcaacgttgaatattgttattattcttgnccggtatt

SEQ ID NO: 4021 - DNA, 75 bp, Glycine max
  unsure at all n locations
  Clone ID: 701000561H1
accacgtnntantaaaanttntaagantccaaagacaccaagaacaccaagaaccccaagaacaccanttagnnt

SEQ ID NO: 4022 - DNA, 265 bp, Glycine max
  unsure at all n locations
  Clone ID: 701000564H1
ctgtnattccagtttggagaattagcagagatataatgagttacnggattgaagttgggagagtaaaaagtatttttactctaaaaacaacaaaccttttcttcttaataatggtctaatcctaaaaaaaaaattaatnttattgaaacttgcagttttatattgtaatttgtaganatactttcatanttttagtcaaacaaaggcatagtctgtctagaaggcatagtctgtctaggagccattgactctggttgtgaatttt

SEQ ID NO: 4023 - DNA, 274 bp, Glycine max
  unsure at all n locations
  Clone ID: 701000565H1
agaaacctggtaggaggtgcgaaacgcagctgcgcaatccnaannccgaggancantncttctactnaaactccaccatctgtcatctacgccttcgcccctctcgtgtttcccacaacggttactccttctccctctcctatttcaacccatgccatggcttgtctgagnnnnnnnnnnnnnnnnnnnnnnnnnnnnggcgccacctggctctcttcccctgacgaaatgctccaacactgccccctctccgcncaccaccgccgtctccgcg

SEQ ID NO: 4024 - DNA, 270 bp, Glycine max
  unsure at all n locations
  Clone ID: 701000567H1
gnagagaagaaagagattgaagagacccagcagancgacaaggacagatggaagggtcttggcctatgatatctcagacgaccaacaggacatcacaagaggaaagggtttggttgactcccttttccaagctccacaggatgctggaactcactatgctgtcatgagctcctacgagtaccttagcactggacttcgccagtacttggacaacaacatggatggattttacattgctccagcttttatggacaaacttgttgttcacat

SEQ ID NO: 4025 - DNA, 269 bp, Glycine max
  unsure at all n locations
  Clone ID: 701000568H1
caacaacttctccttcttcaagggatgtgctatcaaacagttaagttatattgagcaacaaataantggctgttacaggtggaagtaaatcagtaggaagtgctcctcctggagttgaaggtcagccgaataaagtaaataaccgcaaaaatatgagangtggaagccctgcattaactagacgacaaacagttgcaacagnttnttctccaccgtctcctgcagccctacgagcttntatgtcattacgtttgcagttgctcctgagg

SEQ ID NO: 4026 - DNA, 269 bp, Glycine max
  unsure at all n locations
  Clone ID: 701000569H1
caactccaaacacaaagncatcatcatccatggcngcctccgtctccactgtcggagctgtcaacaganctcttttgaacctggaatggttctggagctggagcttcagctcccagttcagccttctttgggaccagcttgaagaaggttattgcctcaagggtccccaacagcaaggtttccggtggaagcttcaagattgttgctgtagaagagaagaaagagattgaagagacccagcagaccgacaaggacagatggaagggtnt

SEQ ID NO: 4027 - DNA, 266 bp, Glycine max
  unsure at all n locations
  Clone ID: 701000570H1
ttgacgtcagtatgcatcacgtttgtaaaaagtattataggtagctanttcatcacttatttacttttttttttacattttttctaatttattttattatcattcataataaataaggtaaaaatatacaaagtggtctgacaagaacttatgacctaactctgacatctttaataaatagatcaaaccaaactagaccttatttatattagatggtaggtatttgacaaaccacctaactatcttatttntatgcttatttactt

SEQ ID NO: 4028 - DNA, 268 bp, Glycine max
  unsure at all n locations
  Clone ID: 701000571H1
aggcnaactaccctgaggatngaccaggcacgctcgaagtagtgctggccanaagacccttgttttttagggancatcaatccacaaccaaggaaacatactttgtggcaggcaacatcagactttactggtggacaagccagcataaacaggcgacattttctggcagtgtccacaaggattgctaggcaagcattttgagaagctcattcagtgtgatccacgtctcaactatctaagccagcatccggatttggtgttggattct

SEQ ID NO: 4029 - DNA, 264 bp, Glycine max
  Clone ID: 701000572H1
ttatgcagagaaacaagctcttggagaagtgaatgctgagcttcttgacacccaagtgaatcctgctgtgtgggaaattagtggacacatggttttaaagaggaggaaggattatgatgaggcgtctgaaggcaatgcttggaggcttcttgctgaggtgtccctttctcaagagaggtttcaagaagtcaatgatcttgtttttgaagccattggctgtggtgaattggaggatgtcaatgttcaaagtgtcaaaaaagaagt

SEQ ID NO: 4030 - DNA, 263 bp, Glycine max
  unsure at all n locations
  Clone ID: 701000573H1
ctcttatcttctttgtaanaactacgacgaagtaacaacaatggtgncgggaactgcaaccttgaagctagcctctccgntttttcttctccaatgtcaaatttcagcgcttcctcttcattcccctctcgtctcccaatgcgaaccccttcttcttctaaacctcgatttctcaggatttacgccttgaccagcaacgacatcaaggtcggcaccaacctcgaagtcgatggtgctccttggcgtgtgttagagtttcttca

SEQ ID NO: 4031 - DNA, 262 bp, Glycine max
  Clone ID: 701000574H1
cagatctggaactagacatcatcaaggaggaccttttggaattgtcatcaaccgtcctcttcacaaaaagatcaaacacatgaaacctacaaaccatgatctattaactaccttctctgattgttctctgcatttcggcggacctcttgaggcaagcatggttttgttgaaaacagaggagaagatgaagcttccaggatttgaagaggtaatccctgggctatgttttggatctcgaaacagtttggatgatgctgcagga

SEQ ID NO: 4032 - DNA, 262 bp, Glycine max
  unsure at all n locations
  Clone ID: 701000575H1
caagttgaaccaacggatgcctctgatatatgtaaaactctatacataccagatctttagggcactctcttatattcatcgttgcattggagtctgccatcgggatatcaagcctcaaaatctattagttaatccacatactcaccaggtcaaaatatgcgactttggaagtgcaaaantcttggtaaaaggcgaaccaaatatatcgtacatatgctctagatattatagagcacctgagcttatatttggagcaactgaa

SEQ ID NO: 4033 - DNA, 448 bp, Glycine max
  unsure at all n locations
  Clone ID: 701000578H1
agtgacaaattggaagttcagaanaggccctgtgaggcctgtgcccctnaccaaaactgcccannnatcntgganacagatcatgcnactgcatgccaatcggggctcggctctgcncggttgctgcccaaactnggtancgggaaaggcncgttccaaancaagnagggcnccctctctgtgggaaaacnctngnaaattgggtntgctngggaaggctngggnagggctttgcnaggctngcgcccaaagtnttccaaggccctgtantntttggggggnaaccaaggctttgaaaagaanagggtntnattnggcccctnccaaaggggggtgcccccccaaaacaggcaanagggtntttcncgggttgganaggctntgcaaagggatntgtgtnggctcgttaggaaaagangcanaggaaanagganggatttggaaagga

SEQ ID NO: 4034 - DNA, 264 bp, Glycine max
  unsure at all n locations
  Clone ID: 701000579H1
ctcagtctcctcaccctcatgcgtacgcgttccttcatgtttttggnaaccaaatggcaagantcncaaagagcgtactaaggtttcatgtgcagctcacaatgataataagaatccgttggttggaatcggtattggggttgtaacgtcttgtgtgatgggtttaactgcattggatgcggacgccacgagaatcgaatactacgcaacagtggcagagcctttgtgtgagtacaactatgttaagtctggcctcggctactg

SEQ ID NO: 4035 - DNA, 267 bp, Glycine max
  unsure at all n locations
  Clone ID: 701000586H1
caataccttgtgcaattgtgccaaagggcaatgaactatattcagaccaaatgcgtggtcaagcgcaaaggcaaagaaaccggtgaaagtgaaaccttgtgttttacaaagtccaaggataacaacaataacaacatgtgcgaccgccactgcggaaaacgctaccctctgttgtcgttttgggagctgccggaattcatgaaggacaacgaatacattcttcgttattacagagccanttggcctttcaagcaagctctctttagc

SEQ ID NO: 4036 - DNA, 261 bp, Glycine max
  unsure at all n locations
  Clone ID: 701000589H1
ganactcatgaganagtcaaggtggtggagtatgaacaagttcctgagaggcgcgttgtctatgaagagaaagttgcttatgacaacgatcgttactactctccaaggtattgaaattggacaaatggaagaacacctataacgtgttatcatgtggctttttattaggcaggctacctagtataccaaaagcaccactgtgcttgtactaaataaattcctgcttatatatactggccattatgttatatataaaaatca

SEQ ID NO: 4037 - DNA, 263 bp, Glycine max
  unsure at all n locations
  Clone ID: 701000591H1
ggaagaaaaaggaagcatagaatctgataatgaagataccaaatgagaaatattttaaacattgcactgtacagcatagttgcctcccaagtatactaactagtataggattaacccacgcaatccctagaaagaaactactgctagtgtaagatgccantatgctgtttatgtgcatcataaaatgcagttctttgctcatattcatagatcttagatgcacatttgtgattatactcgtttgtacgaaagaactcatattg

SEQ ID NO: 4038 - DNA, 261 bp, Glycine max
  Clone ID: 701000592H1
ttgtaaacaacgtgggaacaaacgtaccgaaacatacccttgatgttacggaggaagacttctcatttctgataaatacaaatcttgaatctgcttaccacctaagccagcttgcacatcctctcctgaaagcttcagaggctgcaaacatcatttttatatcctccattgctggtgtgctatcaataggtataggatccacttatggtgcaacaaaaggagcaatgaaccaactgactaaaaattggcatgtgagtgggc

SEQ ID NO: 4039 - DNA, 264 bp, Glycine max
  unsure at all n locations
  Clone ID: 701000593H1
ccntacttcatccaacagntccattatttgatcaagantcacaaactctaaagcctcgatgcgtgcganccttgaagcggatttttatcctttgtgatcatgacagagattngtgcccttagtgatgctgagctgaatgactttcaggttaaatgtttcaatgctcctttgcaaccatctgaaattgtgggtgtaaagaaggttgtanaagaaaaattgtctgaaggggtgaatgaacgtggacttactttgactggattctta

SEQ ID NO: 4040 - DNA, 267 bp, Glycine max
  Clone ID: 701000596H1
acgaaacatggcaagagtggtggcactccaacagaaccaactatctttctctaccttagcttcctctctttctgacttcagtggaaccagacttcaaactcaacttcagttcaagagaaagcaatgccatccaaaagggtctttctacgttcccgcatcgagcaccaagaaaatcctaataatgggaggcaccaggtttattggtgtgtttttgtctaggctccttgtcaaagagggtcaccaggtgactttattcacaagaggtaa

SEQ ID NO: 4041 - DNA, 261 bp, Glycine max
  unsure at all n locations
  Clone ID: 701000602H1
ggagaaagaatgttggtggtaaagtgttgggtttcttctactaggctagctttttgtttgaggttcgctcctgatgaagtttgagattctcattggttttnatggaccatgtgctagtttgttgctagcgccagaagttttatagagaggaagagttttaattatctttnttcgcgcattttatttgtgaaaacgacttggtcattctaatctttttttcttcaacactgttttttctcatacaaattgggttggccgatc

SEQ ID NO: 4042 - DNA, 218 bp, Glycine max
  unsure at all n locations
  Clone ID: 701000603H1
aatcaattttttacgaagctcccctcggatacagcattgaagacgttagaccaaacggtggaatcaagaaattcagatctgctgcttactctaactgttctcgcaaaccatcctgatacacatccggattgatagttcgttgcatgcaaccatagttttattaggattttntcttctttgttttcaanagnctttttgttgctctccttcaaactcca

SEQ ID NO: 4043 - DNA, 261 bp, Glycine max
  unsure at all n locations
  Clone ID: 701000604H1
tattgccaaggcaagctcaaaaaacgtggatgcttatacatgtgcttgagaatctgatatgctaaataatacccaattatgagacgattcagcattataganactcaaaagtcaaaagcaagtggaatccccttctttagtatttgttccatggagaagctcatgctcgatcattttgcatcatncaatgcctttgtcatagttccataatgtcacaattaatatgcacctaagagttgtttgcttttgttttggggggct

SEQ ID NO: 4044 - DNA, 261 bp, Glycine max
  Clone ID: 701000605H1
ggaaactccaattctgataaaatcaccatctaagttttgtctttaatatttttttggttattcttgatggatgttatgtcactcaagtttaattacactaaaaatttgtcatgaatttcagcctcatgttggcaagcagccaatagcaaggtggtatttcccaccagaagttgattacagattagaagcgttgccaccaaatgccaaaggattggtagtgtggataattgaagccaaggtgtgaggattataacattattt

SEQ ID NO: 4045 - DNA, 265 bp, Glycine max
  unsure at all n locations
  Clone ID: 701000606H1
ctcatggcatcttcttctggtagtttagacacctctgcaagtgcaaactccttcaccaacttcaccttctccacacaccctttcatgncccacttctttctctgacctccttgcttctcccttggacaacaacaagccaccacagggtggtttgtctgagagaactggctctggtgttctcaaattcaagtccacaccaccaccttctctgcctctctctccccctcccatttctccttcttcttactttgctattcctcctggt

SEQ ID NO: 4046 - DNA, 269 bp, Glycine max
  unsure at all n locations
  Clone ID: 701000608H1
cgccgcggagatcagagatcccggcaagaagagccgcgtctggctcggaaccttcgacanggcggaggaggcagcgcgtgcctatcacgccgcagcacgagagtttcgcggccctaaggccaagacaaacttccctctccctttggaaaatgttaagaactcgagccccagccagagcagcaccgtcgagtcctccagccgcgaccgcgacgtcgccgccgattcctncgcctctagacctcaacctacgcccctgccgccgccgcatc

SEQ ID NO: 4047 - DNA, 270 bp, Glycine max
  Clone ID: 701000612H1
cagtcaagcaaacttatggggaaaaggtcctaattcagtttgaagactttgcaaaccacaatgcttttaatctgcttgagaaatatagatctacacatctggtctttaatgatgatattcagggaacagcatccgtggttcttgctggactagttgcatctctgaagttggttgggggtaacttagctgatcacagattcttattccttggtgctggagaggctggcatcaaaacagacaaatgctccactggaggaagtgcgcaagaat

SEQ ID NO: 4048 - DNA, 246 bp, Glycine max
  Clone ID: 701000614H1
cgccgcggagatcagagatcccggcaagaagagccgcgtctggctcggaaccttcgacacggcggaggaggcagcgcgtgcctacgacgccgcagcacgagagtttcgcggccctaaggccaagacaaacttccctctccctttggaaaatgttaagaactcgagccccagccagagcagcaccgtcgagtcctccagccgcgaccgcgacgtcgccgccgattcctcgcctctagacctcaacct

SEQ ID NO: 4049 - DNA, 226 bp, Glycine max
  unsure at all n locations
  Clone ID: 701000616H1
gcagaacttgctactcagtttttcatcaatcctgccaccagtcaacctaatgtttctggacttatacttgctggtctgtgacttcaagactgagtgagtcagtcagatatgttgccctcgttgnagnnaaatatgntgtggagtgttctatgtgggaaatgatcatcagctatggctatctgagantttanaatggagtcatcaggaacntgtaggaattttgagg

SEQ ID NO: 4050 - DNA, 266 bp, Glycine max
  unsure at all n locations
  Clone ID: 701000617H1
tttccttgtcatgggctgttaagatgtctcgcacgtgctcacagtgcngcanccaacggccacaacttcacggacatgcaccgacggtggcgccgccgggtctccgagggagaacggcatcatgctgttcggcgtaagantcatgacggaagctaactcctccttcaggaagagcgccagcatgaacaacctctcacagtacgacgcggagttcaacgccgccgacgccggctacgccttccgacgacgtcgttcacgcctccggc

SEQ ID NO: 4051 - DNA, 261 bp, Glycine max
  unsure at all n locations
  Clone ID: 701000618H1
gatgtttccaagctgaaagcaatctttgataaagcggggatcccttacacacttagtcattctggaagaccagcaatctttgcacgtgatcccgatgcaaatgctctagagtttacacaagtagatggttgatgtttatggatattacttgctaggctacacccctttgtcgctataagtcaccagaatgtagaaataaagttacaaatgattacatgtatgtaaaggctgnngggattgtaactagtaagagccatagta

SEQ ID NO: 4052 - DNA, 260 bp, Glycine max
  unsure at all n locations
  Clone ID: 701000619H1
gaaataaaaggaggaaaaaaaattcattaatattcatattcattcgaattaattgcattaattttgagagaagaaggagaaaccaaaaaaggagcggtttttgcgatctgggtgtgcgctgttttttggcgtcattcgatgataaagcatcatcaccnnnnnnnnnnnnnnnnnnnnnnnnnnnnnnnnnnnnnnnnnnnnnnnnnnnnngtttcgtgtcatgggttttgctgatttgaatcatcaccactcgccacccc

SEQ ID NO: 4053 - DNA, 265 bp, Glycine max
  unsure at all n locations
  Clone ID: 701000620H1
ctccatgctccgccgcactttcacctctccaccactcctccgccgagcgccacctaacctcccttccgctcactcctccgacctctgtaccgccctccgcctcctcctctcnnnnnnnnnnnnnnnnnnnnnnncgcctcgccggcctcctctccaatcgccacatcctcacctccctctctgtccacgacgacgtttcggagagaatcagcatcggtgccggcgccatggcagaagcgatcgcgaanaggcgcggcatccccaa

SEQ ID NO: 4054 - DNA, 245 bp, Glycine max
  unsure at all n locations
  Clone ID: 701000621H1
ggaaggactttggactaatctccgtaccctgatgtcacacacacgaaaaattaccaccagggancaatttgtcatcttggcaacagatggggtatgggatgttatatccaaccaggaagcagtgaagattgtttcagcaacgtcacataaagaaaaagctantcaaaggcttgtgaaatgtgccatacatgaatggaaacggaaaaaaagtggcattgcgatggatgatatgtcagctatttgcc

SEQ ID NO: 4055 - DNA, 264 bp, Glycine max
  unsure at all n locations
  Clone ID: 701000622H1
ggatttggagcgaaggagaaagaaatttaaaatatttctattgttctacgtatgttttaaaatttaaaattataagatacaaaaataaatttattttaaaaccttttttctttctctgaaccaaacaagaaaataactaccttacttcccctcttcttaaccagacataatgtttagttaaaatccccctcaattaanattccttaaaaatggtttttgaanattgattaaaaactagatcaaattaaaatattttgcatatct

SEQ ID NO: 4056 - DNA, 264 bp, Glycine max
  unsure at all n locations
  Clone ID: 701000623H1
caaataccaaagaatcttctttgctttctctcctttgcactttcctcctcttccttgtgattttngtttgcatcacagggagaaactgagacacagaagatgagagagataattagtattcatattggacaagctggaattcaggtggggaattcatgctgggagttgtattgccttgagcatggaattaaccctgatggcaccatgcctagtgatacctcagttggtgtagcacatgatgctttcaacaccttcttcagcgag

SEQ ID NO: 4057 - DNA, 268 bp, Glycine max
  unsure at all n locations
  Clone ID: 701000625H1
ancggaataacgaagcctcctcgttcttcttcttccgccctttctctctctagaaccgtacggtcgtttctttctctctccttcaaccggagacagcgtcgccttcttttctgaatctcgcggtgttgttagttctgcggcggttgtagttccggcggcgatgggacagcaatcgttgatctacagcttcgtcgctcgcggcaccgtgatcctagcggagtacaccgagttcaccggaaacttcaccagcgtggcggcgcagtgcctc

SEQ ID NO: 4058 - DNA, 272 bp, Glycine max
  unsure at all n locations
  Clone ID: 701000627H1
agcggctattcttgcagccaggcgtgacctncaaggaaataagtaaagatgagatatctgatgngcttgaaaggatcatagctggacctgagaagaaaaatgctgttgtctcagatgagaagaagaaattagtagnctatcatgaggctggccatgctctagtgggtgctttaatgccagaatatgaccctgtagntcaagatatcaattattcctcgtggccaagctggtggtctcacattttttgctcccagcgaagagaggctcgagtc

SEQ ID NO: 4059 - DNA, 268 bp, Glycine max
  Clone ID: 701000628H1
tttgcaacaaaattcaattttgagcactaaccagcaccacttccaatggcttcaaatcatgaagaagtgatacttttgggcaagtgggccagcccatttagcaacagagtagaccttgctctcaagctcaagggagttccctacaaatactcggaggaagatcttgctaacaagagtgctgatcttctcaggtacaaccccgtgcacaagaaggttccggttttggtccacaatgggaacccattacccgagtcacttatcatgttga

SEQ ID NO: 4060 - DNA, 268 bp, Glycine max
  unsure at all n locations
  Clone ID: 701000629H1
cagaattctctaaaagagatctttttctgctctttgaagaaagaagggtctttgcttgattttggngatgtctctgctctcagatctcatcaaccttaacctctccgataccaccgagaaggtgatcnccagagtacatatggatcggtggatcaggaatggacctgaggagnaaagcngggntctcggnggacnantnagcgncnctggtgngcttcncaggagantagntngaannagnccaagtccnggngntganagtggaaat

SEQ ID NO: 4061 - DNA, 272 bp, Glycine max
  Clone ID: 701000631H1
ctccaacaagtgtttctgtaaccatggcatccaccactctatcccctacaaccccttctcagctatgctcaggaaagagtgggattttcagtccctcacaggcacttcttgtgaagccagtgaagaggcagatgatggggaagagcaagggaatgagaattgcatgccaagccaccagcattcctgctgatagagtccctgacatgggcaaaagacagctcatgaatctgcttcttcttggtgccatttcatcccctctgctggaatgctta

SEQ ID NO: 4062 - DNA, 260 bp, Glycine max
  Clone ID: 701000633H1
caagttgaaccaacggatgcctctgatatatgtaaaactctatacataccagatctttagggcactctcttatattcatcgttgcattggagtctgccatcgggatatcaagcctcaaaatctattagttaatccacatactcaccaggtcaaaatatgcgactttggaagtgcaaaagtcttggtaaaaggcgaaccaaatatatcgtacatatgctctagatattatagagcacctgagcttatatttggagcaactg

SEQ ID NO: 4063 - DNA, 259 bp, Glycine max
  Clone ID: 701000634H1
caaagcacaaagcaaagctcatccttgagttaaaaaatggcagcagcttcttccatggctctctcatccccatccttggctggcaaggccgtgaagctgggcccatcagccccagaagtgggaagggtgagcatgaggaagaccgtcaccaagcaggtctcctcaggaagcccatggtacggcccagaccgagtcaagtacttgggcccattctctggcgagcccccgtcctacctaaccggtgagttcccaggcgact

SEQ ID NO: 4064 - DNA, 228 bp, Glycine max
  unsure at all n locations
  Clone ID: 701000635H1
ggagacccattggaggatttctgcgagacaaaccctgctgatgaggaatgcaaagtttatgaatagaggagagctccttttctaacgtatcatgtgaaaaagaaggaaattgttcagacagtctatctgaggagagattttcaaagtttatatttatttgcngccaataataagttttggcgtgactgaatgaatatcacccatatattgattgatattgaatttctg

SEQ ID NO: 4065 - DNA, 260 bp, Glycine max
  unsure at all n locations
  Clone ID: 701000638H1
antcagctgagctgaccaagcatgattcanaatggttgcattgtatcccaagggtgtgcccctctgaattctaggtcacgcaaccatggcatacctagtacctctgcctttcgttgcgcttctctaatgcctcccaaggttgccgtctctaacatccggagcttttggggacataatctggaatgtaaacccttgttgccaagaggaatgacattgacaaacacgtttgctgtatcaagcctgcgtgtaagggagggtca

SEQ ID NO: 4066 - DNA, 97 bp, Glycine max
  unsure at all n locations
  Clone ID: 701000640H1
ctcctacaatcacaattcataatatgaggaacctcctctcccctcttaaatattctgattccggtttccacaccaacatancgnaannnnangnnnt

SEQ ID NO: 4067 - DNA, 267 bp, Glycine max
  unsure at all n locations
  Clone ID: 701000641H1
agcaaacaccttcatgcactctacaaaaacaatctacaagcaactccctcgatctcttcgcacaccttcaactactctaaagatctctcgacctatcaccaccacagccagaatgtctttcttccctcgatcctactttgcncccgagtnctccttcacccctctcttccgcctcctggacgactacgacaactactcccgggaagtctccagccagcaaggacagagccagaggcccgctgggcgccgcactgcctctctccccgc

SEQ ID NO: 4068 - DNA, 50 bp, Glycine max
  unsure at all n locations
  Clone ID: 701000644H1
ctngagacgantcggcttcaggttgncattctcatcntnttatttntcta

SEQ ID NO: 4069 - DNA, 270 bp, Glycine max
  unsure at all n locations
  Clone ID: 701000646H1
ggancaacnccgaggntcagcncgttggattcaaattggatagccttcttaaattatctgatacccgtgcaaganataacaaaatnactttaatgcattatttgtgtaagcttcttgctgagaaaatgccagaattgctagattttgataaggatcttgtccatttggaagcagcttctaggattcaactaaaagcattggctgaagaaatgcaagctgtgagtaaaggtttagagaaagttgagcaagaactcgctgcttctgaaaatg

SEQ ID NO: 4070 - DNA, 273 bp, Glycine max
  unsure at all n locations
  Clone ID: 701000648H1
accacatccagaagatcgtccctgctgtggaccgtaacgccaacccttacatgttcgttggaaagaatctcctcgcaggtggtatagccggaagcattacttcttgtattgtttaccccctggactttgctagaactagactcggagtcgatgtcggtaganaagcccggcgagagacaattcaacggagtcaaggcantgcttggtncnaaagtatccaatctgatggcattaagggtctatacagaggtgctggtgcctctataataggaa

SEQ ID NO: 4071 - DNA, 260 bp, Glycine max
  unsure at all n locations
  Clone ID: 701000649H1
caacgattgatccatccttattcgttccncactcaatagnaattnannnctctcttctctatttcagtaaanggctgttttgtatacgagtntnccagtntnagcctatacatcncaaaacatcaaaacaactggttggggctccttgtatggcttcttcctcagttggtagaagggctacatattcaanacaatctgtatcnccaaatgagccagttgtatctgtagattggctttatgataacctgaaggagccagat

SEQ ID NO: 4072 - DNA, 258 bp, Glycine max
  unsure at all n locations
  Clone ID: 701000651H1
cnaaacttntaactgagaagtcttcctgnggcaccnaaaagataattgcaagtaatgacctttctgtagtttctgtccttatttgtggacatgtttatcatgctgaatgcttggagagtttgacatctgaagtcaacaagtatgatccaccttgcccagtttgcacttttggtgagaaatatacacttaagttgtctgaaaaagctctgaaagctgaaatggatttgaaggctaaaaataagaaatcaaagaaccgag

SEQ ID NO: 4073 - DNA, 159 bp, Glycine max
  unsure at all n locations
  Clone ID: 701000652H1
cttncatntncanactnaaacctttcntnatccttanatctcgnctctaccaaaannatgccgtttagctctgnagantaacggangagttacgatcggacggtcctccttcgttactgcntcgcgntntgcgatcgtnattttccggaggatnaattc

SEQ ID NO: 4074 - DNA, 62 bp, Glycine max
  unsure at all n locations
  Clone ID: 701000653H1
ggattgagaaagagagaaaaagaaaaatnaaaggatggtggtgagtgntgnttntgnttnat

SEQ ID NO: 4075 - DNA, 260 bp, Glycine max
  unsure at all n locations
  Clone ID: 701000654H1
ggattcgcacagcacttgggagaggtaagaaaattgtttttcttacnagagttgatccttttccagtagctttactggctgttctttttggcgttaagaatgaaattctgagttctaacgccactaaccctatgctgacgcgacttcttgagaactgtaagagtctcaaatatctggttgatgagtgtccttttgcatttgtgaactagtatgtaatattttattcacttaaataaagcgcattactatgtgcaatgagt

SEQ ID NO: 4076 - DNA, 262 bp, Glycine max
  unsure at all n locations
  Clone ID: 701000655H1
agcaaccaggtcctgagagtgatgaagagataagaagagtgccaganattggaggtgaaagtgccggaacttcggcctctcagccagatgccggttcaaatgctggtacagagcgtgttcaggggacaggggagggtcagaagaagagagggagaagcccagctgataaagaaagtaaacggctaaagaggctactgaggaaccgagtttcagctcagcaagcaagggagaggaagaaggcatacttgattgatttggaaac

SEQ ID NO: 4077 - DNA, 263 bp, Glycine max
  unsure at all n locations
  Clone ID: 701000657H1
gcaganacnagcagatgtgaactcacttatgctgttgttgggattgttgtgctacttgcttccaatgctgttcaaatacagtggtgcctcagctggctctcactgtagacccttcactacacttntcaagancttctagcattgtgatgttgattgcatatgtngtctacattgtcttcaactgtggacacacagggagttatttgaagaagaagatgacggtaaagaggcgaggatggttcagaagancaagctgtgattgg

SEQ ID NO: 4078 - DNA, 268 bp, Glycine max
  Clone ID: 701000659H1
gtggaagtattcgcagaactttgtttcccaatttccattgcctccgcttccacctcgcaaccatgatccatcccggagaagaaccgcaaggagatctgcaaatacctcttccaagagggagtttgcttcgcgaagaaggacttcaatttggccaagcaccctgagatcgacgtgccgaatctgcaggtgattaagctgatgcagagtttcaagtctcgcgagtacgtgagagaaacttttgcttggatgcactattactggttcctca

SEQ ID NO: 4079 - DNA, 270 bp, Glycine max
  unsure at all n locations
  Clone ID: 701000660H1
tctaagtgagatacacagtagttaggtagcaagcataagtgtctaaccttagaaacatatctgctacatatcgtgtggcattttggaattgtgccactaaaattctattcatctatgggctgcctcatcttatgctatgcaatcaatccttgcaaaccctatgatccgcatttccagcgggtctagggngancnatttgggggtcngcttatncacatggagaaggatgttggncctgagagttaggtccatngctgaggaagagcaacc

SEQ ID NO: 4080 - DNA, 271 bp, Glycine max
  unsure at all n locations
  Clone ID: 701000662H1
ggaggcagaggcagaaggtgaagaaggtgcgaagtaaagcatttacaaggcggcgagaagcataaagcgaagagagaacagtttgtacaacgcactgagatccatctaccaagactccatcttcgtctccgagatctctcttctatggcctcagctnccctctccctcgccaacctccgctgcggcctctggtactcccgccccgccgccttccactccacntgcnacgnaaagtccaccgacggccacaccaacaactgcnccttcacca

SEQ ID NO: 4081 - DNA, 267 bp, Glycine max
  unsure at all n locations
  Clone ID: 701000663H1
atgatacaggacatgttgggatgaatgtaacatgacatcaagtcgcatgttatttgttctcttttatgtcggtattttattnggtaggggcaggatactctatggataacatgatcaaaattttcttcataagatttatnttgagttaatattttgtcttcctaaggttgagcagtaaaagtgggccttgggatacaatctggtatagagatggagcagaagattgaccaacatgcattcagtactcagaagttccaacattcactc

SEQ ID NO: 4082 - DNA, 234 bp, Glycine max
  unsure at all n locations
  Clone ID: 701000664H1
ccagaacatttgatactctgctgactagtaataagtagaaaagaaaaggacatctccaccancttcagcttttactgggttctagtcttaggattagtttccataaagctcttacatcttttagtacaaaatgttctaattttatgatgggggatgcnaatattgttggacggtggagaaggtctncccttaatttgtacttactaaggggtttantaaaacnatttttcnggt

SEQ ID NO: 4083 - DNA, 255 bp, Glycine max
  Clone ID: 701000665H1
gcaaaaccaggttgtgagtagccagaactctcatgctgaagctcaagggtggggttctgctggggttccaaagccagaaccactggcctggggaggtgcatcttctcaaaggatagaaccaaataatcctgctaccatgccttcccagccagcttcccatggcccctggggtgatgcttcatctgtgccaaccactgtctcgtttaacactggaaatccaactgcgagtttacccacacctggatttctgggcat

SEQ ID NO: 4084 - DNA, 253 bp, Glycine max
  unsure at all n locations
  Clone ID: 701000668H1
atgcactgaatcaactttccatgtttctggggttgattgctgctgagatatattnnnnnnnnnnnnnnnnnnnnnnnngctatgttctaaggaacatgtggcatttagttggtacttttgtcctcatgtcttacagtatggttactttgctccccttgggggatnatgggtctctgttttagcatgtagagtcgaatcgtacttcgaggatcttgatggcttaatttatgatgcacaatgtgtcgtgttgatc

SEQ ID NO: 4085 - DNA, 254 bp, Glycine max
  unsure at all n locations
  Clone ID: 701000669H1
atgcactgaatcaactttccatgtttctggggttgattgctgctgagatatattnnnnnnnnnnnnnnnnnnnnnnnngctatgttctaaggaacatgtggcatttagttggtacttttgtcctcatgtcttacagtatggttactttgctccccttgggggattatgggtccctgttttagcatgtagagtcgaatcgtacttcgaggatcttgatggcttaatttatgatgcacaatgtgtcgtgttgatca

SEQ ID NO: 4086 - DNA, 259 bp, Glycine max
  Clone ID: 701000671H1
tgctgcaccagcaacaacagagaatgaacagtactgaggaggggatgcaaggcataggcataggcataggctgcttccaaaacgacgtcgtagggcagctggagctgagtcccactatgagcaactcctcctcctcgctatccatggagctggacgagtccccggagagcagaatccaacggttgatatcggagcacccggtcatcatcttcacccgatcctcctgctgcatgtgccacgtcatgaagaagctcctcgc

SEQ ID NO: 4087 - DNA, 190 bp, Glycine max
  unsure at all n locations
  Clone ID: 701000672H1
cattgttgtaatattctttttcctattatcttaaactgaaaaagttttgtagtcctagtgtaggacatgggtatgtacctatggtaatagtgagtaaaggtttataagaatacgctggatattanaaagttccaccagacttgaaagagattgggatctaaagttattaagcttaagctttgttctgttt

SEQ ID NO: 4088 - DNA, 262 bp, Glycine max
  Clone ID: 701000673H1
gtcctaaaggccttccaataataggaaatttacatcaatttgatagttccattctttatctgcagctatggcaactctcaaagaaatatggccctatattttctcttcaattagggttaaggccagccatagttgtttcctctcctaaactagccaaagaggtactgaaaaaccatgacctagagtttagtggacgacctaaattacttggccaacagaaattgtcctataatgggtcagagattgcattttccccatacaa

SEQ ID NO: 4089 - DNA, 247 bp, Glycine max
  unsure at all n locations
  Clone ID: 701000676H1
ggcaagttccaaggcagagaaaacaaacaatggccaccaccttcgnagaggggatatggagaacaanagtgatcaagaagaactgaagcatcttgggtttgtgaagattgcggcaattaaagcctttgtgtgtgtgtcgaatctctacgacttcgcaaagcaaaactcgggacctttgagatctgctgttggaaccgtggaagacactgtaaccaccgttctgggtcccgtctaccaccaattcaag

SEQ ID NO: 4090 - DNA, 102 bp, Glycine max
  unsure at all n locations
  Clone ID: 701000677H1
aaagggttncttctgattctagnnagaagnattgtgatgttgatatgggtgttgtttnatnatntattagtgnaggtagnatggaaatcgagttganaantt

SEQ ID NO: 4091 - DNA, 263 bp, Glycine max
  unsure at all n locations
  Clone ID: 701000678H1
gtggattggttgcagctggtgtcatcccatccactgangtgtgccatatctgccaatagtatagctttctgtttatcgcaaaccttgcgtacacgtacanaatcatagagacgtgcataagcgctagtccagcaacaattaattttggcagatatggcacacatcagtggattggttgcagctggtgtcatcccatcaccttttgattatgctgatgtagttactaccacaactcacaagtcacttcgaggaccacgtggagc

SEQ ID NO: 4092 - DNA, 263 bp, Glycine max
  Clone ID: 701000679H1
gcaaagctttttgtgcgaccaagaggttggcacctaccggaggcacatattctgattgatggtgaacctgcaactggttgcctgttgattttggcctctatttctaccacagctactcagcattccggcgcactcaaggtgctggctttggccctttcttttatcttcccaagatggagcattcaagggaagctaagatttggaacaatgtgtttgagaaagctgagaaggtagcaggcatcgaaagaggaagcataagggca

SEQ ID NO: 4093 - DNA, 256 bp, Glycine max
  unsure at all n locations
  Clone ID: 701000681H1
tttacaaaatatgcagtgtgctaggtagtccaaccactgncatcttgggcagatggactcaaacttgccagggatatcaactatcagtttccacagcttgctggtgtacatctctctacactgatcccatccagaagcgatgatgcaatcagccttgtgacgtcactttgttcatgggatccctgcaagagaccaactgcagcagaggttcttcaacatccttttttttcagagttgcttttacatccctccatcc

SEQ ID NO: 4094 - DNA, 256 bp, Glycine max
  unsure at all n locations
  Clone ID: 701000682H1
gatggatcaatcaaagaaataacaactccaaatacaaatgataactttgaacgtccannnnnnnnnnnnnnnnnnnnntttggtgattcggagaagataaataataataggccgatgattcataaactatcagaaaatcttacacctccattaatagatagaccaatgtcaagaccatcaaatgcatatcaaaggccacctcaatatttccacacaacataannnnntgaaaaancgttngnnnncncanatccgc

SEQ ID NO: 4095 - DNA, 254 bp, Glycine max
  Clone ID: 701000683H1
gtgctaatagcatatttagttgtggccttgtgctacttccctgttgctctcattggctattgggtgtttggtaattccgttgatgacaacatcctcatcaccctaaacaaacccacttggctcatagtaactgccaacatgtttgttgtcatccatgtcattggaagctaccagctatatgcaatgccggtttttgacatgatcgagaccgtgatggttaaacaattgcgcttcaagccaacttggcagctacg

SEQ ID NO: 4096 - DNA, 255 bp, Glycine max
  Clone ID: 701000686H1
tttggactcccagaaggtgagacttgcgttggaagagaaaggcattgattatacatctcaccatgccaatcccataactggcaagaacttggattcttcattcttcaacatgaatcccggtggaagactccctgttttccaaaatgggtctcacatcctttacaagactattgatataatccagtacatagaaagaattgctgtgttctcctcagggtctgagaatatcagtagcagtagcagggaagtgattga

SEQ ID NO: 4097 - DNA, 253 bp, Glycine max
  Clone ID: 701000687H1
ctccttttctctctctagaattctcagatttgcggggcgagatgatgcagcagccaggacccggcatggcacctcccaccatgggccagcagccgcagcaacagtaccagcagcagcctccgccgcagcagcaacaaccctacgtcatgatgccgccgcagcatcaggcgccgcagcctatgtgggccccatccgcccagcctccgctgccgcagcagcctgctagcgccgacgaggtccgaaccctctggat

SEQ ID NO: 4098 - DNA, 259 bp, Glycine max
  unsure at all n locations
  Clone ID: 701000688H1
atgatcagtcaaaatctaatgcacaacagacacaaggtttgcagaagagcctttgtggtcatcctcttttctttggtataacaatgggactgctttctgagatcataaattctaggctcttcacatctgtcagagattctctggggttaacatatgacgtgtcatttganttaaacttgtttgataggcttaaactaggatggtatgtgatctctgtgacatcaactccaagcaaggtccacaaagctgttgatgcatg

SEQ ID NO: 4099 - DNA, 261 bp, Glycine max
  Clone ID: 701000689H1
agcaaccaggtcctgagagtgatgaagagataagaagagtgccagagattggaggtgaaagtgccggaactttcggcctctcagccagatgccggttcaaatgctggtacagagcgtgttcaggggacaggggagggtcagaagaagagagggagaagcccagctgataaagaaagtaaacggctaaagaggctactgaggaaccgagtttcagctcagcaagcaagggagaggaagaaggcatacttgattgatttggaa

SEQ ID NO: 4100 - DNA, 263 bp, Glycine max
  unsure at all n locations
  Clone ID: 701000690H1
atggccactcttcttcttcccacgctcctccttctcatacccttcgccaccctcgtctccgcccgccctcacctcgccggagactttctccgactgccctccgaaaccgataacgatgacaacgtccagggcacccgctgggccgtcctcctcgccggttccaatggctactggaattacagacatcaggctgatgtttntcacgcctatcaaatactaaggaaaggtggcctgaaagaagaaaatattattgtttttatgta

SEQ ID NO: 4101 - DNA, 261 bp, Glycine max
  Clone ID: 701000691H1
gtctggcagtccagctccacagcttccgtctatagctgcagagttcgtcgtcaatgagagacacgacagaactgccgacccgaaagcaattcaaatcttcctgggaagtgatgcgctgcgcgcccacaatgcagatctgctattctcttccaaccagctgaccttatatgacgacgatcgctgcaaactccaaattcctttggtgcgacccgaagacgagcgcacctttaaatcgctggcgatatagcaggtcttcggcga

SEQ ID NO: 4102 - DNA, 264 bp, Glycine max
  unsure at all n locations
  Clone ID: 701000692H1
ggccgccaaggcgcttcacgcgcttcgtgggagattctacaacgcacgcccaatcatcgctgatttctcccccgtcacggattttcgcgaggccacgtgtcggcagttcgaggagaatagctgcaaccgcggcgggtattgtaatttcatgcatgtgaagctcatcgggagagatctacggaggcgactcttcggccgcaaccaccgcggtggcagtgggacctaccaccgcgtcaccggagcangagtcgcagccgcagcgcg

SEQ ID NO: 4103 - DNA, 263 bp, Glycine max
  unsure at all n locations
  Clone ID: 701000693H1
caaataaagctataggacagaagactggtggtcaatatttggttggtggacttgattgnacagtgcatagaaatttctttggcagccagattcaaagctttgaggcagagctttcagtgccggagcttgtctccaaggaaggaggtcctgaaacattttgtggaatttttattcgtgcccctgcaattcttgaagcagggccagaanttcaagtgctggctgattatcctgtaccttctagnattggnggccncctccccccc

SEQ ID NO: 4104 - DNA, 266 bp, Glycine max
  unsure at all n locations
  Clone ID: 701000694H1
gttgagaactaagaaggagaagcaaatggcttcctcaatgatctcttccccagctgttaccactgtccaaccgtgccggtgccggcatggttgctccattcactggcctcaagtccatggctggcttccccaccaggaagaccaacaatgacattacctccattgctagcaacggtggaagagtgcaatgcatgcaggtgtggccaccagttggcaagnagaantttgagactctttcctacctgccagaccttgatgatgcacaa

SEQ ID NO: 4105 - DNA, 264 bp, Glycine max
  Clone ID: 701000695H1
gctggaaatggagttcaagtctcacctgttactccatctgctgatgttactgcttacttcagctctgagcattcgagcagctcgtttgattattctgacctcggatggggtgaacaagtccccaagacacccgagatctcatccatgctttctgctgctcctttggacggtgaatctcagtttgtgcagggtgctgctgatcagaatcagaagaagaacaacctgctggatatggcatctgtgcaagatgattctgcaaaaatc

SEQ ID NO: 4106 - DNA, 262 bp, Glycine max
  unsure at all n locations
  Clone ID: 701000696H1
agcaagctcatcctagagttttaaaaatggcagcagcctcctccatggctctctcttccccatccttggctggcaaggccgtgaagctgggcccatcagcccccgaagtcgggagggtcagcatgaggaagaccgtcaccaagcaggcctcctccggaagcccatggtacgggccagaccgcgtcaagtattggggccattctctggcgagccccgtctaactcantgggagttccaggtgactacggttgggaattgttgg

SEQ ID NO: 4107 - DNA, 272 bp, Glycine max
  unsure at all n locations
  Clone ID: 701000701H1
cacaattcattttcgaacgaacgtgtcacagaattctcgccttttccgaatatggcatcgcgcgtcagcattggcaatctcacttcctccgcgccgtatattaattcccctcattttcgctcacaacttaagctttccagcaaactccctctttgcacaagccactcatgcgncgacaagactgtgctggtaaccggcggagcgtttaacatcggcacccacaccgttcttcagctcttgctcggaggttgcagaaccgtcgtcgtcgacaa

SEQ ID NO: 4108 - DNA, 265 bp, Glycine max
  unsure at all n locations
  Clone ID: 701000702H1
ttcccatgtgaacaagttgggttgccagaaggagtagagagcttcaactccaacactcctcgggatttggtccacaaaatctaccagggactcnccattctccaagaccaataccaacaactcttccatgacttgcagccctgatttcttgttcaccgacatgttctacccctggactgtggatgctgctgctaagttgggaattccacggctcatttatgttggtggaggttaccttgctcactcttctcagaacacaattgaa

SEQ ID NO: 4109 - DNA, 268 bp, Glycine max
  unsure at all n locations
  Clone ID: 701000703H1
ggtgaaacttgttttccttgcgcgaanttttgggcattcccccaatcgcttcatcctcatctacttaaccctaaccccacacttctcacatcactacatatataaaaccgccgtcacgatgatgctcagaattcgtagcccgcgatggctggagcgagtgagcgtcgaaaaccccctcgccacaacagtctcggacctaaaacggattatccaaacccaattgggaatcccggttcacaaccaaaccctctccaccaaccagaacctc

SEQ ID NO: 4110 - DNA, 263 bp, Glycine max
  unsure at all n locations
  Clone ID: 701000704H1
acgcgttagtagttantnantttccttctcttcanaaacctanttgtttntntntcattttttnggcactatagaatgtttganaagtntagccatcaaactanacntggcttcntctnntangtnggtntanntgttaccctgaagannnaggaagatgaanacaaggtaataagttgngaaattgttccaaaaccaaggttcgtncccaaacccatttatagcaccaaccctttgatcattcccangtgtaaagtgaggcc

SEQ ID NO: 4111 - DNA, 209 bp, Glycine max
  unsure at all n locations
  Clone ID: 701000705H1
cttgtatagcatgtgttggattggattctttcaataacacattatngttgtttgtattcctttgtgtactttaaagataaaataccatgttaatattctgatatatatatgccaangnannagtgattcagtatgttgctcatatcgaatgcaagttatgcaactatcnagaggacatngtacnctactntcagtaactagctccataa

SEQ ID NO: 4112 - DNA, 262 bp, Glycine max
  unsure at all n locations
  Clone ID: 701000706H1
cttaaaggctaagtataaatgttcagcaatagtgaacagtaccgtnnggnaaaaggaaaaaagtcagtcgatgacaaatgaaataatactgaattagcaatcatataagcagttaaagcgtaccattgattatggtttgtaataacgtaccttttgtataatgggtcggcgagtttatagtagtagcaaggttaataaccctagcgaaangactgactaaattaaagtgcggaaaatagttattattataagnccngaaacc

SEQ ID NO: 4113 - DNA, 259 bp, Glycine max
  unsure at all n locations
  Clone ID: 701000707H1
ccaaacatgccaattgtcttaagatacaagcccctaaaaaaacatgatggaatctggtcgttagctgatggctgaattgttgtgacttgtagttggtaatgagtaaggaacttgtgttctacaagataagtgttganttgtataatttagagtatctagtgttcagttatgtataaattacttagcatttaaccaacaatagggggtactacttatttttatgtgccaaaaactaatccagttccaatgaattgtctgt

SEQ ID NO: 4114 - DNA, 209 bp, Glycine max
  unsure at all n locations
  Clone ID: 701000708H1
aaataaattgccgcccttccccttcgcctcacgcgttccccaaaccctcccacacttccataaacgacnagatcantacttccccttaaaaacaacacctttttaacctcctctcattcattcattctcttcatttctncaactctaaacttcattacttancagcanaacaccaataggcaataaacccccccnaaaacccanttttt

SEQ ID NO: 4115 - DNA, 267 bp, Glycine max
  unsure at all n locations
  Clone ID: 701000709H1
ctcactatgcagtcatgagctcctacgagtacctcagcnctggacttcgccagtacttggacaacaaaatggatggattctacattnctccagcttttatggacaagcttgttgttcacatctccaagaacttcatgaccctgcccaacatcaaggttcctctcattcttggtatctgggggaggcaagggacaaaggaaaatctttcccaatgtgagcttgtcctttgcccaagatgggantcanccccatcatgatgagtgctgg

SEQ ID NO: 4116 - DNA, 271 bp, Glycine max
  unsure at all n locations
  Clone ID: 701000710H1
cgagtccttacgcgttgtttgtgtttgcgtcggaaggaagagaagatgagtgagaatttgatggagaaagtgagcgcactgggagancgcctgaaaatcggaggcgtggaagtggggagaaagatgagcgaggggatgagctcccatgagtttcaagctcaaggagttcttcccagccctgggncccaatcaggcccgacaagcttgtggaggacgctacttcccgaggcccctggaacgagncccgaatgggccctcaatcctcgatctc

SEQ ID NO: 4117 - DNA, 270 bp, Glycine max
  unsure at all n locations
  Clone ID: 701000711H1
tccattccaacctctttcacacttcagatctgtntcttcatcggtngttcaagtaaatggcctttgtcaccactgctgaagtgtgtgatgcgaacccacagttaattttgagtggggagcttcgtgcccntcagccagtttttcagatttatggccgtcgacaggttttnctctgggnnctatagttaaccttgaaaggtgtttggangacaatgttttggttcgtgagttcccttgaangagaaaaggcaatggaagatttctnagttg

SEQ ID NO: 4118 - DNA, 260 bp, Glycine max
  Clone ID: 701000712H1
atagttccaaatttagcaatcagtaagattttatcacgagataacaataaagttcgcattctccaggaagggtgtaagggcctgctttatatggtgcttcatgctcgtgttgtgctagacttgtgtgaatatctagaacaggagatcagctttgaacaggttgaaggggatttgactcgttcccatggaaaatggacttttgagcaactaggaatcatcacacactgctaaaatactccgtggagtcaaaatgcggcaag

SEQ ID NO: 4119 - DNA, 266 bp, Glycine max
  unsure at all n locations
  Clone ID: 701000714H1
ctgatgatgatgatggtactagccccatcctacctgggctgcctgatgatgtttcaaaacactgccttgcactcgtgcctcgttcgaacttcccagccatgggtggtgtctgcaaganatggaggggctttattcgaagcaaagaatttataaccgtggcgaaaattggctgggatgcatgaggaatggctctatatcttgacagcaggcagtgaaggaaaagggagccattgggaggtcatggattgtcttgggcataatcgccg

SEQ ID NO: 4120 - DNA, 267 bp, Glycine max
  unsure at all n locations
  Clone ID: 701000716H1
cttttgcagaaaaaaaatgaaaganctgctataaaagttgaagtgcctaaattggttttnacttgtgggagaaacttaactcattttacttatgttattctttcataagtatttattgagccaaacaaggccataattgaaggtgttatttagcaacggaggaaatcttacagtaattaggtggaaaggaaagaatagttttagcttatttcataattttnttggagtaactaagcaatgaaatcaaatttggtccttttgtcgtag

SEQ ID NO: 4121 - DNA, 331 bp, Glycine max
  unsure at all n locations
  Clone ID: 701000718H1
cattcactttctcctacctcgtccttctaacccaacctcaacctgtttctccgagaatcacattccaacgcttctgttcatggaggaagttaacgttgtggaaaactaaagggatgggnactggtctccagtaagctggcttggcgttttggctgggtccatccagggaaagcccgttgccagggatnagnaggacccaccaaaatttttttaaagcaaaaagnctggttngaaagaaagncatnattaaaaggggggtaagaatttggcanaaggatgggaagggccccttttttgggttggctngttnataagtttccataaatggatt

SEQ ID NO: 4122 - DNA, 261 bp, Glycine max
  Clone ID: 701000720H1
tttgaggttgattatgtcttaaaagactttaattgaagtcataaattatgtgaaaataagatgtataataactatattctactgcagatggacaattgatgtgggatggaccagtgcatgggtcagaatagtaaatgaatggttggcagtttgtgtctactgtaagttaattactgtattttcctaccccttaaactaggcttagcatgaagatttgaattttatctaaagcttcatgagaaaagaggaacttcacaaatc

SEQ ID NO: 4123 - DNA, 263 bp, Glycine max
  unsure at all n locations
  Clone ID: 701000721H1
cttctgctcagtacatattaattatatataggcagcatacaaagangctgaaatacagatgcaggaatgaaaataatctaactcagctactactgcattgccaactcagcactcctctaacagaattggttagacaaaatcttctagatgctttgatggtactagaagcaagctactagactggaagaagcgtttcaacataatagaaggaatttctcaaggattactctatcttcacaagtactcaagactgaaagtcattc

SEQ ID NO: 4124 - DNA, 260 bp, Glycine max
  unsure at all n locations
  Clone ID: 701000722H1
gaggtttcctaacttattccaaagggatgagatggtattgtaaattgagtttagtataatgttttcagttatttcagtgtattacagtgcaaaacatcaacctcttcaaggacctttgaatggaatattgatattcttctgtctcctctnattctatattttnaatataattgtnaatattatagagttcttttttttgccgttccatgatttaattcccagcnaataatgtgtggnaaacaattatactgcagcncaat

SEQ ID NO: 4125 - DNA, 271 bp, Glycine max
  unsure at all n locations
  Clone ID: 701000724H1
cagctaaacttcgatggggttgtgaatattaaaatatctagccggtgggtatttcacatctcacttatattatagtccgagtttgaggtgtgtttttttaggctagatttgaagnactttccagttagttatctctantttcaagggattattttatatataancatattgagtggttgtggatctggttccttnaatttaatataatacttcctttgcnaaccttnattnattccttccagtccgctttngtttgcccggattggaaaaa

SEQ ID NO: 4126 - DNA, 209 bp, Glycine max
  unsure at all n locations
  Clone ID: 701000726H1
ctcccagaattccgcacctgctagtgcttgaatgatgtctgattcncgtttttgttcagganctttgagttgttgataagatctttctctctgtcgcccagaattgtgattgaggatataaaaagagaatcaacaacggatgattcgatatgcatgaaggttaattgattctctcatgttgtgttcnattgttgaaagttactttcacc

SEQ ID NO: 4127 - DNA, 260 bp, Glycine max
  unsure at all n locations
  Clone ID: 701000727H1
cagacatcataaccggcctcgtactcgtcgatgttgtcaatggcttctgcaccgttggagctgnncaatttggcgccgaaagaaccagatgaacgaatttctcagatggtaaaagaatctctgaggctgtccaaagcattctctgagagaaagtggcaaatttttgctttccttgattgccatcaccccgacaaacccgaaccccttatccacaacatgtattacnggntaaggcgaagaaaaattggttcctgatctgt

SEQ ID NO: 4128 - DNA, 261 bp, Glycine max
  unsure at all n locations
  Clone ID: 701000728H1
tgcaattgaagttgaagtcttgcccttctctcttcaactccaaacacaagacatcatcatccatggctgcctccgtctccactgtcggagctgtcaacagagctcttttgaacctgaatgggtctggacctggggtttcagctcccagttcatccttncttgggagcagcttgaagaaggttattggctcaagggtccccaacacaaagatttcctctggaagcttcaagattgttgtgtagaagagaagaaagagattga

SEQ ID NO: 4129 - DNA, 264 bp, Glycine max
  unsure at all n locations
  Clone ID: 701000729H1
gtagagacaataagacttgaaaatgtggaggacatgtgaagaaatgaatgataatcatcctgtgcactccagattttccatcaagacaaattggctcgcctccaagtgtgacagctattgcagctgctacagtagctgctgcaactgcatggtgggtgcccatggactgcttcctttatgtggtccactccatacagctttngcctgtcctcctgcatcagcaactacagttccatcaatgattattgatgaatcaccacaaaa

SEQ ID NO: 4130 - DNA, 268 bp, Glycine max
  unsure at all n locations
  Clone ID: 701000730H1
ccgccatattccacaagaactctccaannaatcctccttcccacgagattctttggtgggaaaaatccaagaggtttgaaatttgaaggcagggaagatggattatttcaatgcaccaggaagaaaccatctctttgttccagggccggttaacattccggaccagatcatccgggccatgaacagaaacaatgaggactaccgttctccagcaattccagctatgacaaaaactttgcttgaggatgtcaagaagattttcaagacc

SEQ ID NO: 4131 - DNA, 269 bp, Glycine max
  Clone ID: 701000731H1
cgagtggcaaggcagatggttgagagatttggattcagcaaaaaaattggacaagttgccattggtggacctggtggaaatccattcttgggtcaacagatgtcatcgcaaaaggattactccatgggcaactgcggatgtagtggatgcggaagtgagggaactggtagagagagcatattctagggcaacacatattatctcaactcacattgatatccttcacaagcttgctcaacttctcatagaaaaagaaactgtggatggtg

SEQ ID NO: 4132 - DNA, 270 bp, Glycine max
  Clone ID: 701000732H1
ccatggttggggctttgaaagtcactaagaagatgaccatatctttaaaccccatcgtcagcttcagctcaacgaagttggaaacaaagtatcaggatgcatcaagatattctgttggagcttctttaccaaaggcaacccagtttacacctttgttgatagtgtctagatcgagaaagcttgtcaaggaaagaagatttggtccttgtttttcagtggcagatagtgatcagcttgcagcagacaacagtagtagcaaggattttgaca

SEQ ID NO: 4133 - DNA, 266 bp, Glycine max
  Clone ID: 701000733H1
cacaccccaatgcttttctccattttttccatcttcaagggataaacttgtcttcccaactcacagaggtttcaagaaatccttgcaaaactcaacactgtcatacccttatctttactccaccggtgctgcctatagaaaatccccgttttgtttgcaatgctcgtgaagcagtaaatgaagttaaagtggtgactgactcaagctggaacaaccttgtcattgcaagtgagacccctgtgctggtagagttttgggcaccatgg

SEQ ID NO: 4134 - DNA, 206 bp, Glycine max
  unsure at all n locations
  Clone ID: 701000735H1
aatagcaaggaggtaccaaaatagtgtgattcatggctgcaacgaatgcgtcaatctttgcatcttccacgcaaccatgnttgggngtgnntcctancattccaaacacggttgctactcgttttctcaatgtttcgtcaccaagaagttaccttgtgaagaaaaagcatgtgaaatttagcaaaaaaatcagtgctgctgctgna

SEQ ID NO: 4135 - DNA, 262 bp, Glycine max
  Clone ID: 701000736H1
ttggggataaggtacactgttgggaaggaggcttcgattttgcgggagcttaagcagggtgattttgatccgaaggatcaagttctggactaggtttccgacggaggggtcgaagcttacaccgccgcatcagtccgcggagtttcgatggaaggattactggccttgtggtttttaggcatttgaggaagctgtttcaggtggatcctgctggattacatgttgggctatatgtggaaatgatgctcttcgggagctttcg

SEQ ID NO: 4136 - DNA, 263 bp, Glycine max
  unsure at all n locations
  Clone ID: 701000737H1
caaccttgcttcccatagataacatctgcatcagacaatagacaaacatgtattccttaacatgcacaccactnnnnnnnnnnnnnnnnnnncatcacaccactctaaagccaaacctcaaccctcttctgggtgcagatgcaacttctagggccatgttctctacccttgaaaagaagaacatgctttactaccaaagccattcccctcatccaccagngaagatgtcttgaaagcatttcaangaangacgagctctcagt

SEQ ID NO: 4137 - DNA, 255 bp, Glycine max
  unsure at all n locations
  Clone ID: 701000738H1
ctatttctcagcaccagtcagcaacaacaacacccctttcctttcaacaagacancaaacttgnttcacagctttttttgttctttcacctcgattcacgaactgggtcatcctctgattgtggnttattggatttcatttgagtacaccacacccccaagatttggatttnaaccaaaaacnagtcnttgtggttggcaggttgccattaangtgatatcataagggattcccaaaaatctgttgtgtcnaccc

SEQ ID NO: 4138 - DNA, 266 bp, Glycine max
  unsure at all n locations
  Clone ID: 701000741H1
cgagtaagaaccacggtgatccgtatccttttgatggtccaggtgggatattgggccatgcattcgctcccactgatgggaggtgccactttgacgccgacgaatattgggtggcgtctggcgatgtcaccaaatcgccggtgacaagtgcgtttgaccttgaatctgtgggcagtgcacgagatcgggcaantgctcggattacggcaantcgtcggacctaaagaagcccatccatgtaatccttctaataccacctcgaacta

SEQ ID NO: 4139 - DNA, 257 bp, Glycine max
  unsure at all n locations
  Clone ID: 701000742H1
tggattctacattgctccagcttttatggacaagcttgttgttcacatctccaagaacttcatgaccctgcccaacatcaaggttcctctcattcttggtatctggggaggcaagggacaaggaaaatctttccaatgtgagcttgtctttgccaagatgggaatcaaccccatcatgatgagtgctggagagttggaaagtggaangcagagagccagcaaaaatgatcaggcagagatcaccgtgaagctgcaga

SEQ ID NO: 4140 - DNA, 168 bp, Glycine max
  unsure at all n locations
  Clone ID: 701000743H1
agttcgtatttatacatcttctctggtctagcaatgagttctcaacatgcgccgagatatcgcgtgttcgccgcagaacggagcagttaggaaactattcgggagnaacgcacgcanacagctcaggttctatcatngngtagggcgttcacatgcgagcgatagaca

SEQ ID NO: 4141 - DNA, 265 bp, Glycine max
  Clone ID: 701000744H1
atttttggtcacatagtttatggtctgcctctgcgtagtgcttcaacagccccctgctcgctcgatcatcttgattattttttaagccttttaaatgcccaacatcttgttcttgatgtttgagattgatgtatccaattcttagtgaaatcttcttttccgggtgtatgatcaattctactgtgagacgacgcaggaccccattagttcaaatccttctccggtggcttttccttactggctcctaactacgtttcaaggattt

SEQ ID NO: 4142 - DNA, 270 bp, Glycine max
  unsure at all n locations
  Clone ID: 701000748H1
ttaagaacaaaatgggcagcctggcactgttctaacttcaaacacaattcttctgaggcaacaaattggcttccattcttcaaaccccattcaaagaacacagctgagtttctttccaccaaaagcaggtagttttctgggaggaacagcaacagggggcaaacagtcaggcagcagaagaaagctatgtgnatnaacatgtggcagcagggtgacttccaccagancagtgggtggattgggtcttggctggcagaacttccaggggtg

SEQ ID NO: 4143 - DNA, 266 bp, Glycine max
  unsure at all n locations
  Clone ID: 701000749H1
gcttctcaactgctaaagctaaactaagaaaataatccaggatgaggcatctccgttatcatgtgccagtataaganccagcactctgggctaggtcttgtagccagaatctgattctggcttgaatggtagcnccgctgagggctatcagaagcagtcaagaatcaccatagatttctgagaatcagatcaggtctactcatcagtcatggatagcagcaagaagggagccctcatgagtaatgaaagcgcaaaagatttatcag

SEQ ID NO: 4144 - DNA, 262 bp, Glycine max
  Clone ID: 701000750H1
cgaataataatttcagatctcgtcgatcttgagcttcaacaatggcgaaaccaaggtactctcgtcttccacctcgcaagtcatcgtcgtcttccacgctgattctgactctcttcctggtcttcaccttcctcgttctcattctcctcgctctcggcatcctctccattcccagctcctcgcgcggcaatttgcccaaacctaacgatctcgcatccatcgctcgcaacacaatcgagacttccgacagtgacgagagggg

SEQ ID NO: 4145 - DNA, 261 bp, Glycine max
  unsure at all n locations
  Clone ID: 701000751H1
aatccttttgtgtcagtntccttcctaatcgctgctcagccatcaccgtcgcgacttcgcgaggagacacgttccatcttctggcaccccctcttccgattccggcgttccctcttctagttctggagtttatcgacgtccttcatcaaagtttccggggtctgttcgaggtggatgaaaagctttaccaaaattaagaactttccgaatacatggatgagaaagccaagaaaaaggggagaaaagatgaagtaatgaata

SEQ ID NO: 4146 - DNA, 257 bp, Glycine max
  unsure at all n locations
  Clone ID: 701000752H1
gatgattttggtataaacccagttagaacaggatctacacatacagatggcacgttccagacgaaaagcccatttgcttttgatgattcagtgcctgcaactccagtttccaaatttgcttttgatgattcagtgccgcaactccagtttccaagttcgaaaatctccaaggtacagtgaggcaggggatcacttctttgacatgtcaaggtttgattccttcaggcacgaaagtggatatnctccacaaccagagg

SEQ ID NO: 4147 - DNA, 260 bp, Glycine max
  unsure at all n locations
  Clone ID: 701000753H1
agaattcccccactgagcaagggggtttgtcagtggatgtgnttaaaaaggcgttcantgccacagaggaggaattcttgcatttggtgaagctatccatgcccatnagtccccagattgcttccgtcggatcctgttgccctttttggtgcaatttctaataatgtgttgtatgttgcaaaccttggagactcgagagctgttccttggcaggngggatacagagagaaagacnatccggtggtggcacagcgttngtc

SEQ ID NO: 4148 - DNA, 273 bp, Glycine max
  unsure at all n locations
  Clone ID: 701000755H1
aaaaccttcccttctcttctcacccccacactcccatctcacacacccctcgcatnccaacaatgtctctcaccattccctccaacctctccaagcccgccgccctccgccccaaactaagcccaaagctaaggtccgctgccacanccaccatcgtctgctgcacnacaaacaaacaacnaacaaacaacaaacgtgtcttccggaccntgaaaggggttcntccggccngngntggcccntctcttcnatcttcntctccggcccntctcc

SEQ ID NO: 4149 - DNA, 261 bp, Glycine max
  unsure at all n locations
  Clone ID: 701000756H1
ctctttttgttgtttagtcagctatgttagtataaagagaaccctagtgcaaatacatattgtataactttggtgactctagtctgtgcaaaagaatgcttctaggcaaccaatgncaccagtcatgcacaagtataataaaccactctattcccatgcaatacaattgcgttctntttagttccagtggaagaaccntcttaagtgcccanttgggcatcattctcccttgcccagggctaaaagagcaacagcttgtaa

SEQ ID NO: 4150 - DNA, 261 bp, Glycine max
  unsure at all n locations
  Clone ID: 701000757H1
aggaatctaccctgcacttggttttgaggcttcgtggtggcatgcaaatctttgttaagactttgaccggaaaaacaataactttagaagttgaaagttctgataccatcgataacgtgaaggcaaagatacaggacaaagaggggattccaccagaccagcagaggcttatcnttgctgggaagcagctggaagatgggtccgtactcttgctgattatnatatcccagaaggagtcccactctgcatttggtgttgagg

SEQ ID NO: 4151 - DNA, 266 bp, Glycine max
  unsure at all n locations
  Clone ID: 701000758H1
ggagatccaaaaagagagagtggaaaanatggcgcggttgatcacagtggtgtggtgcgcggtggcggtgctattatgcgccgcggccggtgcgtcgtgggtggaggaggcggcgaacccgatacgaatggtgtctggcgtggaggcggaggtggttcgggtgatcggggagtgcccggcgtgcgttgaagtttgctaaggttcgtcagcaagnttcgggaaagaanttaaccaaagccgnaggaagaagatgaaaggagaggtac

SEQ ID NO: 4152 - DNA, 260 bp, Glycine max
  unsure at all n locations
  Clone ID: 701000759H1
gccgtcgattcgcagttgtcgctccgatttctgagctccgatgcggcggcgattcggtctcggataattgaaccgaagcccagtgcgatgacccctaattccaagcgaactgggcttncttgcggtgaagtgtggaatgagcgcgctatgggataaatggggtgctagaattccaattactgtggcntgggtggatgataacattgtgtcctcagattaagaccccagagaaagaaggtttctgtgctctccagacacaa

SEQ ID NO: 4153 - DNA, 263 bp, Glycine max
  unsure at all n locations
  Clone ID: 701000761H1
ggctcttgatattttcttcgcgtcctctaacctccttcacacgtttcattctctctccctctctttctctctctgcgtgcgtacggtnnnnnnnnnnnnnnnnnnntattcgtagattgaatcctccgaagcagatctcacattcaaccttcaatgcttcgttctctttccctctccgattcatccacggattccaattctcagtttctttgtttctctcgtcgaaattcgtttccgaacaccgcattcacgcgccaaccttg

SEQ ID NO: 4154 - DNA, 262 bp, Glycine max
  unsure at all n locations
  Clone ID: 701000762H1
gtctttgctgattgtntttgttttngttgaagtaaaaacattgttttcatgtnggactagaggcttggcaaaaccctaaattagttgtcacttgattgattggnatttatatgttggggtttgaaaagcatatctgagctacattctattgttatttgtcgctaatgtccaaacttctggaatgngaatgattggtagcatagtcactaaatatttatctgagaattttaacaaaggtgacttggtcataacgtntgttcct

SEQ ID NO: 4155 - DNA, 271 bp, Glycine max
  unsure at all n locations
  Clone ID: 701000763H1
catgaagtnattttncttttcttcaatatggacttctttatcttagctgaagcttcagaagaaactggagaatgcttttgagacttcattaatttatctcaatgattggatatatactgctgttgatgcctggtatttggtgactttaagaaactctgaaggtcctgtatagtgttaggttctgttatgaattgtccganaatccaatctataaatgcagagtgtgtcccnaatttgacatcacctcctcccccttatgtaataagagang

SEQ ID NO: 4156 - DNA, 257 bp, Glycine max
  unsure at all n locations
  Clone ID: 701000765H1
ggcagcgtccttgttggggaagcttgttagccaacaaatgcatggaccaagagttgctataacacttgcaaggtttctccctgatggccttgtgtcagtaattagggatggacctggtgaagctgttgtagttggtctgagcagactacagagacaccagaacttgtatggacaccagcgatggcagcttccttatctgcacaaatttccactatggcattagatgnctaccgtgagcagatgaaggggcgngttgt

SEQ ID NO: 4157 - DNA, 257 bp, Glycine max
  Clone ID: 701000766H1
aaaaaaccaacaaaaaagatctagtcctagaatccaacaggggcgacctcacctccaagaacacatagccatgtcaagaaacttgcttcttgttctttttgcagtagccaccttcctccatggctcagaagcacaaaccagacacgtggtaggtgatgccacgggctggatcatccctcccggcggcgcggccacctacaaccacctgggcttccaacaaaacattcaccctaggcgacactctcgtgtttacttca

SEQ ID NO: 4158 - DNA, 265 bp, Glycine max
  unsure at all n locations
  Clone ID: 701000768H1
gcatcctccgtcctccgaactttcttcatcaccgtcggcgtccgncaccgaactctgcttcatgcgcaccctcggttacatcattacaaaacttcacttgatcaaagaacttcgacgttggattattaggcttaaaaacgttttgcncttntnccaaaaattctcttacgccaacgaggctcanggncctttggattcgcaaaggttacnnggccagtccntgtaccatgaaanctggngcgaaccaacncagttcaaaaaacnt

SEQ ID NO: 4159 - DNA, 269 bp, Glycine max
  unsure at all n locations
  Clone ID: 701000769H1
cagatgggtcaatgcttgcctatgtaagancactgtgagttgcatgttctgaatctcttgtctaatgaatcaaagcagttgacccatggggcaaaggaaaatggtttgactcatgggctggcagaatatatagctcaggaggagatggatagaacnnactgggatattggtggtcactgggaccagtaaantataattgcctttccacctgaaagttggactccttcctgaaaataaccactttttagaattatgcacccaagggaaga

SEQ ID NO: 4160 - DNA, 253 bp, Glycine max
  unsure at all n locations
  Clone ID: 701000771H1
cttagatgctgtgttcgtggagatctctgggaagagttagaagaaatcttaaatcagaccatgccaaatgccactctttataacgcagctgttcaagggctgtgcttacgtaaaaatggtgacatggcaaataagatctacacaaaaatgctcaganagtggttttcaacctgatgtcaaaacgcagtncctatgcttcgtatgataaggaaaaggaggtagctagtagtctattaattgctataactaacac

SEQ ID NO: 4161 - DNA, 251 bp, Glycine max
  unsure at all n locations
  Clone ID: 701000772H1
ctcatcctcttctttctctctctaccattgccatggatccctacaagcaccggccatccagcgccttcaattctcccttctggactacaaattctggtgctcctatttggaacaacaactcctctttaaccgttggagctagaggtccaattctgctggaggattatcatcttgtggagaagntgcaaatttgatagggaacgtatccagaacgtgttgtccaagcccaggggcgnaatgcnaaagggttt

SEQ ID NO: 4162 - DNA, 252 bp, Glycine max
  unsure at all n locations
  Clone ID: 701000773H1
caaaccctctgcgaagtctaagcaagaaactccaaaaagtggaaagtctaagcaagaaactccaaaaagtgganagtttaagcaagaaactccaaaaagtggnaagtccaagcaagaaaccctgaagactgccctttcgaaagtaaaacctctcaaaagtggtggaaagatgatgttaatggtaagtncaagtgaaatctggttcatcanagagaaangttctgagatgagtactccagatgtttgagcagg

SEQ ID NO: 4163 - DNA, 250 bp, Glycine max
  Clone ID: 701000774H1
cataccctttctatcctacttgctacttcccacttccattcttttcttaaccagctaggatggtgagtgttgaagagattcgtaaggcgcaacgtgcagaaggccctgccactgtcatggctattggcaccgccactcctcccaactgcgtggatcagagtactatcctgactattatttccgcatcaccaacagcgagcacatgaccgagtcaaagaaaattcaagcgcatgtgtgataagtcgatgat

SEQ ID NO: 4164 - DNA, 251 bp, Glycine max
  Clone ID: 701000775H1
ttttccaacagtgttcaccatacatggactctggcctgactataatgatggaacctggccgtcctgttgctctggatctagtttcgatccaaaagagatattgacattgactaatagtttagagcaatattggccatcattgagctgtagcaagccatcattatgccatggtgggaaaggaacattttggggctcatgagtgggagaaacatggcacatgctcttatccgtgtttcgaaatggaatatgat

SEQ ID NO: 4165 - DNA, 254 bp, Glycine max
  Clone ID: 701000776H1
acactcataacacaaagcacaaagcaaagctcatccttgagttaaaaaatggcagcagcttcttccatggctctctcatccccatccttggctggcaaggccgtgaagctgggcccatcagccccagaagtgggaagggtgagcatgaggaagaccgtcaccaagcaggtctcctcaggaagcccatggtacggccccagaacgagtcaagtattggggcccttctctggcgagcccccgtcctaactaacggt

SEQ ID NO: 4166 - DNA, 255 bp, Glycine max
  unsure at all n locations
  Clone ID: 701000777H1
caatctccaggctatctatcaagtaaganagctgttaagaggaggagaatggctgatgatggaagcaggagggaattgatattcaggtcgaagcttccggatatctacatccccaaacatatgcccctccactcttactgcttcgngaattgagagagtgtggttcacgcccctgccctgatcaatgccccccagggagacgtctaacagntaccacgaagtggacagcacggccaganagtggcgannnggtga

SEQ ID NO: 4167 - DNA, 258 bp, Glycine max
  unsure at all n locations
  Clone ID: 701000778H1
cgtgattgcacttgggatcggtggtataaagtcatgtntgccatcttttggggcaggtcaatttgatgatactgatccaaaggaaagggttaagaaggggtcgtttttcaattggtattacttttctatcaatctaggtgccattgtatcgagcagcatagttgtgtggattcaagacaatgcaggatggggccttggatttggcattcctactttgttcatggtattatcctgtgataagcttctttataggcacac

SEQ ID NO: 4168 - DNA, 257 bp, Glycine max
  Clone ID: 701000779H1
aaaaactccgcagactgctttatgcagtctaatggatattccctagcgcaagataatcatggatgcttcggttgcatttcaggaactgggggtaccatggagctaaagtgcccaccaaatggtcagatgcagatgcataatgagtttgatggggctctccctttggtgacagttcctgctgctgctgaatttagcaaggaaaatggtgtctgggcatgctctcctgatcgtcttgaactgccttcaaagccattcca

SEQ ID NO: 4169 - DNA, 258 bp, Glycine max
  Clone ID: 701000780H1
ttgcacttcccaaaaacacagttggaggaaccattctgcgtagtgatctattggcaaattttttgacagagggcaattttagagcaagtgttgatttgcagcgcactcatcgtattaaaggaatgattaaaatggtggccacagttggtattcctgagaatacaggtatagcattgggcctgtgctatgaatagttcttttaggggcgtgccagttctgatatttacaccatctgctctcaagactgtgattatggaa

SEQ ID NO: 4170 - DNA, 256 bp, Glycine max
  unsure at all n locations
  Clone ID: 701000782H1
acgtatanaaaaagcttctccaaagaatttgaaggagaaagattcattcatgttcatttttnccttttccccttcgtccccatcaagtttctgattctctntttncacttcctttctcttcttcattcttctttctcttttcaactattttctttacatttttcnncgtttncctctcgctttnttcgcgttnactttctctactctgttttacgcattttattaatngttttgttagttaatttngcgattcgng

SEQ ID NO: 4171 - DNA, 256 bp, Glycine max
  unsure at all n locations
  Clone ID: 701000784H1
cctgacgaagaacttgtccaaaaggtgcttgcttattcttactttctgacattgggagtaatctgtaccagtcctttgtgtctgaagccattgttgatttagagagtacaaagttgtgttttgactcctgaaactaatattatggttgtnagatatggcagggctttacccctcgcccattaaagtgattggtagatcactcagtccatcggcctattgagatgtggcaaaagatggtggaggaattttccacaag

SEQ ID NO: 4172 - DNA, 216 bp, Glycine max
  unsure at all n locations
  Clone ID: 701000785H1
atcgatcactcgtcagcacatacagttgctgtcaaggtcccggagtcaattcacaacaccaaatcgccatcatgattgaggaagtcttgaagaagacctcggagatgttcccgctgcccacggaaggcctcattctgcttggtgtccgtccatgtatcccggaggagccgtctagagtgtggcgagtggaaganagttggcgcttgctagtgtgct

SEQ ID NO: 4173 - DNA, 252 bp, Glycine max
  unsure at all n locations
  Clone ID: 701000787H1
aaggttctgaattctgatatatagtaatcaagagtcaaaactgaggattcgttaggttggtgttgaatccagttccaatggacacaccaaatgcacagccgcaagctgcatcagcaagcacgccaaggaaaaaaatgacaaagcaattgacaggtaaaagggatgatacacctttgcaanctgcagcaagagcagggattatgactgtcctgaaagacacggttggtggcatgaagagggtgaactacgtgt

SEQ ID NO: 4174 - DNA, 257 bp, Glycine max
  unsure at all n locations
  Clone ID: 701000788H1
ccagcaggggctccaattcctactcttagccgcagatctctcagggcttgcatcttctcaggtaagttgtgaagatgtacacatcaaggaagaaaatccacaaggataaggatgctgaaccaactgagtttgaagagtcagttggacaggcatgtttgatctggaaaantacccaacccagagcttaaacagtgatctgaaggatttatacataaactcagctgtgcaagttgatgtttctgggaaccgcaaggctg

SEQ ID NO: 4175 - DNA, 255 bp, Glycine max
  Clone ID: 701000789H1
cgttgttaagatgcagtcaagactagcagaagcaacaaggagaacatcttgtgcattatcctcaaccacttcgcttcactctaaaacgacaactttgctctggcactcgtatccgaaccgcagaccccgaaattcattcgggagagctagaagctggtcccaaagttcacagagggacaacccccaaggtataagtacaccaagataaagcgagggaagccaggtattctgaaacagaacgcatgcgagcaagcg

SEQ ID NO: 4176 - DNA, 256 bp, Glycine max
  unsure at all n locations
  Clone ID: 701000790H1
aaaagtcatcatagttgtagaagatgggaagaatttcaaggaccaagagttatgcaattgcctcttcaatagtacaaganaaccaacaacaaacaccaccttccattacctgcacaacttttaacattcttgcacccatatacaagctnntcaaccatgaggatcagagttgccgcgaaaggatttacaaaggcgtgttggttgaccaggattccaagggatattggattggntgttgtatgagagatcttccata

SEQ ID NO: 4177 - DNA, 251 bp, Glycine max
  unsure at all n locations
  Clone ID: 701000791H1
ttcccatcctctgaagaagggtaattggccttgtaatccacacattgatcatgatcattgcatctgggactgaaagctatagactcaaggttgcaaganaacatggcgtggttgaaagtggagggcaagttctttgagcatattcattttgcttccncagtttatncttatgggaactgctgatgcattcttagaggttgcaaaaattgagttccnccatgatcaatccccggaacacatgaagagcattg

SEQ ID NO: 4178 - DNA, 261 bp, Glycine max
  Clone ID: 701000792H1
caaaacactcataacacaaagcacaaagcaaagctcatccttgagttaaaaaatggcagcagcttcttccatggctctctcatccccatccttggctggcaaggccgtgaagctgggcccatcagccccagaagtgggaagggtgagcatgaggaagaccgtcaccaagcaggtctcctcaggaagccccatggtacgggcccagacccgagtccagtacttggggcccattctctgggcgagcccccgtcctacctaacc

SEQ ID NO: 4179 - DNA, 259 bp, Glycine max
  unsure at all n locations
  Clone ID: 701000793H1
ctctctcaagagaggtttcaagaagtcaatgatcttatttttgaagccattggctgtggtgaattggaggatgtcaacgttgaaagtgtcaaagaagttgatgcagtcagcacaagcgaacaccctactgtggtggtagctggttcacaagaatgtgtgattctacactaacaaggctctaaanttatgaacaaattcagcaaatcccgtagtgctttaagaattaattgctggattgtgtcacgtttaagtcccatag

SEQ ID NO: 4180 - DNA, 341 bp, Glycine max
  unsure at all n locations
  Clone ID: 701000794H1
tgcgaaancagcaggaggagttttgcgtttaagggaattgtggcctctggcgtttcggtcgcngcttctactcnncacagccgaaaccaganaccattcttcncaaaggttttgaaagattggccgttacaagcccggaaagggtaacanattnatttgggaacatgggaggggggtccataaaaaatnaccattaatggtaagttgncaaagggaagaaaagggcntnctcccccatttggttnccttaatttccatggggttttttggggggggccctncctggncaatttncccaacttggggaagggttaaccaaacantnncancanaggaaantt

SEQ ID NO: 4181 - DNA, 257 bp, Glycine max
  unsure at all n locations
  Clone ID: 701000795H1
cagtggcaatgattgctactggatgtgttatggcccgcatttgccacaccaataattgcccagttggtgttgccagtncagaggnaagagttgcgtgcacgctttcctggtgttcctggggatcttgtcanctactttgtgtatgtagctgaagaggtaagaggcatattggcacagctggggtatgagaagttggatgatgtgattggcggactgatttgttccaaccagagacatatctctagcaaaaactcagc

SEQ ID NO: 4182 - DNA, 259 bp, Glycine max
  unsure at all n locations
  Clone ID: 701000796H1
tcaaatcctatccgaagttccttataccgtgtttacactcaaaggattagaatgcaatatataataactcagtagctactagttgtagttcaacctccttcctccatatacgtttannnaatctcactttcctattacagtatctttacctcaatggcaccaagttctgcagtgccagatgaacaggttgttgttggagaggagatgagcatgtaagagtggtcatttggaacagggcaaggcaattggatgncatctc

SEQ ID NO: 4183 - DNA, 299 bp, Glycine max
  unsure at all n locations
  Clone ID: 701000801H1
atccttcttgcagcaagggcttctaggactgagaatcaggatgctatagatgctgcaatagttgggatgcttgctgatccaaaggaggcacgagctggtatcaggnaggtccactttcttccattcaatcctgtggacaagaggactgctctaacttacattgattctgatggnaattggcatcgatctagcaaaggagctcccgagcagatattgaacctctgcaactgcaaagaggatgtaaggaaaagggttcatngaacgattgacaagtttgctgagcgtggactccgttcttt

SEQ ID NO: 4184 - DNA, 298 bp, Glycine max
  unsure at all n locations
  Clone ID: 701000802H1
ccgttgccatctcaaacccgaatccaaatccaaatccaacacgatgtcgtatcgaccttccgccaacgccaggaccncggttcggcggaaccgctacaaggtcgccgtggacgccgatgaaggtcgccggcgccgagaggataccatggtggagatccgaaagaaccgtagggaagagagtttgctgaagaagagacgcgagggtctccaatcccagcagattccttcgtcacttcactctactgtaattganaagaagttggaacaccttccagccatggttactggtgttttcacc

SEQ ID NO: 4185 - DNA, 295 bp, Glycine max
  Clone ID: 701000803H1
caaacacaatgcattccacccgagggaatgatttagcaatggcttttgccatggtccctgtgcctcccccaacatcaaccaatgactccaatcccatgaacattcccttacatttctcaatcaccaaactagtgacaaatcgagcatcacttgccatggcatcattgaacaagttattatgttttggatcagcgccaggtaaatcccaaagcatcatcccatgtgccgtttcaaatggtgtagtgtcaccatttttgaaccaagtagaaaattgattccatggatttgtcaaaat

SEQ ID NO: 4186 - DNA, 207 bp, Glycine max
  unsure at all n locations
  Clone ID: 701000804H1
cttttaattcctaaatcgtaatttacaactttgtagggatgagacattcttggctagctctgcacttcaatcctttatttgtacaatgctatggccaagtcaataccatgcatcttatctatgtgtgtcattgaacgaagtagttgcgtgaaaatgatgcttgtactatgaataaataataaaagaactttatcatttcaaaaaana

SEQ ID NO: 4187 - DNA, 272 bp, Glycine max
  unsure at all n locations
  Clone ID: 701000805H1
ttgtactcgatttccaaagataaaagaggaaacaatggtggtggttcttggtaatacctctacgtctgagctatatgcttgaaaagagttctgtttcaagtcacttagtacctcaatgaagtgcctctgactccagtaatctcagggcgaaaactgtttagtctccgattgttacattggttgaacaaagaacactccattgaagacttgatgntgtnagtagtggancaccattggtcagtgcccatgtacataccaacgtaacgtagatt

SEQ ID NO: 4188 - DNA, 290 bp, Glycine max
  unsure at all n locations
  Clone ID: 701000807H1
gttttcactggagaggcatggggttaccttggaagtaggagatttttggtagaacttgacatgcantcagatgctgttcatggccttaatcatacattaattgaaacggtcattgaaattggttctgttggaaagggtctcagtcaaggtgttaaaaacttttttgctcataaagagggggattcttctgccacaaatcagacagtgnnnnnncngaaacgtgcacaggagtcactgatatctgaaaacataaagatagcatctgcaagtgcctcaaatcctgggnatac

SEQ ID NO: 4189 - DNA, 288 bp, Glycine max
  unsure at all n locations
  Clone ID: 701000808H1
caaatgcanaatagtcccgtngcttccatgtancctcaacagatncatggcaaccaattgcngaggatatggctatngtcagcaancaggagttnaatatcttgagnagcaaatgtatggtttatctgtgagcgatganngtgctccgaagattcttaccnggtntcttctccatcntatgtgccaccggggaagncttccatgccagaagatctgttatttgggganttgttaatatggcanaagtgacaccaaaacctatcctgaccagactggtagcatgtaaaa

SEQ ID NO: 4190 - DNA, 294 bp, Glycine max
  Clone ID: 701000809H1
tcacatttgacggaaacagggtagcgtgagagtcgagtcacctgccgaaatcctatagcaccattttgaccaaggcgatatagctaacagctattcgcccccccatactttttttaattttctccttctcccatggtgtaattgctccaactatggccgtggacctcatgacgaccggttacacccgaaacgacaacatcagtagtttcacaaccaaagccgaggaaaatgccgtccaagaagccgcttctggtctagagagcgtcgagaagctcatcagactcctctcccaaa

SEQ ID NO: 4191 - DNA, 291 bp, Glycine max
  Clone ID: 701000810H1
cgagagtggtcctttggctgagagatggaagtggtcgaggccaaatgcaaatgtttatacattgttgattcaaggtttagcggcggtgttaagggtttctgacgctctcagggttattagatatatttgtgaaatcggcgtttctcctggtgaggaggttccgtttgggaagatagtcaaatgccctagctgtcggatagctgttggtgttgcacaaccacaacaaggtattcagatagtgtcttgtgcaaagtgtcgctaccaatacgaacttgtttcaggagacatagt

SEQ ID NO: 4192 - DNA, 295 bp, Glycine max
  Clone ID: 701000811H1
atcacccacctatgctcaacgacgaagtgtggcgcctagagaagattggtaaagacggagctttccacaaaaaattgtccaaagaggggataaacagcgttcaagacttcctcaagttatactttgttgatttccataggctcaaaaagattttgggcgttgggatgtcagataaaatgtgggatgtgacaatcaagcatgcaaagacttgcgagaagggcaacaaatactacgcgtaccgtgggcataattttaccgtctttctgaattccatatgccagttggttagagctga

SEQ ID NO: 4193 - DNA, 235 bp, Glycine max
  Clone ID: 701000812H1
gagaagatggctttgcaactatgggagacactgaaggaggccatagaagcgtacacggggctctctccgaacaccttcttcaccctgctggccctcatcctggccctctactacgtcgtttcgggcctcttcccctcctcctccgaccaccgccacaacaccgcctcgcgtgacttcgagcctcagatggagcctctgcgaccccctgttcaaatcggcgaggtcaccgaggaag

SEQ ID NO: 4194 - DNA, 294 bp, Glycine max
  Clone ID: 701000813H1
ttgtttggatttttgttgcctgtttatcttccaaaagtttttaggttgtattacgctggtcacaaagactgatcaaggacaaggagtcatgtagttttcttttgatgtataaggtcttgaaccataatttactgttggttagtgtatgatattttcatagtaaatgtatttggttgtgtagatatataccctctcctgtgtggcatattttgttgttgccgttatttattcttcttttacacttagaaagagggacaaacaggaggaaaggagagagtagatattaaacttatg

SEQ ID NO: 4195 - DNA, 272 bp, Glycine max
  unsure at all n locations
  Clone ID: 701000814H1
ggagtatgcgaggcagagatttcagcaatactggttgaagaagcctactttattggactcaccaagtatcgtttcccaagatgggattgccaatggtgtgaaccattgacatggatgcttnttatgtatttagcatgttcagcttggtatgtgttgactaatatatagaaaggcatgatgtgatgcataaaatttgtaaataatatataactaaaaatgtgtgatttgagaatttttacaacagttatgttagtaatccctccttttgtgat

SEQ ID NO: 4196 - DNA, 301 bp, Glycine max
  unsure at all n locations
  Clone ID: 701000816H1
aganaaactcagcacaacacccctcccaaccctctttttcttttaatttctcatcatatcatatctattaatcttacacatatattaagacatagncataatttttttcgttttanctttccttgcatgggctgttnagataagatgtctcgcacntgctcacagtgcggcaacaacggccacaactcgcggacatgcaccgacggtggcgccgccgcttcctgcggcgggtctcccagggagaacggcatcatgctgttcggcgtaagagttatgaccgaagctaactctccttccggaa

SEQ ID NO: 4197 - DNA, 296 bp, Glycine max
  unsure at all n locations
  Clone ID: 701000817H1
gaccattcctcttccatnacntnncaatcttnccntcctaatttactctaccaatctccttcaacaatatccgnagntngatgcttccttgtttctcgacatagaggttggtcaatccntgatcatcgatgatcncgncgnnggggcattnaccgtctccgctttcgacgcnaatcantgccctggtaatattcacttctctaatttatttggtatatttgtattntgattcaactatgtgtgcgtgtgttttgatcacgttgagtcatcataatcatgtgagataacagctangt

SEQ ID NO: 4198 - DNA, 293 bp, Glycine max
  unsure at all n locations
  Clone ID: 701000819H1
cgaanncacacaaattaattccttatttttggagggcgtattactaattaccattaattactattaataaagaaaaaacgcataaccatttctgtcctccttggtcgttgaatcgaaaaaaccagaatggcggattctgagcgaatccaaaatccgtggatggcttcggagcaaactgcaattgaaatgaacgccgattcagggaatgcncttctcttcctcatccgccgccgctaaaattatctaattctgatcaattgggaatcggagcacgagctttctccgccgccggc

SEQ ID NO: 4199 - DNA, 292 bp, Glycine max
  Clone ID: 701000820H1
caagttcgccacagttgtgcgtgtcatcgcacacacacaggccaagaaggtcggattcaccaagaaggccgatgtagtcgagatccaagttaacggaggagacatcgccgccaaggtcgcctttgcccgtggactcttcgagaagccagtcgccgtcgacgaggttttctccgagtctgagcagatcgacgttatcggtgtcaccaagggttccggattcgagggagtcacagccagatggggaaccagaagactgccacgtaagacacacaagggtctgagaaaggtcgct

SEQ ID NO: 4200 - DNA, 289 bp, Glycine max
  Clone ID: 701000821H1
ttctccctcttttctctctgccctccgccatgactgaggataaggagatgtcttcctctgtcaccaatggcgatgattccctcactggtcacatcatatctacaactattggaggcaaaaatggggaacccaaacagactattagttacatggcagaacgggttgtaggaactggatcatttggaattgttttccaggcaaaatgcttggaaactggggaagcagtggctattaaaaaggttttacaggacagaagatacaagaatcgcgaactacagttaatgcgtgt

SEQ ID NO: 4201 - DNA, 288 bp, Glycine max
  Clone ID: 701000822H1
gctactaaaccatgttacatttctcacaaaacaagattatcatcttcatcttcaggaataacaatgatcccacgagcaacaacagttattggtactgtggaggatggaaatcaaggagaggctgataccattccaactccggtagttattattgatcaagactctgatccagatgcaactgtggtcgagataacctttggtgatcgccttggggctcttcttgacactatgaatgcgttaaaaaacttggggctgaatgttgttaaggcaaatgtctttctagattcc

SEQ ID NO: 4202 - DNA, 286 bp, Glycine max
  unsure at all n locations
  Clone ID: 701000823H1
gtgttttgtgattgaatgataatgtaaaattactttaattgtcagtatataatccattttctcaactatcaattgcaangaaaaattatcacttttggtgaaattgtcttgagctagttgaaaatgatttcggtgtgcactcaaagatggagtatatatgatgaatttcttttcagggatattctccactaggttcaccagcagctctcannagtgatattctaagaatcctgttgtcacagagattgcagagagatggggaagacnccagcacaagttgccctcg

SEQ ID NO: 4203 - DNA, 294 bp, Glycine max
  unsure at all n locations
  Clone ID: 701000825H1
ctaaggaactctcccagaaaagaggcatcagttgcaatgggctcgtnacggtgagggcgacaagcggtggatcgtggaggaccgccccgacggcaccaatgtccacaactggcattggtccgagaccaactgcctcgactggtccaagaccttcttcaccagcctcctcactaacctccctatcctcgacggcgagggtaacctcttcctcaaaacgacgtcgcttcgctccctcgacggcgaggctacatcaatgtccgaaaggggaagatcatccccggctacgagatcagc

SEQ ID NO: 4204 - DNA, 296 bp, Glycine max
  Clone ID: 701000826H1
gattattttgtctacgttgtcagcagcctctgaccgcaaatccacgagatgttagttttttctagccacaaacgcagaccaacccctggacgcacattagccaccattagctgtctcactctaacatgcgcttctccagccgctgcagactctgctccacttgctacttcctctagaagaagcctttttcaaatctctctgccaccggacccgttttcttctgttcatttgggtttctctcttccaatttatccgcttctttgagacctaccctctctcaactttccctttcccaa

SEQ ID NO: 4205 - DNA, 294 bp, Glycine max
  unsure at all n locations
  Clone ID: 701000827H1
ctccgtataggatcaggaaactgctaagaccatgttntttatgtactatgtaattnctgtatgtatgcttgacatatacaagtgggaaatccaaggaaatgtgtggtcctaaaaatggtgcaagataagcaactctctatggagattggcggggtggggttgtttcaaactgcaacaggggaatacttgccactgattatgtctcagttattgcataattaaactaatatacgtgccactgtcaatgttggttcttatggatgtggtagtgccatacccaaaaggataccaaaa

SEQ ID NO: 4206 - DNA, 294 bp, Glycine max
  unsure at all n locations
  Clone ID: 701000828H1
gtgatgataacttaattagtgttcatgaatatgtcaagccttactttagtggttctaaattgaaaagctttctagctggtcataatatcaccattactgatggtattgacaaaactagtgcaactttgcaatttagaaagttagcagattgtgattttctcaagagaaactttaagcagatgtctaatgttttgtgggtggctcctgaggataaggcgagtttatggtcacaacttcattatgtttcgtgtaatantctggaaatgcaagaagctatcttgtcaatctcgtaaa

SEQ ID NO: 4207 - DNA, 113 bp, Glycine max
  unsure at all n locations
  Clone ID: 701000829H1
tcgagnntctngatcagagggaacagagcanttcttgctcaataactgtnnaggtgttgattgttcatcngtgncgcaattagtntctttgggtacttagatgntgngnagtt

SEQ ID NO: 4208 - DNA, 301 bp, Glycine max
  Clone ID: 701000831H1
ggaagctatggacttgattggagcatttcatactcatccaaactgttccctgaaaaattccacagttaattgcacaggcaactttgaccattctcctcaattggatctttctttgagaagatcttgtcccggaagctttgagaataaactcactgaagaaaggcacaccctgatgcattctaatgcttcagctttcaagcggtatactaccaggcaattgcaaatatcaatgcctgcagtgttaattaacttctctgatcaacaaagagaacagataacaaattgtgagaaaaacatctcc

SEQ ID NO: 4209 - DNA, 298 bp, Glycine max
  unsure at all n locations
  Clone ID: 701000833H1
atcaactnaaaaacagnttttgnacgcncgaatctattgnccaatgaagctttgaatcagactggnatatgggntnaaggngagttantgcgaacanaancnaaantagaaatagcacagggccagttgaagagtgccattgnnacatatactcagcttcttgctantctcntncgttcagaganaaacttnnggttnagancagaagctgtataaggacnacatagatcatgctaggngcatggaagttgagatatggtctgatctgctcnngtgtacatgagtctgtcacggtngc

SEQ ID NO: 4210 - DNA, 291 bp, Glycine max
  unsure at all n locations
  Clone ID: 701000834H1
gaaaaaggaggaacgcagaccgaggcgtttccagttcgaaagggaaatgaaagtgtctttgttggtgaagggnncgtgnnagaaacgaaaggggtgtgtgttgggttgaataggtatagataggatcaatgagcaacaacaacgcaggaaaggtggtgtgtgtgacgggtgcttctggtttcatagcttcatggatcgtcaaacncttctccaacgtggttacactgtcagggccaccgttcgctacccaagtaatctgaaaaaggtagatcattggttaaacttganggc

SEQ ID NO: 4211 - DNA, 293 bp, Glycine max
  unsure at all n locations
  Clone ID: 701000835H1
tcgtaagagtagtaactaagaaaatanaggtttctaatttatttcgttcaattctccggcggcaccgcaaccgattccgccaccgcatatggcaaaaggtcgaaaactaacgaccagccggagcgagcgcttcttgggaacctatgcttacagccaaggctccgccgccgtgaacccgtcggagcttcgggaagaggatgtatggggcgccggagatgacgccggcgaacgcgagtngagatccacacttcgccgccatgagcaacggcggcggaagccggcgccggattccc

SEQ ID NO: 4212 - DNA, 290 bp, Glycine max
  unsure at all n locations
  Clone ID: 701000836H1
tcgtgaatgcgtataaaagganaataaagaaattagcgtcaaaatgttgggtgtgttcagcagctccatagtgtcgccnccggacgagctcgtngccgccggccgccgtactccgtcgccgaagatgacggcggcggcgctgcggaagcggttcgaggagaagaacccctccgccgtgtcggtggaggtcggagagcatgtccagctcgcttatacccaccacaacgagtcgccgtttcagcccagatcctttgctgtcaaggatgaggtgttctgcttgtttgagggag

SEQ ID NO: 4213 - DNA, 279 bp, Glycine max
  Clone ID: 701000838H1
cctgagcttcatgtttgcaagtctgatccttgggatttgccaggtgatttggagcaagagagatacttctttagcaccaaagtggccaaatatcccaacggaaatcgctccaacagagccacaaattcgggttattggaaggcaactggcttggacaaacaaattgttacttcaaaaggcaacaaccaagttgtcggaatgaagaagacacttgttttctacagaggcaagcctcctaatggatccagaactgattggatcatgcacgagtatcgcctc

SEQ ID NO: 4214 - DNA, 281 bp, Glycine max
  unsure at all n locations
  Clone ID: 701000840H1
gttgacnttgattggtacgtgtctcttcttgagagaaatggcgatgattcctaattgncaaaagggggaggacgattgagactcancttgttgatattggnatgagagntaaggatgctagaatgcagcttgttcgggttgggcgtgatctnntgattnatcctgacattactgggtaatgtgcacttgcataggatattgtgtgctgctgcttggattgctggagagtatgtngaggttgcggccaacccctttgaatcatggatgcacncctacaaccc

SEQ ID NO: 4215 - DNA, 292 bp, Glycine max
  Clone ID: 701000841H1
caagaaatacttagataggcttttgagtgaggttttggacgaagctttagtgaagcttatcaatacttccgataaatggggtttcccaggcaatgcaaatggcagcgaatatggttgtcttggagcgtgcttgtgattttttctttcgccatgctgcacaactttcaggtgttcccttgagaatggtggagagaagcagaaggcagttccctcttagaaaagcccgtgatgctgcagaagacatgctctctgggctactcaaagccaaggttgatggattcatgacattgat

SEQ ID NO: 4216 - DNA, 283 bp, Glycine max
  unsure at all n locations
  Clone ID: 701000842H1
aatctagttctagatcgcgaanaccgccacgtcacggctcagaagaaatcnngcatgtgttcccctacgacgcatcccggttcgttccgatgcagcctccacaaaaacagccacagcgcgcaaaccggttcgtttccgtcgaaccggctcaacatgcgccggtccgcaatgaagaactcgctcgtgagaatcggtggcgtccncacgcgagtgggtgaaacgtgctctcaccgcgctgattcgtccttcnnncncatcaacagcggagaagaacggcgtttga

SEQ ID NO: 4217 - DNA, 292 bp, Glycine max
  unsure at all n locations
  Clone ID: 701000843H1
tgtaaattgtaaattgcatcatccctgaagctgnacctcaaaaccctagctgccngcttgtctgcaacggcatcgtttcagtatctcgttatgattagttgagaatccaaaggaatcgaatcgaatcatctcgacgagaagcaaaacaccggctatagttatgtacagagagcgaggaggcgtcggatccaaatcggaggtaacttccgttgatcggaagcgaatcaatgacgtcctcgataaacagctcgaacgatcctcgccgtccacatccagagccgccggcgccatc

SEQ ID NO: 4218 - DNA, 293 bp, Glycine max
  unsure at all n locations
  Clone ID: 701000844H1
agcggcaagacctggaagttcgtctcgcacatcgccagtngcggcgaangcgccccaacaacggcctgacccccgtctgggagcccttcctcatgctctacaagaacaagctcatctgcttctactccgaccagcgcgatcccaagtacggccagaagatggtccaccagaccaccaccgacctcaagacctggggcccggttgttgatgatgtcaagtacccgacctacaccgaccgccccggcatgccgaccgtcgccctgctgcccaacggcaagtacatcatgtcgtac

SEQ ID NO: 4219 - DNA, 293 bp, Glycine max
  unsure at all n locations
  Clone ID: 701000845H1
cgaccttggagagcgttcttgttgtacggnccgccggggacggggaaatcgtatttggccaaggccgttgccacagaagctgattctacgtttttcagtgtttcttcatcagacctggtttcaaagtggatgggagaaagtgaaaagctggtctcaaatcttttccaaatggctcgcgaaagtgcaccttctataatattcgttgatgaaatagattctctatgtggtcaacgtggagaagggaatgagagtgaagcttcaaggcgtattaaaactgagcttctggtgcagat

SEQ ID NO: 4220 - DNA, 293 bp, Glycine max
  unsure at all n locations
  Clone ID: 701000846H1
atgcttgagagggtaaataataaatgccagtcttaaatgattttgctgacaaacggtttttgaacttctataccccactgttttcaaattatatttgtttgactatgtttacatttggattttgttcattttttccccaaatctgtaaggtttacttcagtgtaacggnatgattgaacatccaaggctttgttgtccactttgagtntattgggactttattcgttggatcttactgtgaaagctgcttgtgatatctactgattgagtgtttatgcaggcattcatactac

SEQ ID NO: 4221 - DNA, 297 bp, Glycine max
  unsure at all n locations
  Clone ID: 701000847H1
tntanacatcatgatgttgagcaagagtacnactnanggnttttatgtatntgtaccaganaagttgagatggcntgttnttgtgatagcnatacttgctgnggttgtgggaagccaatccatcatcactggaactttctcaatcatcaggnaatgctctgcattaagttgctttcctagagttaaagtggttnacantnntncaaaatccatggacaagtatatatccctgagatcaactggttgttgatgctctgtgtttggntgtaantattggtttagagacanaaagcttat

SEQ ID NO: 4222 - DNA, 298 bp, Glycine max
  unsure at all n locations
  Clone ID: 701000848H1
ctctttttgttgtttagtcagctatgtnantataaagagaaccctagtgcaaatacatattgtataactttggtgactctagtctgtgcaaaanaatgcttctaggcaaccaatggaaccagtcatgcacaagtataataaaccactctattccatgcaatacaatttgtgttctttttagtttccagtgaagaaccctctttaagtgccacttgggcatcattctncttgcccagggctaaaagagcaacagcntgtaaataaaacgcatgtnncnaacgggggatantacctgtgc

SEQ ID NO: 4223 - DNA, 295 bp, Glycine max
  unsure at all n locations
  Clone ID: 701000849H1
caattganagnagtgtccaacaaggttnccaatgcagaactgaaattgtttttggaagtggagctggggatggattcacgtcccatcgcaccacctgacaagaccaaggatgatatattacttttcttcaagctatatgatcctgaaaaagaggagctgcgttatgttggaaggctctttgtgaagtgtactggcaagccattggaaatcttaacgaggttaaatgaaatggctggtnatgaccctgaagaagatattgcactttatgaggaattaagtttgaaccaaatgtcct

SEQ ID NO: 4224 - DNA, 292 bp, Glycine max
  unsure at all n locations
  Clone ID: 701000850H1
ggaggttttaaagacaagttgggtgaaggaggatatggctctgtgttcaagggaaaattgcgtagcgggtcttgtgtggcaataaagatgttaggtaaatcagaaggaaatggccaagattttattagtgaagttgcaaccattggaagaacatatcatcaaaatatagtacaactaattggattttgtgttcatgggtcaaaacgtgctcttgtctatgaattcatgcccaatggatctcttgataaatttctttttccaaagatganagtatacatttaagcnatgatag

SEQ ID NO: 4225 - DNA, 291 bp, Glycine max
  unsure at all n locations
  Clone ID: 701000851H1
cttcccttttctccataaacgaggtgcttcagatttgctcataataggagggaatcgaatcgaatcgaatcgaaaggnaagtgcagaatggatgacatgccgttgccggcgctctttgagcaagcccgcaagatccacgccgcagccaccgattccggcgccgaccaggaggttgtgaagaaggggtgcgaggctctgcatagatgcgaggacatggtcaataatctaggtttgttctctcccaacgagaccaaagaagatatcagcaccacgaatctcaaatacattctg

SEQ ID NO: 4226 - DNA, 287 bp, Glycine max
  Clone ID: 701000852H1
cttgttatactggcattgcagattttgtgcctgctgacattgaaactgttggataccgagtattcttgggacacaaacaatactttgtatcttcagatgttggtgcgggaaagatgcaatggtatgcatttcacaaagaacctcctggtggtgttgatgagcccaacggaaaaaaggaaaggttgcttaggatatttgagggctggtgtgataatgctgtagatctgatacttgccacagaagaagaagcaattctaagacgagacatatatgacaggataccaaca

SEQ ID NO: 4227 - DNA, 280 bp, Glycine max
  unsure at all n locations
  Clone ID: 701000853H1
cgtgcattaaattttccgagaggccaaaatatccattncacctttctctttctccgatggctaatccctcactcttgttcttcagtctcctcctattatccgccaccgtagccgccgccgaacggatcgacgatgaagacgaccttctgatccgtcaagtggtgccggatgcggaggaccaccacctgctcaacgcggagcaccacttctccgccttcaagacaaagttcggcaagacctacgccacgcaggaggagcacgaccaccgcttccgtatctt

SEQ ID NO: 4228 - DNA, 282 bp, Glycine max
  unsure at all n locations
  Clone ID: 701000854H1
ccagaaggaagaagcaacaagacaagggcaaaagcgagcnagtgtcgctntcccttcctcccctccccctctncccccttccagccgacagcgggttacgcttgagctccgctcgcgttcctagcttcgtgcacacacaaaacagcgacactttcaagcgaccaaaatcctcacgccctcgtctttttgcgacctccttatcctnccctggttcaagtctggcgagcgagcgagctggcgtgatcgagaaactcttgcnaccagggggngaagcaagggaga

SEQ ID NO: 4229 - DNA, 282 bp, Glycine max
  unsure at all n locations
  Clone ID: 701000856H1
aaaaagactccttcaactagtactgcattctttcttttcttcaaatggtagcaagaggcatcaagagcaaaagacattgttaatttcggagatggcgagttacgaggctattaagaacttnnnnnnnnnnnnnnnnnnnnnnnnnnngatggcactcctccataaccagatctctgaatcaagatctgccactgtttctcccaccattgcccaaactaccccgcttcaccttcacatcaacaacattattgaggaacaacacataatcgcaaggcaccaacc

SEQ ID NO: 4230 - DNA, 290 bp, Glycine max
  Clone ID: 701000857H1
gaatatcttatcttgaggaaggaagacatggatttgtcaacatttgagttgtcaaccattgctgaagccactaataatttttctagcagaaataaactgggggaaggtggatttgggccagtgtacaagggtacactaatagatgggcaagacgtagccataaaacgacactcacagatgtctgatcaaggactgggggagtttaagaatgaagttgtgctaattgcaaaacttcagcaccgtaatcttgtgaaacttctaggttgctgcgttcaaggaggggaaaaatt

SEQ ID NO: 4231 - DNA, 292 bp, Glycine max
  unsure at all n locations
  Clone ID: 701000858H1
gtttttcacatacaaactggcancttggtgactggtgcatgctcccagttgtggaccaaaaggaagagatgattcaagatgcatctacttgtgatgcttataatgagcatggtatggctagaggatataagagaagaaatcttaacgttggggaattatttctaattgagaagataaagaccaaagttgatgttgtttggcaaaatggtgaacatactttgggattggatccacacaacttagtcgcgtncgaatgtcntaaacactcatgaattttggccccagcagtttg

SEQ ID NO: 4232 - DNA, 234 bp, Glycine max
  unsure at all n locations
  Clone ID: 701000860H1
tgcaaacactgangacacatactcgctnctgattgttctntctttntctgngctnacanatggcttgttnanagcntntcatggttctcntcattncgcgtcgngangcngggaaaactcgcagnaggcccncngngttaaacaangtacaagcccgcnaaggtgatctattggggngtggggcaganaatgctgaatcntctgagcncgactncgccgacgctccagagcang

SEQ ID NO: 4233 - DNA, 295 bp, Glycine max
  Clone ID: 701000861H1
cgtgcattaaattttccgagaggccaaaatatccattgcacctttctctttctccgatggctaatccctcactcttgttcttcagtctcctcctattatccgccaccgtagccgccgccgaacggatcgacgatgaagacgaccttctgatccgtcaagtggtgccggatgcggaggaccaccacctgctcaacgcggagcaccacttctccgccttcaagacaaagttcggcaagacctacgccacgcaggaggagcacgaccaccgcttccgtatcttcaagaacaacttgct

SEQ ID NO: 4234 - DNA, 146 bp, Glycine max
  Clone ID: 701000862H1
gggcaaagcattttcgaagaaattacgtggatttaggaaggctctgattattcttctacatctacaattattaaggtgaagataatttcggctctttacaagtaaagaatgaaatttttatattgatcaactaaatctaccatatg

SEQ ID NO: 4235 - DNA, 277 bp, Glycine max
  unsure at all n locations
  Clone ID: 701000863H1
ctatttctgacnacgttttgctctnccgcctctccctctcnctcaaaaatcgttctcttanattttagggtnntgtnttgctgctgcctccgntccccccttctcataaacnacgcgttttctcttctgcttcgtatctattctttgcttttngttttngttgattcaaggcttcacagcattcgtngcggcattttaatcgatttatccaagcnggactgaatganctaatggagtctaaaggtggggaaaagaagttctagtagtagnagtcgtc

SEQ ID NO: 4236 - DNA, 300 bp, Glycine max
  unsure at all n locations
  Clone ID: 701000864H1
anagccntgaaaganggaaggaagcccantgntggnncccctgacggtgatgaggacctctcagttcctttgagttcttcaagtgatagatatgaccttgggacnaccgaaactactgtttccagtcctggaccagaatctgattcatcacatagttatcatagccctgtcaactaccagaatctgccaagcattcagcctactcctagatttcatgatactgttaacgancaacattctgcagatattccaccatctatgctttncatgacagagnagataatgacaagcntcttccgt

SEQ ID NO: 4237 - DNA, 282 bp, Glycine max
  unsure at all n locations
  Clone ID: 701000865H1
ctatactccacacttncagttgttccaccatattttttgttacttatactacaccttttaagtgtttgtagcaagaacttttgtgtgaggtttgttgcaatcaagagatatntaagccttctatttgatactcaattaatcttttgatcgacttattttgagataaagtgatatctttagttgtgatttcattcctagaccgagaatcgagtctcaaactttgattaggaattcaagtgtcaaatcactgtactaaccatttttggntaatttgaggtcagt

SEQ ID NO: 4238 - DNA, 281 bp, Glycine max
  unsure at all n locations
  Clone ID: 701000867H1
caaaggcaaactaaaagtatgttgttgtgtttgcacccatgtcactgcaaattccttgcaagtcagaagcgattatagagggtcagaatctgcagtgttaattttcatctcagttgcattcattcttaactggaattataatgaaagaggttcttcactacactacatggtagtagttgttgtggttctccgtcacatgtcatcnttggacatgttcatacatttcttcgtctttgtgaatggagttgtatgtgttactcgatcaatcgctggttccagtc

SEQ ID NO: 4239 - DNA, 280 bp, Glycine max
  unsure at all n locations
  Clone ID: 701000868H1
cttcattcttttcttcttcaattcatatcatatcaattagatttgntcttcagagtttgctagtgagataccatggacaactacaacagcaatgacttttggaaattcagtgaccagttgaggcttgaatctggtttggccaatctgtctctgaatgattattccatttggagcaacagctacagctccaagaggcctgatcagaggaggaactttgatgtcaagggcagtgatttcaacaactcatcaaagccttttgatgatgatttcaatgatggcc

SEQ ID NO: 4240 - DNA, 280 bp, Glycine max
  unsure at all n locations
  Clone ID: 701000869H1
ttccaatatattccattctctctgtgtatttccctacctctcccttcaagatgcagatcttcgtcaagaccctcaccgggcaagaccatcacccttgaggtggaaagctctgacaccatcgacaacgtcaaggccaagatccaggacaaggaaggaatccccccggaccagcaacgtctcattttcgccggaaagcaacttgaggacgggncgtacccttgctgactacaacattcagaaggagagtactcttcacctcgtcctccgtctccgtggtggc

SEQ ID NO: 4241 - DNA, 290 bp, Glycine max
  Clone ID: 701000871H1
gcacccttgtctgatggaaggattgatcaatggggcaggttgcagtgtgtgtaccatggttggtgtttcaatggcaaaggagaatgcaagctcattccccaggcaccccctgatggccctccggtacatacgtccaaaaaagcatgtgtagctgcttacccaagtactgtacagaatgatatcttgtggttctggcccaatactgatcctcaatacaaagatattattacaagaaaaagacccccatacataccagaattagatgatccatcgtatactaaattaatggg

SEQ ID NO: 4242 - DNA, 292 bp, Glycine max
  unsure at all n locations
  Clone ID: 701000872H1
cttttaaatttgcaagangttattcttggtaccaagctttccattctcatccctgccattccagctgccatcattgccgantgctatggctttggaagaccttggatttttatattgagcttacttggacttacaccacttgctgaacgtgtgagcttcatcacagaacaagttgccttttacactggtcccacagtcggaggacttctgaatgctacntgtgggaatgttactgagctcataatagcaatatttgcccttagcagtaacaaaattgctgtggtcaagtatc

SEQ ID NO: 4243 - DNA, 281 bp, Glycine max
  unsure at all n locations
  Clone ID: 701000873H1
aacactcacaaagacacagagtgcgttcgttgacgacaaacacacacaaacacacaacaaaagctcnnccggaaaatctttctccggcgacctggaattccgacgaaggtagttgcggctccttcgtcccgaaactgaggccctcaaagtataaactttggtggtggtgggtangatctggnggtgtatgatgggatcttggcatatgcccgntggagactccggcgaggttgctttggaccacaagcttcttccgtcataagcttatgancttctaataa

SEQ ID NO: 4244 - DNA, 284 bp, Glycine max
  unsure at all n locations
  Clone ID: 701000878H1
catgattcataatcatggtgttaatcagantcaaaaaaaaaaactgagagaaataaggncatgatttaggtagctgngatctaattgnctaattgacaagcatctnatttccaattcttttttccaatatcttctttctttcacatgaaancacttcatttccaataattcaagtggggggctggtggcattgtttgtnctggtttttatcatgttacagttactttaaccaaatagagacatatagcagcaaattctgtcgttactgntttattttctacncc

SEQ ID NO: 4245 - DNA, 289 bp, Glycine max
  unsure at all n locations
  Clone ID: 701000879H1
aggaaaggggaaggaagcnaggcaaggaaggagagtggatcgattcctcagcagcaccagacatttataaaagctctttcccttccctcaaatcgctcatactcttccaatctttttntttttntttnttanccttncccccccgntnangaagacnactcncaaaaaagagnaanaagagggtttncgcgntggantcnaangggattttganggaccncanggnttncccananggatccccctancttttgaancgngggtcctgttgctgaagnntntttcctgg

SEQ ID NO: 4246 - DNA, 285 bp, Glycine max
  unsure at all n locations
  Clone ID: 701000881H1
aagaaaacaantntanagnaatataagtnaatattctttagnagaatcaaaangaatattaanttnaaataanttttagatagaaanaagacttaaaaaggnggatttgaaatgcgagatcnagaaacatatcttnncgtggnacgagtagtaagtagtcnatggttnggggcttnggcgggnctcttgggtagagatanaatcgtnttttccagatgnattgatatncctgtaattgnnaatcnagttnttgacanggaaaggggggaagnagattatagatcc

SEQ ID NO: 4247 - DNA, 284 bp, Glycine max
  unsure at all n locations
  Clone ID: 701000882H1
gaaaaataacaaatttatgaaaaaagaaatatttgttatcgaaccagttcgcctgtctagaaaaaacaataaacnattttntatgtatcacaccataggtctttcgtttnttcttttgaattaatgaaagacctatggtttgatacataaaaaataaacgaaaaatttatcacaaatacccagaaaaaattcatgttaataagananatttttataaatatattacaagaacaagagatcaaanaataacaganaaaaaagaanaagataattctgatttactt

SEQ ID NO: 4248 - DNA, 281 bp, Glycine max
  unsure at all n locations
  Clone ID: 701000883H1
ggaatgtggntgctcagcttgtgagaagagctgaaagggctggattcaaagccattgcccttactgttgataccccaatactaggacgcagagaagctgatatcaagaacagattcacattgccgccatttttgacattnaagaactttgaaggattggaccttggaaagatggacaaagctgatgactctggacttgcttcatatgtntctggtcaaattgatcgtactttaagctggaaggatgtgaagtggcttcaaacaatcaccaaactgccaatt

SEQ ID NO: 4249 - DNA, 280 bp, Glycine max
  Clone ID: 701000884H1
gatgtgcgcagtaaatcaagaacaatatcaaagcctgttgaacatccctctgagctccctaaatggaactatgatggatctagcactggacaggcaccgggtgatgatagtgaagtaatcctatatcctcaagcaattttcaaagatcctttccgtggtggtaacaatattttggtcatttgcgattcttacaccccacaaggtgagcctatccctacaaacaagagacacagagctgctgaaattttcagtaacccaaaggtccaagcagaagttccat

SEQ ID NO: 4250 - DNA, 290 bp, Glycine max
  unsure at all n locations
  Clone ID: 701000887H1
aacaatcaaagtagcactgtggaagatgttgctacaagtagcttgtcctctgctctctgggcctttgttgagtcaatacctnctactcctgcatcagctgctgaaagtgcattggtgaaccgagctttgaatcgaatgtctagcttcagcaggttgaagatcaagcacaccaacattgctgcatcaggtaaagacactggaactatgaagagnnctggcagaaagggacttccattcctttcttctctattcttattgctttatgtgctttttgttgggtttttgttgga

SEQ ID NO: 4251 - DNA, 281 bp, Glycine max
  unsure at all n locations
  Clone ID: 701000888H1
agaaagcctccttcaantagtactgnattctttcttnncttcnaaatggtaggangaggcatccagagcaaaagacttgntgatttcggacatngcgagttacgaggctatnaagaacttnnnnnnnnnnnnnnnnnnnnnnnnnnngatggcantcntccataaccngatctctgaatncaagatctgncantgtttctnccaccattggcccanantacnccgcttcaccttcacatcnacaacattattggggaacaacactnatcgaangcaccaac

SEQ ID NO: 4252 - DNA, 280 bp, Glycine max
  unsure at all n locations
  Clone ID: 701000889H1
cttggnataaagccaacaaacgacgtcgtgtggtttccaataccttctacgtttgaatttttgcnagaattgagatggcgaacgagaacgaacccgcgaagtggctgttaccataccttcaacgcgccgatgagttgcaaaagcacgaaccactcgtcgcttattactgtcgattatatgctatggaacgggggctgaagattccgcnaagtgagcgcacgaagaccactaatgctcttctggtttcgctctgaagcagcttgaaaaggntaaaaagtcc

SEQ ID NO: 4253 - DNA, 277 bp, Glycine max
  unsure at all n locations
  Clone ID: 701000890H1
aggtggcttcaacagggacctgggcattcgctttttccagcttatatgtgtacaaggacaggaatgtggttgntcancttgtgagaagagctgaaagggctggattcaaagccattgcccttactgttgataccccaatactaggacgcagagaagctgatatcaagaacagattcacattgccgccatttttgacattgaagaacttgaagggatggaccttggaaagatggtccaagctgatgactctggacttgcttcatatgttctggtccaa

SEQ ID NO: 4254 - DNA, 331 bp, Glycine max
  unsure at all n locations
  Clone ID: 701000891H1
gtcgacagcatctcagtccaccaagtgaagaaaaaatgggtttgttgggtcgactcgtggttgtgttgatgattgttctgcttgccagcgggacatccatcgctgagaaagttggttcgcgncttgccggggccattcgaagttcaacaaccggcaagtgcaagccgctgggaactgtgataggnaagcaacaagccgtgttcattcgaaacattgttcgtggacnattcccaggattggnaagccgcgattggttaaaccatattcggaacggtaacngaacaaacaaaacgggtcttgttgggcaaacggggcttccaaagaaggttgg

SEQ ID NO: 4255 - DNA, 261 bp, Glycine max
  unsure at all n locations
  Clone ID: 701000892H1
gtctctgtgtttgcggctgacgatcngaaacgagtgactncntcgtttctcgcaagtacaagtantcatggggaagggnaaangttcacatcaacattgtcgtcattggacatgtcgactctgggaagtcaactaccactggtcacttgatctacaagcttggaggtattgacaagcgtgtgattganaggttcgagaaggangctgccgagatgaacaagaggtcattcnagtatgcctgggtgctcgacaagctcaaag

SEQ ID NO: 4256 - DNA, 287 bp, Glycine max
  unsure at all n locations
  Clone ID: 701000896H1
gctgctatgatgaggtactggaataatgaggaggttttgcagaagttgggacaagccatgggtcttgccattcgggagatgcaggtgcctctgctgaaaattctggggcagatganaccgaagatttgggaaatgaagatgaatcaattgttcatcatactgctagtgntggtgatgtggagggcttgaaaaatgcactagcctctggtgctgacaaggatgaagaagattcaganggaagaactgctttgcatttgcctgtggatatggcgagtaaaatgtgctcc

SEQ ID NO: 4257 - DNA, 290 bp, Glycine max
  unsure at all n locations
  Clone ID: 701000901H1
ctaaaatccccgttcgatctcacggagacggacctctctctcgcgcggacgcgttngctgtagctcgcttcactctcagacttctcgcgcaacccccctctcgtggacgcgttgttgcagatcctcgttcgttctcgctctctcgcgtgagtttttgaatttgttggtctatgtgcaggaccagncccgaactcctgctcaatccctgtggatcagcttgcatcgatttatcctggaagaaagtaaacaaaatcctgtagaatagctctttgtggcttttaaatgaatcg

SEQ ID NO: 4258 - DNA, 277 bp, Glycine max
  unsure at all n locations
  Clone ID: 701000902H1
tagactttcaccgtgaagctgtaacttgcaaatgctttttgagttaaccagttaccgctggtgtgctgaagcgcataactcattaatgtgttgctgctaaagtgacgaagaagtaaatcattaccattgntgtaatgtcacacatattcttccaaagatgcagacagtataggagctggctgaaagccgtattcattatagatattggtcatcacagttgattaaagggatgaagttacactgaattttgttcaatttgtanagtctatatattagc

SEQ ID NO: 4259 - DNA, 276 bp, Glycine max
  unsure at all n locations
  Clone ID: 701000903H1
gttcgatggagcaaagggtgccaatgcaaaaaatatgacgtattacttttcagattggttttccatggtgaaggagctgcagagttccatcaacatcttctctgatgcaggtcctgatgttaggtgggtgggagatgaaacaggttctgcagggtatacatgttggtctaccattaatcgaacctctctatccattggaagtccagacatcattcagtatataaacactggtgatccaaaagggacagnttggctaccggcggaatgtgatgtatc

SEQ ID NO: 4260 - DNA, 269 bp, Glycine max
  unsure at all n locations
  Clone ID: 701000907H1
gcagaactgtttggataggtattcaaactgtgttgaaggaagaaatggtctttaccgttaacaatggagacctctctactttgtccttgttcaagttttgttgctgctgtgtttttgttctctaaattatttttgcngataagtttgtcatttgtgttttatacaagcattttttttattgtacagttctgtcttcgtttttntnnncctttttttttaaattgcatgatcatatattnccctactgttactgcacatnaatttagtnc

SEQ ID NO: 4261 - DNA, 272 bp, Glycine max
  unsure at all n locations
  Clone ID: 701000908H1
cgacgtcgttgtgctctctgaagataactnccgagaaggaagttggtcaggacagaggagctctcgttgagntctatgctccttggtgtggacactgcaaaaagcttgctccagaatatgaaaagcttggtagcagcttcaagaaagccaaatctgttttaatcggcaaggttgactgtgatgagcacaagagtttgtgcagcaaatatggagtctctgggtacccaacaattcagtggtttccaaaaggatctcttgaacccaaaaagtat

SEQ ID NO: 4262 - DNA, 276 bp, Glycine max
  unsure at all n locations
  Clone ID: 701000910H1
ccgacttttacattaattgcacaataattcgccgatagattgatgtctaaaaaaaacaatcataacttactatatacagttatacacctttttcattanttctgtaacataattttccaactgatgttgatgcngatgtgtttngtttcttntcttttctttaaataaccttgcagcttcgctttaaaaaatttatanattaattaattgttttattaaaaaaatggcgnttaactttccatgcaggcgtaggggnttgtcattagcttcataatg

SEQ ID NO: 4263 - DNA, 282 bp, Glycine max
  unsure at all n locations
  Clone ID: 701000912H1
attcattcaagattcagcaagtgcgttttggaagcagagaccgaaatacttcgagatggcccgtacaaagcaaactgctcgtaagtncaactggaggaaaagctcccaggaagcagcttgcaaccaaggctgcacgtaagtctgcaccaacaactggtggtgtgaagaagcctcatcgttatcgccctggaactgttgctcttcgtgagattaggaaataccagaagagcactgagctcctaatcaggaagcttcctttccanagnttggttcgtgaaattg

SEQ ID NO: 4264 - DNA, 100 bp, Glycine max
  unsure at all n locations
  Clone ID: 701000914H1
ctctgcacagtgtttaatggataattagctaattagctataatttcgnggttctatttggcgagttcgttggttgtagcntttcccntttntagtnggnt

SEQ ID NO: 4265 - DNA, 281 bp, Glycine max
  unsure at all n locations
  Clone ID: 701000915H1
ctttctatagggggaggagctggtgcaaagaatgctattctcatgcaatatgccaaatgctgttctttcnatgtggagatattttgttggagatctcgtctttgaagtttctaagatgacttctccctacattaaatgtacagtctctttcttcatagcatttggaaatttggctgatgacaccatcaattttgaggctttccccacaagctggtgcagtttggagagattcaggaaaaagttgtattgaaatttcacaagaggattncctacagctngtc

SEQ ID NO: 4266 - DNA, 278 bp, Glycine max
  unsure at all n locations
  Clone ID: 701000917H1
gtgcatacatagctatctatttatctatagcaagtgcgtcaagagacacgtggtaccctagctagagtgccattctgtggtttntttctttcttctttctgcatcacatgcacaatttgnnntgantcgttacctttttcttctttgctctncanaaatctcananacacaggtatntagcaaatgggttctcaccaacaagaaccatggctattggagatgggaaaccaagggttttgaccaagnagaccaggntggcgttctgcacacagatgtcc

SEQ ID NO: 4267 - DNA, 275 bp, Glycine max
  Clone ID: 701000918H1
gtaacccttaaattttcccttcagttttttgagtttatatatgtattccctgaatcgatctaacatgaatagctttctaagggtactcttctcgggatgaggcaaaccatttttgagtttatatttgattccctgaatcaaaggtacccatccttcagttttttgagtttatatatgtattccctttgtgatcacaacaatttggtgctgtcaagtgggttggtgttctttttctcaggcgccttgcaacagccgtagacgtttcaacacataga

SEQ ID NO: 4268 - DNA, 279 bp, Glycine max
  unsure at all n locations
  Clone ID: 701000919H1
ccctatggaagcagtgaaacgaacgctaaaaaaacaaaagaaaggcacagccgaaaaacgaaagacagatncgtgtaaactctgcattctcaaaaaaatacctttgaagtccaccgtcgtgtaaccctagcataccaccctgccgtcaacggtcatcactctccgtccaccgtcgcagtcggagcagccaccagagtttagggagaaaccttggcaagtagaaaattagaattttaaatggccatgagaggaggaaggaagaatttgaagagggcaaca

SEQ ID NO: 4269 - DNA, 271 bp, Glycine max
  unsure at all n locations
  Clone ID: 701000920H1
ctgcaattcccgacactggcttgctttgtgatttgctttggtctgctcctggtagggatgtgaagggttggggtatgaatgacagaggagtgtcctacacctttggccctgatatggtcgctgaattcttgacaaagcatgacttngaccttgtttgtcgtgctcaccaggttgtagaggatgggtatgaattctttgctgataggaaacttgttacgatattttcagctccaaactattgtggtgaatttgacaatgctggtgcgatgat

SEQ ID NO: 4270 - DNA, 273 bp, Glycine max
  unsure at all n locations
  Clone ID: 701000921H1
gaaaataaagatgcattttcaacagatgtaagttctgaaaagaagcatgttgaccaaaatcctaaagaattatctgccagcagtgaaaatcctgaagtagaagaaaagcaggaagatctcagcctcccatctggttgtagtaaagatgataaagtaaccaacaaggatgcagtagatgagaaanncccaagcaagtgttggggagattacagtgacagtgaagctggatatgattgaagtcacgagttaaggaatgataaatttttcttatta

SEQ ID NO: 4271 - DNA, 250 bp, Glycine max
  unsure at all n locations
  Clone ID: 701000922H1
gcttcgtcgccttccctcgcaagaatgntaactcatctnacnngcacccccgccgcatgacgtggtgccacctccaaacatttcctcgtcctcaggcagttcagnnnnnnnnnnnnnnnnnnnntttcctctgtgtctgattncgacccaacacttcnctcttcttccgaatcacagagtatgtgctgattcctgttccttcgatcgattctccatctgggttaatgttggtttttgcaatgcttaagtc

SEQ ID NO: 4272 - DNA, 273 bp, Glycine max
  unsure at all n locations
  Clone ID: 701000924H1
gagaaatactaaatcgttccatatcgaatccagaattttggttcttttcaaaatttgtgatattttatgacgcatataggggtaactcgcaggttataccaatcaaattacttttttttttcttctaatgtaaatcaaaatgttagtgaaaataaaaagnacattactagaaagaaaaaaaaatgaatctcttgaattggagttagagactcgaaatcgggnaaaagcagaataccctgatcaacgaaatcttgaatcatctatctcaaacca

SEQ ID NO: 4273 - DNA, 277 bp, Glycine max
  Clone ID: 701000926H1
gctttgaggacaataactggtcaagattcagctgttgtttctggattgtcccctgcttatgaatccattccacaggctgatacaagattagtagttgaggccatccataaatggaatatatgtcagagtcatagtcggagagagcgagaagataatgtagacatatatggtgagaatggaatttcagacgtcaataaaatatatccagaggaagtgggggaggagaaaaacactagcccgaaaatcaagaatggagttatgaaagtgaatctctgtc

SEQ ID NO: 4274 - DNA, 279 bp, Glycine max
  unsure at all n locations
  Clone ID: 701000927H1
gtttattgtttgtttagaaaacaataaacaagataaaaaaatcatgttagatatgacttctagatagttattatatattctaattagtaanttgtgattggatcacgacataaaaattctttaactgtcaatgcaaacattatttactctttttgtaattagaatagaaaactttcaaatgaacccctgaacaaagggatgtaacatcctgaaattaattgaatgtgaaaagttggagatgagcttattatcgtttaagtggcttatatgctgctgcta

SEQ ID NO: 4275 - DNA, 283 bp, Glycine max
  Clone ID: 701000928H1
tgattctcagggagatggtaattcatcgttacttcagagtgaaatttccaaagctagtggtttcaaggcggcctcgtgatattcaccttccagaagaagatagcttgattacagctagtcgatcctctgcaaaactttttatctgctggaaatttagttaaaacagatttgtcccaagacactacagttgacattactagaaaactggcagctctgaatcctgcatttagagatgaccgactcgttacgagaaatcaagaaggtttagcattccctcgtggtc

SEQ ID NO: 4276 - DNA, 284 bp, Glycine max
  unsure at all n locations
  Clone ID: 701000930H1
ctctccttcgacgattcttcagggtttcgcttcgttcaccaacgcnccgtggtttctcttctcttcacgattttggggtcgaaatttggagtttagtttgccggcatgtccatgagtgagcgcaagactattgacctagatcaaggatgggattttatgcagaagggcattttgaagctgaagaacattctagaagggcttcccgagcctcagttcagctcggaggactatatgatgctatacacgaccatatacaatatgtgcatcagaagccgcctcatgac

SEQ ID NO: 4277 - DNA, 280 bp, Glycine max
  unsure at all n locations
  Clone ID: 701000933H1
aagatgagaattcgaggatacctgggctgccggagaagcgtacaacagtgctctgttccgcgactatgaaaatggacgtggagaggcttggacagataagtttgaaagacgcagtacacattcgagccgctccgtcagaaaagggacaggaaacggtcgangccaaagacgatcaatctttctttgcaccggcgcaactgaagcaatccctacgcatggtggcaccgaagctccgattggtatctttgataccctattgaagcgggntttgcannaaagg

SEQ ID NO: 4278 - DNA, 273 bp, Glycine max
  unsure at all n locations
  Clone ID: 701000934H1
cnnttgattgataacaacnggatattnaaanttgcagactttggnttggcaannntttttgatcccaatcaagctcagccactgacaanccgagttgtcactctttggtataggccaccagagcttttgcttggagccacttattatggcactgctgtggatttatggagtacaggttgcatacttgctgagctttatgctggaaagccnataatgcctggaagaatgaggtggagccnttacataanatttttaaacttngtggttcacctt

SEQ ID NO: 4279 - DNA, 271 bp, Glycine max
  unsure at all n locations
  Clone ID: 701000935H1
aaaatccaggacaaggagggtatcccaccagaccagcagaggttgatatttgctgggaagcaattggaggatggaaggactcttgctgactacaacattcagaaagagtctactcttcaccttgtgttgcgtcttcgtggtgggttttaaaagtctgagaatgttctgtaggtgtcttgaagtctaagcatgtggaagttccgaagatctttgggttttntcttttnaatntnccngaaggtttactcttgncaaattgtttccatggtca

SEQ ID NO: 4280 - DNA, 261 bp, Glycine max
  unsure at all n locations
  Clone ID: 701000936H1
gtccaagtgttgagacatgatcccaccgttggggaacttagggtgcacccctttgaagtaaaccttaacgacgaggtcgaagtatcccanttcgtgaacgctgcttgttggagtgtaggntcgcatgcatagtttctcgtccaacggtggcacataggaatatgtgcttcccaactggcaaacccatgagtaggtcgtcggaggggagggcaaagcggaanagcctaacgtcgtgagantggaggntttggagatgagttg

SEQ ID NO: 4281 - DNA, 266 bp, Glycine max
  unsure at all n locations
  Clone ID: 701000939H1
ggccgttgcaaatcagcccgtgagcnttgctattgaaggaggnggcanggaatttcaattatatgtatctgngcgtattcacggggagatgtggcacagcacnagatcatggtgtcgtggctgttgggtatggaacagctaaaggtctgattattggatcgtaaggaattcatggggttctagctggggagacgatggctacatcagattagaaagaaatctgctaacagcagatcncgcaagtgtggaattgcaattgagccatc

SEQ ID NO: 4282 - DNA, 282 bp, Glycine max
  unsure at all n locations
  Clone ID: 701000941H1
ctttcccatgggatactctatcatcctctgtttcaaccctcaatgtncccccactgcccatgcatcaaccttgcacaaatgcgcgatttctatcgattcaaagcatcccccacccgttccnnnnnnnnnnnnnnnnnnnntgttttctccacttccacacccaattttctccccaaaaccaaaactttctcccacaaatcttccccttctcttccattctccccctcacccctcanacccaaaccgtcttctccaatttccatccaaatnccgctantgggt

SEQ ID NO: 4283 - DNA, 261 bp, Glycine max
  unsure at all n locations
  Clone ID: 701000942H1
ctgggatccaaaacgacgtcggaggaggtgaagcgcatgatgncggacttgatcggaacggcgacggctacattgacctgaaggagttcggcgagttccttnnnnnnnnnnnnnnnnnnngagctccgggaggcgttcgagctgtacgatctggacaagaacgggtgatctcggcgaagagctgcactccgtgatgcggagttgggggagaatgctcctcagcgatgccggagatgattcgaaactggatgcgaggtgacg

SEQ ID NO: 4284 - DNA, 243 bp, Glycine max
  unsure at all n locations
  Clone ID: 701000943H1
gatgatgaagtgaggaagtggatttctggtgttggtgttgacagtgttgggaagaagcttgtgaactcaaaagatggacctccaacctttgagcagcccaagatgactctggagaagctctgctgtatggtaaatgctgtccaagaacaagagaatgtcagagagtccatnatgacaagtattgaagaggcgtctgaatgtaacgagngtatcagaggacttcttcatctgattgagaancaa

SEQ ID NO: 4285 - DNA, 216 bp, Glycine max
  unsure at all n locations
  Clone ID: 701000945H1
aagagaggtggcaaagctgccgccgctgccgttatggccgccacctcttccaaagccgccgacaaggtcgccaacggaatcgccgatattcagatttcggatnggacctgcaccggcgtcctctgttcgcatcctctctccagagatattcgaatagagtctctatccgtcacattccatggacatgatctcttcttgattctgantggagctgaa

SEQ ID NO: 4286 - DNA, 280 bp, Glycine max
  Clone ID: 701000946H1
cactcttggtattgtcaagcacgtggatgccaagaatgtcaccattcttgaccagtcaccccaccagcttcgccaaggccaagcagaaggagccactcaaggaatgcaaaataatcgaaggggatgccgaggatctcccacttcgaactgattatgccgatagatatgtatccgcaggaagtattgagtactggccggatccacagcgtggcatcaaggaggcatacagggttttgaaacttggaggcaaagcgtgtctattggtccggtctacccaaca

SEQ ID NO: 4287 - DNA, 278 bp, Glycine max
  unsure at all n locations
  Clone ID: 701000947H1
aagatggagaagtatcagatctggagcaggagaatagcgttggcagcgtttgcntttgccctgctgttccaatgcggcctcagcagacgacgtcgttgtgctctctgaagataacttcgagaaggaagttggtcaggacagaggagctctcgttgagttctatgctccttggtgtggacactgcaaaaagcttgctccagaatatgaaaagcttggtagcagcttcaagaaagccaaatctgttttaatggcaagttgactgtgatgagcatagattt

SEQ ID NO: 4288 - DNA, 284 bp, Glycine max
  unsure at all n locations
  Clone ID: 701000948H1
ttttcgccaaggtgaataaaggttcaaagccaccgaattttacgcaaagatcagaatgggaanaatgtgagcctctccaacttcaaaggaaaaccactaattgtgtatttctaccctgctgatgagacccctggctgtaccaaacaggcttgcgctttcagggattcatncgagaagtctcaagaaagcaggagcagtggttgttgggataagtggtgatgatgctgcctctcacaaggcattgccagcagtacaggctccattaccttgttgagtgatgaggg

SEQ ID NO: 4289 - DNA, 220 bp, Glycine max
  unsure at all n locations
  Clone ID: 701000951H1
caaaatttagaaacaaaaacatgttggtgaaggtgtacggtccaacctatggagcccccaagagggtgctggtgtgtctgattgagaaggaaattgagtttgaaacagtactattgatctctcaaggaanaataaggaactgagtctaaagtgagcattgncattctgtatcagtgngtaatccttgaccggatacagtctgaggattaaacaggngntg

SEQ ID NO: 4290 - DNA, 267 bp, Glycine max
  unsure at all n locations
  Clone ID: 701000953H1
ttccactttcacccgaagagaaacgattatnggttttccatcagancccagaccctagacttctcggattcattcttgcgaagggggtttcggctctgaagacgacccttcttctcccggcggacccggcttcacggccgtggaggaaaaggaggaaccccaatgcccaccgggtctcagacagtacgagactatgatggttttgnngcccgacatgtccgaggatgaacgacttgcantcacccagaagtacgangaggtgttgtt

SEQ ID NO: 4291 - DNA, 266 bp, Glycine max
  unsure at all n locations
  Clone ID: 701000954H1
ttcacatgccacaggatgaggcacttctagcatcttggaagcagcaacttcgatcganatgttgagactcttaaaatnaaagaaaatttgcacaatttacgcacagttttgagccgttgtggggtggaatgtgaaggncttgagacctgtgcattangaatcagacacttattgaaaatgcagagaagatagttggttggnctttaagctgccatctcatgcagaatgcngaaactgaccctgatgcaaaactcgtgttgtcttgc

SEQ ID NO: 4292 - DNA, 275 bp, Glycine max
  unsure at all n locations
  Clone ID: 701000957H1
gnnaaagatcaataggcgcaaagacttcctccactggtggacaaagtgaggtcgattcggtttattttcttggcatcgaagctattttataataagcaattacatggtagtttaccttgctaagaagcactcatgttagatggagattgtgtccgtacaatactttgtcacagtttctgaatgttttatgtgctgctgcttttacggggcttcaggcccatttgangttgaataatggatgtttattgttatcngtcaatgctaatctgcacctg

SEQ ID NO: 4293 - DNA, 274 bp, Glycine max
  unsure at all n locations
  Clone ID: 701000958H1
ancgttttcgtgggctgttcaaagggaatggtantaattgtgctcgnatcgtcccaaattctgctgtgaagttcttcagttatgaccaagcttccaaaggtatactncatctgtatcagaagcaaactggaaacgaggatgctcagctgactcctnttttccgtctggggctggagcctgtgcgggaataattgccatgtctgcaacttatcnaatggacatggttcgaggcannataactgtacanacagagaagtcnccttaccagtacaga

SEQ ID NO: 4294 - DNA, 276 bp, Glycine max
  unsure at all n locations
  Clone ID: 701000959H1
tgtcagcaaaaaggttgcctgcatngtgacnagttgagactgttctggtngtnnaaacagtctcttctatcttggagtatggattcacacattngacttacncccacatcnctgcaatgttgggagnttaaaccttgtcactggtccaccctttatgganttntggctgaaattaaatgttaaagttttntatgaggctaccaattctgtagtgcttgaatacttgaatactttgccgcatgtggtngatttgtaaactgttgggttancatgatc

SEQ ID NO: 4295 - DNA, 279 bp, Glycine max
  Clone ID: 701000961H1
agagcagtttgaagaggaagctctgggcagagagagaatctacttcattagaaggtgaaggatctggacaagaaacagcagctgatgaaaagaagccaagcatttactctatcaatcaaagattcaagcatttttctgacctggttactggatattatggccacgggagatttggaggcctcttccctgctgcaacacgtgagtatgctcctatggtagatgaaatctggagagatcctgctgttcaggaaacatacaagagaagaaaggattacataa

SEQ ID NO: 4296 - DNA, 283 bp, Glycine max
  unsure at all n locations
  Clone ID: 701000962H1
gncaaagccatagccatacggcagtacccacccttgcagtgttgactatgctgctagctcaacccattttcctctctcgcaactttcccactctcaacaaccgaaactcgagaacttntcttcaanttcacaaccctcctgcactcataanantntcaccgcaaagaacgccaataatagcctcttctggttgtnttngttgcttcgtaaaatcggcttgatgtcaganccaaaacctcgctgggtgcgttttttaagaaaagaaagggttgtgcacatattt

SEQ ID NO: 4297 - DNA, 290 bp, Glycine max
  unsure at all n locations
  Clone ID: 701000964H1
gccagcaagaaagaattccaaggccangaggaagntggaggggaatganccngatgtntcgntcggagcgaacaagttccccgagagaacagccgattgggacngcggcgcagagccaanaacnacgggcaaggagtancangagccggcgcccggcgacgctngttgacccgacggatttacgtcatggtcgtttacagnnccanggatagcagantttntggncattttctgtntctctaatncacgtcttaaccgttatggnattcncnggctaatnaantntaata

SEQ ID NO: 4298 - DNA, 284 bp, Glycine max
  unsure at all n locations
  Clone ID: 701000965H1
gcaattgaagttgaagtcttgcccttctctcttcanctccaaacacaagacatcatcatccatggctgcctccgtctccactgtcggagctgtcaacagagctcttttgaacctgaatgggtcnggacntggngtttcagctcccagttcatccttctttgggagcagcttgaagaaggttattgggctcaagggtccccaacacaaagatttcctctggaagcttcaagattgttgctgtagangagnagaaagagntgaagagacccagcagaccgacaagg

SEQ ID NO: 4299 - DNA, 280 bp, Glycine max
  unsure at all n locations
  Clone ID: 701000966H1
tcanctcccaccatgtacggtatcactcgcgccctccgcacgtctaccccgctccgcctcgcaccgcgcaccgtngccgcgaaggcttacaacagtggcaaggtctcgggccccgtgatcggtatcgatctcggcacgaccaactcgtgtgtctccgtgtacganggnggcgcacccaaagtcattgagaatgnccgagggcgcgcgtaccacgccctcggtcgtggcgttnaccaaggacngngacctctcgttgggcanncgcgntccgccagcagtt

SEQ ID NO: 4300 - DNA, 230 bp, Glycine max
  Clone ID: 701000967H1
ggacttctggtggctatggcgctgactggtggtggatactcacgacgtcactgatggtggcacacggcaaaccaagtggtggctatggcgccgctggtggtggtggtgtgtaccctgacactaccactgatggtgggtacagcaaaacaagtggtggtgggtatgatgatgaggttgactataagaaggaagagaagcaccacaagcatcttgagcaccttggtgagtta

SEQ ID NO: 4301 - DNA, 274 bp, Glycine max
  Clone ID: 701000968H1
tgccgtcgtttcggtgaataagtgtcgtttaaagatgcagagtctgcaacagaaggcttccgaatggagcggtgtttccatagacgacgctttcggcatcgacgacaccaatctcttccagaaactcggcctccaaaccttcattaacctctccaccaatttctacaacagggtttacgatgacgaggaagaatggtttcgttcaatattcgcgaattctgagaaggagaatgccatcaaaaccaatacgagttcttcgtgcagcgaatgggtg

SEQ ID NO: 4302 - DNA, 270 bp, Glycine max
  unsure at all n locations
  Clone ID: 701000970H1
tgaagattccgcaacagagagtagaaaagatggcgcggttgatcacagtggtgtggtgcgcggtggcggtgctactgtgcgccgcggcggcgcgtcgtgggtggaggaggcggcgaacccgatacgaatggtggcgggggtggangcggaggtggttcgggtgatagggcagtgcnggcacncgctgaagtttgctaggttcatgagcaggttcgggaagagttaccgaagcgaggaagagatgagggagaggtacganatattctcgca

SEQ ID NO: 4303 - DNA, 273 bp, Glycine max
  unsure at all n locations
  Clone ID: 701000971H1
cgctcgatagacactccatactagagctgagctccttctactagataatccgccatccaacatggctcgccaacccatctccgcgcaggcgtggttcagactcgcttcatcaacctgncgaacctcaacgtctcccgtttctcccttcgtacaagcccgattcgcgccactgctgagcagaacacttcgcaactcactcgcaccactagctccttacgtgactcgacctgaacaactncagantcttgaccattcccgacctttcctcgctcc

SEQ ID NO: 4304 - DNA, 274 bp, Glycine max
  unsure at all n locations
  Clone ID: 701000972H1
cgttttcactttcatctctcaccatccaaccacaccctcaggctcagaatagtttctagntctcagcaaaatgcnaaagnaacccagagantgtccatggccaaggcaaaggccaaggttctcacggaccttcaagtggaaganatggagaagcagcatgagaccttgtcttggaatggccaccttggaagnntcttccccaaagatacaagctcatcggnaccacttcattggcctttgttatttgtaacatggataangtgaattgagtntt

SEQ ID NO: 4305 - DNA, 272 bp, Glycine max
  unsure at all n locations
  Clone ID: 701000973H1
acaataagcacataaaccttcgtggacatggcaacaacagccttgtccacgatcagtgtgctttgcaggaggaaacctcagcacatgcatattatcctaccctcttcacagacactccaaaatggaactctaagaactgntgtaactgcttnagcctcaanagataatatcagcatagaaagtgagaagtgttgttcctctttgttggtgnacagaagancagttttggcttcctggggtttccttgttgggtttcccgggtgagagtttgg

SEQ ID NO: 4306 - DNA, 272 bp, Glycine max
  unsure at all n locations
  Clone ID: 701000974H1
atgaaaacaatagtgacagcagtgatgagaatgactatggaagcagaggcttgagcattcgtgatggaagtgacaatggaagtggcactcagttggttgatgcccctggatagcacatgtgcccaagtgatgcaaacaaagactganaaagttagtagtagatgggtgcatgcgacggaaaaagagtgccatgaacttattcntcttgatgatgttgcaagggttaangacttggctatgggaatatcttgaatatgcaactagagcatccc

SEQ ID NO: 4307 - DNA, 273 bp, Glycine max
  unsure at all n locations
  Clone ID: 701000975H1
caacaagcgacctagatgttgttcagtgccaganaaccctcagaaattactggattgacatggttgcagaggcagagctgaaacctcagacagaaggtgcagcttttcgtactcgctggctttttggcggaactaattacaggagnatgtttgaacccctagatattgctgagtaccacgcgaatggtggtaaagactatgangctaagggaagatctagncattatatagtgttgcangagtggctggaanangataagaaagaaaaaagca

SEQ ID NO: 4308 - DNA, 275 bp, Glycine max
  unsure at all n locations
  Clone ID: 701000976H1
cgcttccatggtgtctcgccccaatctagataatgcgaatatgaagatgccgtcatattttaattttccagcacttgatgtttctgttgcatttccacaggccactccagcacnctacttttcctccttgtgcttcagattattttcatttcaatgacttgttgaaaccggaggagcaggccgtgaggaacagagtgagagagtgtatggaaaaagaaattgctcctataatgactgagtactgggagaaggctgaattccccatttcagttntc

SEQ ID NO: 4309 - DNA, 275 bp, Glycine max
  Clone ID: 701000977H1
tgtgctgaagtataaacttatagtggatgcattattgatttggttatttgtgtgttgtttctgaacgattcctttgttatctttttcaattttgccagagtacttgaatgtatggtctcttttaacggaagttttgctttttgcagtgatggcaggtttggctccagaaggaacacaatttgatggtcgccaatatgatgctaagatgagtgaattgctttccactgatgggcaagaattcttcacctcatatgacgaagtctatgacagctttg

SEQ ID NO: 4310 - DNA, 276 bp, Glycine max
  unsure at all n locations
  Clone ID: 701000978H1
ccgttctgcagtgatcaatgcaggctatcgtatatctggaactcatgttaatccattgggacttaaatcagatgcacccatggatgtnatttgggatataatgcgctgctgggtaaaaaatcatcctgtgaagcctcaaccagcagatcaaccaggaagcatcatacttgcaaaggaacctgttcttcaggctaattttgctcgagctgtagcatctcttagcaaggcacaagctaagaaggttgcgcgcttcttccaaatcctgaaagacatggg

SEQ ID NO: 4311 - DNA, 278 bp, Glycine max
  unsure at all n locations
  Clone ID: 701000979H1
ggantggcttaacatatgaaactggagaccatgtgggtgtttatgctgataactgcgacgaaactgttgaaganactgncgaagttgttgggtcagaatttagatctattgttttctcttcacactgataaggaggatggcacttccctaggtggttctctcctgcctcctttccctggcccttgcacactgcgtactgcanntagcacgctatgctgatctcntgaacncccacgaaaggctggtttagttgtttagcttctcatgcatctgaacta

SEQ ID NO: 4312 - DNA, 234 bp, Glycine max
  unsure at all n locations
  Clone ID: 701000980H1
ctgattcagaaactcttaggcattccacattctcaaccccgaancctaagagnagagcgaanntgacaancaccttcncgaccgtcgcaggactcggtggcgcattactgtcatccacctcatctcgtncantcagggttgtgantcncagtgntgcaggntcctnagnaantgtnnatgnaatggagatntgttgnanatggngggagtacattatcgtnggtattgngnnnc

SEQ ID NO: 4313 - DNA, 282 bp, Glycine max
  unsure at all n locations
  Clone ID: 701000981H1
tggaatgacaggagnaggaggcaatgtgggtgcagttgngacccagttaattttcttcaaaggatccaagttttcaaaagaaagaggaatcactctaatgggagccatgatcataatatgcaccctgccaataccgtttaatctactttccacaatggggtggcatgttttctggtccttcatctaaaaaagtgacagaagaagattactacttggctgagtggaactcaaaggagaaggagaaaggctctcatcatgcaagcttgaaatttgctgatanca

SEQ ID NO: 4314 - DNA, 279 bp, Glycine max
  unsure at all n locations
  Clone ID: 701000982H1
agcaatttgctgcagaagaaatctcttctatggtgctcatcaagatgcgtgagattgctgaggnttnccttggctccacggtgaagaatgctgttgtcactgtccctgcttanttcaatgattctcagcgtcaagctaccaaggatgctggagtcattgctggtcttaatgtgatgcgaattatcaatgagcctactgcagctgccattgcttatggtcttgataagnaggccacaagtgttgntccagaagaatgtgttgatttttgaccttggtggc

SEQ ID NO: 4315 - DNA, 278 bp, Glycine max
  unsure at all n locations
  Clone ID: 701000983H1
cttgggaagaagcttggacattggtgaaccaaatgagtttggtgccataagcacttcctctcctcactctacagctgcttatgagagtatcagcatgcaaaacccaaagaggtttgctgcacaattgntgccagactttgtgacctanataagacattgaaaggtgagcaatgtggtagcacactgctaccattcgctgtttctgaatccctcacaatttcttcttagtcccctgctattatgtgggggagtggtgaacaattgtagtgtaaagaaag

SEQ ID NO: 4316 - DNA, 279 bp, Glycine max
  unsure at all n locations
  Clone ID: 701000984H1
gaagagagatggatccagacgcgttggcaaaggcattcgtggagcactactacagcaccttcgacaccaacaggaacggcttagcgaatctctaccaggagggttccatgctcactttcgaagggcagaagatccaaggcgcttccaacatcgttgccaagctcacctncctcccttntcagcagtgccaccactcaatctccaccgtacgactgccagccctccggcgttcaacgccggcatgctcgtcttcgtcagcggaaaccttcagctcgccgg

SEQ ID NO: 4317 - DNA, 274 bp, Glycine max
  unsure at all n locations
  Clone ID: 701000986H1
aannaaaagaaaaggaaagcggattcagttttgaggtcactcactcccaccgatgactgatcattaacacctttttcttccctttctttctacaattatccctaaactnnnnnnnnnnnnnnnnnnnnnnntccctatcccaaaaacgcgtcaaccaaaacacaaaaaccctattatcaccaccacacanttccttttctnggatctgtagatctaacgctattgcgtcacataaccgttcctctgcaacctagtgctgttttcactgaanttc

SEQ ID NO: 4318 - DNA, 274 bp, Glycine max
  unsure at all n locations
  Clone ID: 701000987H1
gttacacaaaagttggccttgatcattgcagtaattttagtaaatagacattgagcatacacaaactaaactggcagcatgggacanacttcntccatacaagangataagatgaaaaagcgcattcgtncaagctatgggcacgttcatggactttggcacacacttgaaaaacgcgaacgagtgggcccaactctgtgcgacaccaaanaactgctacctgtcgttccgcatcgtgattgatccgaaaacgtcggctgagctgctgccatac

SEQ ID NO: 4319 - DNA, 253 bp, Glycine max
  unsure at all n locations
  Clone ID: 701000989H1
gantttttagaattatggctcagttattgtctccagtgtgcatggaggctctganaatccacaatccatcactgaatctttgttcaagaagctcatggcggatgctggtgaagggtgcaagtccttgcacctttgtnacacacagtggttggaagagaagagggtgtggcagggtcagagttactgctgaagattcagtttctccctctgagactattgcagatgattatnangaagttcttggactgcttcc

SEQ ID NO: 4320 - DNA, 274 bp, Glycine max
  Clone ID: 701000991H1
ctcagtttatctagtgccctagtagctgatgatggcaagttccttctggctgcacgcaagttcagacgccctacctgcacagattatattatctcccttgatgcagatgatatgtccagagaaagcaatgcctatgttgggaaattgagatcaaattttttgggaaccaagtttacaatctacgatagaaaaagttgttccactgagctggtggtgaattcaaaacaagtttcacctaggcccagggtcccaacaggcaactatccagttgctc

SEQ ID NO: 4321 - DNA, 274 bp, Glycine max
  Clone ID: 701000992H1
cagtaacaaaattgctgtggtcaagtattctctgttgggttctattctttcaaaccttcttctggttcttgggacctctctattatgtggtggcattgcaaaccttaaagtggaacaaaaatatgacagaagacaagcagatgtgaactcacttatgctgttgttgggattgttgtgctacttgcttccaatgctgttcaaatacagtggtgcctcagctgctctcactgtagacccttcactccacttgtcaagagcttctagcattgtgatg

SEQ ID NO: 4322 - DNA, 92 bp, Glycine max
  unsure at all n locations
  Clone ID: 701000993H1
cctggtttgcgcgggttnggcgtcgtgaagcagttggtgcttcttatatccatatctcccaaattaaaggaaacacacaaacataacatant

SEQ ID NO: 4323 - DNA, 184 bp, Glycine max
  unsure at all n locations
  Clone ID: 701000996H1
cnnaaatnattnttctggagaatagatggtctctgaacaagccttattggaggatatcgatgagcatggaantacgactagaatgaagcattgagatgcttaactggatgcccatngatgttggtcgatgagaacttacatncgcatggntacaanagcgcatcngcggntgattagnngccta

SEQ ID NO: 4324 - DNA, 302 bp, Glycine max
  unsure at all n locations
  Clone ID: 701001002H1
ccgccatattccacaagaactctccaangatcctccttcccacgagattctttggtgggaaaaatccaagaggtttgaaatttgaaggcagggaagatggattatttcaatgcaccaggaagaaaccatctctttgttccagggccggttaacantccggaccagatcatccgggccatgaacagaaacaatgaggactaccgttctccagcaattccagctatgacaaaaactttgcttgaggatgtcaagaagattttcaagaccactactggaaccccatttctcatccctacaactgg

SEQ ID NO: 4325 - DNA, 296 bp, Glycine max
  unsure at all n locations
  Clone ID: 701001003H1
gagatcttgcccatcaactcatggactactcagatgccttatttcatcagaggctatgcgtattccggtggtggnagaaaggtgacacgtgttgaggtaaccctggacggaggtgaaacgtggcaagtgtgcacactggactgtccggagaaacccaacaaatatggaaagtactggtgttggtgtttttggtctgtggaggttgaggttttggacctgctcggagccagggagattgcggtgcgtgcttgggacgaggccctcaacacccaacctgaaaagctcatttggaatgt

SEQ ID NO: 4326 - DNA, 296 bp, Glycine max
  Clone ID: 701001004H1
ttttatatatgatctcatttacaaaaagaagccaacatagtttagtgtcacaacattttacgtcttcttcatcagcatatgcatttgtttaccgttttcaaaagttttgctgcatcgcatctggcataaaaatgggagtgtaaataaaataattttgtattcaagttatttcatattatttcaccctgtagtctccattagtccattaagtcttagcagactcttcaagattgtacgagttacatgacaccagcatctatgctttggtacttattttgcaaatacatatatataaa

SEQ ID NO: 4327 - DNA, 293 bp, Glycine max
  unsure at all n locations
  Clone ID: 701001005H1
tgaagacacgtaagangtccaagangctctccaccggcgccattgttgcaatcgttgtggggtccgttcttgggcttggcnnnnnnnnnnnnnnnnnnnnnnnnntgtctccggcggcggcgaagacagcccgcgaaccgccgaaggatgngtggaggagcatagcgtgccggcggaggcggggacgtcgtcgtcgaaggatgatatcaccnggggttcggcggaggtggagaggaacaagcttgtgttcttcgaagggggaatttacagtttcgntttggaggatttgttga

SEQ ID NO: 4328 - DNA, 296 bp, Glycine max
  unsure at all n locations
  Clone ID: 701001006H1
cttctgggnaaattcagaggtgttaggcagagaaaatggggtaaatgggctgcagagattcgtgacccctttcagagtactcgtatatggctcggcactttcaacactgcagaagaggcttcccaagcctacgaggccagaaggcttgagtttgaggctatggcagaggctcaagcttacaaaactagttctgtttctgaacctttggctacaatttctgataataagagtaactgctgtaactcttctgccgctgctatctccgccgctgccgtctccgccgctgatgtgtctgt

SEQ ID NO: 4329 - DNA, 260 bp, Glycine max
  unsure at all n locations
  Clone ID: 701001007H1
gtggagtctggatttaatgctccccannagaacccncccaccatancgaagatgacacttctaatgctgaaagtcaacccaacattctgaatctatttctcaattagttaacttaaaccaaactgcatatgaaaatccaaatctgggaaccttgagtcatgaagaatatttcagagtcttggatgagatgaaaaccaagagctactcgtatgacactgataaggacacaaacatctatgatggaaacacctcatgtcttg

SEQ ID NO: 4330 - DNA, 276 bp, Glycine max
  unsure at all n locations
  Clone ID: 701001008H1
gtgcttcgccatcgcaaagtttgtggccttagtttctgaatcaatntcgaagtactccaaccagccactggattcttggagagcatggacactcagaaaagtcaacctgagaagcagtcttcatccactgcaactgccccatctgttacttcatgtcgaaagaagaagaatgaagaagctgctttcttggacgatttgaaggaccacattgatgagtttattaatgctctatggatgaacacaaaacttgttttaagaaaacattcagaagatgtt

SEQ ID NO: 4331 - DNA, 299 bp, Glycine max
  unsure at all n locations
  Clone ID: 701001009H1
ttccttccaatttttcaaacaccagtaaatggccacccatcaattccacccccacaattcctncttcttcttctttnccacaacactaaacgccgntcgttttcatgactccataattcaccagannnnnnnnnnnnnnnnnnnnnnnnnnnnnnnnnnnngcgagttcacatgggattgggaacaaccgcggcgagaagcagaagaagaatcgtcatcgaagaaggttctataagaacaacacacaccgccaccgccaccaacgccgatgccgatggagctggagctaggttcaacaa

SEQ ID NO: 4332 - DNA, 293 bp, Glycine max
  unsure at all n locations
  Clone ID: 701001011H1
gcctgaatgtcaattctacatgaagactggagattgcaagtttggtgcagtctgtcgtttccatcatccacatgaaaggatgattcctgctcctgactgtgttttgagtcctataggtcttcctttacgtcctggagagcccctgtgtgtgttctattcacgttatggcatatgcaaatttngtccaagttgcaagtttgatcacccaatgggagtcttcacctataacatgtctgcatcacctttagctgatgccccaggacggcgtttgaaattcagtgcaaagacttttc

SEQ ID NO: 4333 - DNA, 295 bp, Glycine max
  unsure at all n locations
  Clone ID: 701001012H1
agaaaaaaaaaaacccttagccaacacaaccatcatggccacctctgctattcagcaatcagcattcactggtcaaactgctctgaagcagctcaatgagttcgtccgcaagaccggtggcgccggcaaaggtcgcactaacatgcgccgnaccgtcaagagtgctcctcagagcatttggtatggccctgaccgtcccaagtacttgggtccattctcggagcagattccatcatacctgaccggagaattccctggtgactacggatgggacactgctggattatcagctgac

SEQ ID NO: 4334 - DNA, 298 bp, Glycine max
  unsure at all n locations
  Clone ID: 701001014H1
gtgaccgcaacctcatttgcacccttctcccagcatcacaggctgttgaagaacaagcagctgccacagcataatgtgttcaaatgacaactattttcatttcccgttgtacataaactcttattcctattcatacagttcttgcacttgttgaatattgcttcatcatatgtgacaatgatgataatccactgctcttaagtttcatccaatcacaggaaaaaaaaaaaaagtaattcgtataattgctgctgctatnggattttaggaatgtattttnggcctatctgtnacagta

SEQ ID NO: 4335 - DNA, 300 bp, Glycine max
  unsure at all n locations
  Clone ID: 701001015H1
tgactatattggtactggcaaagaagtttggagcagctatggttactcttgaacatcgctactatggaaagagttccccatttaattctttggagacagaaaatttgaaatatctttcatccaagcaggcactctttgatttggctgtttttcgtcagtattatcaggattccnnaaatgcaaagcttaatagaacaaaaactgaaaacccctggttcgtttttggtggctcatatgctggagcactcagtgcatggttccgtctcaagtttccccatttaacatgtggaagtctggcaa

SEQ ID NO: 4336 - DNA, 302 bp, Glycine max
  Clone ID: 701001016H1
tcaaccccatagtgatgagtgctggagaattggaaagcggaaatgctggagaacctgcaaagttgattagggcaaaggtatcgcgagggcagcagacattatcagaaaaggaaagatgtgctgtctcttcatcaatgatcttgatgcaggagctggtaggcttggtggaaccactcaatacacagtcaacaaccagatggtgaatgcaacccttatgaacattgctgacaacccaaccaatgtccaacttcctggcatgtacaacaaggaggagaatccccgtgttcccatcatagtcatgg

SEQ ID NO: 4337 - DNA, 301 bp, Glycine max
  unsure at all n locations
  Clone ID: 701001017H1
gatccgttagggttttagtttgttaaaaaaganctgcnattcccaaagcggttgggacggtggtggtgaaggcatcagtaacagttagggtttcccaatggaggagcaggcgtcccagatcggccgctccctggtgaagcagctggcatgctgcaaganaaccactcgagacaaatccctccgcctcctcctgaaatcatggctcccgtcgcagtcccagcccctctccgacgacgatgccaagaagctttggaagggcctcttctactgcatgtggcactccgacaagcccctcgtccaa

SEQ ID NO: 4338 - DNA, 303 bp, Glycine max
  unsure at all n locations
  Clone ID: 701001018H1
tgtttttatacaaacctcatgtaggtgggagagagagtgtctttnttggntcatagcatagcatcactatggatnttntgagtngagcntnttcangnttccctcagctggtttccccttcaaagagttgtttccctccacacaacgttcnaatgnaattaangcatcaacatccacacccacgcncgcntcatatgntcngncanngncttcngncngcttcncctcnngnaggngtgtngaaggnggaggnagttngtgatctngaaggttgacgatctgatgaatgggnacggngcggat

SEQ ID NO: 4339 - DNA, 297 bp, Glycine max
  unsure at all n locations
  Clone ID: 701001019H1
acaaggccgtctccnaatgggtnggaatcgtcgtcctcgctagcaaccaagccagcggcggcaagctctacgaggctgcatgctccgttgaagtccctgcttcaagaccgcgcctatttgcttgtcgccgagcgcgtcgatatcgccgccgctgccgccgctagcggagttttgctctctgaccaaggccttcctactgttgttgctagaaatatgatgttggattcaaagtccgaattggtggttcttcccttggttgctaggatngntcgaactgtggatgctgcggtgaatgca

SEQ ID NO: 4340 - DNA, 275 bp, Glycine max
  unsure at all n locations
  Clone ID: 701001021H1
gaacaatggnatccacagngtngnagatganggttcaggagggnngggttnggancctgaaagaaggttctagnggagaatngggtttgggtnaggtngtgtactggatgttcagagaccaangtgtgacagacaattgggctntgatcnangntgttgntgaggncaacaaagccaangttcnngttgnagttgttttcaatntnttccacacatttcttggtnnaaaatcnngtcattagggttcatgctcaggggttgngccaattntgnca

SEQ ID NO: 4341 - DNA, 293 bp, Glycine max
  Clone ID: 701001022H1
gacctttttgcattgcaaatggctgctgcaactgctggagttgttggtggaaatggttcgtctgcttcttggatgcgattcaaaggcaaggaaaggaagcaaaccaagatgaacaagtcaaggattagttgctcttattcttcttctgtgatggatccttacaagaccttaagaatacaacgcggtgcctctgaatctgaggtcaggaaggctttcaggcagcttgctctgcagtaccatccagacgtgtgcagagggagcaattgtggggtgcagtttcacgaaatcaacga

SEQ ID NO: 4342 - DNA, 297 bp, Glycine max
  unsure at all n locations
  Clone ID: 701001023H1
atacaaanncacaagataaaaaaaattaaaatttataaaaaagaagaagagagattatagaaagcnaaananagagggttcaagttcaacaagcctctcttctttgtnttcttgcgaagaagaaaaatccctccgagtcaactcggacgagttgcctcatcgtacggttccttcctcggactctttcctcttcttccccttccgaatcaccgttcgcagggttttgctctctcnctctctctgtctctcgcttcgtttctagttcagatctcgcattggcttcagctgaaaccacgc

SEQ ID NO: 4343 - DNA, 295 bp, Glycine max
  Clone ID: 701001024H1
cttttaaatttgcaagacgttattcttggtaccaagctttccattctcatccctgccattccagctgccatcattgccgagtgctatggctttggaagaccttggatttttatattgagcttacttggacttacaccacttgctgaacgtgtgagcttcatcacagaacaagttgccttttacactggtcccacagtcggaggacttctgaatgctacatgtgggaatgttactgagctcataatagcaatatttgcccttagcagtaacaaaattgctgtggtcaagtattctc

SEQ ID NO: 4344 - DNA, 294 bp, Glycine max
  unsure at all n locations
  Clone ID: 701001025H1
tnaaaaaacaatagttcctctttttttgtnattttttgtttttgcacacccctcctgaattaccagagacnagccgcaaaattaatccatacccagaatttctctctctgaaatatcttgtggggtttatctgttttttgttcaccttcatagttgagaagatacataaagttgattttctttaatataatagtaatataaagctgtgtttgtngggtgttttggaggatctgctttgctttgctgtgttcagtggattgtgttaaaggggttttgagaatcttgttgaagttg

SEQ ID NO: 4345 - DNA, 293 bp, Glycine max
  Clone ID: 701001026H1
aaacttctcaaatcagctgctgcatatgctaattcacgtattcatgctgttaaagctgaagttcttgtacttgctagtggcaaggacaacatgcttcccagcataaacgaagctcaaagactcatgggattattgcaaaactgcaaagttcgtgtctttaaggacagtggacacacacttctcctggaagatggtattggtttgctgacaatcatcaagggaacttgcatgtaccgtcgctcaaggaggcatgatttggtcagggatttcatacctcccagtatgacagaatt

SEQ ID NO: 4346 - DNA, 295 bp, Glycine max
  Clone ID: 701001027H1
cccaaaattgctctgccactcttaacgggcaaccacaagctcactgatgctgttcttcctcccacgaaagactggaggaaagaaggaatagtgagtgatgttaaagatcaaggcagctgcggatcatgctggacattcagcacaactggggctttagaagcagcctatgcacaagcatttgggaagagtatctctctttctgagcagcagctagtggattgtgctggccgtttcaacaactttggctgtaatggtgggttgccatcacaagccttgagtacatcaaatacaatgg

SEQ ID NO: 4347 - DNA, 294 bp, Glycine max
  unsure at all n locations
  Clone ID: 701001029H1
tcttgcttggggttagtggatctgattatgccgtgctatcgtgtattaataaaaggttcaataaactgatcaatagtgggtatctatatgggttgaggaaacaattgggggctgtggagcatttggtgtatatggtttgtnatccaagaggatgggtggcctttgaccccaagataaacaggtggatttctttacctaagataccttgtgatgagtgctttaatcatgcagacaaggagtccttggccgtgggctgcgaactgttggtctcggtcgagaattgatggagtttgc

SEQ ID NO: 4348 - DNA, 297 bp, Glycine max
  Clone ID: 701001030H1
tgcattattcaatggccaccacagcagctctatccggaaccatggtgagcacctccttcatgaggaagcaacctatgacgaccaagagcctaaagacattccccaacgctctttttggtctgaaaggtggacgaggtggtcgtgtaacttgcatggcctcgtacaaggtgaagctcataaccccagaaggagaagtggagtttgaatgcccagatgatgttttcatgttgacaaggctgaggaagaaggcattgaacttccctactcgtgcagggctggttcttgcgtttcatgtgt

SEQ ID NO: 4349 - DNA, 303 bp, Glycine max
  unsure at all n locations
  Clone ID: 701001032H1
gcatattactcttttgttgagaaaattttcanagctgatgctgttcttcattttgggacacatggttcccttgaattcatgctggaaagccaggtggggatgagtgatgtatgttatccagacagtctgattgggaacattcctaatatctattactatgctgcaaacaacccttctgaggctaccatcgccaaacgaaggagctatgcgaataccatcagctatctgactcctccagcagaaaatgcaggactgtacaaaggtcttaagcagttaagtgagctcatctcctcataccagtcc

SEQ ID NO: 4350 - DNA, 298 bp, Glycine max
  unsure at all n locations
  Clone ID: 701001034H1
gngaagccatcactgggcatcgcttattggaacgatatggcatgactgaatttgttatgggcattgtcgaatccattgaaaggtgagcgcaagcctggaaccgttggcaaaccatttcctggtatacaggtcaagattattgcagatgaanagagtgtgaatggaaatactggaatgggtgagctttgcattaaaagcccttgcattgtttaaagaatattggaaacttcctgaggtaacgaaggaatcatttactgatgatggattctttaagactggagatgcagttactacagat

SEQ ID NO: 4351 - DNA, 294 bp, Glycine max
  Clone ID: 701001035H1
ggagaactgtttgcgagtgaccacagtaggcacagccacaccccaatgcttttctccattttttccatcttcaagggataaacttgtcttcccaactcacagaggtttcaagaaatccttgcaaaactcaacactgtcatacccttatctttactccaccggtgctgcctatagaaaatcccgttttgtttgcaatgctcgtgaagcagtaaatgaagttaaagtggtgactgactcaagctggaacaaccttgtcattgcaagtgagacccctgtgctggtagagttttgggc

SEQ ID NO: 4352 - DNA, 110 bp, Glycine max
  unsure at all n locations
  Clone ID: 701001036H1
agtnacctaacggtgcttacaaatattaacagcngaagaagtgaagggccccagacggccacccgttcttagggtagggttagggttttaattttcnccacacaacatac

SEQ ID NO: 4353 - DNA, 288 bp, Glycine max
  unsure at all n locations
  Clone ID: 701001037H1
ttcaattttgcntttctctgcctaaaaggtgaacttcttctctgcttcttccgtgagtcgcgcgttatgatttgaattttgtactttcaatcttttttgtggatggggttgttttcatttttgtgttttgctttctgagatcagctcaaaattttcatttttcttttttgtggggggtttgattttnctttgnagttttttataatttggggaacttttaggtttcttggatccgaagttttggttganaattccggtttcactgtttctgactttnagggttccgtt

SEQ ID NO: 4354 - DNA, 293 bp, Glycine max
  Clone ID: 701001039H1
tcataacacaaagcacaaagcaaagctcatccttgagttaaaaaatggcagcagcttcttccatggctctctcatccccatccttggctggcaaggccgtgaagctgggcccatcagccccagaagtgggaagggtgagcatgaggaagaccgtcaccaagcaggtctcctcaggaagcccatggtacggcccagaccgagtcaagtacttgggcccattctctggcgagcccccgtcctacctaaccggtgagttcccaggcgactacggctgggacactgctgggctttcc

SEQ ID NO: 4355 - DNA, 292 bp, Glycine max
  Clone ID: 701001040H1
caaatgcataatagtcccgtggcttccatgtatcctcaacagatgcatggcaaccaattcggaggatatggctatggtcagcaaccaggagttcaatatcttgagcagcaaatgtatggtttatctgtgagagatgacggtgctccgaaaaattcttaccaggtttcttctccatcctatgtgccaccggggaagccttccaagccagaagataagttatttggggaccttgttaatatggcaaaagtgaaaccaaaacctactcctgaccaaactggtagcatgtaaaact

SEQ ID NO: 4356 - DNA, 293 bp, Glycine max
  unsure at all n locations
  Clone ID: 701001041H1
gtagttgagaactaagaagaaggaaatggcttcctcaatgatctcctccccagctgttaccaccgtcaaccgtgccggtgccggcatggttgctccattcaccggcctcaaatccatggctggcttccccacgaggaagaccaacaatgacattacctccattgctagcaacggtggaagagtacaatgcatgcaggcgtggccaccaattggcnagaagaagttcgagactctttcctacttgccagacctcgatgatgcccaattggcaaaggaagtcgaataccttctaa

SEQ ID NO: 4357 - DNA, 289 bp, Glycine max
  Clone ID: 701001042H1
tcctacacttgtaattcgtggaactgggctttatgagctctggaaaactggcaggtatagaaactatccacctgagcaacttgtggacattatagcaaggatccttgcaatggtacccccatggacacgtgtttatagagttcagcgggatattcccatgcctctggttacctctggggttgagaaaggaaatctgagggagctagcattagctcgaatggatgacctgggattgaaatgtcgtgatgttcggaccagagaagctggaatccaggatattcaccaccaa

SEQ ID NO: 4358 - DNA, 289 bp, Glycine max
  Clone ID: 701001043H1
aaagaaaactatgaagcaaagatatggactcagaagaagagtgtcttctcagtgttccaatggatcattggacgaggttgataatatgcctgagcctgccttgtctgatcgatcctttgccaaccccacttttcaaggaactattgaggaggcatggtttgattcagctgcagtatttgactcagattgtgatgatgactaccagagtgttaatgatgatgtgatatctctgaatggaactgaaaccaattgtggagtttcaactgatcagatgcataaacccggggag

SEQ ID NO: 4359 - DNA, 294 bp, Glycine max
  unsure at all n locations
  Clone ID: 701001044H1
attgactgtangcagcaaagnngtatcttncnagtcgatacaaagatataacacagttccaggaagaggttatggngcttgcctctagctggaatagaagcaatattgtctagtgatgaactccaggttgcatcagaggatgctgtatatgactttgtgttgaagtgggtccgaacacagtatccaaaactagaagagnnnngagaagtcctgggtacacgacttgcccgtttaattcgcttcccttacatgacctgtcgaaaacttaagaaggtcttaacctgcaatgacttt

SEQ ID NO: 4360 - DNA, 193 bp, Glycine max
  unsure at all n locations
  Clone ID: 701001045H1
gcaatttcaattctnatcatgtcaaatatgcaacctcaatttagccagattaacatctctgttacatggaggggaaaganatttgttgtcgagatgaatataggagccnatgtgaaggatctagggcaggaattgcaaaagttaacaaatatcaaagaagataccatgcggttcattgttccacagatttcnc

SEQ ID NO: 4361 - DNA, 294 bp, Glycine max
  Clone ID: 701001046H1
gctcgaggttataatccagccacatgggttttggagatcactactccagcagttgagagtcagcttagagtagactttgcagaattctacacaaaatcagaattgtatcagaggaatcaagaacttattgaagagctaagcacacctttagagggaacgaaggaccttgatttccctactaaatactccctttcctttattactcaatgtatagcttgcttctggaaacaacacttgtcctactggaggaatccacagtataatggcatccggttattcatggcagtaattata

SEQ ID NO: 4362 - DNA, 295 bp, Glycine max
  Clone ID: 701001047H1
caaaatgggtgattgtaaaaatgggttctaagggttcaattcttataacagcatcgagtgtagcttgtgcacctgcattcaaggtgaatgttattgacactgttggatgtggagacagttttgttgctgctattgtctatggttttatacataatatgccactggttaatacattggcaattgcaaatgcagtgggtgctgcaacagccatgggctgtggtgctggtaggaatgtagcaacactggagaatgtagtacatatattaagatcatcaaacctcagcgaagatgatga

SEQ ID NO: 4363 - DNA, 296 bp, Glycine max
  unsure at all n locations
  Clone ID: 701001048H1
ctgcagtgaaaaggctttctacgtatacgaacagaaggaggaaganattggtggcttattcatcaaaacacattctcttgggatgcaaattgaaatctgatctcaccaggaagtttctttcttcaaagaagattgattgatagcttttgtagcgctagttttttcttagttgcaccttacatatccgttggagttctgtgtatgattgtacaataattgtaattaattgattgatattagtcaacttgcaaaanaaaaaaaaanaacaaannacaanaacannggnnggcnnngnc

SEQ ID NO: 4364 - DNA, 280 bp, Glycine max
  unsure at all n locations
  Clone ID: 701001049H1
aaagattttgatttggtgatgaancgttggagcatttcactncngttatataaaaggcgtggcttgtgggctgtgtagaactcaaatcgatcaaataaatggctactgaacatgaagacgatttcaaggatgagaagaatccccgccccctcgacgaggatgacatcgcccttctcaaaacctatggtttggggccttattccacaagcataaaaaanntcgagaaggaaatcaaagacatggcaaaaaaggtcaatgatttatgtggtatcaaggagtc

SEQ ID NO: 4365 - DNA, 294 bp, Glycine max
  unsure at all n locations
  Clone ID: 701001050H1
gactatattggtactggcaaagaagtttggagcagctatggttactcttgaacatcgctactatggaaagagttccccatttaattctttggagacagaaaatttgaaatatctttcatccaagcaggcactctttgatttggctgtttttcgtcagtattatcaggattccttaaatgcaaagcttaatagancaaaaactgaaaacccctggttcgtttttggtggctcatatgctggagcactcagtgcatggttccgtctcaagtttccccatttaacatgtggaagtct

SEQ ID NO: 4366 - DNA, 288 bp, Glycine max
  unsure at all n locations
  Clone ID: 701001053H1
gtcaaggtcatctcctggtggtgatgatgatcttgacaagttattaaacggtgtcataaagaaaaaattgaagatcatccctgagaatgtcacatggggngggcagtcaggtgatgttttcgactatcttgcaggtgattttatgagaccaagaattaatgaggttgatgaactgctgacaaaaggggtcaatgtgactgtatacaatggacaagttgatctgatttgttcaaccaagggggctgaagcttgggttcataaactaaagtgggaagggctaaaaatttc

SEQ ID NO: 4367 - DNA, 293 bp, Glycine max
  unsure at all n locations
  Clone ID: 701001054H1
aacaatcatttttntttttcttctgccccctttctctctctgaagcgaaaccctagaaattcatcatnctttncagaatctgacaagtttcctcaaccgaacctaaattctctcaccaaatcctcacttatccaaattcgatactccaatccccacccaaattccccgcatcgactcccctccccaaaattcccccatcgccggcgtctcccgnggccgaacgcatcacatcgccgattcggctanggcgctaacagtggcnatcgtatgggtaagattctccaagaaaccgc

SEQ ID NO: 4368 - DNA, 290 bp, Glycine max
  Clone ID: 701001055H1
ttaaaggttcgattagttgctgacaaagatataaataagcccaggggttatgctttcattgagtatctgcatacaagagacatgaaagctgcttataaacaagctgatggtaggaaaattgatggtagaagggtgcttgtggatgttgagcgtgggaggactgttccaaattggagaccccgtcgcttaggtggtggacttggtaccactagagttggaggtgaagaagttaatcagcgacattctgggagggagcaacaacagtctcgttctgaagaaccgagagtgcg

SEQ ID NO: 4369 - DNA, 291 bp, Glycine max
  Clone ID: 701001057H1
caacctcccatgcaatcgctcaccctctccgtcacctgaatctgttttctattccctccgtcgcgtaacaaggatgaatggcattgggaaactcaaatcgtcgagttctgaattggaccttcacattgaagattacctgccttctggatccagtgttcaacaagaacggcatggcaagctccgcctgtgtgatttgctagacatttctcctagtctatctgaggcagcacgtgccattgtagatgatacattcacaaggtgcttcaagtcaaatcctccagaaccttggaa

SEQ ID NO: 4370 - DNA, 292 bp, Glycine max
  unsure at all n locations
  Clone ID: 701001059H1
ctcattctccatacctcaacgaagaggttaaagagacggcaacactttgctgtccgccttgaccgagcagagcttcgtcttgggccctcgattttgccctaaagtactctcagtcacaacagacacnnnnnnnnnnnnnnnnnnnnnnaatggcaccgaagcagaccaaggctgagaagaagatcgcttacgatgcgaantgtgcgacctaatggaggagtacggccagatcctcgttgtgaactccgataacgtgggatcgaaccagctccagaacattcgcaagggtctc

SEQ ID NO: 4371 - DNA, 291 bp, Glycine max
  unsure at all n locations
  Clone ID: 701001060H1
gatccgttagggttttagtttgttaaaaaagaactgcnattcccaaagcggttgggacngtggtggtgaaggcatcagtnacagttagggnttcccaatggaggagcaggcgtcccagatcggccgctccctggtgaagcagctggcatgctgcaaganaaccactcgagacaaatccctccgcctcctcctgaaatcatggctcccgtccgcagtcccagcccctctccgacgacgatgccaagaagctttggaagggcctcttctactgcatgtggcatccgacaagcc

SEQ ID NO: 4372 - DNA, 295 bp, Glycine max
  unsure at all n locations
  Clone ID: 701001061H1
gcaattgaagttgaagtcttgcccttctctcttcaactccaaacacaagacatcagcatccatggctncctccgtctccactgtcggagctgtcaacagagctcttttgaacctgaatgggtctggacctggggtttcagctcccagttcatccttctttgggagcagcttgaagaaggttattggctcaagggtccccaacacaaagatttccctctggaagcttcaagattgttgctgtagaagagaagaaagagattgaagagacccagcagaccgacaaggacagatggaa

SEQ ID NO: 4373 - DNA, 295 bp, Glycine max
  unsure at all n locations
  Clone ID: 701001062H1
ggaagtaatagatctagttccattccaaaggatcttcttcaactgtatagaagatgccaccagattggtaaagacttgttagctgcaaactgtaacgtgtgtcgcagatcatcaaatttggcaacatgccttgattgtagtattgnccttgtgatggggcaggccacttgattgagcatataagaacacacccttcccatcaaaaatattattcacacaagcttaaacgtctggttaaatgctgcaagtccaacatgcaaggtcactgacatcaaggatctcttggtttgtcata

SEQ ID NO: 4374 - DNA, 297 bp, Glycine max
  Clone ID: 701001063H1
caaaagccattgggaccacaagatgtcttgggcaaccctattgaataatctcaaggtgcaggagaggcagaaccgtgtttgcacaaccgtagccattgcaattgttgcagaaacatgttcacccttcacagttttaccagcattgatgaacgagtatcgcgtgccggagcttaatgtgcaaaatggtgtgctcaagtccctctctttcctatttgagtacattggtgaaatgggaaaggattacatctatgctgtgactcctttgctgaagatgcactcatggacagggattggttc

SEQ ID NO: 4375 - DNA, 300 bp, Glycine max
  unsure at all n locations
  Clone ID: 701001064H1
accgaacaaaggaattatgattttcggcttggacaatgaatcgataaattaaaaaaaaaggaagggaganagccccctctaattctccgaaaggaatgtgaaaatccagccgggncacgaaacgacacctctctgcgcttaaaacgactgcggcccacgatcgcgttcttcagttgaggcatgttattcgctgctcactcctnnnnnnnnnnnnnnnnnnnnnnnnnnnnnnnnnggccttcgcatcttcacaatcacatccaatagagacacgttgactttagtggaagaagaagaaga

SEQ ID NO: 4376 - DNA, 296 bp, Glycine max
  Clone ID: 701001065H1
ctctattattctcgttttcaatatgcagatcttcgtcaaaaccctaaccggtaaaacgattacgctagaggtcgagtcctccgacacaatcgataacgtgaaagctaaaatccaagacaaggaaggcattccaccggatcagcagcgtttgatcttcgccggtaaacaactcgaagacggcagaactctcgccgattacaatatccagaaagaatcgacgctccacctcgtcctccgccttcgcggtggcatgcaaatcttcgtcaaaaccctaaccggtaaaacgattacgctag

SEQ ID NO: 4377 - DNA, 286 bp, Glycine max
  unsure at all n locations
  Clone ID: 701001068H1
caaggcngtctccaaatgggtcggaatcgtcgtcctcgctagcaaccaagccagcggaggcaagcttctaagaggctgcntgctncgttgaagtccctgcttcaagaccgngcctatttgcttgtcgncgagcgcgtcgatatcgccgcngntgacgccgctagcggagttttgctctctnnacaaggccttcctactgttgttgctagaaatatgatgttggattcaaagtccgaattggtggntctccctggttgctaggatgntccaatgtggatgtgcggtg

SEQ ID NO: 4378 - DNA, 290 bp, Glycine max
  unsure at all n locations
  Clone ID: 701001070H1
caccacttctacactcaccctctganacattcagacacccaacaactaccgaatacacacagcacacccgcnatncatgcagatcttcgtcaagaccctcaccggaaagaccatcaccctcgaggttgagtcttctgacactatcgacaatgtcaagagcaagatccaggacaaggagggcattcccccagaccagcagcgcttgatcttcgccggcaagcagcttgaggatggtcgcaccctgtccgactacaacatccagaaggaatcgaccctgcatctcgtcctcc

SEQ ID NO: 4379 - DNA, 289 bp, Glycine max
  Clone ID: 701001071H1
cggtgagatttgcgaatctgagaaatggcggattcttctcgggaggagaacgtttacatggcgaaattggcggagcagggccgagcgttacgaggagatggttgagttcatggagaaggttgcaaagactgtggaggttgaggagttgacggtggaggagaggaatctcctctctgtggcttacaagaacgtgattggtgcgaggagggcttcgtggaggatcatatcctccattgagcagaaggaggagagcaggggcaatgaggaccacgtggccattataaaggag

SEQ ID NO: 4380 - DNA, 287 bp, Glycine max
  unsure at all n locations
  Clone ID: 701001072H1
aaattgatcctagatggatctgccaaagatcatttattgttgatactgaaattgctgagttcttcttcattgattncaacaccttttgtggacaagtattttcttaagccaaaggaccacaagtatgactggagaggagtgcttccaagggaaaaatatttatcaaagctcttgaaggatctggaaatagcattgaaggattctactgccaagtggaagattgttgtggggcatcatcctgtaagaagcataggacatcacggtgacaccaaanagctcataagaca

SEQ ID NO: 4381 - DNA, 287 bp, Glycine max
  Clone ID: 701001073H1
gattctcagggagatggtaattcatcgttacttcagagtgaaatttccaaagctagtggtttcaaggggcctcgtgatattcaccttccagaagaagatagcttgattacagctagtgatcctctgcaaaactttttatctgctggaaatttagttaaaacagatttgtcccaagacactacagttgacattactagaaaactggcagctctgaatcctgcatttagagatgaccgactcgttacgagaaatcaagaaggtttagcattccctcgtggtccatatga

SEQ ID NO: 4382 - DNA, 183 bp, Glycine max
  Clone ID: 701001074H1
gattttcaatgttagtttttcatacacaagaaagtgaaaggttgtacttagatcaaacgatgattataggctgtgcaagagttaaatttgcacagttttattggcaaagtacatatatgtctgtgtttagtcgggtttcagtcccttggttacaaaaataatgtttctttgtagttaagcgac

SEQ ID NO: 4383 - DNA, 284 bp, Glycine max
  Clone ID: 701001075H1
cttcttcaatttccaatctttttggacaccctctattgctattcctcccttggtgttgtttgtgttaaagggtatctctctacttaatataaagttccattgtctcttgaggcaattttcaaccttagttgtgtgttttggagagtttttttgtgttgttttgttgaggttgggtttgtgagtgagagaatggtgggtgctctatctgttgtgggctcatcagtgatggactctcacactggcccttgtttgtgtgttgatgctctcccaacaactagtgttaa

SEQ ID NO: 4384 - DNA, 288 bp, Glycine max
  unsure at all n locations
  Clone ID: 701001076H1
tgaganatgatgatgaagcgtcggttccttttggttctcttggttctctatgtcacagtggagcagagtaagctactccaccacgtagaagccgatggtgggtttgtaaaaacaagaggagtgcagcttatgctgaatgggagtccctactatgctaatggctttaatgcctattggcttatgtaccttgcctctgatccttcccagagaaacaaaatctncatcggtatttcaacaggcttcaaatcatggactcaacattgccagaacttgggccttcagtgatgg

SEQ ID NO: 4385 - DNA, 293 bp, Glycine max
  Clone ID: 701001078H1
gacctccgaggttcctcttctgagctcaaacaagaaaagcaaaggcagcacgagaaccctaactgccgccgttcgcaggcgcagtttccggtgtcgttatgttatcccttactgttgctttcttcctcatcaaacgcaagaagaacgtggccgtcgatgaaggttccaataaaaaaggtggaacttctcgaggcggtggctcatcatcgctaccaaccaacctctgccgtaagttctcaatcgcagaaatcagagccgccaccaacaacttcgacgaactctttgtggttgga

SEQ ID NO: 4386 - DNA, 292 bp, Glycine max
  Clone ID: 701001079H1
gcatggtaatgaggctggaaaagggggggaactgacacatgatgaaacaacgatcattgccggggcacttgaactcagtgagaagacggcgagtgatgccatgactcctatatctgaaacatttactgttgatattaattcaaagcttgatagggaactgatgaatgagatattggagaaagggcacagcagagtcccagtctattatgagcagcctacaaacattattggacttgtactggtcaagatttattgacagttcatccagaagatgaagcacccatgaagagtg

SEQ ID NO: 4387 - DNA, 291 bp, Glycine max
  unsure at all n locations
  Clone ID: 701001081H1
atccaataataataaccccctttttccctctccatacccttttgctttctttatccaataataagaacttcccacgagtggctttaactggtctggtctggtctggtcggacacacaaaaatattagtatggagaaggtgagttttgtgaagaatggagagcttagattgcctccggggtttcgtttccacccgactgatgaggagctggttttgcagtacttgaagcncaaggtctctcctgccctctgccagcctctatcatcctgaggttgatgtttgcaagtctgat

SEQ ID NO: 4388 - DNA, 178 bp, Glycine max
  unsure at all n locations
  Clone ID: 701001082H1
ggntngaggtngtttntctntcttactctctntctttctctgngtgtgttcntgagtggagtganntgtgtgtagnngcgttctntattgcaggngttctngtcggaatttcctttattgatttttcngatcaccggattcgatccaatccctaatccctaattctgngantccanca

SEQ ID NO: 4389 - DNA, 288 bp, Glycine max
  unsure at all n locations
  Clone ID: 701001083H1
ttagtcgaatggttttacaaganatccttgctcgcgcagttggggaagatatcattatgaatgccagtnatgttgttaattttgtggatgatggaaacaaggtaacagtagagctagagaatggtcagaaatatgaaggagatgtcttggttggagcggatggaatatggtccaaggtgaggaagcagttatttgggctcacagaagctgtttactctggttatacttgttatactggcattgcagattttgtgcctgctgacattgaaactgttggataccgagtat

SEQ ID NO: 4390 - DNA, 229 bp, Glycine max
  unsure at all n locations
  Clone ID: 701001084H1
ctttctcttgaatccatcatgaccatgaaagattccattgttctatattcagctttgggaagaggacaccttgtttcaatggtggaactaggtaaactcatactaagccaccacccttcactttccatcaccattcttttcctnnnncccnnnccccaaccaagacacccccaccttccccnaccgccttcacctgcgacgcnaccgcnaaatacatcgccgctgtnac

SEQ ID NO: 4391 - DNA, 285 bp, Glycine max
  unsure at all n locations
  Clone ID: 701001085H1
ttcgttattctcttattcatccttctcttctgaataatccagatctctttctgcccttttctccgtcacgcttttcgtgaccggatctgtatggatttgatccagatctacacgccgatggtggttttggccgggtctttcatagatctggtgcgtagaggctcagatctacggtaccgaggtacaacagagaatcgatgacaagancgcagatccgacggtagatccagccgattccgcttgttcgatcgctacagacccctgtatcggatcataagcagcgtg

SEQ ID NO: 4392 - DNA, 288 bp, Glycine max
  Clone ID: 701001086H1
ttcccaaattcattttaatcctaattctgcacttcttgatcattcgatttttctcctcaagatgcagatattcgtaaaaactttgaccggcaagaccatcacccttgaggtggaatcctccgacaccattgacaacgtaaaagctaagattcaagacaaggaagggatcccacctgaccagcagagacttatctttgcgggtaaacaacttgaggatggtcgcacccttgccgattacaacatccaaaaggaatcaaccctccatctcgtgcttcgcctcaggggtgg

SEQ ID NO: 4393 - DNA, 291 bp, Glycine max
  unsure at all n locations
  Clone ID: 701001087H1
cttgaagcttgctgctatttcaacacctcctagcaatcgaatcagtncccaatgcttgatgaggaagtgcgttcagttatgcagttcatacggtataatgaatgataagcactattttgacccgctgcaggttttggagagtttggtgaccatttttattgaaggcagtgggcgtgggctgtgtaagagaataatagcagttataaaagctgcaaacaccttgggcctctcattttttgaggggttcaacaagcaaccaattgaactactacagctgctttcgcttaaagc

SEQ ID NO: 4394 - DNA, 286 bp, Glycine max
  unsure at all n locations
  Clone ID: 701001088H1
cgtatacaccattgccataggctgtgctgtttgccttctgatgagtctactggtatttccaaattggtcaggcgaagatctccataattccacggtttacaagctccnaggccttgccaaatctatagaagcttgtgtgaatgagtacttttacggagaaattgaaggctctggggatatgaaattatctgaggatccaatatacaaaggttataaggctgttttggattcaaaatccattgatgaaacactggcatgcatgcaagttgggagccaaggcatcaag

SEQ ID NO: 4395 - DNA, 286 bp, Glycine max
  Clone ID: 701001089H1
ctcgaagtgtgaagcactgagcagttgaggaaatgggaacccttgggagagcgatctacagcgttggtaactggattcgagaaactggacaggccattgatcgtctcggttcccgtcttcagggcggttactacttccaagagcagctctctaggcatcgaactctgatgaacatatttgataaggctcctgttgttgataaggatgtatttgttgcgccaagcgcctccgtcattggagacgttcaacttggaagaggatcatccatttggtatggagttgtctt

SEQ ID NO: 4396 - DNA, 284 bp, Glycine max
  unsure at all n locations
  Clone ID: 701001090H1
ttcttgttggtattttggttcctaaacttagctccagaactatacagcaagctgttggagttgtgggttgcattattatgcctcacaatgtgtacttgcattctgcgcttgttcaatcaaggcaggttgatcccagcaagaaaggccgtgttcaggaagctcttaattactactccatagagtccaccattgcccttatagtgtccttngtcataatatatttgtcacaactgtgtttgctaagggctttatggtactgaaatagcaaatagcattggtcttgt

SEQ ID NO: 4397 - DNA, 290 bp, Glycine max
  unsure at all n locations
  Clone ID: 701001091H1
ctaagatttaccgctatgctttcccacaaatattgttaccacnttgttctatgtttactctccttgtgcttctcttgttctcatccgcaatctcagaaccttcaagaacccaccccttcctccaggtcctaaaggccttccaataataggaaatttacatcaatttgatagttccattctttatctgcagctatggcaactctcaaagaaatatgggccctatattttctcttcaattagggttaaggncagccatagttgtttcctctcctaaactagccaaagaggta

SEQ ID NO: 4398 - DNA, 203 bp, Glycine max
  Clone ID: 701001092H1
ggcttttgaccaagagcccactgtttcttatcccggtggatgatcatttgccgtttccaataggtgagttaatatactgagtgccgtagctcccctaatgtatttcaacttgtactacgagtttttactttacacacatacgagccttgcaccacatttttttctgaacataaaataatgaaaagccggaacatatcaaaggt

SEQ ID NO: 4399 - DNA, 290 bp, Glycine max
  Clone ID: 701001093H1
ttatttgggctctgcccttcccaattgagaaggcccccactaagagaattgcaagtgtaaatggtggggtgaagatatctgaactgttgaagtatccggttagaggctttgtctttgagggcggcgaaatgctggaagatctatcaaacgttgtttcagatgcatgtatatgtcttcagaacaacaacatacctttcaatgttcttatctctgactgtggaaagcaagtgtatctgttaccacagtgttatgcagagaaacaagctcttggagaagtgaatgctgagctc

SEQ ID NO: 4400 - DNA, 295 bp, Glycine max
  unsure at all n locations
  Clone ID: 701001094H1
ctcgaacctctccttccgctctgtcctgaacccttttcagctccctacacaaaacccagcttcatgcaccccttcacgctccttcaagcacccaaattcagtgtggtctgagagaactgagaacccgcattgagtctgtgaagaacacgcagaaaatcacggaggcaatgaagcttgttgctgtagccaaagtgagaagagctcaagaagctgttgtgaacggaagacccttctcagagaccctggttgaagtcctctacaacatcaacgngcagctccaaactgaggacgtaga

SEQ ID NO: 4401 - DNA, 295 bp, Glycine max
  Clone ID: 701001095H1
tggagaactgtttgcgagtgaccacagtagggcacagccacaccccaatgcttttctccattttttccatcttcaagggataaacttgtcttcccaactcacagaggtttcaagaaatccttgcaaaactcaacactgtcatacccttatctttactccaccggtgctgcctatagaaaatcccgttttgtttgcaatgctcgtgaagcagtaaatgaagttaaagtggtgactgactcaagctggaacaaccttgtcatgcaagtgagacccctgtgctggtagagttttgggc

SEQ ID NO: 4402 - DNA, 295 bp, Glycine max
  Clone ID: 701001096H1
taaaatgataatgggcaacaaaccgacctgatgtacttgaccctgctctcctgcgtcctgggagattggatagaaaaatagaaatccctctgcctaatgaacaatcaaggatggaaattcttaagattcatgctgctggtatcgctaagcatggtgaaatagactatgaagctgttgtgaagcttgcagagggatttaatggggctgatcttcgaaatgtctgcacagaagctggaatggcagcaattcgtgcagagcgtgattatgtgatccatgaagattttatgaaggctgt

SEQ ID NO: 4403 - DNA, 284 bp, Glycine max
  unsure at all n locations
  Clone ID: 701001102H1
atttggaatgttatgggcatgatgaacaactgctggttcagagtgaaaaccaangtgtgcaggccccacaagggtgagataggtatagtgtttgaacaccccacccaaccaggcaaccaatccggcggatggatggcaaaagaaaaacacctagagaaatcatctgagtccaacccaaccctcaagaagagtgtctcctccccattcatgaacaccaccttcaaaaacctataccatgtctgaagtcagaaggcacaacaacgccgattcggcttggatcatag

SEQ ID NO: 4404 - DNA, 287 bp, Glycine max
  unsure at all n locations
  Clone ID: 701001103H1
gaaatgtggctatcaaaaaggttcttcaagataagaggtacaagaaccgggagctgcaaacaatgcgccttcttgaccacccaaatgttgtcgctttgaagcactgtttcttttcaaccactgaaaaggatgaactatacctcaatttggtacttgaatatgttcctgaaacagttaatcgtgtgatcaaacattacaacaagttaaaccaaaggatgccgctgatatatgtgaaactctatacataccagatctttagggcgttatcttatattcatcgtcntatt

SEQ ID NO: 4405 - DNA, 287 bp, Glycine max
  unsure at all n locations
  Clone ID: 701001104H1
caagaagctttagcaactcttgtggtgaacaaacttagaggatcactgaaaattgcagcactcaaggcccctgggtttggagatcgcaagagccagtaccttgatgatattgccatcttgactggaggtactgtaatcagagaagaggttggccttactttggacaaagctggcnaagaggttctcggatatgcctccaaggtggttctcaccaaggatacaaccacaattgttggtgatggaagtacccaggaagcagtgaacaagagagttgcacagattaggaa

SEQ ID NO: 4406 - DNA, 274 bp, Glycine max
  unsure at all n locations
  Clone ID: 701001105H1
ccaaaaccaacagcatcatcatccatggcatctcaaggtcacggtaacaagctcatcgtttcaacatcaccaaagagtgatannnnnnnnnnnnnnnnnnnnacgggatcattgcccaaaggacagtgcttgtgctcaccaacgacacatgaagggtccttccggtgccgtttgcatcgtgggcatacagcttcaccagctaattggatgaaacgctccaagtccatgcctgccaataagcctgtggtttctgactccacatgctgatgataac

SEQ ID NO: 4407 - DNA, 281 bp, Glycine max
  unsure at all n locations
  Clone ID: 701001106H1
ataaacaccacaatcgttcagggaagatatgccttattttatcaattctgtccaacaggaatgaatcagaggggaagaatccctgttggacagaattgataaaataaggcatataaacaccacaatcgttcagggaagatatgatgtttgctgtcctatgatgtcagcctgggatcttcataaagcttggccaacngcagattttagggtggttcctgatgcagggcattcagccaatgaaccaggcataactgctgaactagtggctgcaaatgagaatt

SEQ ID NO: 4408 - DNA, 282 bp, Glycine max
  Clone ID: 701001107H1
ttctctctgtgtatttccctacctctcccttcaagatgcagatcttcgtcaagaccctcaccggcaagaccatcacccttgaggtggaaagctctgacaccatcgacaacgtcaaggccaagatccaggacaaggaaggaatccccccggaccagcaacgtctcattttcgccggaaagcaacttgaggacggccgtacccttgctgactacaacattcagaaggagagtactcttcacctcgtctccgtctccgtggtggtatgcagatcttcgttaagac

SEQ ID NO: 4409 - DNA, 281 bp, Glycine max
  unsure at all n locations
  Clone ID: 701001109H1
gcgaanagccaatcaacaggtccttagctcacttcagcctttggattatattgttgttgcatttttgcctggtattagtgaggaactacttttccgaggagcgattcttccacttttgggaatgaactggaatagtattgggattgctgccttgatttttggtgttttacacctaggcaacggtcgaaagtattcctttgccatctgggcaacctttgttggtcttgcttatggatatgctacaattttatcctctagtgttgcggttcccatggcttctc

SEQ ID NO: 4410 - DNA, 280 bp, Glycine max
  unsure at all n locations
  Clone ID: 701001110H1
tttgagtgccgagcaaaaccctaatcgagttcgattgcaacacacctccgttgctgtattccaccttctccgacgatcncanccaaacctcttacaaccgaagctattgcgcttacagaaaanaagatggacatgacattagatgacataatcanaatgtctaanaatacgaagaataagaanccaagaagggttctgaacaaaagtcaaaagttttcaaataattttactcaagataagtctgcaaaggtccaacgttatatggaatcaagatcttctc

SEQ ID NO: 4411 - DNA, 253 bp, Glycine max
  unsure at all n locations
  Clone ID: 701001111H1
acantattttgaagattcgaagagtctatgangcttttctagcagaatttcccttgtgctatggttattggaaganatatgctgaccatgangcncgccttggctctattgataaagttgtcgaagtctacgagcgtgcggttcaaggggttacatattcagtggacatgtggttgcattattgcatatttgctataaccacatatggggatccagacactgttcgtaggtaatggaagtttagttgtttgtc

SEQ ID NO: 4412 - DNA, 282 bp, Glycine max
  Clone ID: 701001112H1
gtgatccaaagcttaacggtagccccagccatggaggaggaagtgtagtagttgatggcaaaatttcacatgatgcatcgcatcaagaaattgacatggtcaaaaataaaaatcttgagaaagatgacgaatctgatcttccaaacagcaaaagcaatcatgatcaatccaaccttttagaacctgaattgggtgttggcagagctctctctgatggaccgtttcctgtcattcctagtttgtctgaaacattgatgcaaaatggactggtgaaaaccactc

SEQ ID NO: 4413 - DNA, 282 bp, Glycine max
  unsure at all n locations
  Clone ID: 701001113H1
aaggttcaatttttacccttttttcttcccagaagcnatctctgaagccgacccattttggaattcggaaaacccagtgctgatcgctctctgggtgttcccaaaatgaagcttcggagntcttcgctgtgcgtctttctagggtttctggtgctgttcctttcgccgccgccatctatggcgaaattcgtggtggagaagaacagcttgacggtgacgtcgccgngacgacatcaagggcacgcacgatagcgcgattgggaacttcgggataccccaata

SEQ ID NO: 4414 - DNA, 283 bp, Glycine max
  Clone ID: 701001114H1
cttgacatacccgacataatccacagccatagccatggccaacccattactttttcagagttggtgtcaattctacaagtcccaccaactaaaactcgtcaggtgcagagcctcatgcgttatctagcacacaatggattctttgagatagtaagaatccatgacaacatagaagcatatgctctcactgctgcttcagagttacttgtcaaaagcagtgagcttagtttagctccaatggttgagtattttcttgaaccaaattgtcaaggtgcatggaacc

SEQ ID NO: 4415 - DNA, 285 bp, Glycine max
  unsure at all n locations
  Clone ID: 701001115H1
gcaccacaagacttatgtggaaaatctgaaaaaacaagttgttgggacagagcttgatgggaagtcactagaagagattattgtcacatcatacaataagggtgacattcttccagctttcaacaatgcagcacaggtatggaaccatgacttcttctgggagtgncatgaaaccaggtggaggtggaaagccatccggggagcttctagaactgattgaaagagactttggttcatttgtaaaattccttgatgagttcaaggctgctgctgcaacacatttgg

SEQ ID NO: 4416 - DNA, 283 bp, Glycine max
  Clone ID: 701001116H1
cgttgccattctcatcctcttctttctctctctaccattgccatggatccctacaagcaccggccatccagcgccttcaattctcccttctggactacaaattctggtgctcctatttggaacaacaactcctctttaaccgttggagctagaggtccaattctgctggaggattatcatcttgtggagaagcttgcaaattttgatagggaacgtatcccagaacgtgttgtccatgccaggggcgctagtgcaaagggtttctttgaggtcacccatgaca

SEQ ID NO: 4417 - DNA, 290 bp, Glycine max
  unsure at all n locations
  Clone ID: 701001117H1
caacaacctcctcaatccgatgatngtncttcctcttgttggtccctttacgatgacctctactacgacacgctctacgtcccaaccgagtccgagtcgccgcgattaacggaatccgttagcgtaagagcgggcgtggatgtggcttcgntcagcgcgtgcagcaagaagcgcaagttctcccgcgcgtggagctcacacctggcttcgggaagctggacactaagccgtgaacaaggaagcaagctcctggcgcgtaagttccggtacgattgcttgtacgtgtgcga

SEQ ID NO: 4418 - DNA, 289 bp, Glycine max
  unsure at all n locations
  Clone ID: 701001118H1
ctttctcttcttacaattacaaatcccttcatctctctctctcnattctcatttcaatccccttcttcaacccctctctctctctccaaaacgccaaaccaaaaaatggctcagaaggccgagaaaaacgacaccgactttaaggtccccgaaaccatcnnnnnnnnnnnnnnnnnnnnnnnnnnnnnnnnnnttaccgaaccttctagattcttcgacgcaaccacccccgccacgtcatcgcgctcccccaagcgatccctccccctcgacgacgaatctcagacgg

SEQ ID NO: 4419 - DNA, 284 bp, Glycine max
  Clone ID: 701001119H1
caaagaaccaagaaaccaagcaaatcattgttctctctgtcctgtgttttgtgatttcccccttcaagccaccaccaatggccaacaacgagatgcaagttgagaggggtttggacttggaaaggtacatggggcgttggtatgagatagcctctttcccttcaaggaaccagcccaaggatggcgtgaacaccagagccacatacactcttaggaatgatggcactgtgcaagtgctcaacgagacttggagtaatggcaagagagggcacatagagggaatg

SEQ ID NO: 4420 - DNA, 284 bp, Glycine max
  Clone ID: 701001120H1
ctaaaatggggacttgggactctgccactgaccccttcttacagcagtttctcttcaaagtcaggagggcttttacatgacatcaccaatcacagcagggttaatagaagcatgaaattcagagtttcagccaaacaagagaagcaagaagagaagaaaaagcaatctttgttcagcagtgtgactgaagctcttgatttttctcaagtgagatctgctgaggatgctcagcttatagaagaggctagagaagccacaagatcgggagaaaggatgagtaggga

SEQ ID NO: 4421 - DNA, 280 bp, Glycine max
  Clone ID: 701001121H1
ctcaatctctcgagcttgcatttaatattgcggacaggttgcgcaagagaaggctcaattcaactcgatcacttggaatttagacaagagggggtctgtcttcctttgtacctggatcacaatactggtcaaacatgtgttgagttttcttgagcacagtgaacaaatactctactgggagccactctaccgagtttcataagaacttaaaatagtcggcacaattaatagttgtgctgtatgagtgttacaagacagttcaaaacactgcaggtgtatg

SEQ ID NO: 4422 - DNA, 280 bp, Glycine max
  Clone ID: 701001122H1
aacgtcgcagcgagcgagcgagcgatggaagaagaatattttgatttcgagaagaaggtttcgataaaggagacgatgtcgatggaggttgatccagccaaagtccttcttttgcttcgcggtttcctccaaattcagcaacgcagggccgaagcatattccaagctcaaatggttaataataattacttacaaggctttgcttggattccgccaaaatatatgcaaaatcattttcttctcgttatgatcgcatcgcttatcttcgagtgtatttgaat

SEQ ID NO: 4423 - DNA, 279 bp, Glycine max
  unsure at all n locations
  Clone ID: 701001123H1
cngacttggagcaatcgtgaaaattcggcatctaggggagggaactctggttttgagaagccgattcagttagtgttaaaggaaccgattaaggatatggaccgtgttgatggttttggtggagaacctatggttgggaggaaagaggatgatgcactggatgatttgtttagtgcatatatgaatttggacaatattgatggtctcaatttttctggtatggaagataaggatttggatagcagaactagtggttccaagacagttgagagcagtgat

SEQ ID NO: 4424 - DNA, 264 bp, Glycine max
  Clone ID: 701001124H1
agaccacttcccctgatcaagagcactctgaatccacacccaaagaagctgcttaatggatctgtgttgaatttatcaactcatctgcctagcctcagtaatggtaatgggactgtcctgtcttctattagcagcaagaaaaggaaggacttttttctttatgggaaagatgaagaatgttgtttggctattaatcctccatctgatcggagtccagatttggtaatgcacccaagtgaatcacactggttgaatgacttcaga

SEQ ID NO: 4425 - DNA, 278 bp, Glycine max
  unsure at all n locations
  Clone ID: 701001126H1
ggcttgcaccgctttgggtgaccacggcgaacaagtnccttaccaactctctgggactctctccctgctatcgccgtcgtcggtggccagagctctggaaagtcctcggtgttggaaagtgttgttggcaaggatttcttacctcgtggatcagggattgttactcggagaccccttgttttgcagcttcacaagattgatgagggtggcagagagtatgctgaatttctacacctccccaggaanaggttcaccgattttgctgctgtgagaaaaga

SEQ ID NO: 4426 - DNA, 280 bp, Glycine max
  unsure at all n locations
  Clone ID: 701001127H1
gnaagaagtccattcaaaattgcctgctgtaactgtacaaggtgaatctgatcaaaacttacagcaacaaacacttgatgatgatgaatcagaagcaatcaataatgccaagagatgcataccagaaaaagaacttgatagaatgtccactgttgttgaggaacctgaaaccaatgccaatgttggcatagtaaaagaagaacaatcagacaaccaatcgcaaggntcaagcatgcaaaatatgattgcaaattatataacagcagaaggacatctggca

SEQ ID NO: 4427 - DNA, 283 bp, Glycine max
  unsure at all n locations
  Clone ID: 701001128H1
cgacatcgcttgttctgttccacnaganctaanagccnaangngacgggaaagcacctgatgatgtaagttgatgatgtaaancgtacatganncgagcaccgagtttattcatttatcagnggcaagtatctaaggttagtaaaaatnaataagttaganaaacttcgtaagtntatttttgataganaaatagaaaggatccaatttgagcaaggttcaaanaaatggttggaantagtaaaactgttttgatcaaangtgtagccgcaggaattaacctt

SEQ ID NO: 4428 - DNA, 281 bp, Glycine max
  Clone ID: 701001129H1
cctggttgttcctcaattggttatggagaagcagaggagctaggacccttctttcctcaggacagcagccaaccaaagctaaagttaaatccttattcttggaataacgctgccaatcttttgtttttggaatcccctgttggggtggggttctcctacaccaacaccagcagtgatataagtgagcttggtgacaccattaccgctaaagattcacacacctttatcatcaagtggtttagaagatttccacaattcagatcacacgaattctacatttc

SEQ ID NO: 4429 - DNA, 280 bp, Glycine max
  unsure at all n locations
  Clone ID: 701001130H1
ctcagcacatataataggatattggagatgtatttagaatgtggttctgtagatgatgctctcaacattttcaacaatatgccagancgcaacttgactacttgggatactatgataacacagcttgctaagaatgggtttgccgaagattcaattgatctatttactcaatttaaaaacttgggactgaaacctgatgggcagatgttcattggagttctatttgcatgtagtgtgctgggagatattgacgagggaatgctgcactttgaatccatga

SEQ ID NO: 4430 - DNA, 281 bp, Glycine max
  Clone ID: 701001131H1
gttcagcttcattcattcacaccaaaaaggtgaatgtgaacaccaaacaacaacaaagtaactacacacacttcgagcttccaaggaaggaagaagatgggtggcgtgacctcttcaatggcggcgaactggcgttcttccctccgtccccggcgtcctacaaggtgctgaaggaggaggcgacggggctgctgctcatggagccgttcccgcaccgcgagaacgtggagattcttcggttcccgaaccgccgcggcacggagatcgtggccatgtacgtg

SEQ ID NO: 4431 - DNA, 281 bp, Glycine max
  unsure at all n locations
  Clone ID: 701001132H1
ganaagggtgcatgagaggaaagggatggcctcagaactccgattgcaagttcagaggtgtgaggcagaggatttggggtaaatgggttgctgagattcgcgaacctatcaatggcaagcttgttggtgagaaagcaaataggcttggcttggtactttctccactgcacttgaggctgctcttgcttatgatgaagcggctaaggccttgtatggcccttgtgcccgttttgaatttttccgagtcaatagactctaaatggatcatcatcttctagtgg

SEQ ID NO: 4432 - DNA, 288 bp, Glycine max
  unsure at all n locations
  Clone ID: 701001133H1
cttgcaaactagttttgtttttggaacatatcgcattacattacattagattggnggcaaagcaatggcatcgtcactacaagcagcagctactttcatgcaacccaccaagtttttgcagctaaagtctactcaggccatatctaaggcttttggtttggaacctgctggagttaataaggtcacatgctcccttcaggctgatcttaaggacttggctcacaagtgtgttgatgctaccaaaattgcaggctttgcccttgccacctctgctctcgttgtttctgg

SEQ ID NO: 4433 - DNA, 284 bp, Glycine max
  unsure at all n locations
  Clone ID: 701001135H1
annaccancancgtttgtcatcaatntcttatcnnttctcattcccttntctncttcctcaacacanacaaaatatctcttccaatttcaatttctcgtngtncctcatcatggctcgtctcgcgntcgctgtngncgncgtgctcctcgtggnacactccgcctccaccgngacggctgtccctgcaggaccttcataatctcctcctantcgttgcggaancctaactccaacaccttcgccaanatcaccgagatccgatccttcacccctctctacatca

SEQ ID NO: 4434 - DNA, 279 bp, Glycine max
  Clone ID: 701001136H1
gcaacagtgagaacaccattgaattttgattctagcaagcagagcttttgtcaattttctattgaccttctcggtggaggaattttagtggacaaaactggagattggatcacacttatacaaaattctccaattagtaacttgttgagagttgctgcttggaagaaaggctgtttaatggttaaaattgtgatgtctgggaatgcagcagtcaaaaggagtgattgggcctcattggtacaagtgtttttaacaaacagcaacagtacagagcatttc

SEQ ID NO: 4435 - DNA, 281 bp, Glycine max
  unsure at all n locations
  Clone ID: 701001138H1
ccttcttcttctattacaacaacgtcnggacaagaccatgaccatggccatggccacgatcctgctcctgttcacggtcttcgcggtttcatcggccctagacatgtcgataatctcgtacgacaacgcccacgccgccacgtcgcgcagnacnantgagctgatgtccatgtacgagcagtggctagtaaagcacggcaaggtgtacaacgcgctcggagagaaggagaagaggttccagatcttcaaggacaacctgcgattcatcgacgaccacaant

SEQ ID NO: 4436 - DNA, 280 bp, Glycine max
  unsure at all n locations
  Clone ID: 701001139H1
cgccagcnagcgcttcttctctcgcattccgtggagatctagtgctgccaaacctcgctgaaaattagggtttcgtttcggaggtagacgaagatgttcggaagggcaccgaagaaaagcgacagcaccaggtactacgaaatcctcggcgtttcgaagaacgcttcgccggatgatttaaagaaggcttacaaganagccgccattaagaaccaccctgacaaaggcggtgatcctgagaagttcaaagagcttgctcaagcctatgaggttctgagtg

SEQ ID NO: 4437 - DNA, 278 bp, Glycine max
  Clone ID: 701001140H1
caaagcttaattggcttcgggcaagcgcaacccacatctcttgtgggcctgaaccacctaaccccatctcagatctctcagatcccaagcccaaatccagatccaggcccagcagcatcagaatcgcagcaacaccctgagcttccttgggccgaagcccatccccatgaagcacgcgggcatgcctccgaagcccacgaagctttacagaggggtgagacagaggcatggggaaagtgggtggctgagatcagacttcccaagaaccggaccaggtg

SEQ ID NO: 4438 - DNA, 276 bp, Glycine max
  unsure at all n locations
  Clone ID: 701001141H1
acaaccataaacaatatgtgtgcatatgggctcaatcctggtatttcaggttctcgtcttttgggcaccattcctcagtctatttcacagcaaactgtttggnatcaaatggcaacagtgagaacaccattgaattttgattctagcaagcagagcttttgtcaattttctattgaccttctcggtggaggaattttagtggacaaaactggagattggatcacacttatacaaaattctccaattagtaacttgttgagagttgctgcttggaag

SEQ ID NO: 4439 - DNA, 275 bp, Glycine max
  Clone ID: 701001142H1
tgctacctgctgtgatgaccactacagttgctgccctaacgactatcccatctgcaacacttatgctggaacttgtctcaagagcaagaacaacccattcggagtgaaggcattgaggcgtactccggctaaaccccattggacctttgggcgtaagaacaaggtcagcagtgcttaagcagataaaggaaatgtgaacgtgcaggaaggagccaatgatgaagtaaatgaaagacgaagaattaaaacaccagctgatacacttcccctttacc

SEQ ID NO: 4440 - DNA, 277 bp, Glycine max
  unsure at all n locations
  Clone ID: 701001143H1
ctcaaatttgagtgctacaagtgagaaggcagttatggaaacatngaaaganacagagacttccatgcgtattgttggaaatagaaaagattttgctgaaggtgcaaaaaaaattgaatattttgaagagacaacttttcttttgagcgcaatactgtggcgctggcctccttctaggttccctgttggtaatgatgttatacttatgaaagtcttagcaaacatccatacaaggacagataaagcaactcctttttccaagctctttcttcttcag

SEQ ID NO: 4441 - DNA, 277 bp, Glycine max
  unsure at all n locations
  Clone ID: 701001144H1
ggctgcctccgtctccactgtcggagctgtcaacagagctcttttgaacctgaatgnttctggagctggagcttcagctcccagttcagccntctttgggaccagcttgaagaaggttattgcctcaagggtccccaacagcaaggtttccggtggaagcttcaagattgttgctgtagaagagaagaaagagattgaagagacccagcagaccgacaaggacagatggaagggtcttgcctatgatatctcagacgaccaacaagacatcacaaga

SEQ ID NO: 4442 - DNA, 277 bp, Glycine max
  unsure at all n locations
  Clone ID: 701001148H1
cgacgactgtntcgtcggnangatccgccgcagcatcgctcttgcnagtggacttcatgaaagacggttcttccgaangcgacggatcaagcgcgatcttgaacgaagacaccatgtacttgccgtcttcgatgaactgttttcagttccagaaaccgtatcatcacgcgcagtacgtgaagacggaggagcacaatttcttgagcgccgacgaggctgcaatttcttctccgatgaacaagcaccgaccctgcaatggtatgtccagaacagtgga

SEQ ID NO: 4443 - DNA, 280 bp, Glycine max
  unsure at all n locations
  Clone ID: 701001149H1
agatggacaactgcaagccgtgcggtggcgccatcccgctgtgcatggtgggggagttcgacctgccgctggacatcatcgaccggcgcgtgacgaagatgaagatgatatcgccgtcgaacgtggcggtggacatcgggaggacgctgaagccgcacgagtacatcggcatggtgcggcgcgaggtgctggacgcttacctcagggaccgcgccaaggagtacggtgcgaacgtcatcaatggcttgttcttgaaaanggatattcctaaggataagaa

SEQ ID NO: 4444 - DNA, 281 bp, Glycine max
  unsure at all n locations
  Clone ID: 701001150H1
caagattggataattagccgaataatatcatggcttctatcttccctatttctcgtatgtccttcactgatttctctgcaccccttcccatttccataagttcctcatcttccacattcccantttcacaacancatgcaaacccactaaacatagcaaannaaaacgccatcatgtttccaaagtgtcatgcccatagtaaccaaaacaactcagcaccaaacccagaaganggaaaaccanataacaacattgtagacgaaaaaataggagngntgttc

SEQ ID NO: 4445 - DNA, 278 bp, Glycine max
  unsure at all n locations
  Clone ID: 701001151H1
ctctagagccacacccttcaagatttagctcatgcccacttcaattatggctccattttccacttccccccacttctcagccntcaccttcctcatcttgttcctcaaaacacaagcttntgatccactctctttcttttcctttacggattttgagaaagatccaaattttaagtcaagtgtggggcttatggcaatgcaaaagttgtcaataatggttctgaggttcttctttctgggaatggtgggagagtcatatacaagaagcccgtcaagct

SEQ ID NO: 4446 - DNA, 217 bp, Glycine max
  unsure at all n locations
  Clone ID: 701001152H1
aattgagctacttactataagatttagatctcccaacagagagtttcacaaaattgccaagtncccttttcaggatcaaggaagagaatcaagaaccaacnaaaggtgttgttcattgttgtagttgtttgtaactgtagcaacagggnagatggttggnaagttggttgtggtgaggcttgtgttggccatatctgtgttgagctctctccttctg

SEQ ID NO: 4447 - DNA, 275 bp, Glycine max
  unsure at all n locations
  Clone ID: 701001153H1
gtcatcgttgggatctccatacgccggatctgctaaaatacgcttgatccatatgggcctcctcgaccacttgtgggacgacaccgtcgccggcccaaggccggaaaacggtctcggcaagctccgaaaacaccacaccttcactttccgacctagctccggcaaggaaacggatngcgggagcgtgagatcgtacggagacgaatcgtcggaggaagcgacgagagtgacgcgtagtatcatgatcgtgaaaccgcccgggtaccagagtggat

SEQ ID NO: 4448 - DNA, 274 bp, Glycine max
  Clone ID: 701001154H1
gacaagcttgttgttcacatctccaagaacttcatgaccctgcccaacatcaaggttcctctcattcttggtatctggggaggcaagggacaaggaaaatctttccaatgtgagcttgtctttgccaagatgggaatcaaccccatcatgatgagtgctggagagttggaaagtggaaatgcaggagagccagcaaaactgatcaggcagagataccgtgaagctgcagacatgatcaagaagggaaagatgtgcgctctcttcatcaacgatc

SEQ ID NO: 4449 - DNA, 273 bp, Glycine max
  unsure at all n locations
  Clone ID: 701001155H1
ccaaatgggttaatcatcctgtgctacagtgtgcgcactgcgacacagtaaactttcctggcacggatgcaggcattgtggtcatggatggngaccgcatggtttcgcggtcgggccggcgcatgtttgagagagactatcgtgctgtaaccaagcatgtgtcgcctctctgcgagggcaccccgttgaatgtgatggtatctgcgattactcgaagtgaagtggacatattggtaaagaacctcgcaaagagtccagaagtgctggagtcgg

SEQ ID NO: 4450 - DNA, 276 bp, Glycine max
  Clone ID: 701001156H1
caagggatgagaaacttcctcgtcgcaaaatttttgacaaacctaagacgcgctgcttcactattctccctatggagtttaatcttgtggtccgtcaaaagtttttaaattttgtgaggttcattatgaagaaaagggacaagcttagttgtcaagttggaatcaacccatactccatggaatggactggtttggccaatagattactgagtaagggcaacgatattctgtgttgcgattatgctagttttgatggtttgattaccaagcaagtta

SEQ ID NO: 4451 - DNA, 274 bp, Glycine max
  unsure at all n locations
  Clone ID: 701001158H1
cgtatacgcgcgtgcagaacatctttatagcaggaacagacccgantcccgcgacaatagtttgggcaatgaatgcactgttgaagaatcccaatgtgatgagcaaggttcaaggagaagtgaganatctattcggtgacaaagatttcataaacgaagatgatgtcgaaagccttccttatctcaaagccgtggtgaaggagacattaagattattcccaccttcaccactacttttgccaagggtaacaatggaaacatgcaacatagaagg

SEQ ID NO: 4452 - DNA, 275 bp, Glycine max
  unsure at all n locations
  Clone ID: 701001159H1
ccaggaggcaccttcaacatgaccgagcaanggancgtggggagagccagtgaataatggatggatcgacattcagaacaggacattcacgaaatggtgcaacagccatctggcggagaaaatgctgaagatcggtgtgctggacaaggatttggaagatggtgtcttctctgctcacttcttgaagttatatcatccangaatgtcggaatgatcaacaagaaagccaagatccgtgctcagaaactggagaacacaggcgccgcgctcaagtt

SEQ ID NO: 4453 - DNA, 276 bp, Glycine max
  unsure at all n locations
  Clone ID: 701001160H1
ctgaaatataacatggtgattgtaagtccaattcttgaaaggganattaaccatggagaggttatatggaacactgccgttgtaattggaaatcatggcaatataattgggaaacacaggaagaaccatataccaagagttggagacttcaatgagagcacatattatatggaaggnaacaccggccaccctgtatttgaaacagcatttggaaaaattgccattaatatatgttatngtaggcaccatcctttaaattggttagcctttggcttg

SEQ ID NO: 4454 - DNA, 276 bp, Glycine max
  Clone ID: 701001162H1
aggttgttatgcgccgtaagtaatttgtttgttggattggaattgagaaaacagcaacaaggggaaatgggagatagagaagaacaaggcgagggtgctggctcctccttggaattggaagctcctattccagagacccaaaaagaaatcccaatttcagatggcatcgcattcaacaatcagagcgcgattttccaagccatcgaggttgtggaacgagactcgttggccatcgctcagagtttcacttctctcttcgcttccctccgattggcc

SEQ ID NO: 4455 - DNA, 274 bp, Glycine max
  Clone ID: 701001163H1
cctgtcctgtatattgataaaatgataacatcatggattaagatgaaaaagaacttttcaatcatttgagacagctgaagggaaaaagcaccttgcttctcatttattcataggaaaaaaagaagtgatgaatggactgtatctttattgtttattttagttcctctctttattttctcacccattgctcctgcttaatttgattcttgtcagtttctgtctggtaggtccattatcagaatttcattggaaaagagtaacatgtctctcacca

SEQ ID NO: 4456 - DNA, 286 bp, Glycine max
  unsure at all n locations
  Clone ID: 701001164H1
gnnatgatccagttgaggttnnnnacatgactgggatnccttaaganttcaattattgaaattgaataagtaaacaatttaattggattgggtcgaatggtatcaaaaanatggagtactaactcccatttcttattncattattgaattaaccgatcaacttgctttggttatcgaacatttctttttggatttccaaaaattttccggaaaaaatttggaatcnatttttatatgcgaatccatccctacttacttccnggtcctggaggtttctggcggctta

SEQ ID NO: 4457 - DNA, 280 bp, Glycine max
  unsure at all n locations
  Clone ID: 701001165H1
ccaaaagaaaattacaagtactagatcanaaagatgcagacagaaaaagaacagctgagttacagaatatttagaaggatatatatatactaccaaggnaaagattganacgcttgaggagtttgaaaaagtttctacaagtgaggaacgccagtccttcattgagaagcttgatcaggtgcaagattggttgtatacagatggtgaagatgccaatgcaacagagtttcaagagcatctagatcagttaaaagctgttggagatccaattttcttcagg

SEQ ID NO: 4458 - DNA, 278 bp, Glycine max
  Clone ID: 701001166H1
tttacgagaagataaagcacgagctagccggaaagggagaggaagacttcgaagttgtgctaatatccagcgaccgcgaccaagcatcctttgactcctactacagcaccatgccttggttagccttacctttcggtgacccagaaatcaagaacctcgttagacactacaacgtgcaagggattccctggttggtgatcataggccctgatggtaaaacaataaccgtacatggcaggagtttgataaacttgtaccaagaaaatgcgtaccctttc

SEQ ID NO: 4459 - DNA, 276 bp, Glycine max
  Clone ID: 701001167H1
caggaagttcattaaaagctcccaaatcattcttttcactatcaactttccgaagcaagggtagtgactcgaaacccagatgaaatttcactgagttggcctggcaagtaatttggatcatcctcaatggtaggggggtgatattaaatatgatacagaaaagagaggtaggctcgatacaatgatctatatgaaagatacatgagatgggggttatgtatattttcttggactcatgaggttttcccctatgatttagttagtcatggttgtgtt

SEQ ID NO: 4460 - DNA, 275 bp, Glycine max
  Clone ID: 701001168H1
ccatcatgatgagtgctggagagttggaaagtggaaatgcaggagagccagcaaaactgatcaggcagagataccgtgaagctgcagacatgatcaagaagggaaagatgtgcgctctcttcatcaacgatcttgatgcaggagctggtcgtcttggtggaaccacacaatacactgtgaacaaccagatggtgaatgccactctcatgaacattgctgataaccccaccaatgtgcagcttccaggtatgtacaacaaggaagagaacccccgt

SEQ ID NO: 4461 - DNA, 275 bp, Glycine max
  unsure at all n locations
  Clone ID: 701001169H1
catttctccatttccattttctctctcacttttcaagaatcgtaagcnatgggaaagtcttacccaactgtgagtgctgattaccagaaggccgttgagaaggcgaagaagaagctcagaggcttcatcgctgagaagagatgcgctcctctaatgctccgtttggcatggcactctgctggaacctttgacaagggcacgaagaccggtggacccttcggaaccatcaagcaccctgccgaactggctcacagcgctaacaacggtcttgacat

SEQ ID NO: 4462 - DNA, 272 bp, Glycine max
  unsure at all n locations
  Clone ID: 701001170H1
gcagtatgatggcacactgccaaaattgaatgaatattcaatgaagtaattgcctttgcntctcaataatggcaatcttatgatgatacaatttatgatccaagaattagctttctgctttgctgtttagtgtttaatagtaatttcatttgatcacgtttnattntcanagtttttatgctgtntgtcgccaatttagatgcattggaaattaattgtatgatgtctcgttccacanancaaaaaagntaaaaaannananngggacaang

SEQ ID NO: 4463 - DNA, 272 bp, Glycine max
  Clone ID: 701001171H1
cagtgtttttcatttcatcgtgcattcaatggccaccacagcagctctatccggaaccatggtgagcacctccttcatgaggaggcaacctatgaccaccacaagcctaaagacattccccaacgttggtgaagctctttttggtctgaaaagtggacgaggtggtcgtgtcacttgcatggcctcgtacaaggtgaagctcataaccccagaaggagaagtggagtttgaatgcccagatgatgttttcatgttgacaaggcagaggacga

SEQ ID NO: 4464 - DNA, 272 bp, Glycine max
  unsure at all n locations
  Clone ID: 701001173H1
tcggataaacacaatagctgtagctagagaggagattcgcagaancaagataagggatgtttgggttaatcggaagaaaggccaatttgttggtaggatcgggaacaagaagaaggtggttgagcttcgcagcaacagccacaaccacttctaatggtggtgccatggnggacntgctttcgcaactccaatctaatgtccaaaaggctcttgctggtggaggacccgaggcagtgaagaggaacaagagtaggaacaaatttctgccccgc

SEQ ID NO: 4465 - DNA, 269 bp, Glycine max
  unsure at all n locations
  Clone ID: 701001174H1
cggcttcgtggaatccatccacacgccgtcgcgctctcgctccccctccgcctcctccgacgacccctacttcggctcgcagttcctccaggnccttcgcctaatcgctcagtcggcgcgtgacgacgacgnnnnnnnnnnnnnnnnnnnaagccgctctccggagaacgatttcctcaggatcgagctcggtggctgggacaacgatgaggagaacgacaacgacaacaacgacgacgaggagttcgaggaacacgaggaggcggagg

SEQ ID NO: 4466 - DNA, 272 bp, Glycine max
  unsure at all n locations
  Clone ID: 701001175H1
ganaagttagggttcacaacttttccttttccttttgcttgcgaatctgaatcaaataatcaatcatccattcattattcatcatgtnntcggcgaagaaaatcacgctgaagagttcggacggcgaggctttcgaggtggaggaggcggtggcgctggagtcgcagacgattaaagcacatgatcgaggacgactgcgccgacagcggcatccctctgccgaacgtgacgagcaagatcctggcgaaggttatcgagtactgcaagaagca

SEQ ID NO: 4467 - DNA, 271 bp, Glycine max
  Clone ID: 701001176H1
aaggactgaaattttaaaggttcatggtagcaataaaaagtttgaagctgatgtttcacttgaggtaattgctatgagaacacctggttttagtggagcagatctggcaaacctgctgaacgaagctgctatattagctggtcgtcgtggaaagacagcaatttcttccaaagagattgatgattccattgataggattgtggctggaatggaaggaaccgtaatgacagatggaaagagcaaaagcttagtggcatatcatgaagttggg

SEQ ID NO: 4468 - DNA, 274 bp, Glycine max
  unsure at all n locations
  Clone ID: 701001177H1
gcaatgtctatgtgtaataatatnccagaaagggaagaagaagaccttcattattgcaagtaacngccaccctcagacaattgatatttgcaagacaagagctgatggttttgatctcaaggctgtgacagcagatcttaaggacattncattacaagtctggggatgtttgtggtgtgcttgtgcagtaccctgggcactgagggagaggtnttggactatggagagtttgtgaagaangctcatgctcatgaggtgaaggttgttatggcaa

SEQ ID NO: 4469 - DNA, 130 bp, Glycine max
  Clone ID: 701001178H1
aaatgcaatggcggcttctgttcccaaaatttctaggtgtctggataatagttgctaatactgtcttttgaaattgttcatttctgattcaatgtgaaactataaaattgttcacctctgtattttgatc

SEQ ID NO: 4470 - DNA, 273 bp, Glycine max
  unsure at all n locations
  Clone ID: 701001179H1
gcgggggacactactttgttaagtgagcccaagcctcctccctgccgtgacctggattcctgctgaagtgttgtatactttttgccttcaataatgtgaggcttgcatgtcttggagcttgccttaattgaaacattgtcagactgttagatgctcaaccaatttttgtatgaatcatcctggatggcttccgttcaaaaatttgttccataaacgccatccataaatttcttgggctggtttattacttaccagcgttatctatgcgttcng

SEQ ID NO: 4471 - DNA, 273 bp, Glycine max
  unsure at all n locations
  Clone ID: 701001182H1
gagtatatgatgacgaagtgaggaagtggatttctggtgttggtgttgacggcattgggaagaagcttgtgaactcaaaagatggacctccaacctttgagcagcccaagatgactctggagaagctcttgacgtatggtaacatgcttgtccaagaacaagagaatgtcaagagagtccaattggctgacaagtacttgaacgaggctgcacttggaaatgctncacgaggatgctattaacaggggaatttcttccaatcttgaattggag

SEQ ID NO: 4472 - DNA, 271 bp, Glycine max
  unsure at all n locations
  Clone ID: 701001184H1
cgacaatatgataaggtgctcaagcttgggtgcacaccatccattgacactcaaataccttaacatcccaaaaaagtcaaacctcccattcgtgaatttgaccagcaattccttccttcttccatctcttccccctaaagcncacaacaaccctctncaaatcccttcacagaagcttgcaaaacccttaaactctacaccaccctcatcgatcatggcttcaactaccacagaagacgacagcgagtaactacgacctttccccggtctc

SEQ ID NO: 4473 - DNA, 270 bp, Glycine max
  Clone ID: 701001185H1
aatgatataagcaaggcactaacaggaacaccatacgagagtttcatccacgaagattatcgtaggtagactggtgggtatgtacatacaccacgttttgcctttttcctttctttcccttttaacattcctctaatctttgttcacaagtcactactgcaagagccaacagggcaatacaaccaccctgttgaaattttggccatgtccttctctcatttttgtactcagttcatgttattttttttgtcttccccatccaattgatat

SEQ ID NO: 4474 - DNA, 268 bp, Glycine max
  Clone ID: 701001186H1
aacgtcgcagcgagcgagcgagcgatggaagaagaatattttgatttcgagaagaaggtttcgataaaggagacgatgtcgatggaggttgatccagccaaagtccttcttttgcttcgcggtttcctccaaattcagcaacgcagggccgaagcatattccaagctcaaatggttaataataattacttacaaggctttgcttggattccgccaaaatatatgcaaaatcatttcttctcgttatgatcgcatctcttatcttcgag

SEQ ID NO: 4475 - DNA, 268 bp, Glycine max
  Clone ID: 701001187H1
gttactttactggttgaccatcataatgatatgcgcttggacattgaggatatgtcttatgaggagcttcttgcattaggggagcggattggcaaagtaaacacaggtttgtcagaggaaatgattacaagtcaaatgaagacaaaaacttatttattactacctactaatgctattaacttggaggaggcagcttctgaggaacaggaaaatgattcttgcataatatgccaggatgaatataaaagccaagaaaagattggattct

SEQ ID NO: 4476 - DNA, 227 bp, Glycine max
  unsure at all n locations
  Clone ID: 701001188H1
aatgcatcgatcactgaaagtcgcggtgatcggcgccggcgtctcgggcctcgccgccgcgcgcgaactccgccacgagggccacaacgtcgtcgttttggaaaagtccaatcacgtgggcggcatgtgggcctacgacccaaanacagattccgacccattgggtctcgacccgacccgcgaaaccgtccacagtagcctctacctctcgctgcgcaccaactccc

SEQ ID NO: 4477 - DNA, 268 bp, Glycine max
  unsure at all n locations
  Clone ID: 701001189H1
attgcagcccctctgcttcttccaccataatccattgcntctcaaccctttgcaacccaccacactcgacccccaaacagccctcaacatgtctgtccaggatagagcccaggcccagctgtcgcagctcgacaaggagctgtccaagtaccccgcactcaacaactttgagaagcaaacgtcggttcccaaggtctacatggtctcggtctagccggcctttacttcttcctcatcttcttcaacattgctggagaattcctcgtca

SEQ ID NO: 4478 - DNA, 268 bp, Glycine max
  unsure at all n locations
  Clone ID: 701001190H1
gcattttcatattagttagagagattgggaactgntaaaattcaaaaggtaaagtggttaaaattagaaccaatttatttttgtnattaanattattgccaatttatttttctgtgtaaaattagtactaatttaatttttcttttatctttatatntttttacattctttttttaaaaataattatcttatnggagtnatacttattntttttatgggaaannataattacttgacatattaagtaaaanacaaaattactttgtng

SEQ ID NO: 4479 - DNA, 250 bp, Glycine max
  unsure at all n locations
  Clone ID: 701001191H1
cttgaggtctcttgctctactaaacngttattttcactctaccaataaaaatcttcgtgtatacctacttagagatctagcatcatgggagagcctacaacacaagaaatcattgatattgctaataattttctgctttcgagccctcctggagagtttatggaagttgttacagacgttagagctctcttacctaacgagtccatgatcaatgagagcgctcctagaacgttcagagagtacaatactg

SEQ ID NO: 4480 - DNA, 270 bp, Glycine max
  unsure at all n locations
  Clone ID: 701001192H1
catttttntttcttctaataatgaacctctcttttctttcttgggtcaattgaacatctaattttagattcctgtaaaaaaaacttgaatggttttaattatattatactccttagaaagaagacaatatttttnatttttttcactaaattttcattaagttaagctgtataagtttcttctctcattcatattgcacatttgcagctttagtttgcaagattgaagtgaagacacagtgaatatgtggctgtgtgctaccaaaagatg

SEQ ID NO: 4481 - DNA, 269 bp, Glycine max
  unsure at all n locations
  Clone ID: 701001193H1
ttgactcactgccatctgtatctgcatagcataaataccgcacgcacgcgattcctatgatttgttttttcactctgggcgatttnccctattctttttgagtgccgagcaaaaccctaatcgagttcgattgcaacacacctccgttgctgtattccaccttctccgacgaatggcaaccaaacctcttacaaccgaagctattgcgcttacagaaaagaagatggacatgacattagatgacataatcaaaatgtctaaaaatacga

SEQ ID NO: 4482 - DNA, 269 bp, Glycine max
  Clone ID: 701001195H1
ggttttgaagaattttgaagggttggatcttggaaagctgaacaagactagtgactcttttgctgcctcttatgctgctgaactatacgatcggtcactcaactggaaggatatcaaatggattcaaacaatcacttctttgcctattttattaaagggtgtacttactcctgaagatacaatgatagccatacaagctggagctgctggaatcattgtttccaatcacggagctcgccaacttgactatgtccctgcaactattatgg

SEQ ID NO: 4483 - DNA, 289 bp, Glycine max
  unsure at all n locations
  Clone ID: 701001201H1
gtgaatggcaatatttccngccaaacaacacctgcttggtaccaaaagcgagcaatatgttgatgcaccttcaatacttcattcttatccattgactctcttatgttcatttgcctcagcatctccatttttctccgattgattgcattttctgggattcttacagaatttgtccattggtccttttttagtcccacactttgtctggcacttgcagcagcattacaagagtccgcaaactcatcttcttcacttccatcacatccaatcggttcaccaaattcaaaat

SEQ ID NO: 4484 - DNA, 211 bp, Glycine max
  unsure at all n locations
  Clone ID: 701001203H1
tcgagcgattcgntgaggaatannntcccaagggtttaacntttggcnntttaatatgcgntcagantgtcatgagtccttctgttgcggggagggcaaatatggctgtaganttctacaggatatgcctcagntgagcattatcaagacagtnagtttaaaggcaaagacatgttctcngncagannctcangcgngtgtannntggngt

SEQ ID NO: 4485 - DNA, 295 bp, Glycine max
  unsure at all n locations
  Clone ID: 701001205H1
gttcctcattttgcaagcnttctttggnttcacaccatttttctattgacttcatcncaatataagagancattngtgtcggtangatcaccaccatattcnttnggncttcctgctggtnatttctangtttcgttcaatttggctttgaatttnctgctgcaaaccttanctaactgcaaagcnttggattacngantctaacnttacnggccacagtttgcctggttnaacnggagctcggtttttaactggtcntggantcaaggatngcccntaaaggccaattgggttg

SEQ ID NO: 4486 - DNA, 288 bp, Glycine max
  unsure at all n locations
  Clone ID: 701001207H1
ttnagaagaatgcggatttccaaagctaataaagganacatcccttggaacaaaggaaganagcacactcccgagactttgcaganaatcaaaganngaacaagggctcgcaatggcagaatcccnaaggttcaaaatggaagctcgttaatctgggcatgcacanactttcagacacnagangaaagttgggcnctggaatgagnagantggggaaagaggcctgggaaggagtggtgccngatcttgctggcttgagtggcggatttnattgcnggagcntctagg

SEQ ID NO: 4487 - DNA, 287 bp, Glycine max
  unsure at all n locations
  Clone ID: 701001208H1
ctttgtctttcttccacaaaattnagatatngcaagtgaaatganggccaggcacatctcattcttctcttgatatttctgatggcactcgctgcaaacaaagtttctagcagtcctattgtgacnacaagaacaggctctttgcagatcacatgaagaacnctatttttcctcgtgcaacaaggatcaatngnatacgttgtcgacatagcactggnacatggacatctganctatagaatgtcctccacncncagagntcaacctnattcatggatggttttggt

SEQ ID NO: 4488 - DNA, 281 bp, Glycine max
  unsure at all n locations
  Clone ID: 701001209H1
cagcggaagcatcgccgaacgcacacagttcgtggcctatctcatctactcctccttcctcaccggcttcgtctntccggtggtctcccactggttctggtccccagacggctgggcctctgcctttaagatcaccgaccggctattttccaccggcgtaatagacttcgccggttccggcgtagtccacatggtcggcggtagccggcctatggggancgctgatcgaaggcccaagaatgggacgtttcgatcatgcaggacgagctgtggccttgcga

SEQ ID NO: 4489 - DNA, 92 bp, Glycine max
  unsure at all n locations
  Clone ID: 701001210H1
gatgtacttgctgttaatacaagctacatggtttatcataaatagagtggnggnnataaatgancgagantatnacannnnatgcaactngt

SEQ ID NO: 4490 - DNA, 280 bp, Glycine max
  unsure at all n locations
  Clone ID: 701001211H1
caagattggataattagccgaataatatcatggcttctatcttccctatttctcgtatgtccttcactgatttctctgcaccccttcccatttccataagttcctcatcttccacattcccactttctncaaacaccatgcaaacccactaaacatagcaaaccaaaacgccatcatgtttccaaagtgtcatgccatagtaccaaaacnatcagcaccaaacccagaagaaggaaaaccatnccacaacattgtagcnggaaaaaataggagggtgttc

SEQ ID NO: 4491 - DNA, 275 bp, Glycine max
  unsure at all n locations
  Clone ID: 701001212H1
aagaacctgattattgaggtgataaataaatctgttaaattgcataaaattacccgtcatctagtgaagcattgttctttattttcatggttttcgtctctcatctccgttgccagacagaggcttaatggaaatgaaaataaacttttcttaaagnntgtgttggtagcattgaaggtaagtaagcgctgattctcatcggtttgtatttcctgttggatgcaggaaggtccttttgattttcctttgaaatgtgttgggattttctaaaatta

SEQ ID NO: 4492 - DNA, 254 bp, Glycine max
  unsure at all n locations
  Clone ID: 701001214H1
cttttccctctctctctcattgactcctctgattcattcaccccaatttttttctgtccncttttcctctcagaggagcctctgagtctgctcaggtgttccttgtcaagagatccttttgtttttgaggtgtgaagggaaagagaaaaaagatgaatcagtgtggttatcagcagagaaggccttgacaagctgtgaggagatgaggatggaatctgtggtgtgccctaaacctcgaagattgggctgttgaa

SEQ ID NO: 4493 - DNA, 120 bp, Glycine max
  unsure at all n locations
  Clone ID: 701001217H1
catnatanggttncttntnttcctgggcttgaactccacaaagccanggaagganaacanaccaaaccaaacntattcnttatttcccacttgttcaacctgnggtgnatatancccngg

SEQ ID NO: 4494 - DNA, 76 bp, Glycine max
  Clone ID: 701001218H1
ctcctttcttttgtgtaagactagcttcattgtggaattttataaataaatttcctgtttgatatgattttaaaaa

SEQ ID NO: 4495 - DNA, 170 bp, Glycine max
  unsure at all n locations
  Clone ID: 701001219H1
ttccagcaaatgaggtagtncanaanaaanacaatgtcaganaataaagtggaaatggcgaggggttcanagcaagctgttaatgnagcnagtntngtagaaaganatcctagcctgggccttgacaaagacaaaganatctacaacctctgaagnacttccaccnnngg

SEQ ID NO: 4496 - DNA, 291 bp, Glycine max
  unsure at all n locations
  Clone ID: 701001221H1
gagcttgcaaccagacaagaggcctgagttctggcaggttgttaagatattagagcaatttgaatcttcacttgccagtgatggaaccctgagcctggtgccaaatccttgttgggatcataagaaagggcttcttcattggattcaaaagctggtcccttgcaccaaaatagtngggccgtggcctaaaaccccaaattcntggaatctttccaagtggtccctggcttttattggtaacaccaaggtcccattgtaattaaaaatgaaaggttggtttttcaaggttcc

SEQ ID NO: 4497 - DNA, 282 bp, Glycine max
  unsure at all n locations
  Clone ID: 701001222H1
tgtctcaaacccaaagaacacggagttggcggcgaccctttctctctctgatttcgatcatggcagctgttgctccttcttctgacaaaactgcagatttattgcagaatttgactctggactctgagtccaaagccatggagttgctgagcctgcgaagaaagaatggactgctttttccaatgggggcanctaaaggggggccangccattcaatccaaattcatggnttggttccaaatggatacccntcngcgtaataatangggggntangatggnc

SEQ ID NO: 4498 - DNA, 283 bp, Glycine max
  unsure at all n locations
  Clone ID: 701001223H1
ggagctaacacagttgcagcactcagattgggctcagctgcctgagaacaaaggcaaacttattgtgactgttcatccaagcttcggtgaacgatacctatcatctgttctgttccaagagcttcgtcaagaagctgaaaacatgcagccagtagcagttgattaattccatgcataagcttgttgtggagttacattactggggcaacctagttatnacaatcctgttgtagcaaaaattgntaacatcatcttacaggtncggccatagcaaaaatngtcc

SEQ ID NO: 4499 - DNA, 281 bp, Glycine max
  unsure at all n locations
  Clone ID: 701001224H1
tttggccaaggccgttgccacagaagctgattctacgtttttcagtgtttcttcgtcagacctggtttcaaagtggatgggagaaagtgaaaagctggtctcaaatcttttccaaatggcacgcgaaagtgcaccttctatcatattcgttgatgaaatagactctctatgtggtcagcgtggagaagggaatgagagtaagcttcaaggcgtattaaaactgagcttctggtgcagatgnagggtgtaggacacaaatgatcagaaagttccttgttcca

SEQ ID NO: 4500 - DNA, 190 bp, Glycine max
  unsure at all n locations
  Clone ID: 701001226H1
gaagttgtgatggaacttgcgtgtaacattcttagcattctcaatgtcttaggtgcaaagagaagatgctaagtttgagatgatcttactatatttttcatattggnccgtcttcctctataattttaagtggacactgtaactcaaaattatagaggaagacggtccacttaaattgaatttggtgcct

SEQ ID NO: 4501 - DNA, 275 bp, Glycine max
  Clone ID: 701001227H1
gatttggtgagaatgtcagcgagttgaacaaatgtagaaaatgaggcaaggtgataacttgatggtcttacgactcccagactgagtgacaatcaacctctatgtgcttcgttcttttatggtaaacaggatttgtggcaatttgaatggcacttgtattgtcaacatgcagtggagttggttttgcttgtgaaaaccaagctttgaaaggagaccgtgtagccaaataatcttagagcatgtagcagacatggtatggtattctgttttagtgg

SEQ ID NO: 4502 - DNA, 274 bp, Glycine max
  unsure at all n locations
  Clone ID: 701001228H1
agcagaccnacaaggacagatggaagggtcttgcctatgatatctcagacgaccaacaagacatcacaagaggaaagggtttggttgactcccttttccaagctccacaggatgctggaacncactatgcagtcatgagctcctacgagtacctcagcactggacttcgccagtacttggacaacaaaatggatgttctacattgctccagcttttatggacaagcttgttgttcacatctccaagaacttcatgaccctgcccaacatcaagg

SEQ ID NO: 4503 - DNA, 139 bp, Glycine max
  Clone ID: 701001229H1
gttgatagagaacagaaacacacaagtttgctaccaattacatcaactagctatttttgtggtgatggaaataaagttgtaatacctaagaaactttaaacactatatatatctttctatcctatcagtatgttgccat

SEQ ID NO: 4504 - DNA, 159 bp, Glycine max
  Clone ID: 701001231H1
aaaatcagggtcccctcaatcaaaaaacttcttcttgttctgttgtgtccatatgttatattttattttatgatatacatagaagctgttcttctgatctaattttatgagatcaagtgttggttcttctccatctagtactattatttttcccctgta

SEQ ID NO: 4505 - DNA, 268 bp, Glycine max
  unsure at all n locations
  Clone ID: 701001232H1
attatcgtgaatgcgtataaaaggaaaataaagaaattagcgncaaaatgttgggtgtgttcagcagctccatagtgtcgccnccggacgagctcgtngccgccggcagccgtactccgtcgccgaagatgacggcggcggcgctgcggaagcggttcgaggagaagaacccctccgccgtntcggtggagcggagagcatgtccagctcgcttatacccaccacaacgagtcgccgtttcagcccagatcctttgctgtcaaggatg

SEQ ID NO: 4506 - DNA, 276 bp, Glycine max
  Clone ID: 701001233H1
attagagtttttttcataaagattttcagatccgtttacaacaagccttaattgttgattctgtagtcgtagattaaggtttttttcatgaactacttcagatccgttaaacaacagccttatttgttgatacttcagtcgtttttcaagaaattgttcagatccgttgataaaagccttattcgttgattctgtagtatttcaagagatattgcccagatgcagatcttcgtcaagaccctcaccggaaagaccatcacccttgaggggaagctc

SEQ ID NO: 4507 - DNA, 127 bp, Glycine max
  unsure at all n locations
  Clone ID: 701001234H1
aagattttntagatacaganaacaaagtaaaattctggggnnntttattccncaattancaatactannattcaaanaaaggagagtaatgagtataatctttcgctcagacgatgtactgntatat

SEQ ID NO: 4508 - DNA, 277 bp, Glycine max
  unsure at all n locations
  Clone ID: 701001235H1
attaacataaaaaacctctctttctctatttcttttattattgggtatgtcttgaagttcttctgaatttgaagcatatatttgtccttgaatggaaacacgtgctggaagtgatatgaagatggccatagatgatgcttgaacggccttctctcctgtttccacccccaggattttctgggaaatcacgagggagatgctagcgggaggaatttagaggttccgaagaaactgctataaaccncccnggcaagccgggangtaaacccctcncncc

SEQ ID NO: 4509 - DNA, 288 bp, Glycine max
  unsure at all n locations
  Clone ID: 701001236H1
ggaacgaagnacaaagcgctgggatcganaatcttgattcggtttgatttttacgttttnnacttctgattcaacgcgcttttcgacaagcttgatacgctcttggatttttgcnggattcgatcgatcgtaattncnttggnaatcatgacntcaggcgggttngnggncttgaaccggtnatgggacggaanccggttggggancgagaanattccgaatctgnaccgntttgccggntttnaagttttncccaagaatgggngggcnatnggnaaggggcccctt

SEQ ID NO: 4510 - DNA, 280 bp, Glycine max
  unsure at all n locations
  Clone ID: 701001237H1
agatcacccaagagagaacctaagacacacaacacaacacaaacacacagagttagaggagaaatcatcatggcatcagcagcatctggntttgtgttgtcacttaatgttgcagctgccaccacaaactcaagggtggtcatgttcaacacnaagaacaacgcttctaggcttgttgtaagggcttcagatgngcctngcggcggnaaccggcaccgccacacccccagctgaagctggagctaaaccaaagccaccacctattggccccaagngaggg

SEQ ID NO: 4511 - DNA, 218 bp, Glycine max
  unsure at all n locations
  Clone ID: 701001238H1
gacactgcaatctagaaaaaaaaaaanggttcgaactnctgatgcacnnaaagccttcangtccgatcatgacatgtaccctttagntcacaaggacgaagacggttttctttgangaaattgtggccaaanccatggggggttttgggggatgctgcncttgatggatatgagaggcttactaaggngactgatanatcggggggtcaagcaaaaag

SEQ ID NO: 4512 - DNA, 276 bp, Glycine max
  unsure at all n locations
  Clone ID: 701001240H1
cattgacctaaatgtagctaagagtctcttcaaggattagcaacgcaaaaatcattctaattatagattgtgacatgtactcaaaccattcacaatcagtgagagatgccctttgttttttcatggatgaagagaaaggccaagaaattgcttttgtgcagtttcctcaaaattttgagaacctcggtaagaatgatgtatgggaatgctatatcagccactgtggaggtgagttagataatattgatggactagaataatgttcctcccgnaaga

SEQ ID NO: 4513 - DNA, 272 bp, Glycine max
  unsure at all n locations
  Clone ID: 701001241H1
gtcttgcaattgaagttgaagtcttgcccttctctcttcaactccaaacacaagacatcatcatccatggctgcctccgtctccactgtcggagctgtcaacagagctcttttgaacctgaatgggtctggacctggggtttcagctcccagttcatccttctttgggagcagcttgaagaaggttattggctcgggtccccaacacaaagattcctcnggaagcttcaagatgttgcngtagaagagaagaaagagattgaagagacccag

SEQ ID NO: 4514 - DNA, 271 bp, Glycine max
  unsure at all n locations
  Clone ID: 701001243H1
canagatttaaccaaatgcaattcatatganaaaagccaattaattctttacaaagaacaacaagtaaacgcattnnnnnnnnnnnnnnnnnnnnnnnntagatacgatcttttatcctataattttatcaattatgcagataagaaagactcatatatttatggntatagatccctatttcaagtaaaaaaaacaagtgatttcttctaattacaacacgtataaaaaagattattggaatcatagatatcnctttatccaggattatat

SEQ ID NO: 4515 - DNA, 249 bp, Glycine max
  unsure at all n locations
  Clone ID: 701001244H1
cttttccctctctctctcattgcncctctgattcattcaacccaatttttttctgtcctcactttcctctcagaggagcctctgagtctgctcaggtgttccttgtcaagagatccttttgtttttgaggtgtgaagggaaagagaaaaaagatgaatcagtgtggttatcaagaagaaggcctgacaagctgtgaggagatgaggatggaatctgtggngtgccctaaacctcgaagattgggctgtt

SEQ ID NO: 4516 - DNA, 269 bp, Glycine max
  unsure at all n locations
  Clone ID: 701001245H1
tgttggtngcagtggtggcggcaagggtgcccgtggaatattcaacataggaaaagcaccagttactaaagtagacaaaaatgccaaaaacaagatctattttaaagatgttgctggctgtgatgaggcaaagcaagaaattatggagtttgtccacttcctcaagaacccaaagaaatatgaagaacttgtgcaaaaattccaaaaggtgctctcttggttggtcctccaggcacaggaaaaacccttttagcaaaagctacagcagg

SEQ ID NO: 4517 - DNA, 268 bp, Glycine max
  unsure at all n locations
  Clone ID: 701001246H1
cgacaatatgataaggtgctcaagcttgggtgcacaccatccattgacactcaaataccttaacatcccaaaaaagtcaaacctcccattcgtgaatttgaccagcaattccttccttcttccatctcttccccctaaagcacacaacaaccctctncaaatcccttcacagaagcttgcaaaacccttaactctacaccaccctcatcgatcatggcttcaactaccacagaagacgacagcgagtaacctacgacctttccccggt

SEQ ID NO: 4518 - DNA, 266 bp, Glycine max
  unsure at all n locations
  Clone ID: 701001247H1
ttttctctctccatccaacatcgaaacncaggtcgttttgtgttccgccgaaggaaccggaggttgtagcaggctagcagctatggatttggcatccaatctcggtggcaagattgacaaagccgaagttctctctgccgttcagaagtatgagaagtatcatgtttgctatggaggtcaagaggaagaaggaaagctaattataccgatatggttaataaatactacgatcttgttaccagcttttatgagtttggctgggggga

SEQ ID NO: 4519 - DNA, 267 bp, Glycine max
  Clone ID: 701001248H1
gttgtgaccacaatagtccagaataatcctcgaagtcagcaacttgttatggaagcaaatggctttgaacctcttatttctaattttagttcggatcctgacgtgactgttagaactaaagcactgggtgcaatatcttcactaattcggcacaacaaaccaggcattactgcatttcgtttgggcaaagggtatgcagctttgaaagatgctctagcctctgaaaatgtgagatttcaaaggaaagctctcaacttgatccattac

SEQ ID NO: 4520 - DNA, 274 bp, Glycine max
  unsure at all n locations
  Clone ID: 701001250H1
gtccaactcctactggaagaattcacaaaggagtatgttcaacctggatgaagaatgccattcccttagagaaaagccgtgactgtagttgggctcctatttttatcagaacatcaaacttcaagttaccagctgatcattccattcctattattatggttggtcctgggtacaggcctggcactttcaggggatttacaggaaagattggccctcaaagaggatgccgttcaacttggtcctgcataancnccccttggatgtaggaatcgac

SEQ ID NO: 4521 - DNA, 274 bp, Glycine max
  unsure at all n locations
  Clone ID: 701001251H1
attaacataaaanacctctctttctctatttcntttattattgggtatgtcttgaagttcttctgaatttgaagcatatatttgtccttgaatggaaacacgtgctggaagtgannnnnagatggcnatagatgatgcttgaacggcttctctnctgnttccaccctcaggattttctggaatccacgaagggntcagctagccgggaggaatnagagggtatcagnagatactnctgataaancaaccagcnagcaggaaggtacnctcctcc

SEQ ID NO: 4522 - DNA, 277 bp, Glycine max
  unsure at all n locations
  Clone ID: 701001252H1
agcgcttctcctctttgtgttctgggctatgcttcttggcaagagttagatcggacgaggattgcgtgtacacggtgtacgttcggacgggttcgatcatcaagggaggcaccgattcagtaattggtctgaagcnatacnacnaatccggctaanggcatatacnntaacnaacncgnagcanggggccgggtaaggaacccgggtcannaantactangacgggggncancntccgacattttcantggtaaaggccttncttggaacacccttt

SEQ ID NO: 4523 - DNA, 274 bp, Glycine max
  unsure at all n locations
  Clone ID: 701001253H1
gcttttcacaaacaagaattaaatctcaaccattttcgagcacatccangnnnnnnntgcccgaaaccctaacgcaaaacgatatcaactcgaagaccgacccttcggtcgcaaagcagtacgacaatgagacaccaaaggnccagcaaatccaggagtctttaagctagtngnctcanagaaggtttgcntgctgacacctatagaaatggtnntgggcccatngggtgntngnggtaatgggnaanggaacggttccgattnctttccttgg

SEQ ID NO: 4524 - DNA, 275 bp, Glycine max
  unsure at all n locations
  Clone ID: 701001254H1
gtcttgcaattgaagttgaagtcttgcccttctctcttcaactccaaacacaagacatcatcatccatggctgcctccgtctccactgtcggagctgtcaacagagctcttttgaacctgaatgggtctggactggggtttcagctcccagttcatccttctttgggagcagcttgaagaaggttgggctcaaggtccccaacacaaagatttcctcnggnagcttcaagattgttgcngtagaagagnaggaagagattgaagannccnncngg

SEQ ID NO: 4525 - DNA, 277 bp, Glycine max
  unsure at all n locations
  Clone ID: 701001255H1
aatactctagttaagccaatatgtcaagttacccctccaggaccgagcttgcatagttctccggccaganaagagggtgaagtgcctgaatcagaattagacctagataccaggcgtaggcttctcatattgcaacatgggcaagatacaagggagcncacgtcaagtgaacccccaattcccgtcagacacccngacnagttttctggttcccagtgtcccgtcacgtaagggatggttttctgtaagagaggagatgggttcacaacaactaaat

SEQ ID NO: 4526 - DNA, 274 bp, Glycine max
  unsure at all n locations
  Clone ID: 701001256H1
ctggtcatcgttgggatctccatacgccggatctgctaaaatacgcttgatccatatgggcctcctcgaccacttgtgggacgacaccgtcgccggcccaaggccggaaaacggtctcggcaagctccgaaaacaccacaccttcactttccgacctagctccggcaaggaaacggagggcgggagcgtgagattacggagacgaatcgtcggaggaagcgacgngagtgacgccttagtatcatgatcgtgaaccgcccgggtaccagagtgg

SEQ ID NO: 4527 - DNA, 267 bp, Glycine max
  unsure at all n locations
  Clone ID: 701001257H1
gggacaaccccagtaccagattgtgaactagctcatcagttcagtagatcaaacattgttcctgatagtggcttatcccctgctatcagagaagaaagtaactttcacattgcaaaggagccattgcagtcaatggttaaaagccacttgaagaacttgtctcaaaatattgatttagatgttgttgttgcctccctttgtgtacatcgatcaggtgaaaaactcattacagataggatganatttctggccagaattcctggggtg

SEQ ID NO: 4528 - DNA, 268 bp, Glycine max
  Clone ID: 701001258H1
ttttcagttccagaaaccgtatcatcacgcgcagtacgtgaagacggaggagcacaatttcttgagcgccgacgaggcctgcaatttcttctccgatgaacaagcaccgaccctgcaatggtactgtccagaacagtggagctgagatagaagaaacatgggaaaattggaaaccgctttcagaaattttgtttaatatgttgcacggttgtgttgaacactgctcatgaggtaaaagttgtaaaaaaaggttgccattgccaacagg

SEQ ID NO: 4529 - DNA, 267 bp, Glycine max
  Clone ID: 701001259H1
aaactattaccattataaggataacagggtactcccttctcacgttgatgccgaacttgccaatgctcaagcttggtggtacaagccggactatattatcaacgagcttaacataaactccgtgataaccacgccttgccacgaggagatcttgcccatcaactcatggactactcagatgccttattctcagaggctatgcgtattccggtggtgggagaaaggtgacacgtgttgaggtaaccctgggacggaggtgaaacgtgg

SEQ ID NO: 4530 - DNA, 265 bp, Glycine max
  unsure at all n locations
  Clone ID: 701001260H1
agccatggctttgcttccgagactatgactgcaactggaacgtggacatcctgcaggagtttgcaagcaatgtagcncatgcaagatggtggaaggtgcatgatgcaatgccaganaacttgcagaagttctgtttgcttaggtccaagcagaaggctgcattagagtgggatcgtcgacaagctgaagngaaactacagtgatggtcactggaaaattaagataaaagacccaagattgaacacttgctttgaggatttctgtt

SEQ ID NO: 4531 - DNA, 263 bp, Glycine max
  Clone ID: 701001261H1
gcagtattaattctcccaactatggaccattacctcctgatgctcctgcttggtgtcaggccccttttgatcctgaaggactcctaagttcagtgatggctattgtcacctgcttgattgggttgcactatggacatattattgtccattttaaggaccacagagtgagaatcatatactggatgacccaacctcttgtcttttagtttttggccttgcgttggacttatttggaatgcatataaataaggttctctactcgc

SEQ ID NO: 4532 - DNA, 262 bp, Glycine max
  unsure at all n locations
  Clone ID: 701001262H1
agacgaggcactggagcctgctgatctctacaaccgcaacctgagagtggtggatgttggangtggaactgggcttcaccactcttggtatagtgaagcatgtggacgccaaaaacgttacaattctcgaccagtcgccacaccagctcgccaaggctaagcagaaggagcccttgaaagaatgcaattgttgaaggggatgctgaagatcttccatttccaatgattatgctgatagatatgtttctgctggaagtattga

SEQ ID NO: 4533 - DNA, 173 bp, Glycine max
  unsure at all n locations
  Clone ID: 701001263H1
gnggnaattcgaacaatgaatttntcattttctttttaatacttttttggtttagactccctaagaatctgtcgatatttccaattaaatctcttgttcctgtgaaggtcctataaaaaaaagggctatgccctttcttactcagaagggcttattccaagttccacacaaca

SEQ ID NO: 4534 - DNA, 273 bp, Glycine max
  unsure at all n locations
  Clone ID: 701001264H1
attancgngnatncgtataaaagcngttatagagataattagacgncgaanctagattatgntccattcactcacataatnatccgtgacccatttcagtntcgtccntaacgccacataaattcaggttcaaaatctcacctttgttgattttgggcgaggattttgagaatggttgtgngcgggggtgctaagtnatttgagaagaggcaatggttcttctcataatgttgtcaatgggctatagcagtgatggagatcttgcagattagc

SEQ ID NO: 4535 - DNA, 266 bp, Glycine max
  Clone ID: 701001265H1
cttatcaactggtgtaggaagcaaatcgaagccatgtaccaagtttttcagcactgctggttgcccattcggtgagggctgccacttcctgcactatgttcccggtggttataatgcagttgcccatatgatgaatctaacacctgcagcacctcttcaaccaacaagaaatgtgaagctctgcctcatgactaatgggtctgcacatctgccgttaagacccgcatatgcaacaagtttaatactgctgaaggtgcaatttggtg

SEQ ID NO: 4536 - DNA, 273 bp, Glycine max
  unsure at all n locations
  Clone ID: 701001269H1
aagaacgctcgcccgcaccgtccagatcgtaatcaagagaagaggagcgagtntngtttttccttgcagcccaagccatggcgcctctgatcctgcatggtggaaaaaccaacaaaaattcttacaanacactcattgcggcggagtatgccggcgtccaagttgactttgccccaaatttttgagatgggngtccaataaaacncctgaatttctcaaggtcaatcctattggcaagggtcctgtgttggnaacacctgatggnccagtatt

SEQ ID NO: 4537 - DNA, 273 bp, Glycine max
  unsure at all n locations
  Clone ID: 701001270H1
gcagccgcttattggctggnagtgaggntcttgcaaattctttaaagacaacaactgatattcaaaacatatctttcctagatgctgcatgatctgctgggtattcaaaaaatgaggatgacttatccagtgtatttttaaaganaggaacatattctgcttttgtagaactgcncataggacaagggccctaccgggaagatgaggnatancnatangccnagtcnctggccatgcnnccccagcnagtccaacagttggatttggaggcna

SEQ ID NO: 4538 - DNA, 271 bp, Glycine max
  unsure at all n locations
  Clone ID: 701001271H1
caaaactgtngggttgancagaatancccttctcaatngtnctancntttgtcagttttgatattgaatgaggaaaagtagtgagatgantgtgattagtagcagctctgccattggatatcaaaactgacaaaaaaaagacaattgagaaggctattctgttcaaccccacagttttcagtttcagttttttgtgtngttttgtgagcgtgtgtgtaacaaacagttacaagtacagaagagacattcccagtacgctactagctaggtt

SEQ ID NO: 4539 - DNA, 258 bp, Glycine max
  unsure at all n locations
  Clone ID: 701001273H1
gggaaacgttacctgtacatggaaacgtacatgcaccttcccctcctagaatgncggaggggtagtcccaatattggagacagatacaggtttatatccagggaaatgctatacagtactcgtgacaatcacttgggttctttgtggttggttgaagctaaccaaaacaatcatcctatctcttgattggnactatacatcccgatctcatgacacaaatccaggagacgttccttagaagaaccattgggtctcatg

SEQ ID NO: 4540 - DNA, 247 bp, Glycine max
  unsure at all n locations
  Clone ID: 701001274H1
cactcataacacaaagcacaaagcacnagctcatccttgagtnnaaaaatggcagcagcttcntccatggctctctcatccccatccttggctggcaaggccgtgaagctgggcccatcagccccagaagtgggaagggtgagcatgaggaagaccgtcaccaagcagtctcctcaggaagcccatggtacggcccagaccgagtcaagtacttgggcccattctctggcgagcccccgtcctacta

SEQ ID NO: 4541 - DNA, 262 bp, Glycine max
  unsure at all n locations
  Clone ID: 701001275H1
ttctggccattgttttcttcatttctggtttgctgcaccttctggttagattcctgtggagaccccaaactagagagcctgatgaattggacaatgtcactgctctccaaggccaattgcagcaactcttccacctccatgatgctgnggttgaccagtccttcattgacaccctccctgtgttcctacaaggccatcataggactcaagaagtacccctttgactgtgccgtttgtttgtgtgagtttgagctgaggacaa

SEQ ID NO: 4542 - DNA, 244 bp, Glycine max
  unsure at all n locations
  Clone ID: 701001276H1
attcaatctacatgaatgctntttnaaacacttactttntcctcctaatatttgaggcagacntgttgaacaaaagaaatcatgataggcagtctttatattgttcatgattttttttgtcattctnnttatataattagaaaccnaaaaggtagnagttaaaagggaaagtgtcaganaancaaggaaatgantaatataataatacaacaccatgatgctgaattngtggtgttttctatga

SEQ ID NO: 4543 - DNA, 243 bp, Glycine max
  unsure at all n locations
  Clone ID: 701001277H1
ctgagggcctgtgcggtgtctgaaccngaggggccatagtangggaccctttgaaccctaantctccacccaaacccattttcccgggaagttccctctgaaacgaagacgaaaatgcagaatcacaggctgaagcagcagcaacaagctctgatgcagcaagcttctccaacaacagtctctctaccaccctggtctccttgctcctcctcagattgaaccaattccaagtggaaatctgcc

SEQ ID NO: 4544 - DNA, 259 bp, Glycine max
  unsure at all n locations
  Clone ID: 701001279H1
gcgcactttatttcctttaactatatatattgatgtgtggatagttgatgttagctaccaaaatcacgtaaganttgtatagtcaaatttatcaacccagaaactgtgtaactctcttaacctctcaagtttatattttcagacatgcccttcatacttgttacttcaatactttacattgtattttagtctcccaataaaatgttgcacttgcatgcttgatttatgatgctatacatataatagagatttgttttat

SEQ ID NO: 4545 - DNA, 259 bp, Glycine max
  unsure at all n locations
  Clone ID: 701001280H1
gtgatgcgagttctgcagttgcatattttgaagaaagtgttcaatttctgtcgaagttgccaaaagatgatttggagattacccatacactttctgtttctcttaacaaaattggagatcttaaatattacgatggagaccttcaagctgcaagatcttactattttaaatctttgaatgtngacgtgatgctgtcaagcacaattcaaacgttccatcccaggttttagatgttgctgtctctcttgcgaaagttgcg

SEQ ID NO: 4546 - DNA, 149 bp, Glycine max
  unsure at all n locations
  Clone ID: 701001281H1
ggctctaacacttcgctcttcaatttcccttgtcaaccagaaagaaaccaaactcccaaaagccaaagacgaggttcccaccaaagtgttttactttggaaaaaccaacccatctttccgtctcagagcaaagagttccatgcaacana

SEQ ID NO: 4547 - DNA, 271 bp, Glycine max
  unsure at all n locations
  Clone ID: 701001282H1
gggactccagcttttcatcgacaaattgctgcacatttgncagaaaatgccattatggcaaantcgcaattttgtgtggaatgggacattgtttgtctcggagaagcaaagaaacatggtattctgggatgaaggaaaaatttgtacaaatgatgaagagcatctatgaacacagaanttacagattgggcataccactggaaatcttttcnggaancattcntgcaacaattttgggaacaaccntcggaaactcctttcctttctagng

SEQ ID NO: 4548 - DNA, 280 bp, Glycine max
  unsure at all n locations
  Clone ID: 701001283H1
cnanaccactttctgnntctcttcantctaatggccatggcagcgtctgcaaagctcaacaccttgtcttcttcccagtggatcgcncacaattccttctntcctcgccgtggatcctcttctcgccgantctcnntntnggaacgngcttgttcttnacccaagacgaatttntccaaaacngccaaatgcctcgaataacncggncngtggaattcttggaattggcgnaatgaaaatgccacntgtngggngncgattagncacccaattggattng

SEQ ID NO: 4549 - DNA, 270 bp, Glycine max
  unsure at all n locations
  Clone ID: 701001284H1
ttttctctctccatccaacatcgaaacgccggtcgttttgtgttccgccgaaggaaccggaggttgtagcaggctagcagctatggatttggcatccaatctcggtggcaagattgacaaagccgaagttctctctgccgttcagaagtatgagnagtatccatgtttgcnatggagggcaagangganagggaangccaattaatacggnaatggtnaataatactaggatctggtaaccanctttaatgagtttggcnggggggaacc

SEQ ID NO: 4550 - DNA, 269 bp, Glycine max
  unsure at all n locations
  Clone ID: 701001285H1
gagaagaagcagaagaaacatactattccagagaaagcagagatccaaaaatgaattcatcacaaaagatatcaaaacattcccccatcagtgcgcganaaggctcacctgcaaaatttcgtcatgaggatttctctcctgaaagggtgtcaggtcatacagcttctgaacatcattatgataacgatgaggagtaagaaaggccgggagataaaacgtgataaatcttccagacaggacnatggatttccggttcaaagtcatcaatc

SEQ ID NO: 4551 - DNA, 264 bp, Glycine max
  unsure at all n locations
  Clone ID: 701001286H1
ggatgaggtattctgcttgtttgagggagcccttgacaatttgggcaacttgagacaacaatatggattggccaagtcaaccaatgaagtattgttggtcattgaggcttacaaagcattgcgtgacagagcaccctaccctgctaatcacgttgttggccatctcagtgggagctttgctttcatagttttgacaaatctacttctaccctctttgtggctctgatcaatatggtaaggtaccctatatggggattactgcng

SEQ ID NO: 4552 - DNA, 268 bp, Glycine max
  unsure at all n locations
  Clone ID: 701001287H1
ccttaatttctctcttcacttatcatcatacttatatattatataacccaataattaaattaaatacatgttagcactttaacattcctttctctaacctcgttcccactctcatattttcccttctgctgatattcagctaaactaagtcaataagatgactcagggaaagatagttgaagctgcagagctcataaaacacttgagggatttcgatcctccaaagangcgcaaaagggaacaagtatgntttgcttgtgcgtgctgg

SEQ ID NO: 4553 - DNA, 61 bp, Glycine max
  unsure at all n locations
  Clone ID: 701001288H1
ctcccatcctttcgcattctcaatacccttntgatttgtgaaaggaaagcnaacatggttg

SEQ ID NO: 4554 - DNA, 263 bp, Glycine max
  unsure at all n locations
  Clone ID: 701001289H1
atcaagttctatagtataagcnatggagtcccagagggtcatgtcccaggtggccacccagttgagagagtaaacttttttcttgaggctggtcctgagaacttgcaaaagggtatagacatggcagtggcagagactaaagagagtgtcacttgcatcatcgctgatgcttttgtcacaccttctccttgtggctcaacacttgaacgttccatgcgttctagtttggcctcctttgtcatgttctctctctgcacattttc

SEQ ID NO: 4555 - DNA, 263 bp, Glycine max
  unsure at all n locations
  Clone ID: 701001290H1
gttttccgttaaagaaccaaaacctgttggtttgatctccaagaaatcttctatctcatgtaaatcaacaggagcaaataatactgaagagaaagaaagtattacaacttatgatgatagggcacataccaaagatgagaaaaatgatcacactcttgttgttcatggcttggctgatgcttgngattcgtttgtaatgatgcaaagtttctctcacgtggcataatgaggttggatgctcgtgcacgtcaagatgttgcttt

SEQ ID NO: 4556 - DNA, 263 bp, Glycine max
  Clone ID: 701001291H1
cgacaaaatggttcgctacggtgcctcctccattgacggcgcaaagtctgctcgcgcccgcggcagctaacctccgcgtatccttcaagaacacccgcgagactgcccaggctgtcaacggctggaagctcgaccgcgccctcacctacctcggaaatgtcttggagcacaaggaggctatccccgaggcggtacgcgggcagcactggacgcactgctcagggcaaggctttcggtgtctccaaggcccgctggcccgtcaa

SEQ ID NO: 4557 - DNA, 263 bp, Glycine max
  Clone ID: 701001292H1
cgacgacaacttcgatgacaccctcgtatctgccatcaaaacctaccaaaagaattacaaccttcaacgtcaccggcaagttcgacatcaacactcttaaacaaatcatgacaccccggtgtggcgtccccgacataataatcaacacaaacaaaaccacatcgtttgggcatgatctcggacttaccttcttcaaagacatgccgcggtggcaagctggaaccacacaactcacctacgctttctccccggagccaagactt

SEQ ID NO: 4558 - DNA, 186 bp, Glycine max
  unsure at all n locations
  Clone ID: 701001293H1
cacttctatctcccaagangttcaaagcttcaaagatgtggactttgctgctagaagaggaaagttttaatgataatcgtgatcatgtgtttcaatcatatataatttttctgtgtttcttaattatttattattgtnatcattgttggaggggatctttgatttttgaattctattcatatttgg

SEQ ID NO: 4559 - DNA, 256 bp, Glycine max
  Clone ID: 701001294H1
cacaaccattgctgctggcttgtaaaaagcttgtagatttgtctgtttcacgaggctctttggatgacacaagtgttatgctaatcaaattggagcactatatttaaagttaccttagtacaacagaaggggaggtagtgcataaggttttagattattgcagttgagatcgcattgaggtaagattgcgttgcagtttgcgactttgaacagccttggtggtgcctgatggataagagtagctgattctttctgt

SEQ ID NO: 4560 - DNA, 254 bp, Glycine max
  unsure at all n locations
  Clone ID: 701001296H1
ttttgaacaagagagatgtggtatttcgatcatttctggaattgaattacaaaatgccctgttgtatcagctcaagttttatagctgcactatcttttgggaggtttctgatatatgtctctattaagatggaggattggaggtttttattcatcaatataagtctgcaggttcatcggtcagtttcgggggttctgangtaccttcaaggtgaaaaatnggttctctacgtagttagacnattttgatatgaa

SEQ ID NO: 4561 - DNA, 268 bp, Glycine max
  unsure at all n locations
  Clone ID: 701001301H1
agngaagctttgggagttgcgagatgaaaatggtgcnagaagatgngggatcttctggaggatgnggaagtcttcattattggcatagatggaatggggggagttggaaaaacattcatggcaactcatttcaagaatgagattaaaaganaggggactttcaaggatgtcttctgggtcactgtttcccatgatttcaccattttcaaattgcaacatcacattgcagaaacaatgcaggttaagctttacggagatgagatgacca

SEQ ID NO: 4562 - DNA, 299 bp, Glycine max
  Clone ID: 701001302H1
gccagacagctggaagctgagggagatatttgccactggtgttgtgctaggagcttacatggcataatgacagtagtatttttctggctcatgaaggataccgacttcttctcggacaagttcggtgtgaggtctataaggaacagccccggagaaatgatggcagccctgtacctacaagtcagtattataagtcaagcactaatttttgtgacaaggtcccgcagctggtcctatgttgaaagacctggtcttctcctactgagtgcttttatgattgcacaactggtgggcaattt

SEQ ID NO: 4563 - DNA, 298 bp, Glycine max
  Clone ID: 701001303H1
caaaactttatcctttctctttctctttttttctttggggggagggggtgaatgaaaatttctggttactgtgcttttttctggttttaggatatgcattacttttgagggaatttggatctggaagagcttttagtgcatgaagattcttttctctctctcactctctcttcaattcatataattacttggggaccaacttccttgaatcgggcactggtagcttagctcgtgtaaatgtgtctctggcgctggaaattcatgagtaaaattaatttgtgagatcgagagctttgag

SEQ ID NO: 4564 - DNA, 300 bp, Glycine max
  Clone ID: 701001304H1
agagagagagcgagcagtttcagacacagagagaggggtttgggattggagggattgacgctgcgtcttcttcctcttctctttcgatccatccctcattcctaatcctccaatccaaccacctcagcctcacactcacatatacacatatctgaacgcgtatcgtccctcctatggcttcaaagcgcatcctcaaggagctcaaggacttgcagaaagacccaccaacttcttgcagcgctggtccagtagctgaggacatgttccattggcaagcaacaataatgggtcctgctgata

SEQ ID NO: 4565 - DNA, 296 bp, Glycine max
  Clone ID: 701001306H1
ggatgataagagctggagggcttcaattcacaggtatgagactgggaagacgaggtatgcacattatcggccagtctgatgacatattggcagatgctggatggcattgtagcttttgcttccgccgaatcagcgatttcattttcaagatgaaagcctacagccattatgatagagtcaggttctctcactatttaaatcctgaaagaattcagaaggtaatctgcaaagggaccgatttatttgatatgctgccggaggagtacactttcagggatatcatggtaaaatgggac

SEQ ID NO: 4566 - DNA, 295 bp, Glycine max
  Clone ID: 701001307H1
tctcatatgtgcgccttctctgtgctatattcatctcagttcaaagtggctagtatagaagaaccataagccactgagggaaaaagtgattagtactttagccaacaaattaaaaatggctgtcaccaaggtctacattgtgtattactccttatatggacatgtagacaccatggctagagaagtacacagaggggctgctacagttgaaggtgttgaagcaacactttggagggtacctgagatgctttcggaataatattggataagttgaaggcccctcctaaaccaaatg

SEQ ID NO: 4567 - DNA, 302 bp, Glycine max
  unsure at all n locations
  Clone ID: 701001308H1
ctccgatggctaatctctcactcttgttcttcggtctcctcctattctccgcntgccgtagcnanccgtnggaagganttngnggatgaanacaagcttctgatccgtcaagtggtgccggacgcggaggaccaccacctgctcaacgcggagcaccacttctccgccttcaagacanagttcgccaagacctacgccacgcaggaggagcacgaccaccgcttccgtatcttcaagaacaacttgctccgcgccaagtcgcaccagaattggacccctccgccgtccacggcgtcaccagg

SEQ ID NO: 4568 - DNA, 297 bp, Glycine max
  Clone ID: 701001309H1
gcagcaccactgtgacactcagtgcagaagaaaatggcaaggtagtggttgctaagaagaatcctatggagactcagagggaaatcactgccatttggaagaagtttgtgttggagaggaagaagaacaatgacaagatgaatggtgtttgttagtgttagcttcaagggggtgttgtgcctatgcctctgccttattgtacttctttattatatatataatttgggcagtaagtacttttgattgagtcaagctatttatctgtttcagttgtttattgatgagaggcaaatatta

SEQ ID NO: 4569 - DNA, 297 bp, Glycine max
  Clone ID: 701001310H1
gcggaagttgcaactgaagtgaagctctttaacaagtggtcgtacgatgacatcagcgttgcagcggatattctcattggaagactacattgccgtgaagggtaaagccgccacgtttctgccgcatacggcgcaggctaccagaagaagcgctttcgtaaggcgcagtgccccattacagagcgtctggtgaatgcgttgatgcgcaaaggtcgtaactcgggcaaaaagctcaaggccacgcgtattgtcaagcacacgctggagattatccacttgctgacggacaagaatccg

SEQ ID NO: 4570 - DNA, 297 bp, Glycine max
  Clone ID: 701001312H1
ggcggtgagttggagctttgaccagtttgagcacacgagaattcagtgggcatgtcaatgggcaaaaaaacctgtgaaatactctctggttgacgcgtttactgagtcagtgttcaaaggaaaccctgcagcagtgtgtttcttagaagagaagagggacaaaaagtggttgcaaggagtagctgcagagttcaatctatctgtgacatgttacttaactcgcatcaccgagtcccatggaacaacctcttatcctcgttttgatctcagatggttcactcctgttagtgagattaa

SEQ ID NO: 4571 - DNA, 294 bp, Glycine max
  unsure at all n locations
  Clone ID: 701001313H1
ggtgatagtggtgatccaatggacatgntttttacggcaacttcctcctcggcctctggtggaggtgctgctgcgggcctctgatggatttggaacacaggatgattggggtttggattcggagtttggtgggggaggccatgatgtaggtggcaccactactgagcttgaggggctgcctcctcctccttccggggtgtcaggttccactgccaaaggcaaagggatggacaattacaagcaggggcagtttgccgatgctattaagtggctttcgtgggccgtcatccttct

SEQ ID NO: 4572 - DNA, 296 bp, Glycine max
  unsure at all n locations
  Clone ID: 701001314H1
ccatcgcttccgccaatntcttcttcgaagagcgtntcgatgacgggtgggaaaatcgatgggttaaattcagattggaaaaaagatgagaacgtggctggggagtggaaccacacctctggtcaatggaatggagacgctaatgacaaaggtattcaaaccagtgaggattacagattctatgctatttcagctgagtaccctgaattcagcaacaagggtaagacactagtctttcaattttctgttaagcacgaacagaagcttgactgtggtggtggctacatgaagttgct

SEQ ID NO: 4573 - DNA, 188 bp, Glycine max
  unsure at all n locations
  Clone ID: 701001315H1
ttacttccatcagnntgganggnanangnnttttncaataatatctatgaactagttnnagttcctgtaattcacaatgcanctcagatanaatggttgggttacagagttgcaggatctagaaaagtcaaggcnactggggnaanctgntnggttngataacctncnctatacacccgatgcagatt

SEQ ID NO: 4574 - DNA, 295 bp, Glycine max
  unsure at all n locations
  Clone ID: 701001316H1
gtgganggggaaactgactttcccccagggcacttcccgaagtgttaagagaatgcctctttctataggggggangngctggtgcaaagaatgctattctcatgaatatgccaaatgctgttctttcaatgtggagatattttgttggagatctcgtctttgaagtttctaagatgacttctccctacattaaatgtacagtctctttcttcatagcatttggaaatttggctgatgacaccatcaattttgaggctttccccacaagctggtgcagtttggagagattcaggaa

SEQ ID NO: 4575 - DNA, 130 bp, Glycine max
  unsure at all n locations
  Clone ID: 701001317H1
ataaagctggcgnattatctgtatttttgggtgtaccacttttttactgatgagaattgaacttaattaggaaattaaattgcacaaaaagcttcagaattgtcctatttattttgtgtacctttngaca

SEQ ID NO: 4576 - DNA, 296 bp, Glycine max
  unsure at all n locations
  Clone ID: 701001318H1
ggaggaggtgctgaaaaggtttcgtgggtcccagaccctgtcactggttactacaaaccggagaacatcaaagagattgatgttgctgagctgagagccacggttttgggcaaaaaattcaaccactaggctctacttaatttcaataattaacctttttggtctcacgtgaatatgttatatgatatatgangttcacanaaccttcggggattattcagcatggggtttttttcttgtatttctctcttgagaattggcctagcatatgaccaaattaatgtttactagtgtga

SEQ ID NO: 4577 - DNA, 296 bp, Glycine max
  unsure at all n locations
  Clone ID: 701001320H1
cttgtgaactccaaggaaggacctccaacctttgaccaaccgaagntgactttgagcaagcncttggagtatggtaacatgcttgtccaagaacaagagaatgtgaagagagtacaactggcagacaagtacttgaacgaggctgctcttggtgatgctaatcaggatgccatcaaaagaggaactttctatggcaaagcagcccagcaagtaaaaattcccgttcctgaaggttgtactgatccaaatgcctcaaacttcgacccaactgcaagaagtgatgatggaacctgctt

SEQ ID NO: 4578 - DNA, 176 bp, Glycine max
  unsure at all n locations
  Clone ID: 701001321H1
ccttcttcgaggacacaaccanaanggcaagcagnacgctccgagagcgctctcgtgtcccgnttntnctnccaaggcctttgagcaanntctcaatcaagcaatatatcnctcgagcagcgctagacgccgtcgagctcccccgagtcgatctcgaacctctcacacacaggtgg

SEQ ID NO: 4579 - DNA, 292 bp, Glycine max
  Clone ID: 701001322H1
tgcccttttgaatgaatgttatagcatatggttggcttcaggacttgaagaagcccttttgagtatagcaaatcagaataattttgagctagatggcatttcaagggaattagttgaatccattaagtatattcatgagcttgatgaacatgcacttcagagctttgtcatctctggagaacaaactacttgccagttgtcagccttgccagctggtttcataccagggttaaatttggtgaaatggaatgggaagcattacattgtcaaacttgcaaacttgtggatcaat

SEQ ID NO: 4580 - DNA, 297 bp, Glycine max
  unsure at all n locations
  Clone ID: 701001323H1
canagagtttcaagaagaggtagcctgtatcatgtattgcaatgctgcctttgagaagaaagaaggcttggttttcagcatattctgttgtggagagtaaaaagattcaagaagcaatcaaatatgtaactttcaatgtacaatttaatgaagaagattttgaagtgcaatgtgaatgtcatttgtttgagtttaaaggtattttatgcagacatatcctctctttgctcaagctcataaggnaaacagagtcagtgccatctaagtatgttttctcgcattggaggaaagatttga

SEQ ID NO: 4581 - DNA, 298 bp, Glycine max
  unsure at all n locations
  Clone ID: 701001324H1
ctcaaactctacatacaaatcaatcggatatgaacacacccaaaatgcattacaagactttgatcgatgaaaaatggacttaatatcactcgcttacgttaccttaagtacgttaactccactgtgcacagtgtcaacgacacaaaatacagaaggatgagttacaagaacagntcaactctgaaaaaggacttttatagtcttaaaaaggtcaacaagcttgangtgaatgangtccactcctaccacgtcacgtcatttgagcatgttcatagattgaccaagggattganaaagc

SEQ ID NO: 4582 - DNA, 294 bp, Glycine max
  unsure at all n locations
  Clone ID: 701001325H1
ttctgatgagcaaaaatttctggaagcgtctatggcttatgtgtctggaaaaccaatcttgagcgacaaaagagtttgatgagttgaaactcaggctaaagatgnaagggagtgaaattgtggctgaaggtccacggtgtagtcttcgtagtagaaaggtttacagtgacctgtctgttgactatttaaagatgttcttgctgaatgtcccagcaactgtggttgcactaggattgttcttcttccttgatgatgtgactggatttgagatctcatatctgataaagatccaga

SEQ ID NO: 4583 - DNA, 295 bp, Glycine max
  unsure at all n locations
  Clone ID: 701001327H1
ccatgactccctacatttttggngtcgtcgtccctctcttagtcactctcatcatccgcaacaactccaaaccccaaacgacgtcgcggcgtcccggtcgaagtcgggggcgaacccggtctagcaatccggaaccgccggttcgaggccccggtccagagcgcgtgggagggggtcgccacgctggcggagtcttcgaagaagcctgcaagacgcacgcggagaggctcctgctcggcacgcgcggggtgctgcagagggaagtggagaccggccaagacggcaggtcgtttga

SEQ ID NO: 4584 - DNA, 294 bp, Glycine max
  Clone ID: 701001328H1
tctctttctctttctctgtctgcttcttcactttctctcgtttcaatcgaaaaaaatcatgggcagaaaaattcttcgtcggtggcaactggaaatgcaatgggaccactgaggaggtgaagaagattgttactactttaaatgaagctaaagtccctggagaagatgttgtagaagttgttgtgagccctccttttgtgttccttccttttgtaaaaagtttgctgcgccctgatttccatgtctcggcccaaaattgttgggttcgcaaaggtggtgcttatactggagagg

SEQ ID NO: 4585 - DNA, 292 bp, Glycine max
  unsure at all n locations
  Clone ID: 701001329H1
gcagaagaacaagtagttgagaactaagaaggagaagcaaatggcttcctcaatgatctcttccccagtgttaancactgtcaaccgtgccggtgccggcatggttgctccattcactggcctcaagtccatggctggcttccccaccaggaagaccaacaatgacattacctccattgctagcaacggtggaagagtgcaatgcatgcaggtgtggccaccagttggcaagaagaagtttnagactctttcctacctgccagaccttgatgatgcacaattggcaaaggaa

SEQ ID NO: 4586 - DNA, 293 bp, Glycine max
  Clone ID: 701001330H1
cagttgccagcattgaaaagcttgcatcttgagcatgtcactctaactgcaggtgaaggtgactgtggcggaggccttttcaacttgtcacatgttgaatactttggtcattgaccggtgtaacttgcatcatggtgcaaaattcctctgcatatgtaattccaacctttctactttgaccataggtagtaccattcaagaaacaccctacaaatttatactttctactcccaaatcttagatctctttccgtgatgcgtgatcctattcaccaatctctgcttgcaatcttt

SEQ ID NO: 4587 - DNA, 293 bp, Glycine max
  Clone ID: 701001331H1
caaacccgtgttctgatgcatggagtttggaatttctgaagcgtaccggatttcattgtgatatcatttgtgtcactgggatggactgccactccaatgcaggatgttcaggttacaattgattggtttatttcctctcaggaatgtgttcccaggacttattgtgttttaaatccacaaaatccttttgtgttgaataggtggatggggaaactgactttcccccagggcacttcccgaagtgttaagagaatgcctctttctatagggggaggagctggtgcaaagaatgc

SEQ ID NO: 4588 - DNA, 298 bp, Glycine max
  unsure at all n locations
  Clone ID: 701001332H1
tccctcactgtcccaaaccattgtgttcccaccttgcttcgcactcactctcccaaccacccatcttcccaaaaactcccatttccttccacaccatcaaattctcaatttttcggcctcaagttatctcattcttctgtttcatctatcccttcatcttcttcactcaaaggcaccattttcgccaaggtgaataaaggttcaaagccacccnncntttacgctgaaagatcagaatgggaagaatgtgagcctctccaacttcaaaggaaaaccagtaattgtgtatttctaccct

SEQ ID NO: 4589 - DNA, 299 bp, Glycine max
  Clone ID: 701001333H1
gttaccatgcctgagagcacagattcttccagcaaggttgtcagacttttatatacaaactctgctgttggtaattttggcccttggttcaaatggtatccagaagctttggaaatgggctcgcagtgaacagaatcctactgggaaggctactgccaatgttgttccactgcattggcaacccaacaatggtcttcttatgactaatgatatctcgggcgtcaaccttgaagaagcagtaccttgcattgccctctcaaaaaatgactcatacgttatgtctgcctgtggtggaaagg

SEQ ID NO: 4590 - DNA, 297 bp, Glycine max
  unsure at all n locations
  Clone ID: 701001334H1
cttccttattttcttccaaatctcaccacccagaaagcacaaaanctacacacatatccaatcttttcntttttcttcatttcgtccaccagattcatacacaattcacgtatacgtacaattattaaaaggaagagatggcaggagaatcatacgaggaagccatcacgagtctgaccaagcttctcagtgagaaagctgagctcggtggcgttgccgccgcaaagataaaggagctgacggcggagttgatgccgccggttcgaagccgtttaacccggaggagaggatcagaac

SEQ ID NO: 4591 - DNA, 295 bp, Glycine max
  unsure at all n locations
  Clone ID: 701001335H1
ttcgttttgaatctcttatttctttcaggtgaaagaaagactttaagtatgggaaatgnagaatcaacancatgcttctcatgatgattttntccggcaaccccgttcccatgatggacgttcaccgaatactagccatcaatatcatcaacccccttcctatgatggaagttcagcgaatactagccatcaatatcatcaaccctcatcatatgctgggagttcggtgaataccagacatcaatataagcagcgacccacatatatagctgacagtttcagttcattggatcag

SEQ ID NO: 4592 - DNA, 293 bp, Glycine max
  unsure at all n locations
  Clone ID: 701001336H1
cacctggtcaatcccttgccattggaacgcctggaatatcagcctctcctttacttgcagagttcactggtcntgatggtgctcatggtaattctttagcacccacttctggaaagtcaactgttactgagcagcctattgagcgcctaataaaagcggtgaaatcaatgtcaccaaaagcattaagttctgctgtcagtgatattggttcagttgtcagcatgaacgatagaatagcaggatcagctccaggtaatggatccagagctgctgttggcgaagatttggttgct

SEQ ID NO: 4593 - DNA, 291 bp, Glycine max
  unsure at all n locations
  Clone ID: 701001337H1
catggagntgtaggtggaggatagtgatcgtggttattgattgaaggataataatatattgcatagtagttgaaatttgtataatagctttgtgcngcaacatggggtgcatcgcttccaagagtgcngctgttgaagacagcagggaaggtgtggcaagggaattcacttcatccagcaaaagggcggcctcgaagatgaaggcttccgtattgaattcggagaaaaggatcgatggggtttgggggaaagataagattttggatggtgctgatatgaaagtttcattna

SEQ ID NO: 4594 - DNA, 293 bp, Glycine max
  Clone ID: 701001338H1
ggagcaccgcaatcgcaagggtttgttcgatttcattgtcttctttgtctcgctggtcaattctcaccagtgccccaaacataaacaatctcaacgcacaatcgcacatagcctaatcctaaacgcatcgtttcgcgctaaatgcttcgcaacagagtgcgctagcttgtttgctcagactcactggcgccatggctctttcactcggcaagctcttcattctcgtcggcgcaggtatagctggttcagtaattgcaaaagaagggcgtctgccagatgtctctggtctcgcc

SEQ ID NO: 4595 - DNA, 290 bp, Glycine max
  unsure at all n locations
  Clone ID: 701001339H1
ggctattgagttacgtgaaattgtgacatctttgggtccagcatacataaaacttgngcaagcattgaggcattcgacctgatatactgtcacctgtagcaatgacggagctgcagaagctttgtgataaagttccttcatttgcagatgatgtggctatggctctaattgaggaggagcttggtcagccatggcaaaacatctattctgaactatcatcttctcccattgcagctgcatctcttggacaggtatataagggtcgcctaatagaaaatggggatttggtg

SEQ ID NO: 4596 - DNA, 292 bp, Glycine max
  Clone ID: 701001341H1
gcgcattctttgagtgattcttttgctcaggatttgacagggggtgcattggtgccagtagaaggacctgattatcctctttttgctcttgaaataaaccctgagaagtctagggaagagtttcgaaatgccgcccagaaaaatggtggaactggagtcaaagacttcatggatggcatgggtcttggaatgattgcagaccagttgggagaactaaaactgggagaattactggattctcctcctcctggactggatgaagctattgcgatctccaaggttatgcaatttc

SEQ ID NO: 4597 - DNA, 281 bp, Glycine max
  Clone ID: 701001342H1
ctggcatggacttggtaatcatacctgctggggtaccaaggaaacctgggatgacccgagatgatttatttaaaataaatgctggaattgtgaggaccctttgtgaaggaattgccaagagctgccccaatgcaattgtcaacttgattagtaatccagtgaattccacagttgctattgctgcagaggttttcaagaaagccggtacatatgatccaaagcgactactgggtgttacgacccttgatgttgtgagggcaaatacttttgtggcagaggta

SEQ ID NO: 4598 - DNA, 282 bp, Glycine max
  unsure at all n locations
  Clone ID: 701001344H1
cttggactgagcattgatgaagatgctggtgaagcanatgctgacatgcctccncctcgaggacgccggatgctgatgccgatgctgagggtagcaagatggaagangttgattaaatctaacttaattattgatttgcctttgtgtttttagaaacaatgattggggaacagtcttttactatgtttatgttttgaattttcgaaattttggaatgttggctagttaggtgccgtttcctggattagtagtgtatttagtttctatatggaaaattgtgtc

SEQ ID NO: 4599 - DNA, 293 bp, Glycine max
  unsure at all n locations
  Clone ID: 701001345H1
ctcttccaaaccttctcttnnnacntttctttctttcatccccaaatcaaaacctaaaattcccaagctccaanttgctccncccaaatcgaccacctccaccactgccaantcccattattttatatatttattcgtatatatacatacaaagagaggngggagaatggattcggatcagggaaagcttttcatcggtgggatttcatgggatacgacggaggacaagctcaaggagcatttcggaaactatggcgacgttttgagcacctccgtcatgcgggagaagaaca

SEQ ID NO: 4600 - DNA, 290 bp, Glycine max
  unsure at all n locations
  Clone ID: 701001346H1
ttgacggcattgggaagaagcttgtgaactcaaaagatggacctccaacctttgagcagcccaagatgactctnggagaagctcttgacgtatggtaacatgcttgtccaagaacaagagaatgtcaagagagtccaattggctgncaagtacttgaacgaggctgcacttggaaatgctaacgaggatgctattaacaggggaactttcttccaatcttgaattggaggcaaagcaaacttggcaagtaaatatttctgttcctgaaggttgtgctnatccaagtgcta

SEQ ID NO: 4601 - DNA, 254 bp, Glycine max
  unsure at all n locations
  Clone ID: 701001347H1
atgggtgacgttcagatccacaagaccaaaattcttgcatcatcggaagcggtccctccgcccacacagccgccgtctacgccgctcgagccgagctgaagccgatcctcttcgagggctngatggccaacgacatcgcccccggcggccagctcaccaccaccaccgacgtcgagaacttccccgggttccccgacggcatcctcggcggcgagctcatggaacgctgccggagccagtcgctccgcttcggc

SEQ ID NO: 4602 - DNA, 288 bp, Glycine max
  unsure at all n locations
  Clone ID: 701001348H1
cttttaaggaacccgctcgtgaagctgaagaggatcacacaccacntcaatcaaatgatgaagtaaacaatgcacttgaaaaaggcttaaaacaaccattgctgattagttcagagaataaggtagatgaagatgccgaccaagattgtgatgatagcgaagaagccccagaggagtctcgccagccagtgaattcaattgtaatggcatacagactccttacaccttctgtaaaggttcaatattgatatatttcatgctcaaatatgtatggagatttgctatcgg

SEQ ID NO: 4603 - DNA, 273 bp, Glycine max
  unsure at all n locations
  Clone ID: 701001349H1
agcggactcaatgcttgtaaataacgcattaatgctggtnanctgttaccaagtttttctgntgggaagctggatattggagcacaatggatattgcacatgatcgagctggattttatatttgctggggttgcttggtgtgggttccatctgtttatacgtctcctggaatgtaccttgtcaaccatcctgtaaatcttggcatcaagctagcgctctcaattttagtagctggcattctttgcatatacatcaactatgattgtgacaggc

SEQ ID NO: 4604 - DNA, 291 bp, Glycine max
  Clone ID: 701001350H1
tttgactggtaagtggcttggaagtagacagatacgttgtaactgggcaacaaaaggtgctggtggtaatgaagagaagcaaaactcagatgcaaaaagtgtggtggaacttacaaatggctcatctgaagatggtaaagagacatctaacagtgatgctcctgagaacaatcctcagtatactactgtttatgtgggtaaccttgctccagaggtaactcaacttgatctccatcgccacttccatgctcttggggctggagtgatggaggaggttcgggtccagcgtga

SEQ ID NO: 4605 - DNA, 291 bp, Glycine max
  unsure at all n locations
  Clone ID: 701001351H1
tcacaacttcagtgctatggtgaatcagtgtattgcacaggttcggacttgctaagcatgtgcaacaatggtcagagtccacttgataggttcatatctgtggtagcatggtgcatatctaccactcgccctgtgacttttggtgttgctccttataatcccantcttggtgagacacaccncgtttcaaggggaaatcttaatgtgttattggagcagatttcacatcaccctccagtaactgctctccatgcaacagatgaganggaaaacattgaaatgttatggtgc

SEQ ID NO: 4606 - DNA, 292 bp, Glycine max
  unsure at all n locations
  Clone ID: 701001352H1
gtcttcttcttgatacccattacacggttgttgcttttgaatagcgctcgtcctctgtcgtcatatcgnaaaagccgaggttttgaccacgcgctgtagctcccatttcaaaactagggtaaagctcaggattgctccttcagcgtcataacttcgtgtaaccccacgtgctcaagttctcggtcctcttggtctccatctcgcgcaactccgatcttcctgatctcttgagctacaacactacacagcatgtctgcaaagtcggtgcaagggcctggcggcaagaagcccg

SEQ ID NO: 4607 - DNA, 290 bp, Glycine max
  unsure at all n locations
  Clone ID: 701001353H1
gaattttcttggatggttgatggtgctggattgccaccgaatgcgtcagaattgcttcccaagttggtaangtntgattaagaaggtnactgaacaagtaagactacttgccacggatgaagatgagaaacttgcagaaaagagcttatatgatgtaattcctccttatgaccaagcgaaagcacttgggaagacaaatatcgatnttgatcgtatagctgccggattaccttgtggaagtgaagggtttctattaatgtatgctcggtggaaaaagcttganagggact

SEQ ID NO: 4608 - DNA, 291 bp, Glycine max
  unsure at all n locations
  Clone ID: 701001354H1
ctgatattcacgcgcggagggctcatcctctggacctgcaaccacctcagcaacgccctgaggggatctccgatcgacacgttgatccgatcctgcctcctggaggagcgatccggtgcggcctccttcaactacgacgcanctggagccgcatactctctcaaatggaccttccacaacganttaggcntcgtctttgtcgccgtctatcaacgcgtcctccacctcttgtacgtcgacgatttgctcgccgccgtcaagcgcgagttctcggnctctacannnnnnncc

SEQ ID NO: 4609 - DNA, 292 bp, Glycine max
  unsure at all n locations
  Clone ID: 701001355H1
gcttgacgccgcgggggacgccgaggactggaaacggttcaccaagttagggttgctggacgaggctgtgatgcagccggaaggcccaacgaagcgctcgtggagaaggtttctaggctcgaaaganagctttttgactaccaatacaacatgggcctcctattgattgagangaaagaatggaattcaaagtttgatcagctgaggcaaganctagctgaaactgaagagattctaaaacgagaacagtcagcacatttaattgcnttatttgangttgagaagcgagagg

SEQ ID NO: 4610 - DNA, 256 bp, Glycine max
  Clone ID: 701001356H1
gtatttggtataagtgttaatttagttcgattaatgtaaaggtgtggttttaatttgcctgttcgggtagatgtaaactgttggccacaacacttagtctctcttaatttggcccatatcactctcatattgtactactacgtgtaacgtagtatattctcttctctcggtgtatcccccagtcaaactcatttcaattcacttttcccttgtattcgtaattaatgttcgggtaatgaaaatgaattactttagt

SEQ ID NO: 4611 - DNA, 189 bp, Glycine max
  Clone ID: 701001357H1
gttgtgctgatccaagtgctagaagttgtgatgggacttgcgtgtaacattcttagaattctcaatgtcttaaggtgcaaagagaagatgccaagtttgagatgattttactatatttttcatattggactgtcttcctctataattttgagttaaagtgtccacttaaattgaatttggtgcctttcc

SEQ ID NO: 4612 - DNA, 290 bp, Glycine max
  unsure at all n locations
  Clone ID: 701001359H1
ctctgacttggccagaaaccagagagtagtaagtagtgatgaaaagatgccttcaccccaaaaccagaagcattgaatgcncagaaggcattttcagcatcagcatcaacatgggtggggattctattgtttctcatggtacagacgaaggttcttgtttggaggagaattttcccttgctttcatctcactcctcacctgctctcagggataatttgggcttgcaggatgaagacaacagaatgaaagcggagaatgggttaacttgtagtgaaactgatgaagaaatc

SEQ ID NO: 4613 - DNA, 289 bp, Glycine max
  unsure at all n locations
  Clone ID: 701001360H1
gcttcctccaataatttgttgccatcaaaagtctcattagaaaaaataatcttgttcctctgctgccacaactgatccttttgnttaacatctgtgagtttatttaatttggtgatcatattatatttgaccgataccccctgcaaatatgaattatcagatcaagagttgctggcaaagcacacgttgatggtgcaaagaagcatcgtactcgtgatcgcgctgtaaaagctgctcctgctcgtgaaggcaatgctgagcttcaatccaacattgatagaaggcgttt

SEQ ID NO: 4614 - DNA, 290 bp, Glycine max
  unsure at all n locations
  Clone ID: 701001361H1
caagttacatcaagggacaggttgcgtgaatatgaagttgatgttgatcgttctaaaagacgtggacctgagggttgaaagantttatttcgtgattctagagatggcacctgtgacatacatagattctagtgctgttcaggctttgaaagacttgtatcaggagtacaaattacgggacattcagattgcaatatccaatccaagtccagaagttctgcttaccttgtctagatcgggtctggtggagttgataggcaaagaatggtactttgtgagagtacatgatg

SEQ ID NO: 4615 - DNA, 292 bp, Glycine max
  unsure at all n locations
  Clone ID: 701001362H1
cactcttcttcttcccacgctcctccttctccatacccttcgccaccctcgtctccgcccgcccttcaacttcggcgggagactttctccgactgccctccgaaaccgataacgatgacaacgtccagggcacccgctgggccgtcctcctcgccggttccaatggctactggaattacagacatcaggcngatgtttgtcacgcctatcaaatactaaggaaaggtggcctgaaagaagaaaatattattgtttttatgtatgatgacattgcattcaatggggaaaaccc

SEQ ID NO: 4616 - DNA, 293 bp, Glycine max
  unsure at all n locations
  Clone ID: 701001363H1
accaatacgagtttctctctctagaaccaccgaagcgaagaagaagagagaagagaatcacggtttcggccatgggacgcggcatcgcagctcgtctcctgcggaatcnatcccttccatcgcgcctcctctccttccccgcgccaccgccgccacagcaacctcctcctcctacgccgtcgctncagccgtgtcttcgccgtctccgccgagccgaaacccgccgtcaacggagcaaactcgaggccgcctccgaccagagccgtcaatggcggcgtctccacgagaattgg

SEQ ID NO: 4617 - DNA, 143 bp, Glycine max
  unsure at all n locations
  Clone ID: 701001365H1
tnnnaangtgttgtcttgntcggaggatnntgccttagcaatggcctttgcagttgnangacnaacagctgtggnagcttgaactgcttgtcaatggaacctacngaaaganagttcgtanatntnttgattcttctattcta

SEQ ID NO: 4618 - DNA, 293 bp, Glycine max
  unsure at all n locations
  Clone ID: 701001366H1
tccaatatattccattctctctgtgtatttccctacctctcccttcaagatgcagatcttcgtcaagacccntcaccggcaagaccatcacccttgaggtggaaagctctgacaccatcgacaacgtcaaggccaagatccaggacaaggaaggaatccccccggaccagcaacgtctcattttcgccggaaagcaacttgaggacggccgtacccttgctgactacaacattcagaaggagagtactcttcacctcgtcctccgtctccgtggtggcatgcagatcttcgtt

SEQ ID NO: 4619 - DNA, 290 bp, Glycine max
  Clone ID: 701001367H1
caataatgaacttaaatgcgctattgaccacattttggatgcccagagaaaaggcgagatcaacgaagacaacgtcctctacattgttgaaaacatcaacgttgctgcaattgaaacaactctatggtcgattgagtggggcattgctgagcttgtgaaccacccagagatccagcaaaagttaagggatgagattgacagagttcttggagcagggcaccaagtgactgagccagacatccaaaagctcccatacctccaagcagtggtcaaggaaactcttcgtctta

SEQ ID NO: 4620 - DNA, 290 bp, Glycine max
  Clone ID: 701001368H1
ctggagggttccattccaaccggtttcaaatggagatctagaagagaggtggtggattggctgacatcgacgctatcaaagcagaacctgcagggagatagaagtgtatcagctggtcataacttggtaccatctcatgaggccacaaatgacagtgtcaatgaaattattggtctgtctgctcaaataacagatgacaaggactttccaacgagtaactccaaattgtccaattcagacattgtttggtcaggagttgcgtggagatgtggcaaacaacttaagcatta

SEQ ID NO: 4621 - DNA, 289 bp, Glycine max
  unsure at all n locations
  Clone ID: 701001369H1
ccgctcacggctggattgcccgaaacatttgaatttgaggatatgagtgacacatattggacagacagggtccntgacaatggtagtgaagcacaaccagcgcaaccgtgtcaaccaccacaaccagcacggagaaaccggaaaaaagaccatcaacttgttcctactgngccagggaagcctgttcaagttagtcgtaggccatattccaggaaacagtattctaacaacaatcacattgaggctcctgcaaaacctcctggttatatagatgagaatgcccctgctg

SEQ ID NO: 4622 - DNA, 285 bp, Glycine max
  unsure at all n locations
  Clone ID: 701001371H1
gtatctttcctgattggccaattcagcttgctttggattgatcagcagcaacgcctgaaattcaatgttgatgttgtagagngtgaatggggccagggtgctaagcttgatgttctggaatcaaagattgcttcagatacttcacacactattaaggcaatttgcattgtccacaatgagactgcaactggggtcaccaatgacttggccaaagtgagacaaattctcgattcctaccggcatccagccctccttattgttgatggagtgtctctatttgtgctc

SEQ ID NO: 4623 - DNA, 155 bp, Glycine max
  unsure at all n locations
  Clone ID: 701001372H1
ttcgtctgtggctgccgnanctcggcgaggccctccgccgcatccgcgagggcgccgccatgatccgcaaccaagggcgaggccggcaccggagnatcatcgnggccgttcgccacgtccgtccgtcatgagcgacattagggttnacacaacat

SEQ ID NO: 4624 - DNA, 288 bp, Glycine max
  unsure at all n locations
  Clone ID: 701001373H1
aaaaactccgccgccatgacgatcactcctctgccacacatgttcgtgatnaaggacctggttatggacatgacgaacttctacacaaatttaaganagcttatgatatgtgctaccatacttgtttattgtagttatagatggtttcacattcctggaattgtaataagatttttcttaacttttaatttgtcttctctttgctgatgtgtattgtgttccttctgtaggtcctccataaaattaatcactcaaatatcataaagttgaaagaggtcttagagaaaa

SEQ ID NO: 4625 - DNA, 289 bp, Glycine max
  unsure at all n locations
  Clone ID: 701001375H1
caaggacatagagttggtgatgactcaagctggtgtgtcaaggcctaaagctgttaaagctctcaaggcgggccagtggcgacattgttgctgccattatggagctaactaattaatggtccagtttgtntgaattttagaaagtgtagctatttttcattgttgatcganatttttgctccttgaatttgaagtacttgtttgtcaattatctgtgtaattgtccccatggaaggaaaggactgtagacttcatttgcaacaaatgcatgttcaatgccaagaatgtc

SEQ ID NO: 4626 - DNA, 288 bp, Glycine max
  Clone ID: 701001377H1
cagggatatcatatcatgtgcactctctcactgccatgcctctcttattctcttcacactcacacttaccagtctggaaggcttctctcccccttgttcttttatcttcacacctcatagacgctctcacagtcacttcctgactccatgctcctccctcagacagagagaaagagagagcaaaaagcaactaggcaagatcaacactgccccgtctgagtctggcttgaagcgcttgtttagtcccaataacaacaagaccgaagtcgaaggtgacgccgacgccga

SEQ ID NO: 4627 - DNA, 285 bp, Glycine max
  unsure at all n locations
  Clone ID: 701001378H1
gtttnngtttctcgtntaagccatcatanggaggaggggcttgtcgggtcaaacaagtgcaacangagcgngatcctgagtcgtaattcggagtcccttttgaaaaaagaggtcttttttgctgtaattcacttggttctccatttgggttacttggattntgtgaggttgtcttggagttggagtcatggcagttgaggttgtnggatttgagatggttcaaggaccagtggagaatggtactggaggaaaacctgttttaaatgagaaggagaatggcaagct

SEQ ID NO: 4628 - DNA, 288 bp, Glycine max
  unsure at all n locations
  Clone ID: 701001379H1
gaagatggctctgcccaaagctaaggagatcgtgtcgtccaattccgtcgtcgttttcagcaaaacctattgcccctttctgcgtcgatgtgaagaagctcttcggtgacctcggtnnccaattacaaggccatcgaactcgacactgaatccgatggaaaagagctccaagcagcattagttgagtggacggaccagcgaaccgtgcctaatgtgtttattggtggaaaccacattggtggctgtgactcaacaactgccctgcacactcaggggaagctggttcct

SEQ ID NO: 4629 - DNA, 289 bp, Glycine max
  Clone ID: 701001380H1
agaatgggttgacacgtgtgggtaatatatgacgagagcgtgtgaagagaaaagcctgaaaagaaagaggggggaaaaagaagaaaatgagggtgcagtaccactactaccctttcccttctctggcgtatggttgcagctactgttatgcttatgcgactactaaattaaaacctactcactcactctctctaacactctccaaccaccgtcgcatttctgcgtcacaacctcactcttccaccttctccatcatcaccaacctcttcttcttccaaaaccctaattt

SEQ ID NO: 4630 - DNA, 290 bp, Glycine max
  unsure at all n locations
  Clone ID: 701001381H1
atttcctcctccagccacgggcgcgtatcgacgacgatgctctcatccaaacctccgcnccggaaagttnttcccggcgaacggcgatgactccgccgacaaactcgaccagctcctcctctcctctgccatctccaacaacgaggacctaggttgttnatccgcaaggccttcacctccggcaagccggaaacgnnnnnnnnnnnnnnnnnnnnnttcgcgcggtcgaaggagtcagagatcgaagaggtgtgcagggctcantaccaggcctnnatctngcngtnggg

SEQ ID NO: 4631 - DNA, 288 bp, Glycine max
  unsure at all n locations
  Clone ID: 701001382H1
gaaatttaagtgaggagctagagaatgatgatgaagtctgctatgtgtgcagtggtggttgtagcacttcttcttctggcggnggtggggcccatggctgaggctgtgacatgcaccccaacagagttgagtccgtgtcttccagcaatcacttccggtgctaaaccttccaatgcttgttgcacgaagctgaagcagcaaaaaccatgcttatgtggctacctcaaaaacgctagcttgaagcagtatgttaactctcctaatgcccgaaaaaccgttgcttcttgt

SEQ ID NO: 4632 - DNA, 288 bp, Glycine max
  Clone ID: 701001384H1
tgaacacaatacagggcagcatcgccatgggattgagtattctgagaagcacttccatttccacttcctatctcttcctccaaatccaaacccattttctcaactcttgttcgttcatctttcgcctccatttcccccacaaagtgtgttactcccaccactcttttcgtttctgccacccccttcttcaccgcctcacccaagcgcggctttcgtggtgggattatggccatggccgccgctggctcgctccgcaaatcagaggaagagtggcgcgcagttctctcc

SEQ ID NO: 4633 - DNA, 151 bp, Glycine max
  Clone ID: 701001385H1
gaagctaaaaacttatgtattatgtctgtgatggttttcgtgcactctggtgttttgtgttaaacaaacatccttagaataaagtggtcatgtcttgcctttcagcaagttcaagtgttttggacttgtgatgggtgtgttaagctcatgg

SEQ ID NO: 4634 - DNA, 284 bp, Glycine max
  Clone ID: 701001386H1
caccaaactgccaattctggtgaagggtgtgctgactgctgaggacacaaggatagctgtacaaagtggtgcagctggaattatagtgtccaatcacggagctagacaacttgattatgttccagccactatatcagccttagaagaggttgtcaaagctgctgaaggtcgtgttcctgtatttttggatggtggtgttcgccgcggaactgatgtcttcaaggcattggcactaggtgcctctggcatatttattggacgcccagtggtgttctccttggctg

SEQ ID NO: 4635 - DNA, 283 bp, Glycine max
  unsure at all n locations
  Clone ID: 701001389H1
actttcctctataggaaaacttggagtttattacacaggtactatttctgcatgtgcgcctgtgagatttatgagatgggtactagggtgcagctaagaagctcaaaaagattcaatttcaaggtttgtagtggaagttatgatgatggttatgtnattggtncagaggaagcaagggatatttcagggttagaggagcctgtaacaaccaaggttctgattccaggtctgcctgatgattcaaaaggtgaatctggtgctccaataagtagttgtttttggg

SEQ ID NO: 4636 - DNA, 285 bp, Glycine max
  unsure at all n locations
  Clone ID: 701001390H1
cgatgagtaccgttgaagaagctgagaacgccgtggagaaattcagtcgttacgattttnatggaagattgttgactgttaataaggcttctccaagaggaactcggccggnacgcccgccgcctcgtcactcctttgagccttccttatcaatctatgttggtaatttgccatgggatgttgataatacccggctggagcaaattttcagtgaacatggtaatgtggtgaatgctcgggtagtctatgacagggagactcgtcgatcacgtggctttggctttg

SEQ ID NO: 4637 - DNA, 284 bp, Glycine max
  Clone ID: 701001391H1
ggaatactacagagaattgcagtagcatatttggttgtcgcactgtgtgaaatttggctcaagagtgatgatactgttaattcaggaccatccctattaaggaagtatcgataccagtgggctgtggctttgattctttctttcctttatctttgcttgctatatggattgtacgttccagattgggtgtatcaaattcaaacagaaccttctgcagagccaaagacattttcagttaaatgtggagtaaggggtaacactggtccagcctgcaatgtggttgg

SEQ ID NO: 4638 - DNA, 290 bp, Glycine max
  unsure at all n locations
  Clone ID: 701001392H1
gccacaacaaacagcaacagctacctcctccattcttcatttccattaccaaaaagaaanncaccanactctctaatanaccataaccatgtcaatggcaacaacatcccctcacaccggcctcttccaaaaccgcaccaaaccttcttttcctttctcttcttcctccttcaagttcaaacccacatccatcaaatgcgccacccaactccacacccaagctccgcccctcacccactcccaagatcgcgtcttcaattcgccgccggccccgccaccctcccggaaaa

SEQ ID NO: 4639 - DNA, 282 bp, Glycine max
  unsure at all n locations
  Clone ID: 701001393H1
tgaaattctaggantantattcatgtngggtgtgtcaccttngaggagcacaagagatgaangagngcnangagagatatttgagngtgtctcaattgganccgatgattntgctgacctttccgaatggaacttgcttgaaagcatcaacttcgatgatttcttcatgggaatcaatgatgatggagatgtcttgccggatctggagatggaccctgagntgcttgctgagttctccctcagtaccgaggattccgagatagcctcatcgtcagtttcagt

SEQ ID NO: 4640 - DNA, 220 bp, Glycine max
  unsure at all n locations
  Clone ID: 701001394H1
gcaagcttcttcacagagagaggtgccccaattgtaatgagaatggcttggtccactgccctgcttgnattccataacttccatatctgctgtttaattttgttattcaaatcaccactagaatcatacatatttcacaccttgtctctctctctaccatcaacccttccacccaatatttttggaccatcttaattgttaccaatctagttatggggtt

SEQ ID NO: 4641 - DNA, 290 bp, Glycine max
  unsure at all n locations
  Clone ID: 701001395H1
tccaaactctacatacaaatcaatcggatatgaacacacccaaaatgcattacaagactttgatcgctgatccatggacttaatatcactccgcttacgttaccttaagtacgttaactccactgtgcacagtgtcaacgacacnaaatacncgcaggatgagttacaagaacagatcaactctgaaaaaggacttttatantcttaaaaaggtcaacaagcttgaagtgaatgaagtccactcctaccacgtcacgtcatttgagcatgttcntagattgaccaaggga

SEQ ID NO: 4642 - DNA, 87 bp, Glycine max
  unsure at all n locations
  Clone ID: 701001396H1
ggcgaaggtggtctcgattgcnagtgatccacgatacactctacgcttcacaaaaccttcaganccantttccaganggcntttggg

SEQ ID NO: 4643 - DNA, 287 bp, Glycine max
  Clone ID: 701001401H1
cactcatcattttctagcaaactctctagcctcttcaaatgggctaggaaggttgaataaaaagaaaacaaaccctagcttaattaattaacttgcttgtgttgttaattaatttgttcaacatggaaggaggagtgcctgaagctgattctctgcctttagagaatgtttgtctctatcatggaaaaatccttatgttcttcgccttgctttctccgctggaattggaggcttctctttggctatgacacaggagtcatatctggagcacttttgtacatcagaga

SEQ ID NO: 4644 - DNA, 146 bp, Glycine max
  unsure at all n locations
  Clone ID: 701001402H1
tnaaattcgaanaatnatnttnncatntnctgnnntaatactgnngtggtntanantccctaaagaatgctgtcgatatggcnaattaaatcttctagttctgtgcaggtcctgtaaaaaaaagggccatgccctttctttactcc

SEQ ID NO: 4645 - DNA, 283 bp, Glycine max
  unsure at all n locations
  Clone ID: 701001403H1
ttcacattttagaanaataccccctcttttgctgcatcagaggagttgtaanttaagagcatggcngcanaagcttcttgtatcatcatcttctcttaccttctcagcggaggctncaagacaaagtcttggaccaagatcactccatctccatttggcttctccagaaaagcctcctttcttgttaaggcagctgctaccccccctgtcaaggcaaggatcagacagacctttgtggtttgcatcaaagcaaagtctttctacttggatggcagcttccggg

SEQ ID NO: 4646 - DNA, 252 bp, Glycine max
  Clone ID: 701001406H1
caaaattcaagtgtcatcctcaaatttgtagatatggtgaaggattttccattatgggcaaacagtttcaaggacagcatggtacataccaatttgcaaattcatgtacagcagtattcttaaactgaaagggtttgggaggtgagtgtggaatatctttctgatgtaattacttcttatgtcaacacaaactgttcatttttgttaacaaaatactccttttatttttcatgtaataaaaaattaaaaggc

SEQ ID NO: 4647 - DNA, 278 bp, Glycine max
  unsure at all n locations
  Clone ID: 701001409H1
aggggtttnggattggagggattgacgctgcgtctcttcctcttctctttcgatccatccctcattcctaatcctccaatccaaccacctcagcctcacactcacatatacacatatctgaacgcgtatcgtccctcctatggttcaaagcgcatcctcaaggagctcaaggacttgcagaaagacccaccaacttcttgcagcgctggtccagtagctgaggacatgttccattggcaagcaacaataatgggtcctgctgatagtccttatgctgg

SEQ ID NO: 4648 - DNA, 249 bp, Glycine max
  unsure at all n locations
  Clone ID: 701001410H1
ctttgaataacaaggntgaagttttgctaaacncangactacccgagagtcagtacctcaccctgacaacagggttgagtatgagctctggaccaacagcaatgatgaatgtgggctcgttgcgatgaacagatgaatttcgtgaagaattttaagggtcatgctcagattcttgagaggggcggttatactttgttcactccacactacataacttggttttgtccaccacccttcattcttagcagt

SEQ ID NO: 4649 - DNA, 276 bp, Glycine max
  Clone ID: 701001411H1
caatttttctctcaaccggcccaatttagcataagcccagcatggccaccgcaacagcagcagccacctcgtccttcatggggacgcgcctcctggaggcccactccggggcggggcgggtgcaggcccggttcgggtttggaagaagaaagccgccgccccgaagaaagtttccagggggtcgggctctagctccgataggcccctgtggtatccgggcgccaaggcgcccgagtacctggatgggagccttgtcggagactacggattcgaccc

SEQ ID NO: 4650 - DNA, 273 bp, Glycine max
  Clone ID: 701001413H1
acaaaagcaaatacaagtctatgctaattcgagcatattcatctgtatggatgattggcggctttgttttgatcatttatatgggtcacctctacatcactgcaatggtggttgttatccaaatcttcatggcaagggagtgttcaatctactcaggagagctcatgaagataggcagctgccaggatttaggctattaaattggcattttttcttcactgcaatgttatttgtttatggacgaattctgagtcaatgcctggttaacacagt

SEQ ID NO: 4651 - DNA, 279 bp, Glycine max
  unsure at all n locations
  Clone ID: 701001415H1
cgtgtttcctcgaaaatcacttgaacttgattcttcatnctcttgcctcctaataaatcctctaacagctttgctgatttcaaactccgacaaagaacaaccttgtcgacacagcaaagcaaagtaacatattaagagaagaagtgtgtttggtgtttgtgtgcggggaagatgagagggtggtgtcaaggcagccagcaccgggggcctgtccttactgcagagggatgatccaagctatggacgnagagagtcagtggaatttctgtttcctacctt

SEQ ID NO: 4652 - DNA, 284 bp, Glycine max
  Clone ID: 701001417H1
attactccctataacatgtggtggtgatttgaagatggcagacttaccagggtatcttcgtgcctgtttgaacacagggaagcttgcctccttgggcaattttggtgtctggaggaattgtcttgcaaattttggcatgtgccttgtataataactggtggccgatgctgagtgtgttaacgtatgtgcctctgccaatgccttgctgttctttgcggggtctgatgattctatattttctgaatctgataatagctgggtgaatttactaagttctgactgga

SEQ ID NO: 4653 - DNA, 279 bp, Glycine max
  unsure at all n locations
  Clone ID: 701001419H1
tttgtnttttctctcacctgaaaatgtcttgctgcggtggtaactgtggttgcggaagctcctgcaagtgcggcaacggctgcggagggtaagattttcgttgtaacattgtttttttcttgggaaaatagagtttttccgggaaattttctttttggatttttaattgttattatggttacccttttggttcaattgcatgaaaaaactatgctttgtttattttcttgcatgggggggagattctgatcacccgaacctttgttttgcttttacaga

SEQ ID NO: 4654 - DNA, 282 bp, Glycine max
  unsure at all n locations
  Clone ID: 701001420H1
cttgacttcttcttaacttccatcgtccatggcggtttcggggttgagaagcggtggtttgcctctcttccaccatcaccaccaccncccaccaccttcgcttccttcaatcccctccttcctttnccaagctcagttttcttggctccaagtcgtcgaagaaggggttcacagtcttctcccgctatgcgcaaggcgtgaccttttctcctcgcgtagattccaagatagcatggagaagctgccgaacctggtggaggacattgtgcagacatccttaaa

SEQ ID NO: 4655 - DNA, 280 bp, Glycine max
  unsure at all n locations
  Clone ID: 701001422H1
ccgagaagaccgccttagctgcattcacgccatggactcactttaaccttctctcacactcaccgcngccancaccgccttccaccatggactccgttnccgtttcgcgatggtaacatacacaccattctcgactcccgttatctcactctccactggatgttaatcatagtttgcacactcattcctcgctgattcggaggctttctcaagaaagggagttagagggccacactggctgtgtcaatgcggtggcttggaattccaaaggttcgttact

SEQ ID NO: 4656 - DNA, 279 bp, Glycine max
  unsure at all n locations
  Clone ID: 701001423H1
gttganagagcagntgtngcttntgagggtgatcttgataaggctgcagagtctttgagagagttgaagctgnatcgaccatctggtccaccaaagncagaggaaattggtgancttccttccctcancaataagcagncagtagctgtgaatcagaatgctaggacacagacnaaacccntactttctccaaatcaanccnnnanagatgtcnangattttaactatgnnaagcaagcagttatgctaggaggntctacagaatccagnaacagactt

SEQ ID NO: 4657 - DNA, 277 bp, Glycine max
  unsure at all n locations
  Clone ID: 701001424H1
aatagagtacactacttgtaataaatattgttagagaaaaaaataagtggaaaganatagatcaatacattgcttaaaggtattttgtatatatagattgattagatattaatttattccatttccttcaaaaacatatcttnctaactttcatgatctggttggaataagagatgattaagataatagctacaagtacaactttaatatctcnncatatagattcttaaatttaaacaaaagantgttccaaaggacacattagaaaatgactagc

SEQ ID NO: 4658 - DNA, 274 bp, Glycine max
  unsure at all n locations
  Clone ID: 701001425H1
caattgaagttaaaagccttagccttccctacaactccaaacaannaagacatcntcatccatggctgcctccgtctccactgtcggagctgtcaacagagctcttttgaacctgaatggttctggagctggagntcagtccagttcagccttctttgggaccagcttgaagaaggttattgcctcaagggtccccaacagcaaggtttccggtggaagcttcaagattgttgctgtagaagagaagaaagagattgaagagaccagcagaccg

SEQ ID NO: 4659 - DNA, 138 bp, Glycine max
  unsure at all n locations
  Clone ID: 701001427H1
aaattgttcagtcccctgctaggctaggcctcgcaaatcctaactccccatcaattccaaaccctacccctccnaagctccctccaacacagacccatcanccccaagaccgcaactcctcaaccccttcttcagctc

SEQ ID NO: 4660 - DNA, 273 bp, Glycine max
  Clone ID: 701001428H1
tttgctctcctttattgctatcctcatcaaacgcaggaagaatgtcgctgtcaatgaaagttcaaataaaaaagagggaacttctcgggacaatggctcactatctgtaccaacgggcctctgccgccacttctcaatcaagaaatgagaactgccaccaacaactttgatgaactcttcgtggttggcgtgggaggctcggcaatgtgtacaaaggccacatcgacaatggttcaactacagtcgcaatcaaaaggctcaaacagggttctc

SEQ ID NO: 4661 - DNA, 273 bp, Glycine max
  Clone ID: 701001429H1
ttggtgccatattcgcctctggcttcatccgtgccattaggttccttgagaaacattgggcccttttgtgcaatgacatcaaaacaggaactattaacaactcaatcactgattcttcagtgagagaggctgtgatgaggtcctcaaggctgatcccaagcttgcggattttatccacaatgagtgtagtaaagggtcatggcaggggattattactaggctttggcccaatacaaagtatgtggatgttattgtgacggggactatggcaca

SEQ ID NO: 4662 - DNA, 277 bp, Glycine max
  unsure at all n locations
  Clone ID: 701001430H1
ctggtatcaaagatggcaacattgactgcttcaagtaacttagtctctagaaattctcatgtccatcatggaccaacaactgcttcatatgagtctaaagcagtagcaatgggacttagatctctaaagcagacaaatactcaagtggacttagaatttttaacccggtggatgagctacttaacagaaccccaattaaaaccaatgcaatgcaagctatgaggaagggacctcaaggcaagaatncctggcctaaaggtataatcacatgtggcat

SEQ ID NO: 4663 - DNA, 281 bp, Glycine max
  unsure at all n locations
  Clone ID: 701001431H1
cgatgattctaacctttgtgtggacaatgaattggggtttgccaaagaccgcaccattagtagactgacaganattaacagcaaggnatacttagagcatcatgctgccatgttagcagaaaagaaaganagagtggatcagaatgccgttgaagcttgaagaaaggatccaaaacctcttatcacagtttggtggctattgttgtggcatagtgaaagtggagtaaaatgaatagttattgtgaacaaccaaaaatttcaaattagaaaacatccatcgg

SEQ ID NO: 4664 - DNA, 256 bp, Glycine max
  unsure at all n locations
  Clone ID: 701001432H1
ggaaaatgaggaaagaaaacgtatagaaatagcagaagcctgggatagcattatatttgcncangtaataagaggtattttattaataacccaatccattcttagaaaatatattctattaccttcattgataataactaaaaatattgctcgtatactatttttcaatttcccgaatggtcggaagnttttagggattggaagagagaaatgtatattaaatgcacatataatggtgttcaattatccgaaagag

SEQ ID NO: 4665 - DNA, 285 bp, Glycine max
  unsure at all n locations
  Clone ID: 701001433H1
cccattcccattgctatcgtgacatcttccgacaaattttctctctgtcttccgtttcgttcttccaatttcaggcatgaatcgtgcatcggtgttccggtagagcatatgacgagggaggttatcggaactgcgaatcgattgcagggtttagagaatgccagagcttcgtagtggtgtgcgacgggggcgtggccgtggccagaaagcatcggaacctgcaaggaaggaggtgaaggctcgtgcggcgccganagggagacccaggactcgattggcggcgaa

SEQ ID NO: 4666 - DNA, 280 bp, Glycine max
  unsure at all n locations
  Clone ID: 701001436H1
ttctctctcttttcacatatcaaagacaangaaaattaaggaaattcggaaagatgatgtacgagcagcagcaacgatttcatcatcagcaaccgatgacaatggatacgaggaggaagaagaaaggatcatcaggcggcataaggaagctgatgagaggcttgaaatagtggacttgagtggcatgtccttggactcccttcccaacccttctcttaatttagccaccatttgcaagttggacctctctaataacaatcttctcgaatataccggagtc

SEQ ID NO: 4667 - DNA, 279 bp, Glycine max
  Clone ID: 701001437H1
gagatacacagtagttaggtagcaagcataagtgtctaaccttagaaacatatctgctacatatcgtgtgcattttggaattgtgccactaaaattctattcatctatggctgcctcatcttatgctatgcaatcaatccttgcaaaccctatgatccgcatttccagcgggtctagggagaaccattttggtgtttctgcttatcacatgagaaggaatgttggcctgagagttaggtccatggctgaggaagagcaaccaagtcagcctgcgacccc

SEQ ID NO: 4668 - DNA, 278 bp, Glycine max
  unsure at all n locations
  Clone ID: 701001438H1
gttggagctaaaaaggtcacatgctcccttcaggctgatcttaaggacttggctcacaagtgtnttgatgctaccaaaattgcaggattcgcccttgccacctctgccctcgttgtctctggggcaagtgctgaaggtgttccaaagaggctaaccttcgacgaaatccagagcaagacctacttggaagtgaaggggacaggaacagcaaaccagtgcccaacaattgatggtggattggactcatttgccttcaagccggggaaatacaatgccaa

SEQ ID NO: 4669 - DNA, 278 bp, Glycine max
  unsure at all n locations
  Clone ID: 701001439H1
ctctctctaaaccacgcctagagagagaacctcgccgccggcaccnctccggcgatgacatgaccgccggttccctcatcccttcctagaccctttgatgcgccgatcgaatgcccgcactcgcagcgccgcctccaatctcacaacaacaacgaaacaatggatccgatcaaaaccaaaacccgctccaacaacctcttctctcgtaaccctaagccctcgcaatcgaggtccctccgttccgtaatcctgatctccctctctctctccttcctctt

SEQ ID NO: 4670 - DNA, 274 bp, Glycine max
  unsure at all n locations
  Clone ID: 701001440H1
ctacacttaaaaaacgattattttttctaattgatgaatcttgtcgttttaaaatatagagattaagancaattttgacccaaaattgagggatgtaaaacacattntgccgtgttgttatttaagagcatgtttggtataattgccttttgagaaataattgtttattctgttacaaggttagaaaaaagcagttattcctccttgaatccnacacacactaagatgatattgttaagcagtcatcgtttggatggaatatagacatcgcaga

SEQ ID NO: 4671 - DNA, 275 bp, Glycine max
  unsure at all n locations
  Clone ID: 701001441H1
cgnagactgagaaaacagaactatacaaaatggaagatacactttctgcgttgaggtctttgatgctttctcagtctccaccgcttgatgccttagttgttccttctgaagattatcaccagagcgaatatgtgtccgcaganacnagcgccgcgaattcgtttccggcttcactggaagtgccggcttggcacttataacaaagaatgaagcactgctgtggacggatggacgatattttttgcaggctgagcaagaacttagtgctcagtgga

SEQ ID NO: 4672 - DNA, 274 bp, Glycine max
  unsure at all n locations
  Clone ID: 701001442H1
aatttttttgaaaaaggaaaagagagagaggaatgataatataagcgttgaagcgttcatctccgtttagattctccagtttctgtttccgattctatttctcgtcttgtgcgcgtgcatagtgaatactcgtgcttgaacgagaaattanttgttaatttcgaagttgaccagtgtggttggtgggagagcgatgccacgatctagttccgccatgcaccaccaccgtcagagctccgataacttcatgttcgacgctcacggaaggtggtta

SEQ ID NO: 4673 - DNA, 271 bp, Glycine max
  Clone ID: 701001443H1
tcacaacttcagtgctatggtgaatcagtgtattgcacaggttcggacttgctaagcatgtgcaacaatggtcagagtccacttgataggttcatatctgtggtagcatggtgcatatctaccactcgccctgtgactttggtgttgctccttataatcccattcttggtgagacacaccatgtttcaaggggaaatcttaatgtgttattggagcagatttcacatcaccctccagtaactgctctccatgcaacagatgagaaggaaaa

SEQ ID NO: 4674 - DNA, 272 bp, Glycine max
  unsure at all n locations
  Clone ID: 701001444H1
cttatcnctgtggttttcatcgtcttccttctcttatatttctntntttttttgncttcgccgnacgccgaaacaatggccgganaaggagagggtcctgcnatcggaatcgatctcgganccacctactcttgtgtcgtgtgtggcaacatgaccgagttnaaatcatcgccaacgaccaagggaacagaacgacgccgtcttacgtcggcttcactgataccgagcgtctcatcggtgatgcggctaagaaccaagtcgccatgaacccc

SEQ ID NO: 4675 - DNA, 275 bp, Glycine max
  unsure at all n locations
  Clone ID: 701001447H1
tgttgctgaattcaggacacaaaatgccagtnataggcatgggaacttcagtggagaatcgtccatcaaatgagacccttgcttctatctatgttgaagccattgaggtgggttaccgtcattttgacactgctgcagtgatggaacagaggaagccataggcctagccgtggccaaagccatagacaaaggccttataaagagtagagatgaagttttcatcacttcaaagccttggaacacagatgcacaccgtgaccttattgtcccagctc

SEQ ID NO: 4676 - DNA, 277 bp, Glycine max
  Clone ID: 701001448H1
cccaaacacacttgaactccagtcatttccttgaagttccttatgcaaatcccttcagaaaatctctaatatccaattgtcaacaatcaccattgcggaagcccaaaacaaatccatttcaccgaagaaccatgaccgttacacagaattcgcagcagcgacaaacgacgaggaggtgccatccggcgtcgttttgttcgggaagtatgagttaaggcggttgctgggagctggcgcattcgccaaggtgtaccacgcgacgagcgtggacgacacg

SEQ ID NO: 4677 - DNA, 286 bp, Glycine max
  unsure at all n locations
  Clone ID: 701001449H1
gtcttgcaattgaagttgaagtcttgcccttctctcttcaactccaaacacaagacatcatcatccatggctgcctccgtctccactgtcggagctgtcaacagagctcttttgaacctgantgggtctggacctggggtttcagccccagttcatccttctttgggagcagcttgaagaaggttattggctcaagggtccccaacacaaagatttcctctggaagcttcaagattgttgctgtagaagagaagaaagagattgaagagacccagcagaccganag

SEQ ID NO: 4678 - DNA, 281 bp, Glycine max
  unsure at all n locations
  Clone ID: 701001450H1
aaagaaatctggtacgatttcaacggctgcttataaaaaatgggaganggctgcaattgctggtgtttctttagttgcagatgctgctgagcatttggagcgagctgcaactgttaaagaaattgaacaagaccaggagaatcaggagaaagatgttctgatcccgctgattatgtcctgcccngccttagccaaatgtccacaaaagcaatttgttgataacaatgtgaacaatattatgaaacttaagctccagttatttccaattgatgaacctactc

SEQ ID NO: 4679 - DNA, 280 bp, Glycine max
  unsure at all n locations
  Clone ID: 701001451H1
cttttggtttgcagaaaggaacatggaagctgtgtgtgcttttncngttggcacacttcacatcccaacagcacatgaaacatcaaactcctttaggaaatccatattcttgagcaaccaagtggcttcaccagtttcattggttttctcaggggcagttcaaaatccaagcttttaactgccttgtcaccccctccattgacagaatccagtaaccaacctgaggctgagccagaatttganagtcatgcagagaaatttgactggtactctcagtggt

SEQ ID NO: 4680 - DNA, 279 bp, Glycine max
  Clone ID: 701001452H1
ccgtcttatgggacgcaaggcatcacacgttgctttggaatgcaccctccagtcccatccaaatatggtaattcttggtgaggaggttgctgcatcaaagcttaccctttctgaaattgcaaaacagattactgatgcaattaggctagagcagagcaagacaaataccatggagtcattctccttccagaagggctgatagagagtattcctgaagtgtatgccctcttgaaggaaattcatggtttactcagacaaggtgttgaagttgacaagata

SEQ ID NO: 4681 - DNA, 274 bp, Glycine max
  Clone ID: 701001455H1
agagcttcctccttgcacttcacatggcagtggaagctgataatccatattttcgattgggttacaacagtttgggtgcttttgcaaccattaaccatcttcacttccaggcttattatttggctctgcccttcccaattgagaaggcccccactaagaaaattgcaagtttaaatggtggggtgaagatatctgaactgttgaagtatccagttagaggtctcgtctttgagggtggcgatacgctggaagatttatcaaatgttgtttcaga

SEQ ID NO: 4682 - DNA, 138 bp, Glycine max
  unsure at all n locations
  Clone ID: 701001456H1
caaaaggccgtcttccaggccctcccggactccatttcccacaccttcctccctnnggtcaatctctccgactttccaccgggcaccaaaattgaaaccctgatctcccacaccgtcctcctctccctcccttccctc

SEQ ID NO: 4683 - DNA, 277 bp, Glycine max
  unsure at all n locations
  Clone ID: 701001457H1
cattgaccatagaattgaaccaattcctagtcatttgatggcttcagaaaatgaattctcagaactcaacagaaatctttacccgcaaatagaaccctacagtacaggatttttgaaggtttcagatcttcacacaatttactggnangcaatcaggaaaccccagtggccatcctgttgtgttcattcatggtggtcctggagggggaacttctccaagcaatcggaaattttttgatcctggacttttaccgaattgttctatttgatcagcgaa

SEQ ID NO: 4684 - DNA, 273 bp, Glycine max
  unsure at all n locations
  Clone ID: 701001458H1
gccactccattggaggagccacagcctctctatgtgctctttggctactatcttacctccaccagacatattcctctatttctgtgtcagtcttgtgcatcacattcggttcccccatgctagggaatggctctttctcacgtgccattntcagagaaagatggggtggtaacttctgtcacgtggtctcaaagcatgacataatgccaaggcttctctttgctcccataacaccttacactgctcaaataaacttcctgcttcagttttggc

SEQ ID NO: 4685 - DNA, 134 bp, Glycine max
  unsure at all n locations
  Clone ID: 701001459H1
aattttntctctctttctattttccttctctcaatcattctctgctccttttcactctctggggtcagggccaatcatcgccaagctcatgctctgcaccctttctctccctctaaagattctccatttttctc

SEQ ID NO: 4686 - DNA, 272 bp, Glycine max
  Clone ID: 701001460H1
tccttctaaaatgaacaattttgagttacttggctcattatccaacctaaaacgaatcagattagagaggattttggttcctccctttgtcacattgaagaatctaaaaaagttatccctcttcttgtgtaatacaagacaggcttttgaaaatggaaacatgctaatttcagatgcttttccaaatctagaagatttgaatattgactattgcaaagatctgatagaattgcctaagggggtctgtgatatcacctccctgaagatgctca

SEQ ID NO: 4687 - DNA, 129 bp, Glycine max
  unsure at all n locations
  Clone ID: 701001462H1
cttcaaccactcaacaaagtggttggtttttggttcttaagccatggcatccacatccttctctgcatntatctcagggnccttctggcacgtgctgtnnaccttcatggctcttcttctgaccgtgtc

SEQ ID NO: 4688 - DNA, 278 bp, Glycine max
  Clone ID: 701001464H1
cagaaagcaagctcatcctagagttttaaaaatggcagcagcctcctccatggctctctcttccccatccttggctggcaaggccgtgaagctgggcccatcagcccccgaagtcgggagggtcagcatgaggaagaccgtcaccaagcaggcctcctccggaagcccatggtacggcccagaccgcgtcaagtacttgggcccattcttcggcgagcccccgtcctacctcactggcgagttcccaggtgactacggctgggacactgctgggcttt

SEQ ID NO: 4689 - DNA, 280 bp, Glycine max
  unsure at all n locations
  Clone ID: 701001465H1
aggngttacatggagcagcagaatgggatgatgtgttttcagggtatggaaatgatggaagggtttaggaacgtgtcggtgaagagaattgggattagcagggtggattcgnnnnnnnnnnnnnnnnnnnnnnnnnnnnnncctaattagtgttttcacaaaatgaggtttatgaagaactatgatcaagggaagagaaaannnaaaaaggaagctgtttncccttttttattttatttttagggaataataatattggttagtgtncagtgggaacggg

SEQ ID NO: 4690 - DNA, 277 bp, Glycine max
  unsure at all n locations
  Clone ID: 701001469H1
caactctgctgaacaagcagctggngaaggttatgaaacaattgctccagcaagatccttcaacatcagataaagattcaatggaggaatctgaactaaaagattttcagtttgtagcagcaagacttggtattacatcccaacggccatcttaatagagagacgatctattcagaagttgttaganaaactcaaaccaaatgaccagacaaaagagatcatcttgaaaaatcctttgtttcccctgtgattgattntcggtgctttatcaggagaa

SEQ ID NO: 4691 - DNA, 274 bp, Glycine max
  unsure at all n locations
  Clone ID: 701001474H1
gaaactccaaattcccccannnccccccttncccgnattatcgcggtggccttggagccgcaacaggacttccccagcgggaacagtccccagcgtctcctcaaggaactcgccgaacgcaagaaagcaacttccccaagaagggtcccccaaggaggttcattctaaggcccccaatagacgataacaaattagcaganaggtttctcaacagcccacaactttctctcaaatcgttccctttattaagttcgtncttgccttcgtcgcgcct

SEQ ID NO: 4692 - DNA, 219 bp, Glycine max
  unsure at all n locations
  Clone ID: 701001475H1
ctgtcatttgtgagattccttcacttgttttatctattccattggattgtacagantcctagctaaaacacccagatgtcaatctctgtaattctatttgatttgtgggtgtttctgtgaaaaaaagaattttctttaaggactgtcaaacccaaaactttttttttgggtctttggtttctgcttcttttatttttgcaaactggcttctgggtttgg

SEQ ID NO: 4693 - DNA, 272 bp, Glycine max
  Clone ID: 701001476H1
ccataagtcccttccctattgtaatttctgccagcctcaaaaaagacttgctctgcctctgccacttctctgagtaggactacactgccatggctgcctcagtctccactgttggagctgtcaacggagctccactgagcttgaacagctctggagctggagcttcagttcccagttcagccttctttggcaccagcttgaagaaggttattgcctcaagggtccctaacgtcaagatttcttctggaagtttcaaaatcgttgccgcggaa

SEQ ID NO: 4694 - DNA, 273 bp, Glycine max
  Clone ID: 701001477H1
cagagtcactcaaatggcttccgaaaccccaaagccaaaacccgttctaccgtggaaaacccgcgtttcaatttcctttctctctaccctaacggactatgcacgccgttctaacggcaccgttaaccgccgtctcatgaacttcctcgatcgcaaatcccaacctaacgccaaacccgttaacggtgtttccacccaagacgtcaccgtcgacgccaaacggaacctctggttccgaatctttaaccccgcagccgcctccggggcgggcct

SEQ ID NO: 4695 - DNA, 274 bp, Glycine max
  Clone ID: 701001478H1
agaaaggcaaatggggtgtgcttcctcgaagcgtgttgatgcggcagcagtcccctaccgtcccgcacccacaagcttggcggtgttcgacatcaacaccatcgaggagccatggctgaagcacctcaacaacaccatcgaggagccatggctgaagcacctcaacaacaccacccctctcccccaagacaataatccaccctccctccccgcccctattctccacaaacttcaacttgctcgacgccaccgatgccccccaatcctgggatgg

SEQ ID NO: 4696 - DNA, 271 bp, Glycine max
  Clone ID: 701001479H1
ctttatgattgattagtgtttgcatattcttagttagcgcctctcacatgataaattcacttatttcagactggctattcggttgtctcagcatgtgttgtcgttcttcgctggaaggataagacaaatagtcaagtgcatcttctgctgagcgggaaggcataatttgcctcattgctgttgctctttgtggatttgctagtgggctcttgtaccgatatgatgcttcatttatttttctgattctggctttagttattgcagttggtgc

SEQ ID NO: 4697 - DNA, 272 bp, Glycine max
  Clone ID: 701001480H1
gttgataagtactactataatagtataactaaggaaggagtaagggtgatggtggttctgatctgacttttggcggtgtgggagtcacgagagcagcaaggggaagtcacaagagtcacaagaatggagagaggttcggcaagctgagcaggaagaaaagtggtggtggaaacggacaggttctagacggttctaatattatggagttggttggaaaccagcaagttttcaccaccttcgtggaccataagtttcacgagttagacacagac

SEQ ID NO: 4698 - DNA, 272 bp, Glycine max
  Clone ID: 701001485H1
tggggggtttggttcatccttgattgccatggatgagagaacatatgaactcataggccctgattaccctggtaatagagctgaagatgttaaagacccaggcttgggttggatgatgggttttatgtttgttgtcatttccttggactttttagtcttgtaccacttcgtaaggttatggtcatggattataagcttacatatcccagtgggacagccacagctatgctaatcaacagtttccatacaaaaactggatcagaacttgcaga

SEQ ID NO: 4699 - DNA, 274 bp, Glycine max
  unsure at all n locations
  Clone ID: 701001486H1
ggagaaaaagaagttgcatttgttcaatttccccaaaaattttatgctactttgaaggacgacccttttggaaatcagatgacaattttggctaagtacttggcggctggaataggtggactccaaggacctttctacggggaacaaactgcttccatagaagaaaagttatttatggtctttctccagaaaacattgaaaaggatggcttggatatatggatcagtcacagaggatgtgctcaccgggctgacaatacataaaanaggttgga

SEQ ID NO: 4700 - DNA, 272 bp, Glycine max
  Clone ID: 701001487H1
ggatcgactttccattaggaccaacaggaagatttaccaatggcagaacagaaattgacataattagtaacatttctttacccctattaagacctctaatctatgtgctgcaatcaaagatttcaaattcatgtctggttatgaattttaggtgtcaaatttatgagttggtgtggactaccttctgttaaccgaataaatttttttgatagtgctgaaagaatgaaaacaatattggtatatttatagagctaagtgtcttttctcttgcc

SEQ ID NO: 4701 - DNA, 273 bp, Glycine max
  Clone ID: 701001488H1
aaaaaagaccctttccattctcctccttttcttcctcctccactggctgcacctcgctgccgtgtctctgcctagcgtgaaattggcctcatttcccatctgggtcctgtgaattgcgattggaaccgcgttttccccgcttctgggcttggctcagaagtagtcagaatgatgtctgtcacaggcaaaagcattgattttgctggcaaaaacttggtctcttgtggctgctcttccaatgcttcttcgtttgataggtacactgtgaggaac

SEQ ID NO: 4702 - DNA, 271 bp, Glycine max
  unsure at all n locations
  Clone ID: 701001489H1
tcatcatccatggctgcctccgtctccactgtcggagctgtcaacagagctcttttgaacctgaatgggtctggacctggggtttcagctcccagttcatccttctttgggagcagcntgaagaaggttattggctaagggtccccaacacaaagatttcctctggaagcttcaagattgttgctgtagaagagaagaaagagattgaagagacccagcagaccgacaaggacagatggaagggtcttgcctatgatatctcagacgacca

SEQ ID NO: 4703 - DNA, 251 bp, Glycine max
  unsure at all n locations
  Clone ID: 701001491H1
ttcttcgtctttcctttgtctctctncctttcccctctctttacgagggtttttctttttcttacnttccctttttttatttttcctttattttgtttttttctttctcttgtttttcgttttgcttccatttctcntgaatccccatttattcttcttcttctgcaaccctaaccctagaattgaagatgcagcctcagaggttaaggcagcaagccatgatgcaaccatctctctaccaccaccctgct

SEQ ID NO: 4704 - DNA, 271 bp, Glycine max
  Clone ID: 701001492H1
aagaagcagagggagtagcggcattaaaaatgcagatcttcgtgaaaactctgacagggaagactataaccctcgaggtcgagagcagcgacaccatcgacaatgtcaaggccaagattcaagacaaggaaggcatccctccggatcagcagcgtttgattttcgccggaaagcagcttgaagatggaaggaccctggccgattacaacatccagaaggaatcaacccttcatctcgtcctcaggcttcgtggtggcatcattgagccttc

SEQ ID NO: 4705 - DNA, 268 bp, Glycine max
  unsure at all n locations
  Clone ID: 701001493H1
tggtgttggcgtatgcngctacgctttcttccactctgtcgtttcaaaagtctgttcctttgaattctcaacgttcaggaacatcatttggttcctctttcctattcagcagagagaatggttcagttgttccgtctcttgttgtgtgtcatgctaagaagaaactcagttttatggagcaaattctggattacattgaagggggtcccaaattaaggaagtggtatggtgcacctgatatcctgaaaaagatggtactgccatagaa

SEQ ID NO: 4706 - DNA, 272 bp, Glycine max
  unsure at all n locations
  Clone ID: 701001495H1
ganaataatggcaatggccagtgcaacaactctagccacaatcactgttgtggcggctagccccagtgttggcagcagaaggagtgggaagaggaatgtgaacttcatcagagggttgaattcttttggagggttgaggctcagaacaangtgacattactaggccttcctgtgtgcactgagcagtgctttgcaaaggtggtgagctcattgaaatatccatcatcatcatcacgtaaggggagaggtggaggtgctgccttttcaacatg

SEQ ID NO: 4707 - DNA, 275 bp, Glycine max
  unsure at all n locations
  Clone ID: 701001496H1
gtttatgtttagatacctgatgaacctgngtntncgcttttggttctgtggctgacaccaatctgctaatactgcnactttctgaatacccttcttttggtgtcaagtaccagattttgtgacagttgggggtagagtaactgcagaagtattgaactgtgcactaaatggcttcaactgggtttgatgaagacggtgataccannggcggtatgtgggttttggaacagaagattgaccagccaatggatgangaagctgaaaggctaaaaaac

SEQ ID NO: 4708 - DNA, 306 bp, Glycine max
  unsure at all n locations
  Clone ID: 701001501H1
gggagctgttattattcctgtagaccaaactgacaagcgagctgatgatagacttatccacactaggtgggatcaccttgaagaatccatatcatctgtgatggatggggaacaaggaaaaaaggagaaagataaattttttagtagaattcacctgagtgttgtcttgatggtggttaccatgtttttgatgggtcaacttattatagtagtgatctcagaccaacatcaaagcagctctggaagangccaattggtcttttagaaattggcattctaagtgttgatggacttcatccaacgaaa

SEQ ID NO: 4709 - DNA, 234 bp, Glycine max
  unsure at all n locations
  Clone ID: 701001502H1
ctaagcacaggaacattcacccagtacaatgaccacacacgatgataaccaggaagaaccggataggggaaccgccaaagaagttgctagctccgttggagaaacaaagaagcgaaaactatgggacggtncttatgacgacggcgatatgcagttcatggacactgctaattctctgaatgggaaaagactctccgaagttggagatgatgccgantcaaaatgctccagtgg

SEQ ID NO: 4710 - DNA, 312 bp, Glycine max
  unsure at all n locations
  Clone ID: 701001503H1
aattcngatanacngtccanggnttngnttcaaacntntcaaacgtccantncnacanttntncnggntacgcgtngtacnccaannaacgtagtaanttncccaattcaaactctncttctccacatcaattcttcaacacncgtttntnttcttcgttaaccaatttcgtttgcgcagtgcaagntcgaatcaatggccagcgctcagctcacagcaatagcgtcatcgatctctacggcgtcgtttgaagggctcgaccttncgctgttcaattncttccagggcagattagattggcaatctctcccc

SEQ ID NO: 4711 - DNA, 299 bp, Glycine max
  unsure at all n locations
  Clone ID: 701001505H1
cncattcgccgcgggcttttatcactcacccgaagggncttttcttcttctccttcntcctnncaaggaggggttctatggttcaaggagcttccagaggaattggcctcgaatttgttaaacagattttagaatacgatgataaagagcatgttattgctacctgccgtaatcccagtgcatcaactgggcttatccatctganagataaatttgcagaccgccttaaaattttgtcgttggacttgactgttgaaactcaattgagaaacaacatgaacaaagtggagaantcatcc

SEQ ID NO: 4712 - DNA, 299 bp, Glycine max
  unsure at all n locations
  Clone ID: 701001506H1
ctgccaacttcacatcccaagtcattatcatgaaccatcctggccagattggtaatggatacggaccagtcctttgactgccanacttctcacattgctgtgaagttttctgaaatcttgaccaagattgacaggcgatctggtaaggagcttgagaggagcccaaatttttgaagaatggtgatgctggtatggttaagatggttccaaccaagcccatggtggttgaaactttctctgagtatcctccccttggtcgttttgctgtgagggacatgcgtcagaccgtagctgttgga

SEQ ID NO: 4713 - DNA, 270 bp, Glycine max
  unsure at all n locations
  Clone ID: 701001508H1
tctgtctcaactttccttnattttctctcttacttctcacgncntcacgcactcggcttgatcgtacgacntccgatcccccccngagtnacacnnaaccagcacnaccgtncgatncgacgatgtctcgcgcntnctccgcngnagattccgccgnctacnggtgagatcctactgttcggagtcagagtccgtcgtcgattccatgaggaagagcgtcagcatgagcaacctctcacagtacgagcatcctcaagacggcagcaataa

SEQ ID NO: 4714 - DNA, 295 bp, Glycine max
  Clone ID: 701001509H1
ttcaattaacaccgtgttcgggtgaagactttatgaaatcgaggtcgtagtatggtggtttagcgggtatggattggaagcagtaccggctcgtacccaagaacaagaacatggattatggcttcctgcttttgctcctcttcttccatatcttccttcctcactcctctggtaaacccagtggagtgtgtgtttctcaaggaggtcgttttcctcccttcaaatcagagggtagcactcccaaaaagggtcctaaagatttgactctttgccggatcttcgcaaaaagacttgc

SEQ ID NO: 4715 - DNA, 294 bp, Glycine max
  Clone ID: 701001513H1
tctgggagcagtttatttactgctcttctgccggtgtctatctcaaatctgatctattacctcacgcagagactgatgcagttgatcctaagagcagacacaagggaaagcttgagacagagagtttgctacaagcaaggggtgttaattggactctataaggccagtctacatctatggacccttgaactacaaccctgttgaagagtggttctccatagatgaaagcgggacgcccaattcctatccccggctacaggaatacagataacccaacttggtcatgttaaggat

SEQ ID NO: 4716 - DNA, 295 bp, Glycine max
  unsure at all n locations
  Clone ID: 701001515H1
gttgnttctgacccaattccacaagttgagaagcctttgtatgagcttgtttngactgcacaaacaattgctccagacagtgaaggtgctattgatggacaccttcgtgaggttggactcacatttcacctcctcaaggatgttcccgggattgtctcaaagaacattgacaaggcactttttgaggctttcaacccattgaacatctctgattacaactccatctttggattgcacaccccggtgggcctgctattctgaccaagttgagcaaaagttaggtctcaaacctgag

SEQ ID NO: 4717 - DNA, 299 bp, Glycine max
  unsure at all n locations
  Clone ID: 701001516H1
gggaaagcagatgcactaagggaggcagcttttgaatatcaggatttgatgaanttggaganccgagtctccaccttcgttgatgatccaaatcnccccatgtgaagctgctctgaagaacntgtattcattgcttgaaaaagtggagcaaagcgtatatgctctcttgcggacaagagatatggctatttcacggtacaaggaatntggtatcccagtaaactggctantggattcnggggttgtaggcaagatcaagctttcgtctgtacaactggcaaagaagtatatganacgtg

SEQ ID NO: 4718 - DNA, 316 bp, Glycine max
  unsure at all n locations
  Clone ID: 701001517H1
gtgaatgttggttggtagagaaggtaattattctgggaagagggagattttcatcagcagatggatgncaatgtgttaaagccgcnatttggctaaccaaaaggtcccttggattgtggggtcggatgaaaaagcccgtgcgtatgtttcacagtnttccggctgatggtcctcttttaattgcctggattcnagggaggccacatcaggatctatgatgttggaccggggntggaaagttaaaaaggacatctctgcnagatgttacgagggacagtnactganacatctctctcgccagatcaactctatcttg

SEQ ID NO: 4719 - DNA, 300 bp, Glycine max
  unsure at all n locations
  Clone ID: 701001518H1
tatgtgcggaagacggccgagcttgctacccagttctatatcaatcctgctaccagccaacccaatgtttctgggattaatactggctggttcagctgatttcaagactgaacttagtcagtcagatatgtttgatcctcgacttcaggcaaanatactaatgttgttgatgtctcctacggaggcgagaatgggtttantcaggctattgaactctctgctgaaattctgtccaatgtgaagtttatccaggagaagcgatgattggaaaatacttgaggaaatcagccaggatacggg

SEQ ID NO: 4720 - DNA, 303 bp, Glycine max
  unsure at all n locations
  Clone ID: 701001519H1
ggcgcggttgatcacagtggtgtggtgcgcggtggcggtgctactgtgcgccgcgggcgggcgcgtcgtgggtggaggaggcggcgaacccgatacgaatggtggcgggggtggaggcggacntggttcgggtgatagggcagtgccggcgcgcgctgagtttgctaggttcatgagcaggttcgggaagagttaccgaagcgaggaagagatgagggagaggtacgagatattctncgcaaaacctcaggttcatccgctcccacaacaagaaccgcttgccctaacatnctctctgttatc

SEQ ID NO: 4721 - DNA, 101 bp, Glycine max
  unsure at all n locations
  Clone ID: 701001520H1
cnctagttggaattgagaccaacggccatggtcagcatgaaaaatatttttctttctaatatatataacggtgttcatctcctgtanaacnnaaaaaaagg

SEQ ID NO: 4722 - DNA, 298 bp, Glycine max
  unsure at all n locations
  Clone ID: 701001521H1
tctgaagataacttcgagaaggaagttggtcaggacagaggagctctcgttgagttctatgctccttggtgtggacactgcaaaaagcttgctccagantatgaaaagcttggtagcagcttcaagaaagccaaatctgttttaatcggcaaggttgactgtgatgagcacaagagtttgtgcagcaaatatggagtctctgggtacccaacaattcagtggtttccaaaaggatctcttgaacccaaaaagtatgaagggccacgcactgctgattcactgctgagtttgtaaatac

SEQ ID NO: 4723 - DNA, 298 bp, Glycine max
  unsure at all n locations
  Clone ID: 701001524H1
atcgcctctcggtgcagcttgtatagctagcagacgcaacaacacacacttctctacagccgtacggtagaaaaacacttacgaaaaacaatcagccatgtctattaaccgcgcactcatcaagaagtgggttcccaccgaaacctggcccatctttngcatcgttggcatcgcttgcggtggcgcagggtactacttgtacaagcttgctatgggccccgaggtcgtctgggaccgcaaggtgactggaggccgtgggacaaggtcaagcacgaccagaacctcaagttcctctcgt

SEQ ID NO: 4724 - DNA, 298 bp, Glycine max
  unsure at all n locations
  Clone ID: 701001525H1
gtgattttcatctttctccactgcactaacgcattcttttctttcacctctttcttgtgtcttatttctaanctatttccaatttccagccagcatgtctggcgaaatgcataaccgattccgcgtcatcgtcacgagccgccgccgcctctgatcaggtcatcagcagccggcggcggcccctctgagccggtacgnatcgcagaaacggcgagactggaacacctttggccagtacttgaagaaccagacacccccagtttcgctttcacagtgcaatttcaaccagtgttgagtt

SEQ ID NO: 4725 - DNA, 294 bp, Glycine max
  unsure at all n locations
  Clone ID: 701001528H1
ggncaccggattggcagganttcnnnggaattattgcactgctagtggatcaactccacaatcagttttattnaggaaaancatgctggcaaatgctgctgctgctcttatggcggtttagctccaaagactaaggtacttagggataaccgatgggtgaacaagatgctgcaattttagtaccaggagacataatcagcatcaagttaggagatatcattccggctgacgctcgtctcttgagggtgatccttgagtgttgattcatctgcttgactggagaatctcttcccg

SEQ ID NO: 4726 - DNA, 295 bp, Glycine max
  Clone ID: 701001529H1
taaggaatctcccagaaaagaggcatcagttgcaatggctcgttacggtgagggcgacaagcggtggatcgtggaggaccgccccgacggcaccaatgtccacaactggcattggtccgagaccaactgcctcgactggtccaagaccttcttcaccagcctcctcactaacctccctatcctcgacggcgagggtaacctcttcctcaaaacgacgtcgcttcgctccctcgacggcgaggcctacatcaatgtccgaaacgggaagatcatccccggctacgagatcagcctc

SEQ ID NO: 4727 - DNA, 280 bp, Glycine max
  unsure at all n locations
  Clone ID: 701001531H1
ggttttgnttctcgttaagccatcntagggnnggaggggctntccgggtcaaacaagtgnaacanagcgagatctgagtcgtaattcggagtccttttgaaaaaagaggcttttttgctgaattcacttggttcccatttggnttacttgattttntgaggttgcttggagttggagtcatggcagtgaggtgtgggattgagatggttcaaggaccatggagatggtatggaggaaaacccgttttaaatgagaagganatggcagctggaananngtt

SEQ ID NO: 4728 - DNA, 301 bp, Glycine max
  unsure at all n locations
  Clone ID: 701001533H1
gtgggaggtaaagtgataggttcaaatggagcagtatgaaattctagaacagattggcaaaggtgnattggttctgcccttccttgtgaggcacaagcacgaaaagaaaaagtatgtccttaaaaagatccgccttgctcgtcaaactgacagaaccctagatctgcccaccaggagatggagcttatatctaaagttcgaaatccatttattgtggaatataaagattcctgggtagaaaagggttgttttgtatgtatcatcattggctattgtgaagcagggatatggccgaagctat

SEQ ID NO: 4729 - DNA, 288 bp, Glycine max
  unsure at all n locations
  Clone ID: 701001534H1
cgtgcatcgagtattcggtttgtacgtgtgccataattgaattgttttgtgttgttttcttgaacatgaattggctaattaaaccaaagctttgtttctgatgagaaagactttggctgggttgtttataaattgtgaaacaggcagagctagctagtcaattatcttattcagtatttctgcacagccctttttttggtgaattattctgcacctacacccctggtgaagaatataattaagtttgcaggcctccaataacaggagnttccagtgtgcaatcaagaa

SEQ ID NO: 4730 - DNA, 294 bp, Glycine max
  unsure at all n locations
  Clone ID: 701001536H1
taccagagaccagtagttgactggtgggctgaagatttaactgtgcttagaattgacattttccaaagagtcaataattgcaatgatggcaagagggcttaaacagtatgctttggccccattctaatgctctatgcacagaaatctctacgaggttggatgtatttggaaaggcaaggnagaagattgagccgcgacaagagcatgaaaaaagggttgttttagagacaatagtgagcctttgccaagggagaagattcaatgtcagtaagctccttctatgctgcttcgggc

SEQ ID NO: 4731 - DNA, 299 bp, Glycine max
  unsure at all n locations
  Clone ID: 701001537H1
gcgaaatgaaatagaaaatgtaaaagatatataccaccgaatattagatgggtccgaagtccgaagcgattcgggnaggcagtgatagcaaagagaagatcatttcataatcagactcacctaactccgccatggctgctgttccctctactttcgtctaaccaaatctgcattgtccataaacaagctggaccactctctggtcaagatcaaaccatacagcttctctctgaatctaaaccgtctagggaggatggaaacatctttaaccagaaggcctctaacaattcaagccacat

SEQ ID NO: 4732 - DNA, 293 bp, Glycine max
  Clone ID: 701001539H1
tcatcaccaacctttgcacccccttctcataaccccgcctgcgattactattattctctcagatttttcgggaaaagcctatgctcgaaatctgctgaggaaatccaacgtggatgctggaattgccacactgtccctcactcggaacctttcctcgtttgcgagttgtgccagtgcattcagcccgtggatagctccattgactattttgacatatttggggtggagaggaagtatgacatagagggtgagaatttggagggcaagtacaaagattggcaaaagaaactgcc

SEQ ID NO: 4733 - DNA, 289 bp, Glycine max
  unsure at all n locations
  Clone ID: 701001540H1
tatgctccatattagcagcagttatgttacgttatggaaggtaccaganaaaggcagcaaggttgattccaagaagtcactggcttctgcaaatgatgtagcccaaganacattctctctggttagaactgtacgagtttatggaacagaagaaaagaacatggaaggtataagtggtggctggagaaattagctgacataagctgcgacaaagtgctgcatatggagtttggaattttagcttaacattcttatcatcaactcaggttatgctgtgctattggaggaa

SEQ ID NO: 4734 - DNA, 292 bp, Glycine max
  unsure at all n locations
  Clone ID: 701001541H1
gnctggaaaccccagttacatccagccctttgatcgcatggtacttgtccaacctgcccgcatacagaaccggagtgagcccactactaagagggatcgaggtgggcctggcccacggataccttctggtgggcccattngtgaaggccgggctcttaggaacaccgagatcgccgggcaagcgggctctctggccgccggtgggcttgtggtgatcctcagccttgccacncaatctcacgngattcatccttcaacgaaggagccntnntcactgctccgtcgctgaccc

SEQ ID NO: 4735 - DNA, 294 bp, Glycine max
  unsure at all n locations
  Clone ID: 701001544H1
cnattttgtctcacaaatctttgncagtgccttggccaaccacctctccacaaatttgagcagcttgagccttccaagcagcaccctttttgaccttttcatgggtgttttggttgatgatggagatgatgacntcgtaggtgctgtgaaggatgatttgatagctgttaaggagagggaccctgcttgcataagttatgtgcattgcttgctgaatttcaagggttttttggcntgtcangctcataggattgctcacaaattgtggcttcaagggaggaaggtctggcgctg

SEQ ID NO: 4736 - DNA, 296 bp, Glycine max
  unsure at all n locations
  Clone ID: 701001545H1
caaagcannaagcaaagctcatccttgagttaaaaaatggcagcagcttcttccatggctctcttcatccccatccttgggctggcaaggccgtgaagctgggcccatcagccccagaagtgggaagggtgagcatgaggaagaccgtcaccaagcaggtctcctcaggaagcccatggtacggcccagaccgagtcaancacttgggcccattctctggcgagcccccgtcctacctaaccggtgagttcccaggcgactacggctgggacactgctgggctttccgcagaccca

SEQ ID NO: 4737 - DNA, 295 bp, Glycine max
  unsure at all n locations
  Clone ID: 701001546H1
tccaattcatgagtgaggcacccaaacccgactcatatgaactgaactgaggtgcttgcattaatattatcatcgtcccatgtggagccctcaaaacaacatcatggantctcctttgttgtcacaaaaccatgttttgcccaacaaacacaatggaaaatgatcctttgtgctatcgtggctatcacaattgttggactagtagttcagnggcaacactagctatggnatactgtccagagcagaaaaatataatgatggaatcgcaaccaatcagggagatattgttgantcc

SEQ ID NO: 4738 - DNA, 205 bp, Glycine max
  unsure at all n locations
  Clone ID: 701001547H1
cnaccaccctctcccctaccataagggtgctcctcctctcacgccaacccccagactctcgttaccaccgagagccaccaagcagacatacaaggnagccttttgctcacctgcctgcntacgaccaacacccgaggagccaacttcgcggcaaaacactcctacttcccacacaagatgccannnnntcagcctgtcgncggca

SEQ ID NO: 4739 - DNA, 290 bp, Glycine max
  unsure at all n locations
  Clone ID: 701001548H1
tacggaagaacttagagacatgtggtgttcttgcaggatccctggtaagagatgttgtngttttgtgtgttacaaattctagaaaatctcttggatggtgattttaacagttatttgtgcttgcaatttgggtgctctagaaaaaaagggattccatatcacaacacttataatcccaaagcaggaatcaacttcagactcgtgtcaaacattgaacgaagaagaaatatttgaagttcaagacagctatcacttttccttaggttggatacatacacacccgtcacaga

SEQ ID NO: 4740 - DNA, 302 bp, Glycine max
  Clone ID: 701001549H1
gggttatcatttctccatttccattttctctctcacttttcaagaatcgtaagctatgggaaagtcttaacccaattgtgagtgctgattaccagaaggccgttgagaaggcgaagaagaagctcagaggcttcatcgctgagaagagatgcgctcctcaatgctccgtttggcatggcactctgctggaacctttgacaagggcacgaagaccggtggacccttcggaaccatcaagcaccctgccgaactggctcacagcgctaacaacggtcttgacatcgctgttaggctttggagcc

SEQ ID NO: 4741 - DNA, 298 bp, Glycine max
  Clone ID: 701001551H1
tggcaaacctcataaactgagattgtattctattgctagcagtgccattggtgattttggagattccaagactggtttctctatgcgtgaaacggctagtgtacacaaatgaaaatggagaaattgtcaagggagtctgctcaaatttcttgtgtgactgaagccaggagctgaagtaacaataactggacctgttgggaaagaaatgcttatgccaaaagatcctaatgccaccatcatcatgttgggaaccggaaccgggattgccccattcgctcattttatggaaaatgttctt

SEQ ID NO: 4742 - DNA, 292 bp, Glycine max
  Clone ID: 701001553H1
ccaattgcataaatttctaagagcagctgatggcactgatgagtggtcacagtttttcattccacagattggcactttcctatcaagtctgatgggtggatttgcaacacggttgaggagattgagcctttggggttgcatcttctgaggaacttcttcaacttcccgtttggaatgtggggcctctcttgccacctgtttcactcagtggctctaaacatcgtgcaggaaaggaacctggcatagccctgaagcatgtatggagtggctggatttgaaagatgagaatctg

SEQ ID NO: 4743 - DNA, 292 bp, Glycine max
  unsure at all n locations
  Clone ID: 701001554H1
tatgcttgtntcaaagattaagccatgcatgtgtaagtatgaactaattcagactgtgaaactgcgaatgggctcattaaatcagttatagtttgtttgatggtatctactactcggataaccgtagtaattctagagctaatacgtgcaacaaccccgacttctggaagggatgcatttattagataaaaggtcaacacaggctctncctgttgcttgatgncncatgataactcgtcggatcgcacggcctttgtgccggcgcacgcatcatcaaatttctgccctatcc

SEQ ID NO: 4744 - DNA, 295 bp, Glycine max
  unsure at all n locations
  Clone ID: 701001556H1
gtaaataccttatcatatcaagtattatcctctaagattagttttcacatttcctctttatttcttagaattcaacaccatatttcttnanacttatcaggatttgttttttcttaattatcctggattatgactggtataaataagggttacactataggttctatgaatatatcaaattatcgaatatattgatatgtcgtaataaatcttagttaatatcagtgtagtatttgttcttattctcttcatctatctaaaacccaaaatttttaaagtagtcaagatttgattc

SEQ ID NO: 4745 - DNA, 287 bp, Glycine max
  Clone ID: 701001557H1
tgattattgttacattatgctatatgattgtacttgtatatacatattttgtcccgccttgtaaatacaattggggacactaactaggattgggaagaagggtcttacatttttagtttggcaaatagatattgcaactacctttgtataatctatttctgaagaagcaattacaactttcaagggatgatagcatttgtggcataaggattaaggaggcataaaggaccattgcttggaatattcactcagacaggcacaggtctgcgtgtatggccaacacatag

SEQ ID NO: 4746 - DNA, 294 bp, Glycine max
  Clone ID: 701001560H1
cgatgacaacgtccagggcacccgctgggccgtcctcctcgccggttccaatggctactggaattacagacatcagggctgatgtttgtcacgcctatcaaatactaaggaaaggtggcctgaaagaagaaaatattattgtttttatgtatgagacattgcattcaatggggaaaacccaaggcctggagtcatcattaacaaaccagatggaggtgatgtttatgaaggagttccaaaggattacaccggcgaagatgttactgttggtaacttttttgctgcttacttgga

SEQ ID NO: 4747 - DNA, 211 bp, Glycine max
  unsure at all n locations
  Clone ID: 701001561H1
agntccaaagttttgctgatancgtatatnttctctggaacctcncagaatgattgttgtctgggatctctcccggaattancaaacagtgctgtcctaacattttctcaatatnananaaaaaataanactttgtgaatattggaggcaatanatgtagggtatttctgatgngcctaattcaagagnaggcgcgtaaagganattgagg

SEQ ID NO: 4748 - DNA, 293 bp, Glycine max
  unsure at all n locations
  Clone ID: 701001562H1
cagcttttgttctagcacttcgctgtctgaggttctggattctcagtgtttgcggagcgcagcatcatcttttagggaagaatggatcatcaagggcatagccagaacccattctatgggggttgttggtagtggagctcaattagcatatggtctaacccatatcagccaggccaaataactgggccaccggggtctgttgtgacatcanttgggaccatcaatccaccggtcaacctgctggagctcagcttggacagcatcaacttgcttatcagcatattcatcagcaa

SEQ ID NO: 4749 - DNA, 293 bp, Glycine max
  unsure at all n locations
  Clone ID: 701001563H1
cncaggttttggttgtcttcttatcaagaaatctgtgatgcaaagccttcaaaatcagtctggttgtactggatctggaatggtgaagattacccccgactttcctatgtatttgagtgattctgtagatggtttggataaatttgttgggatgaagacgacgatgaaatcactggaattggtgataagacgactganactncgtcagggaacacagttgcctgccttttctggtgcattcacatctgcacaggtcagagatgtgtttgagaccgaaatggatcaagacattc

SEQ ID NO: 4750 - DNA, 292 bp, Glycine max
  unsure at all n locations
  Clone ID: 701001564H1
gggccctagaactccttcaccaaagccgccgtgcgcggctccgccctcgccatggtcgacgccggcctcatcttactgggagcgaggcgagangccgaaggccatggagttgtatcttaaggccgcggaactcggaaatcctctgctcagtgcaattgggactttcctatctccaagctgaacctccgaacactgagaaagctgtgaaatggttacgtaaagcttctgtttgtgggatgttcgtgctcagtaccagcttgcatttgtctgcatcgaatggtgggaggtcgta

SEQ ID NO: 4751 - DNA, 301 bp, Glycine max
  unsure at all n locations
  Clone ID: 701001565H1
tagtctcagcgatatgatggcagacccagcaagtttcatagcaagctggttaatcctttcttacttctnatcttggtcaacctcgtcataggcaccatagccatcacttctcgcttcagtttccacgcccaaaaaccaanaagcncaccaccccaaccactcagctccttcaatacccatcatcaccaacccaactgcactcagccccaactccttccaataccctcactgttgcagcgagtcacgtccttcaacctctccctccacaaacaccaacccacaccttccagaaacacaacat

SEQ ID NO: 4752 - DNA, 293 bp, Glycine max
  unsure at all n locations
  Clone ID: 701001566H1
ataaacttcagatggaagcagtttatgtggaccaataccagttttattgggaactggaccaatcntatgacanagtgagtntacatttagacnccatgcattacttctaacttataagtgcaggttgagggaagattctttgctctctgtcaccttccctccagtgttgaatgaagctattgaagttatgaagagggctgcacctctggtgatcttttaattaanatatttggnattgangtaatcactatnttgnnatttgtttttngaccagcccnnttttactctgtgtc

SEQ ID NO: 4753 - DNA, 163 bp, Glycine max
  unsure at all n locations
  Clone ID: 701001567H1
gnagaaattgacccttcacccttgttaactgctcatatagcttcctagttgtatgtaatttatctagactaatgacagtttaggcttaggatcttctcgtcatgtaatcactagacactcatcaacattccctttgatgttatgaatatgaagtgtttgtggt

SEQ ID NO: 4754 - DNA, 294 bp, Glycine max
  unsure at all n locations
  Clone ID: 701001570H1
aaagaacatctcttgctcttcccactttctctctctaaagaatataatactcaaaattcatccatttttattttatttttcttaaaaaacaaagcgcgtatagtctcacgcgcccgacgatgggttttcccgtaggtacccggagctgctgttccgaaaatgttcctccacgcgctctccctcctccgcgtggctgcgctccctcgtcttcgccctcttccgccncctaccgcatctccgacctcctcgacaccgattccgccgcctctgacctccctccgccgcctccgccag

SEQ ID NO: 4755 - DNA, 292 bp, Glycine max
  unsure at all n locations
  Clone ID: 701001572H1
acgggacanangtggaggagaatacaaggttgnttaaggtgcagtgctattccaaagaaggcactgtgacattcaaccatgaaaccaattgagggtgtgactgccttgnttgacatgaataaaaaagaggtgctgtcaatttcagataatggccaaaacatccctgtggctaatggaattaacactgactaccgttactccattcagaagctgaatggaggagagttgaggatgctgaatccaatatccttggagcaaccaaaaggtccaagcttcacaattaatgggcanc

SEQ ID NO: 4756 - DNA, 295 bp, Glycine max
  unsure at all n locations
  Clone ID: 701001573H1
gttttgatttccccaaagaacataaaatatggccacgggcaccgttgacaacaaagcggcgaaatcgaaacctccaagggccgaagcgaatatgtttctcattcgcagcgtacgccggcgacctccttaattgcctcaaagcctcgaaggtngcaatcgacgaaggactctccgacgcagaattatcaaacatagaatccaaattgaaattctcgttcccaccggacttacgcgcgatcctccaacaaggccttcccgtatcccagggcttccccaattggcgttcttcctncaa

SEQ ID NO: 4757 - DNA, 286 bp, Glycine max
  unsure at all n locations
  Clone ID: 701001575H1
ttactcgatctttctataagcatatacttggtgttaaggttacataccatgatattgaagcggttnatcctgattactataagantttgannatggatgctggagaatgatgtgagtgatattcctgacctgacatttagcatggatgcgatgaggaaaagcacatactttacgagaagaatgaggtcactgattatgagctaaacctggaggaaggaacataagggtcacagaagaaacaaagcatgagtatgttgatctgttgctgaacatctttgacaaatgc

SEQ ID NO: 4758 - DNA, 287 bp, Glycine max
  unsure at all n locations
  Clone ID: 701001577H1
tggtttcgtgctccaagttgaaggacacagaatggatttcaagacaagatccgtacgtttgtnttgagtatgggcagcacaaagttccgaaccagaacctgcacaggtcggtcagcccttagtttttgattttgattttgattttgatttgattttgattgagtcgttgacccacgacgaccttgaccttccagacggcggcnaaacncccggtattccaagagaagttcatcttcccctcatgaaggcctcgggagctcaatgtccttgtttggaacagcaatact

SEQ ID NO: 4759 - DNA, 296 bp, Glycine max
  unsure at all n locations
  Clone ID: 701001578H1
gnaaagngattgattccagttccaatggccttnggcacnagcgccttgatcggaaggaaggttcttgtctcanccccaaanccccaaaacaaccaaatcatctactccgctacaattccttttcaagagaagcatcttaaatgctcacaattcacaagctgctctagctgccccttatcttttcctccgcgagcctctctgtgaccccacaagcccttgccgctgataacgtcacccctccccctgtaattgaagcccaacagagccaattaaacccctccaatnatcctcccctt

SEQ ID NO: 4760 - DNA, 293 bp, Glycine max
  unsure at all n locations
  Clone ID: 701001579H1
gtcagcaaagtccccaaatgtcaactgttagctcatttactggattgagtagtgcaagctcctttactactttacaccgaggtgcatggtgcacaccccctcgcctgttgcttcaagatcagtttgatgtggtgcccccagaaacagcatcgtaagttcagtggggaagaagacaatgaganaagatccattaaagaaaaagaatcctgggaacagttcaaaattagtcctggacattggcacgcttaaatgcagaaggaattctaaagctgctgcagaagcaagaacaaaat

SEQ ID NO: 4761 - DNA, 293 bp, Glycine max
  unsure at all n locations
  Clone ID: 701001580H1
gncactttctgagtacaatacaacactgccatggctgcctcagtctccactattggagctgtcaacagagctccactgagcttgaacagctctgaagctggagattcggttcccagttcagccttctttggcacaagcttgaagaaggttactgcctcaagggtccctaacgtcaagatttcttctggnagtttcaaaatcgttgcggcggagaaagagattgatgagcaacaacagacaaacaaggacagatggaaaggtcttgcctatgatatttcagatgaccagcaaga

SEQ ID NO: 4762 - DNA, 280 bp, Glycine max
  unsure at all n locations
  Clone ID: 701001581H1
cctctgaaagctttttgcaaaaagttgtgattttccnctgaaanatggcancttgagctgacccagatcagacctgggaattgtgcatctgggtttggcttnaattgtgctgggaaggttaaggttggtcccagcagantgggtttaaggtgtttgcttcaganactcaggctacagagcctgatcttagtgtcactgttaatgggttgcacatgcctaaccccttgtnantgggtnaggtccaccagggaccattacactgtcatgaagagggctttgc

SEQ ID NO: 4763 - DNA, 298 bp, Glycine max
  unsure at all n locations
  Clone ID: 701001582H1
ctcctcttcctcttcctcttcctgcatttctccgcgtgtgtgtatgtgtgtatactctctcaagtacnnaaatacatacacatccattcgtacataaatacttatatctcttcttccttcgccgttaattctctgaatccctagctcttctgttcccgatatgtatcatggcctcgctngtcaacaacgctaacggcgccgtcaatggttttcctggaatatcccagaagctcattatcgataccgaccctgggatcnttgatagcatggccatcttatggctttcaaagtccagatg

SEQ ID NO: 4764 - DNA, 295 bp, Glycine max
  Clone ID: 701001583H1
atcggaaatggcaaaaggtagcaggggaagacacaggattgcttctcgtcaattcagagtgactccatacccactggcttcttgcaaaagggacatttgtgaggacctctgccaaaacaaatgttctaaggctttggaaaagaaagagtgggaaatgttacatgttctgtgtgcatggaatatccacacaatgctgttcttcttctttgttcttctcatgacaagggttgccgtccctatatgtgtggaactagcttcgtcatccaactgtctgatcagtacaagaaagcttata

SEQ ID NO: 4765 - DNA, 291 bp, Glycine max
  unsure at all n locations
  Clone ID: 701001584H1
cacagnatgcaaagantctgnaacttgctcgagaatttcttctagatgctgctaccgttatatttanagaacaggttgaaaaggctttcagagaaggaacagcacgccaaaatgcgcacagcatatttgtttgtcttgcactganactactggngaacgagttcatgtagcatgcaaagaaatcattacattagaaaagcaggtctttattatgctttattgggaacagactttggaataantgaacaaaaactgaactctccactttattttgagntttacttccaaatc

SEQ ID NO: 4766 - DNA, 294 bp, Glycine max
  unsure at all n locations
  Clone ID: 701001585H1
ggggaggcaagggacaaggaaaatctttccaatgtgagcttgtctttgccaagatgggaatcaaccccatcatgatgagtgctggagagttggaaagtggaaatgcaggagagccagcanaactgatcaggcagagataccgtgaagccgcgacttgatcaagaagggaaagatgtgtgctctcttncatcaacgatcttgatgcaggagctggtcgtctggtggaaccacccaatacactgtncaacaaccagatggtgaatgccaccctcatgaacattgctgataacccca

SEQ ID NO: 4767 - DNA, 129 bp, Glycine max
  unsure at all n locations
  Clone ID: 701001586H1
tctgttttnncctcaaaaaggaagatatacagtacacctcattaanatgtacaattgtttatcatctgaatgaggtgtactgtatatctgtttttggggatacgtntcaaatatcttcctttttgaggc

SEQ ID NO: 4768 - DNA, 294 bp, Glycine max
  unsure at all n locations
  Clone ID: 701001587H1
tcgagaactaaaactaaaacccagtaagggctgaacatgctaatggacatgaacttcttttatcggaattcagaaggggcccaaatatcaaacaatagaattttggctaatgccggaactggaatgtgaacaaacatacacataccagcagtaacagacacgtgtctgatttcttttttataaaataaataganncnaatcggatgagtatgaatctagtggtgggggttctgcggccaccgcttattgcatttcggcgaaacaaaatctccataatctcgagagtgaattcaa

SEQ ID NO: 4769 - DNA, 287 bp, Glycine max
  Clone ID: 701001588H1
ctacttgatgatcgttccttcacctttgatctcactctcgaccacataaaagccgtgctcatgaacatctttatagcaggaacagacccgagttccgcgacaatagtttgggcaatgaatgcactgttgaagaatcccaatgtgatgagaaggttcaaggagaagtgagaaatctattcggtgacaaagatttcataaacgaagatgatgtcgaaagcctccttatctcaaagcagtggtgaaggagacattaagattattcccacctcaccactactttgccaggg

SEQ ID NO: 4770 - DNA, 283 bp, Glycine max
  unsure at all n locations
  Clone ID: 701001589H1
cnatttttactaccaagagaatgcagtgaaagatgtgaaattaacgggtatgaaataccagccaagagcaagggtattatcaatggttgggctattggaagggatccaaaccattggactgatgctaagaagttttgtccagaaaggttcttgatagctcagttgattacaaaggtgcagattttcagtttattccattggtgctggaaggaggatgtgtccaggaagtgcattggcatgctaatgttgaactctgctcagcgatttgctctccatttgatgg

SEQ ID NO: 4771 - DNA, 290 bp, Glycine max
  unsure at all n locations
  Clone ID: 701001591H1
tagactnttctnatantngcgaaagacgttgancaggtnacagagtnaggtgaatactccgngaangactanncatgaccntcctcnggcnacgttgatcgacncanatgagctcacaaagtggtccttgtacagagccgccatagctgattcatagcaanactcctttntctttacatcaccgtgttgagcattattggntacaagagacagagtgccancaaaatccccggtaacnccgaatgtgcacggcgttngncttttgggcatcgttgggccttcggtggcat

SEQ ID NO: 4772 - DNA, 293 bp, Glycine max
  unsure at all n locations
  Clone ID: 701001592H1
cngtgacaaaagttgcgtagaatagcatactcttactctgattcgttagtgaagaaaaatggcaacaattcatcgccggcaccccaactacatcaatcactcgcacaggtcatgtgctcaaacgacctgttggggcctcatcctctaccgttcttggattgccagcaatggccaaggcggggagagtgaggtgctccatggaggaaaagccttcaagcagctcaaacctagggatgggggcatcctgttagcagctgcagctgccgcaaccatgtcaagcccagcagccatgg

SEQ ID NO: 4773 - DNA, 272 bp, Glycine max
  unsure at all n locations
  Clone ID: 701001594H1
cnttaaatttctctgttttctattannagatcttgaactncactgaaagagnctgtcatcttaccngaagaagcttttgatgaagctatttctgagcttgacaccttgaatgaggagtcatacaaagatagcaccttaatcatgcaacttctacagggacaacctaactttgtggacttctgacatcccagaagatggagaagatgcccagaaagtgaatggcactgccaagctggtggaggtgaggatgcagagtgagtccgatggatgat

SEQ ID NO: 4774 - DNA, 286 bp, Glycine max
  unsure at all n locations
  Clone ID: 701001595H1
gaacgatctttgcgtttccgagtctccaagtcctctgttttacantgctgcgcnaanaatcanttcattttgtgattataaatncgcaactcattacccaanccaatttcttctctttaacagcaacaacatcaaaattcccattccttttctnctnttcttaataagaaacctcgagaagaaagtaaaaggttcgtttttaccctctttcttcccagaagcgatctctaaagccgacccattcggnaattcggaaaacccagtgtgatcgctctctgggtgttcc

SEQ ID NO: 4775 - DNA, 291 bp, Glycine max
  unsure at all n locations
  Clone ID: 701001596H1
cacgcgaacacaatagttgtagagtatagagtctgtcgagatctcattcatgatcggtgataattgttgannnnnnnnnnnnnnnnnnnnnnnnnnnngatgggttgttgccaatcatcgatgttgctgagagtgggagagagggagactcaccctgaaaaggagaaggaaagggaaaagganaaagagcaagcgtacggaaaccaccagaggcagtctgagggaggagagggcgacggcgagaaagaggtggttgatttctcgtctcggattctcgctggcggactgaag

SEQ ID NO: 4776 - DNA, 280 bp, Glycine max
  unsure at all n locations
  Clone ID: 701001601H1
tcttcttctcttcgcgtngccgtcgtcccccgcaacgacgtcgtntcatggttacgttattgttgttgtgctgattctctctccgaaaatcttctgagggcttctcggcgatgagtggagtaatacattctctggtgtttgattccgcgtttccattttacaatttctctgtctcggcatgtaangantgtttgatggaacgacgagngctcggctaaccatagtaatggggtgaggccgggtganagtnatgatccatattgtgnccttatccggaggc

SEQ ID NO: 4777 - DNA, 274 bp, Glycine max
  unsure at all n locations
  Clone ID: 701001603H1
ggnaagttagcttttaaagttgtcatccagctggcacttgatcttgcaagagggctgagttatcttcactcccagaagattgtccatagagatgtaaagacagagaacatgctattggataagacacgcacagttaaaattgctgattttggggttgcacgtgttgaggcatcaaatcctaatgatatgactggggagactggtactcttggttatatggctccagaggttttaatgggcaacccctataaacaggaatgtgatgtgtacagtt

SEQ ID NO: 4778 - DNA, 257 bp, Glycine max
  unsure at all n locations
  Clone ID: 701001604H1
ccaagctccacaggatgctggaactcactatgctgtcatgagctcctacgagtaccttagcactggacttcgccagtacttggacaacaacatggatggattttacattgctccagcttttatggacaaacttgttgttcacattaccaagaacttcatgaccctgcccaacatcaaggttctctcattcttggtatctggggangcaaggggacaagggaaaatctttccaatgtgagcntgtctttgccaagatg

SEQ ID NO: 4779 - DNA, 272 bp, Glycine max
  unsure at all n locations
  Clone ID: 701001606H1
ctctggttgggtatctgaatattacacaggtcatagacttttaanaataatttacgttgacaattgtcaagaacaaacttcattttttgggtaaatgtctgcatatttcattattttttcattgaaacgaagtacaatttctatctttagaagactagactagatgacaattctcccaatccgtatctattctacatctttaacgggaaactaaaatattttacactagaagcctggcaaaaacttgtataacactataggcagcagattgc

SEQ ID NO: 4780 - DNA, 264 bp, Glycine max
  Clone ID: 701001608H1
gtaaattgaagggaggaagtggcaaagtgatcaacagcaaacccgaggacagaatatttatatactactctgatgcatggaggtcctggaatacttgggatgccaaacatgccatacctttatgccatggattttattgatgtcttgaagaagaaacatgcatctggaagttacaaggagatggttatatacgtggaagcttgtgaaagtgggagcgtgtttgagggtataatgcctaaggatctgaatatttatgtcacaact

SEQ ID NO: 4781 - DNA, 267 bp, Glycine max
  unsure at all n locations
  Clone ID: 701001609H1
ggnagagaagagaggaagttttgnngtttgaatctatagaatagaatcaaaccaaattgaaagaagatcgatcgatcgatcgatggctctggtcggagttgaagtgaagcatgcggcggagggcgcaccggaggngaattgctcccgccaagcccaccaagcagggcgagggcctccgccactactattctcacaacatccacgagccatcagctccttctccgtcaaaagacgcataacctcaaccgtcttgaggctcagagaaac

SEQ ID NO: 4782 - DNA, 261 bp, Glycine max
  unsure at all n locations
  Clone ID: 701001610H1
cagtcacccgcagcgttcagctcggcgatgttgtgcggcctgtcgtatactggagcagattcgcatcgccctctcggcctgctgctggaaacgccgtctgcaaagcggggcctcatcacgacctcaaacacaacaacaggaagtggaagnggttggataccgggctgatagaagctctgcctgtatctccatgaaagcagacggcggatgcgtctgcacgtctgattggaccatgggaccggtgagctgcacagcagcctg

SEQ ID NO: 4783 - DNA, 259 bp, Glycine max
  Clone ID: 701001611H1
caactacaagtgatctcaggggattgtgctaccaagaagatgttgcccaaggatgcagtgagcgaattgcagaaaacccatgaagccattcaagctttagataaacaagtttcgatgcttcagatggaactagcagcagctaggagttctcgtgagagtgggatctcggattctaattcttcaaccaccacttctggggaaggtgctccaaagaagaaggctttatagtgattggcataaacacagctttcagtagcag

SEQ ID NO: 4784 - DNA, 264 bp, Glycine max
  unsure at all n locations
  Clone ID: 701001612H1
gnaatggcgatggcaatggcgcttcgcagggctttcatcttcaattgacaagcctctgcgccctctcttcaatgccggttccctctactacaagtcgtctttgcctgatgaagctgtttacgacaaggagcgacccggagttacatggccgaagcagttgaatgctccacttgaggtcgtggatcctgagattgctgatattattgagcttgagaaagctaggcaatggaaggggctagaattgataccgtcagagaatttcac

SEQ ID NO: 4785 - DNA, 267 bp, Glycine max
  Clone ID: 701001613H1
gggcaattagcagaggagagcttagggattggaaccacttggtcctgaggttgttgcttattttggagagagattgatatcagagaaaaccctgagcagaaatgctgtaagacaattgtctaacaataagactgtcattgcttttacttataaacaaaatgggttgcttgttggttgcaagtacagaacaatggagaaaagattttggcagggaaaaggcgcggacaagatactgtatggaatagatgacattagtcaagcctctga

SEQ ID NO: 4786 - DNA, 268 bp, Glycine max
  Clone ID: 701001614H1
atcactgacctcgccatgttcattactccgctttggattgcggttatcgtcggcgtcgtcgtgggctgggcctggaagcccaaatgggcctttcaccccaaagacgctcttctcaagtttcgcttcccctcgcccttccaatccccaaaacgacaccgctttcaccttctccaccaccagttcctccgcgcgtgaaaaagacgcgagtgcgagtgcgagttcatttagtgacggaatacgattgctgcatctgtggaagttggttgag

SEQ ID NO: 4787 - DNA, 266 bp, Glycine max
  unsure at all n locations
  Clone ID: 701001615H1
gtggaaattcaggaccttcccttctttgacactgtgaaggttaagacttccaatgcacacgcaattgctgatgctgctctcaaaagtggaataaatttncgagttgttgatggaaacactatcactgttgcttttgatgaaacaaccacattagaggatgttgataatctttcaaagtttttgctggtggaaagcccgtctccttcacagctgcatctcttgcaccagaagtttcagagtgcgatcctctggattagttaggaaga

SEQ ID NO: 4788 - DNA, 239 bp, Glycine max
  unsure at all n locations
  Clone ID: 701001616H1
taaggactatgacannaaccaaggtcgtgannatccgtacatgatataccactgatcatgattcatgctgaaattcatactggctgttagtggacttcaatttgggganggaaagtgattatatagttttgctcgataacaagctgggacaggcggaatttcatggtggttatgttccataacgggttgttgaaggcagcagggggctggggtggtggcatgttgacatgctagcattc

SEQ ID NO: 4789 - DNA, 274 bp, Glycine max
  unsure at all n locations
  Clone ID: 701001617H1
gcaattgaagttgaagtcttgcccttctctcttcaactccaaacacaagacatcatncatccatggctgcctccgtctccactgtcggagctgtcaacagagctcttttgaacctgaatgggtctggacctggggtttcagctcccagttcatccttctttgggagcagcttgaagaaggttattggctcaagggtccccaacacaaagatntcctctggaagcttcaagattgttgctgtagaagagaggaagagattgagagacccagcaga

SEQ ID NO: 4790 - DNA, 255 bp, Glycine max
  unsure at all n locations
  Clone ID: 701001619H1
aagggtggtgcggtgangtggtgtggcaggcagcacggataaaggccgaggcgatggcccaagtttcaaagtttggaaaaagcacgacgccaaagccaatggaagtgaaggaggagtctctagcttcaacaagagaagggcccaggcagagacaaaaacgacattccaagaagaacttctatcaaattcgcanntcaaccaatcatacatctctatgttcagatatgggatgggnggntatcagntactctcctc

SEQ ID NO: 4791 - DNA, 268 bp, Glycine max
  unsure at all n locations
  Clone ID: 701001622H1
gatcgaagatctgnaaccctctcttgcccacaccgtttcagcttctgggtcgtgaaatcgtgctctggtacgacaagtccatttcccaatgggttgcttttgatgacaaatgcccccatcgtcttgcccctttgtctgaagggaggattgatgaagatgggaagttgcagtgttcttatcatgggtggtcttttgatgggtgtggatctgtgttaagatacctcaggtntgcatctgaaggccccgaagcacgtgccattggatctcc

SEQ ID NO: 4792 - DNA, 268 bp, Glycine max
  Clone ID: 701001623H1
tatggctctcacgtgatgcagtatggtgatgtagggcttagcagagatgttctcttccattatttgggtacagatcctgctaatgataatttcacttttgtggatgaaaactccttatggtcaccttcaaaaccagttcaaccaacgtgatgctgatctcatccatttttgggataagttccgcaaagctcctgagggttctctcaggaaaaatacagctcagaaacaagttttgggaagcaatgtctcacagaatgcatgtagacaa

SEQ ID NO: 4793 - DNA, 263 bp, Glycine max
  unsure at all n locations
  Clone ID: 701001624H1
gactttgggctatgcagtcactttgtgagagccataatgacattaaaaccatcataacagagcttgagcttcctgtacatgattgggatgagaaatggatagacgtgtacttggacattagtgtgaagttgctagatatatgcattgcatttagctctgaattatcacgcctgaaccagggtcnnnctttacttcagtgtgcattgcacaatttaggttcttcctcttcagagcagtatgttcgggcatgttcttcattgatg

SEQ ID NO: 4794 - DNA, 260 bp, Glycine max
  unsure at all n locations
  Clone ID: 701001625H1
atgaacatcatcctcaacaataacacatcctgcatactcgactcggaatggtcntcaatacggttggaccatagtactgtgctcaaggacaaaactttgtnaccatagaatttnaaattcctctgtangtaccagattaattttnaccggtcaaaaatacaaangagtaacntgggcctttcagtaaatttggagttctctctctgaaaaaggaactgctgtagtagttcanggataagtcatgcatattnatgtntgca

SEQ ID NO: 4795 - DNA, 265 bp, Glycine max
  unsure at all n locations
  Clone ID: 701001627H1
agtacacaaaattttggtctataattatatgcaacctccctctcttcacaatcatcacatccctncantcgcaggcgaacacaaacactctctctttncntcttggngcaattngatcgaagctatctacccttccatggcggcaggnctctccaccgcngcaatcttaaagnnctacaatctngtnnaanccccaatnccctctttctaaaccaannacatcactcttcttcaaccccttaagatgtttccatcacagtacaat

SEQ ID NO: 4796 - DNA, 264 bp, Glycine max
  Clone ID: 701001630H1
aggtcccaggatctgaaaaagggtgttgattgcgttcgcctgaatgttcaatctgttttggacaaacaacttgctgcttgggagagttacatcctccgtcactgttttgctcttccccaaggttttcgtatgccaaacaccgatgaatcaaatgagaatgccctagatccaggtgctcctttgatccagatatagatgcccagttagattcattgagagaaaaactaattgaggtggggaaggagtctgaaatgcttaatcaag

SEQ ID NO: 4797 - DNA, 269 bp, Glycine max
  unsure at all n locations
  Clone ID: 701001631H1
gtgcccccagcttgaacaagccacttacaagaatcgccagagnctctacctttctgagcagactgatggtagtgtgccgaatactctggtgattgcgaattgcgaggttgtgaagcctagggttgctgctgctgagcacatttcgcagtttaatgaagaggcgcggtccccatttgtgaagangtacaagaccatcatacatcctggtgaggtaaacagattagggaattgccacaaaattccaagatagtggctacacatnacgacag

SEQ ID NO: 4798 - DNA, 270 bp, Glycine max
  unsure at all n locations
  Clone ID: 701001632H1
ttagttcctctctctgngttcatatcgcaacatgcttcccttttcaactctctttcaaaccccgttaaccaccgagtattggtacaaccaccccacaacaacacttctagcgttcttgctcatctcccttgttacttgctatgcatggctcaagcccaaggcccaaaggcttccaccgggcccatcgggcncccctttcttcgggaactcctatccttggacccagacctccacacttattcgccgtcctggcccagatccaggtccaat

SEQ ID NO: 4799 - DNA, 266 bp, Glycine max
  unsure at all n locations
  Clone ID: 701001634H1
tttcatatcacaccaacccattttaatttgcatttgatcttcttcatagacatatatacactatcataatattagtttcttccttaaattttggttgtttttaacgttatgaagtttgggnagagactcaagcaacaaattcaggaatcgttgccggagtggagggacaagtatttgtcgtacaaggaattgaagaaacttgtacggctcatatcggcggcgcgcctaccttgttgaatgggtcgttggnattgggcaagacggag

SEQ ID NO: 4800 - DNA, 269 bp, Glycine max
  Clone ID: 701001635H1
catgaagttactgaatttagctgttgatgggaaagtcacagaacacattataccttcattcaataagattgataacttcttgaaagactggaaaattgggataccagaacagagagagctctttcttgctgtctctaatattttgaaggaaaataaaagcatgtcaaaggatgcttttaagttcctgaccagttatctggcaactttttcggggagatgactcacatgttttgagtggagccaggaggagctgcacgtgcaattgtgga

SEQ ID NO: 4801 - DNA, 269 bp, Glycine max
  unsure at all n locations
  Clone ID: 701001636H1
ctccctttcactctcgtagacatcacaaaccttccctccattcatcccacgcatggctgccatgaactctagcgtattggcctgtagctatgccatatcaggtgcagcgtgttcggagctcaatgggaaggtcacttccgtggcctatgttgcatgctctggctacaagttgccattgatcaaagctgaggccagagttcctaaagccaaagaatctgaaggaggnnggagaggtgcccttgttctctggcagctacccttttcacctc

SEQ ID NO: 4802 - DNA, 271 bp, Glycine max
  Clone ID: 701001637H1
gatctatcatgctcgccattcccaccgtcctcctcgcgtgccttggcagtgccatcgccgcgcccacttcccggccagccggctcccgtcccgtctggtggtgttggtgtgcgtcccaatgatacggcgccgctgtatcacaccatctctgacttcgacttccagagcttcaatctggcgctctatcaggagtggattgagctcgatctcttcaacttacatcgtccagcgcttcagcgtcgacgagtttgccgaggcggcctcaacgaag

SEQ ID NO: 4803 - DNA, 265 bp, Glycine max
  Clone ID: 701001638H1
gtcgtcgcgtgtactttcttgcgaaacagaagggcgaaggggcaaacacaacttttttgtttttttgtagagcgagagagaaaaaaatgttggggatcttcagcagttccgtggtgtcgccgccggaggagctggtggctgccggcagcagaacgccgttcgccgaagacgacggcggggaagctgctgaaccggttcgtggagaacaaggcgtcggcggtgtcgctgcaggtgggagaacactgcattggctacacgcaccaca

SEQ ID NO: 4804 - DNA, 266 bp, Glycine max
  unsure at all n locations
  Clone ID: 701001639H1
gttgagaagaatgcggatttccaaagctaataaaggaaacatcccttggaacaaaggaagaaagcacactcccgagacnttgcagaaaatcaaagaaagaacaaggctcgcaatgcagaatcctaaggtcaaaatgaagctcgttaatcttgggcatgcacaaacttcagaaacaagaaagaagattggcgctggagtgagaagacgatgggaaaagaggcgtggaaagaagatggtgcaggaatcttgctgctttgagtggcaga

SEQ ID NO: 4805 - DNA, 263 bp, Glycine max
  Clone ID: 701001640H1
gggaaaacagaaggctaagagagaatatggagagtagtgagggaattaggtgtaaggtatgcgtgaccggcggtgctagttacataggctcttgccttgtcaagaagcttctgcaaaagggctacaccgtccactccaccctcagaaactttaaggacgagtcaaagataggccttctgagagggttgcctcatgctaatgatgagagactggtgttatttgaagcagacatatataaaccagacgagtacgagccagcaatt

SEQ ID NO: 4806 - DNA, 258 bp, Glycine max
  unsure at all n locations
  Clone ID: 701001642H1
tgcaattgaagttgaagtcttgcccttctctcttcaactccaaacacaagacatcatcatccatggctgcctccgtctccactgtcggagctgtcaacagagctcttttgaacctgaatgggtctggacctggggtttcagctcccagttcatccttctttgggagcagcttgaagaaggttattggctcaagggtccccaacacaaagatttnctctggaagcttcaagattgttgctgtagaagagaagaaagaga

SEQ ID NO: 4807 - DNA, 257 bp, Glycine max
  Clone ID: 701001643H1
aaaaattgggaaggccccagaagatattttggtgaaagacatcatcaagagtagtcctatggaagtggctattgctaccccatcagagaacacaaaggaatttgagacagtggaagctgatagagtgaaggttttcttcaagatcaaggagaaaagtgagtttgtggacatgaaaaggggaatcttggctccaatggatgctgctggttcctgaaatttgaggacaaaggtgaggccaggagatcatcacctctccc

SEQ ID NO: 4808 - DNA, 259 bp, Glycine max
  unsure at all n locations
  Clone ID: 701001644H1
cnaatccggagggatcaacgaaaaggttcttcttggtgttaccattccagtttgtgtcttatttattgggatgattggtgttggaatnctactttgccggtggcccccaaaaaagcatcttgatgaagaatccaaaagcattgaaaaaagtgatcagcctattagcatggtgtgggnaaaagatggaaaattcacattttctgatctgttaaggccaccgatgacttcaatgacaagtactgcaccggaaaaggnggat

SEQ ID NO: 4809 - DNA, 267 bp, Glycine max
  unsure at all n locations
  Clone ID: 701001645H1
cgtgggggaagataagagaactcacaccatatccgttctcgctcctctacgaattttcatancccattcatatttttctccatgcatggacttgncccgcgaagttcaccgtttagacctcaccggcgtggtcattttggacgcacganagccctccgtactccgccaccttccgccacgcatcctcacnanaacaaacaccaatttaatctacacgaaccggttctncgggcccatcgaggcccaattccgttcctcttccacgna

SEQ ID NO: 4810 - DNA, 98 bp, Glycine max
  unsure at all n locations
  Clone ID: 701001647H1
cctnttgatgagatggctctnnggtgaacttgtggaaagagttttagcatgctttcgtccagcagacgttttctncttgctcttncacatcancatac

SEQ ID NO: 4811 - DNA, 267 bp, Glycine max
  Clone ID: 701001648H1
ttctttatagtgtacattttacatacctgtttcaatttttcatttttcagaatttgtccggaatcatttatatgagaccaaaattaaggaagctatgcataactaactctgacacaattcagtatttcattaactgaacatcaaccacaagaaatttgtatggaagtttattctctgaaatgattttgcattccataaactgattcaactttattgagtttttttctctgaactacatatattcaatgtgcagatcctgagaagcaa

SEQ ID NO: 4812 - DNA, 265 bp, Glycine max
  Clone ID: 701001649H1
ggcatcttggttgcgatggcaggaaattctgctggtataaaaatacacgctgtatttgtatctaaagcttcaggtgaaatactaagcaaatatgctgggttgactaatgtggaaatatggctcattccaacttttgaaaactcagcgtggtctatcatggcaatttcatttatttccctgctagctatgtctgcggtgctggccactgtttcttcgtccgcaggcatcgcataagaagagaaggctcgagctcctcttgttcgtg

SEQ ID NO: 4813 - DNA, 210 bp, Glycine max
  unsure at all n locations
  Clone ID: 701001650H1
gncaatggtgtgaaagttcaattcgccatttgtggtgtttgtntgtntaattaggnttangtttacttantnaagcttctcanncntcctcnnctntatactnnnntgntgtattttgccatatcatccgacttttatatgtattttttgggctgctgaaactggtgcatgtaatgatttgggctagcaatgcagtgtatttcatgggtc

SEQ ID NO: 4814 - DNA, 268 bp, Glycine max
  Clone ID: 701001651H1
gtctcccctcactcacattgggcgcaacttcattcgacaacgcctctccgatgcagcaagcagaagagcacctcgacgttctcaccaaaaccggcctcaaaaccggcgtgtccaagcccaggggagacgtgcatcgcgatggcgactaccaccgcgccgtccacgtttggatattcgcggagagcacgcgggaattctcctccaacggcgcgcctcgtgcaaggactcgtgggcccgatctctgggatattctagtgcggccacattt

SEQ ID NO: 4815 - DNA, 266 bp, Glycine max
  Clone ID: 701001653H1
gggggtagatctccttatacataccaagatcttcgagaaatggtggctgcgtacatgagaaatcatacatctgatttccttccatttttcctgtcagagaatttgattgaagatgattccgacgaatcacctgcccagaagtttgaaaattattgtaaagaagtggagtccacagctacatgggggggacaactagagcttggtgccttgactcactgcttgaagaagcatattatgatatttcaggtccttcccagatgtggaga

SEQ ID NO: 4816 - DNA, 266 bp, Glycine max
  Clone ID: 701001654H1
gtgtaagcaagcaaaaccctagcggcgcctgctttctttgttcgtgttttgcatcaggatggagtctcaggtgaagcacgcacttgttgtcaaagttatgggtcgtactggatccagaggacaagtgacccaggttagagtgaagtttttggatgatcagaaccgtcacatcatgaggaatgtgaaaggacctgtgagagaaggagacattctcaccctactcgagttctgaaagggaagcaagaagattgcgctagatggtctct

SEQ ID NO: 4817 - DNA, 260 bp, Glycine max
  unsure at all n locations
  Clone ID: 701001655H1
cacctttgttcactcttcttctcttgcggctagggttttagcgcagttcttctagatttaaggaagatgggtaaggaaaaggttcacatcagtattgtggtcattggccatgtcgactctgggaaatccactaccactggtcacctgatttacaagcttggaggcattgacaagcgtgttattgagaggtttgnnnccgaagctgctgagatgaacaagaggtcttcaagtatgcctgggtgctggacaaacttaaggcg

SEQ ID NO: 4818 - DNA, 259 bp, Glycine max
  Clone ID: 701001657H1
tggttttgaagaattttgaagggttggatcttggaaagctgaacaagactagtgactcttttgctgcctcttatgctgctgaactatacgatcggtcactcaactggaaggatatcaaatggattcaaacaatcacttctttgcctattttattaaagggtgtacttactcctgaagatacaatgatagccatacaagctggagctgctggaatcattgtttccaatcacgggagctcgccaacttgactatgtccctg

SEQ ID NO: 4819 - DNA, 258 bp, Glycine max
  Clone ID: 701001658H1
ggtttatctacacggggtaatagaataactctcaagaaggacttcaatggaagatatctctactcaccttggagactttcatcattgaacaataaggcatcagaagcattttccataaagtcttccttggagcaaaggcaacaacaagaagggagaagggggtttctaaaactgttgcttggaaatgtgggagttggtttgcctgcactattggcaagtggcaaagcttatgctgatgaacaaggggtttcctcctcc

SEQ ID NO: 4820 - DNA, 259 bp, Glycine max
  unsure at all n locations
  Clone ID: 701001659H1
cnagggccctcctggtacaggcaagactggtttgctcaagcaacttatagcatgtgctgttcagcaaggtgaaagggttcttgttacagcacctactaatgcagctgttgataacatggtagaaaagctttcaaatgttggattaaatatagtgcgggttggaaatccagctcgtatatcaaaaacagtgggatcaaagtctttggaaganattgtaaatgctaagcttgcaagttttcgagaagagtatgagaggaag

SEQ ID NO: 4821 - DNA, 263 bp, Glycine max
  unsure at all n locations
  Clone ID: 701001660H1
caatcccaattcaatgactcctcgcgtcgacgatttcgaaaaggacaatctctcnnnnnnnnnnnnnnnnnnnnnnnnnnnnnacgacggcctcaaggaggacatggccgcgctcgcccgagcctgcacgatcgccgtcccgtgccccgacgataattccaccgccgaagacgatgttccggcggaggacccgctcctccacgccggagactcgatcgttcccgccgccaccgacttccgacgacgaccaggacgactcgagt

SEQ ID NO: 4822 - DNA, 262 bp, Glycine max
  Clone ID: 701001661H1
ctgtcatctccgaatctgagtgcaatggactttccagctcttacttccatcaaatggccagaatgcttcaaaatatgctgcagataacgttcaacaaagtggcaatccttacttatcatctgataaagacatgctcatgttcaaatctgggtcttctattccatctagaggtgctgttgactttgcttcagctgtcaggaaattggcttctcaggatctggtatatggaagtatgataaaaaggttctggtgatgcttccac

SEQ ID NO: 4823 - DNA, 264 bp, Glycine max
  unsure at all n locations
  Clone ID: 701001662H1
agttctgttctcttcaaaatggagactaataatgcatgtactatgcattctcattgcatagagatgtccatggaantgcaccaagttgtgccaccacctcacaagagcacccttcagaaactcaagggtaggctcaaggaaactttcttccctgatgatcctctgcgccaattcaagggacaacctcttaagagaaaactgatccttggagctcaatatgtgttccctattctccaatggggtcctaagtatatctcaaactct

SEQ ID NO: 4824 - DNA, 267 bp, Glycine max
  unsure at all n locations
  Clone ID: 701001663H1
gnagttaaaagccttagccttccctacaactccaaacannnaagacatcntcatccatggctgcctccgtctccactgtcggagctgtcaacagagctcttttgaacctgaatggttctggagctggagcttcagctcccagttcagccttctttgggaccagcttgaagaaggttattgcctcaagggtccccaacagcaaggtttccggtggaagcttcaagattgttgctgtagaagagaagaaagagattgaagagacccagc

SEQ ID NO: 4825 - DNA, 269 bp, Glycine max
  unsure at all n locations
  Clone ID: 701001665H1
gntnntgnntgtctccctctctcntacggtctttactcttttaccattctcattttatcgactacgtacgtaatcaaacacacaataatataaagcgctggatctgaattttccgttgcatanctctctgtttctccctgtccaataaatttgtgatttggncctgagaagagatggatcgagaaaatggcgacggcgacattgagngcggtggagccgacgacncgggtttcgatcttcgatggtcgcaatacgcccgtgttggccac

SEQ ID NO: 4826 - DNA, 264 bp, Glycine max
  Clone ID: 701001666H1
acaccttactttcacgtacacacatacaataattatgtctcacgctgcacaccccgctagtgctttccaagttcgaattagagttttggaagctcatggattagctaaggctgacaagacctcgcaatctgatcccttcgtttatgccaagctcaagggattgaagactatgatgactcacgttcaaacctctgttatcaacaacaaccccaaccctgtatggaatcaagaactcgacttattccccaactctgtcaagaggtt

SEQ ID NO: 4827 - DNA, 273 bp, Glycine max
  unsure at all n locations
  Clone ID: 701001668H1
ctcaatgggttcttcttctattacaacatcgccnaccaaccatgaccatggctgcgatcgtgctcctgttcacggtctttgccgtttcctccgccctagacatgtcgataatctcgtacgacagcgcccacgcggacaaggccgccacganngcgcaccgaggaggagctgatgtccatgtacgagcagtggctcgtgaagcacgggaaggtgtacaacgcgctcggcgagaaggagaagcgcttccagatcttttaagggacaanctgcgna

SEQ ID NO: 4828 - DNA, 263 bp, Glycine max
  unsure at all n locations
  Clone ID: 701001669H1
ctcagactcttctttatctgaaccaaaaacaaaaaccaccaactttgtttaaccctgcagagttttttctgttccctttccctgctgctgcttttgcagtctctgggggattttgctttgcatttttttatgtgtcaattggtggtggcttcaagcggtggcggctattattattgtgttgagttttcatttttccaagaatcatatanagggtatcctcagattctgaagctctaaaattcntgcattanagtttctctgcc

SEQ ID NO: 4829 - DNA, 268 bp, Glycine max
  Clone ID: 701001670H1
gggaaattattgaggatttacaagcagtatctgaaagccagaaagaaacaaaaaataggaaaatgaagaagcaaggtcctgtagcggcatttgattcctatgttctggctgccgtttgtgctcttgcctgtgagcttcagctgttccctatgatctcacgaggagacaatcactcagtccccaacaatgtacaaaatatagccaagcctgttcaaaatagatggatcttcccatggcattgcagaatggcatagattcagcaatacgc

SEQ ID NO: 4830 - DNA, 258 bp, Glycine max
  unsure at all n locations
  Clone ID: 701001672H1
cngattcggtaaattttcgtcttctgagtatagaagagaggcgttcccacgccgtcttacgtcgctttcgccgattccgagcctttgatcgaattcagcagtgaagatgtaagtgtagctgtgactganatcttgaagctacctctgatggataaaagcaatggctgcagcttctctagncatattttccaattgctgtcttttcaagtgccatttttgttgtctcctgattttggttcgtctccttatgtctatatc

SEQ ID NO: 4831 - DNA, 257 bp, Glycine max
  Clone ID: 701001673H1
tctgaagcatggcttcatgtagcgcacctccctccctgatgctggtccacccttcaagacctctctcgctctcagagaaccacattctctctctatcctctcctttttaagccctccaaatgcctccacatagagcccaaatccaggacttgccatgccctcgtcgccgctttggctgcagaggtccaagtgcctctaactgtccacgacacggaggaggacgacggttctgatggcttccacgccactccgccgcc

SEQ ID NO: 4832 - DNA, 256 bp, Glycine max
  unsure at all n locations
  Clone ID: 701001674H1
gncagcagggtgctgatggtcatggatcaacaaatgaaagagaggtcagggttgggagattgcagcgtcaaaaggttcgtgtctctcgaaatcgcattttggattctgctgctaaagtgatggagttgtattctagtcaaaaggctgtacttgaagtagaatattttggtgaagttggcaccggtctgggtcccactctggagttctacacacttctcagtcatgacttacaaaaaattatacttgaaatgtggag

SEQ ID NO: 4833 - DNA, 194 bp, Glycine max
  unsure at all n locations
  Clone ID: 701001676H1
gaattgcacatatgattgaacatgttgctttcctaggangtaaaanacgtgagangcttttgggaacaggagcccgttcaaatgcttatactgatttccaccatacagtgtttganatccatgctcctacgagcaccaaggattctgatggtgatttactccattgttctagatgcctgaatgagataggctcc

SEQ ID NO: 4834 - DNA, 261 bp, Glycine max
  unsure at all n locations
  Clone ID: 701001677H1
ctcattcttcatccatagacatggccaccgtcacttctgcagccgttgctattccctcattcactggcctcaaggcaagcgcaggcaaagtgagtgccgcagttaaagtctcagctccccaagccacaaggttgggcatcaaggcttcgctgaaagacgttggagtngctgttgtggccactgccgcgagtgcagtgctggctagcaacgccatggccattgaagtgttgctgggtggtgatgacgggtctctggcttcgt

SEQ ID NO: 4835 - DNA, 261 bp, Glycine max
  unsure at all n locations
  Clone ID: 701001678H1
gngcctccgcggcttcaaccttgtagttattctctttcttcttttttagctatccctctcttgaaaaatctagatctcgttcttccttgatctacgttacgcttttagtgaccggatctgtatggatctgaaccagatctacacgccgatggtggttttggcctggtctttcatagatctgatgcatggaggctcagatctactgtacagagatactgtagataatcgatgagaagaagcagatccagccgcttcgcttgt

SEQ ID NO: 4836 - DNA, 262 bp, Glycine max
  unsure at all n locations
  Clone ID: 701001679H1
ttncaacagaaaccgcgaganaattccccagaaatctcaacacagttaaacatcattcantcanatatttttggaaaataccacaacagtttttcgctctgtacaacgtnggatttggatcagtnttcgtgagagantatttgagcataganacatggnagctgaagcanaggttgcgtgtcaacaaaacgtgggtgtgnnggatgtgaagcatttccanatnagggaagcgatgttcaccagatcggngacgcagatgcca

SEQ ID NO: 4837 - DNA, 264 bp, Glycine max
  unsure at all n locations
  Clone ID: 701001680H1
tgcaggttctccaccacaccattctctctacgtgcaagtcaaaaccggcattcgcacgagtcacaaacttcaccgaacttccgtataaattctcttctcttccgtgattattactgaaagaggaatagaatagtcagcgatggcacagaagagattcatcatcgaggtcgagaaggcgaaggaggcgagcgaaggaaggccttcgagaggacctgtctatcgtagctcttcgccaaggnatggattcctgctctatccaaggtc

SEQ ID NO: 4838 - DNA, 266 bp, Glycine max
  Clone ID: 701001682H1
tgttgctaaggatccctttccaagatggcagcataagatgtatttgccattggaagagagagtttcaaaacaaatgcaaacatccaacaacaaaggggagcatcgttctcttgtatcccagcagtccagtcagtgcaactttaaactaaaggctagtggaagaagtcgttgttccttccttgctcagctccttatggcaccaacaatgttggacatggggaagtatatcgacttggtttgagcaaaagaaagcatgcacaaactga

SEQ ID NO: 4839 - DNA, 267 bp, Glycine max
  unsure at all n locations
  Clone ID: 701001683H1
gngcgcgctttcaagcgaanccacgggcgccatcagaggatgccgctacaactcttccgcctctgcctctgccttcgaccagcccgacacaacatgccttgacgctcagaacgctggacaggctcgtgacgtccatctcgaaaacgtcgaaccagactgtctcgcctctggcaatgcgcaccctaccgtcaccttggctttctagcttcatcgcccaacctcgcatcggatgcnccagagcaggatcaggcgacaggcatcgcatca

SEQ ID NO: 4840 - DNA, 267 bp, Glycine max
  unsure at all n locations
  Clone ID: 701001684H1
gtttttgtcattggtgttaagttgacaaccataaacaatatgtgtgcatatgggctcaatcctggtatttcaggttctcgtcttttgggcaccattcctcagtctatttcacagcaaactgtttggnatnaaatggcaacagtgagaacaccattgaattttgattctagcaagcagagcttttgtcaattttctattgacttctcggtggaggaattttagtggacaaaactgggagattggatcacacttatacaaaattctccc

SEQ ID NO: 4841 - DNA, 268 bp, Glycine max
  Clone ID: 701001685H1
gttggaggattctaaggcgaataaagaagcaaatccaacaaaaaatagcaactaattaatcctcggacagtgtaaaatcaaatttccacatttccgagagagaggatatggcaaaggaatacgagcaagctattgaagaactccagaaattgttgagggagaagagtgaactcaaagccacagctgctgagaaagtggagcagataacagcttctctgggaacatcatcatctgatgggcatcccatcatcagaagcctcagacagga

SEQ ID NO: 4842 - DNA, 261 bp, Glycine max
  unsure at all n locations
  Clone ID: 701001686H1
tanagcttcgctgctcatatgtaaacggacggacacctatctcgattccccagtaagtgcctccgccattcaaacggaattttcgcaaganaacaagttccggccaccatggcaggaaagtttggattaggggaaagtttacttccatgtaaggtcgaagaagaccatcacactgagcaaggatttatggcaggtatacgtgtcacttatcaaccggttgttctggaatcgaaccgaagcccatgcctgaaatagaagaag

SEQ ID NO: 4843 - DNA, 251 bp, Glycine max
  unsure at all n locations
  Clone ID: 701001687H1
tgcgtgtgtttgcgaattgtgcaattttcaagatctgaatcngagaatagataataatggctacaccggaccacctgttcaacctccgcaacaacttgtatctcggggcgtaccaagccgccatcaacagcggcgacgtcaccaacctctcccaagaagactccctcgagcgcgacaccctcgtccaccgctgctacatcgccctcggccagcttcagttcgttcatctccgagatccatgacgacgtccc

SEQ ID NO: 4844 - DNA, 257 bp, Glycine max
  Clone ID: 701001689H1
agcaaagctcatccttgagttaaaaaatggcagcagcttcttccatggctctctcatccccatccttggctggcaaggccgtgaagctgggcccatcagccccagaagtgggaagggtgagcatgaggaagaccgtcaccaagcaggtctcctcaggaagcccatggtacggcccagaccgagtcaagtacttgggcccattctctggcgagcccccgtcctacctaaccggtgagttcccaggcgactacggctgg

SEQ ID NO: 4845 - DNA, 252 bp, Glycine max
  unsure at all n locations
  Clone ID: 701001690H1
gnaagaaactccatagcgaaaaagaaaattcacgttatattgttagtttattcgtcatttctttctttgagtagtaatggcaagcctcaaggttgcatttgtggttgctgtgctatacatggttgtggtgagtgcacacatggcacatgctaggatcaactgcggccgtgtcgcggtcgcggtgtctccgtgcctggctaccttcgtcgcggtggaaggccacaggcgaggtgctgcaacggatgagaaacc

SEQ ID NO: 4846 - DNA, 257 bp, Glycine max
  unsure at all n locations
  Clone ID: 701001691H1
taaaaaccaaaaaaccaaaaatactacaaatttttttcagtttctccgccgccgcacaaccaccacctcctccgttcggatctccggcggacctactatccctactactactctactctatttacacggaagaacaaaaaactatnnnnnnnnnnnnnnnnnnnccccaaagcggctcggttagggtttagttttgtaccatttcgtgtaatctaatttttcatccgtaaaaatctaattttgaggcggcgagatgg

SEQ ID NO: 4847 - DNA, 198 bp, Glycine max
  Clone ID: 701001692H1
tacttccctttgttctcaaaccttatcccttatcctcccaaaaccaaaccatgtctacctccgcagcttctctcgcactcccaaccctcactctccgaactcgacaacctctctgttctccccaatgcttctcctcgtccctctccctcacccctaactccaaacccatttccatttccgccgttttcctcaaaacaa

SEQ ID NO: 4848 - DNA, 262 bp, Glycine max
  unsure at all n locations
  Clone ID: 701001693H1
gcttncnaatcaanncnacnngcnnatttgaatcaatccagggntcnnccttctggtnggatagcttgattctgatgnaaggacaaaggaggactgttgggtcgttcccagcaattgttagnatgatgcaagggcccagttctagtggnactgatatgaancaccagtcttccttgaatcatgtgcaaaatgcagtagnatttctgtttgtcagattataggggatcttctggtgagactgcatgtttacgtggtatggtca

SEQ ID NO: 4849 - DNA, 263 bp, Glycine max
  Clone ID: 701001694H1
tttgcgataaacagaaagctatactattggcagatatggcacacattcagtggattggttgcagctggtgtcatcccatcaccttttgattatgctgatgtagttactaccacaactcacaagttcacttcgaggaccacgtggagctatgatattctacagaaaaggggttaaagaaattaacaaacaaggaaaagaggtattgtatgactacgaagacaaaatcaaccaagctgttttccctggactgcaagtggccctca

SEQ ID NO: 4850 - DNA, 261 bp, Glycine max
  unsure at all n locations
  Clone ID: 701001695H1
tgctttggatgnntttcaancaaaanattgtgcttttcaaatctnttgctctgatgggtacttcaaatcttctcttgtttttcnctctgatgagcctgtgtgctatggcggcttccaaggtggtgcttattcgnaataatatcactctctcctttgatgatattgaagctaattttgccccagcagtcaaaggttctggaaaatatggggtcttatatttgggcagaaccactggatgcgtgtgcagnatgacaaataaag

SEQ ID NO: 4851 - DNA, 134 bp, Glycine max
  Clone ID: 701001701H1
cttgttgtgttgtgttctctgcaaccatgcttctcagaacagcttcatctttctctctcctcaaagccaacgccgaccatatactccctctccccaactcttcttcttctggtattattcgctactctcagtct

SEQ ID NO: 4852 - DNA, 156 bp, Glycine max
  unsure at all n locations
  Clone ID: 701001705H1
ccacaatccattccttaccctattcacttctcaaactcaaaccancctnccctcaccccatctctatttcgccgcacgctctttcccaattcaactctcaacgccgcccctaaacgcaccgtttcgtccaacatttctcactgacgctcactaacg

SEQ ID NO: 4853 - DNA, 215 bp, Glycine max
  unsure at all n locations
  Clone ID: 701001706H1
gtgaaactaaacccctattttgagagtggtaagctgaagccaatacttgacccgaagagcccgtttccattttctcagactgttgaagcgtttgcccatctggaaacaaacagagcaactggaaaaatagttgtctatcccattccatgaacatggntaagcttccactacaatcctacatgcttctgtctgtgattttanggtttgtgttaaaa

SEQ ID NO: 4854 - DNA, 85 bp, Glycine max
  unsure at all n locations
  Clone ID: 701001707H1
gaaactgaaagcgaagaagtagaactacaaagaaagagagannnaattgaatgtgaatggngaatcagaagcagaagtggacgnc

SEQ ID NO: 4855 - DNA, 154 bp, Glycine max
  unsure at all n locations
  Clone ID: 701001708H1
gctcattgagttgttaatcagctttcctttcgaagctatggtaaagtatgctgaaatgatgcccatgctagtatnagtattcatcttgaacattatnataatttatgtatnttttagggcagcagcaattacagtatagtttgtatgcccttgt

SEQ ID NO: 4856 - DNA, 158 bp, Glycine max
  unsure at all n locations
  Clone ID: 701001712H1
taaagagcaatagcaaccgtagcagtggtggtgctaaaagcaatggcaatagcatccanaacagcaacagtaatcgtaaccagaagcnatgccannnccaacnataattacacaaacaaccccttcccaaaacantaggcaccggtgcccggtgaaca

SEQ ID NO: 4857 - DNA, 206 bp, Glycine max
  Clone ID: 701001714H1
gcttgataacagagcagcaaacaaattcagcttcaaatgtgcaggcacagacaaccaatgatagtgaggtgaaacacaatgaggattgcggaaccgctacggttattcatgcgcaggaaagcagccctgaagagaacagtgggcaagataaagaggcaaaacattaactctgaatcttgccgttacattttcttttttcctttttt

SEQ ID NO: 4858 - DNA, 191 bp, Glycine max
  unsure at all n locations
  Clone ID: 701001715H1
ttatttctgaagcacaccctccttctcattttcattatctagctancgttaccactttcaatttcaaattcactgctcagaaattagaatggcnagccaatcaaacactaaattcagttcangatttcacagttanagatgcccaggggaaanaatgnnnatcctcgccgattacaaaggnaaggtccttc

SEQ ID NO: 4859 - DNA, 156 bp, Glycine max
  unsure at all n locations
  Clone ID: 701001716H1
cncaaaattaataacccaaaanatacaaaaacaactttggcaatttcgtaggagatgctcaggagcagcacgctaacacagagtgttacagtcacctgtgttcgtcacagtcacagacaatggttccaatcaattcccgtaaattatagattcttt

SEQ ID NO: 4860 - DNA, 196 bp, Glycine max
  Clone ID: 701001719H1
cttctctctgatatttctacttctgtccaggttgcagcccttggcgccatcagcaatatagtggttgactttatgccacataaatcaacattcatacaatgtgggggcattaaagagcttgtgcaattgacgaagtcgatggattcatctttaaggctaatgctgtatgggccttgaggaacatggtattccgggc

SEQ ID NO: 4861 - DNA, 231 bp, Glycine max
  Clone ID: 701001720H1
gttactgcaacgtggaaaactggcctttcaaggggtctggtacaagtgcgtaagatgtcagcggcagacttcagcatttacttcaccagatgctactgcttctcctagtcagaatgaccgggaaatgtggtggatcagccgctgggtacatagctgcccaatgtgtggtggaacatgggctcgggttgtataaataggtgcattatgttattataatgtcagtttcactca

SEQ ID NO: 4862 - DNA, 129 bp, Glycine max
  unsure at all n locations
  Clone ID: 701001721H1
tcaataataatagcacaccatggttgcctccctctcaaccctggttcttctattgtgtgttanttccacggtagcttggtacncatgcctctacttcctcaaactcaacaacancactcagaagaagac

SEQ ID NO: 4863 - DNA, 160 bp, Glycine max
  unsure at all n locations
  Clone ID: 701001723H1
gcatttctcatganaatgatggtttgcgagantttcttgctgaagtttcaagtcttgggagactgaagcaaaggaatctggtggggttganaggttggtgcaagaaagatgttgggatttcttgttaatttatgactacatggaaaatgggagcttggac

SEQ ID NO: 4864 - DNA, 231 bp, Glycine max
  unsure at all n locations
  Clone ID: 701001724H1
gtgagtgaagtaactgaagagaagaaaaaatgccgtgcctcaacctcagcaccaacgtgtccctcgaaggcgtcgacacctcttccatcctcgccgaagccacctcctccgtcgccagcataatcggcaaacccgaagctatgtgatgattgtactganaggatcagtacccatagcttttggtgggaatgagcagccagcagcttatggagattggtttccattggtggt

SEQ ID NO: 4865 - DNA, 120 bp, Glycine max
  unsure at all n locations
  Clone ID: 701001726H1
tcagaggcaacanaggagttgtaaattaagagcatggctgcacaagctcttgctatcatcatcatctcttaccttctcagccgaggctacaagacaangtcttggacccaagatncactc

SEQ ID NO: 4866 - DNA, 192 bp, Glycine max
  unsure at all n locations
  Clone ID: 701001727H1
gtaaaaggagaagctgtatatatccctccttctccatgtgttccagttgatacttgtggtgctggggatgcatatgcatctggcatactctatggtcttttaagaggctatcagatttgagangcataggctcattagcgctaaggttgccgccacgttgttggacaacagggaactcggcttagaatttca

SEQ ID NO: 4867 - DNA, 280 bp, Glycine max
  unsure at all n locations
  Clone ID: 701001728H1
ttactgcaacgtggaaaactggccttgaaggggtctggtacaagtgcgtaagatgtcagcggcagacttcagcatttacttcaccagatgctactgcttctcctagtcagaatgaccgggaaatgtggtggatcagccgctgggtacatagctgcccatgtgtggtggcacatgggctcgggttgtataaataggtgcattatgttattataagtcagtttccactctctggaagcgagacatggatatagtnatggctactgtgacctgaatcagatgg

SEQ ID NO: 4868 - DNA, 288 bp, Glycine max
  unsure at all n locations
  Clone ID: 701001729H1
taaagcatggctagggagagccacattgtcttgtgttaccatatccacttcaaggnacacatcaatcccatgctttcaattctccaagctattggaacattcaaggggtgagaataacccttgttacaactcgtttcttctatcaataacttgcaaaangtgccaccttctattgtacttganacatctctgatggttttgaccnaggggggcctaaagaggctggaggntccaaaggcatattagatcgcttttggcaagttgggccagaaacatttgctgagcttc

SEQ ID NO: 4869 - DNA, 119 bp, Glycine max
  unsure at all n locations
  Clone ID: 701001731H1
tcaggaactggtgtgtgangngttgtttgcttgatgaatccttgtgctgcttccccttcaattcttaatttctctatcggcaaatcgagatctgatttcttcaaactacggggtttcat

SEQ ID NO: 4870 - DNA, 99 bp, Glycine max
  unsure at all n locations
  Clone ID: 701001732H1
gggcacagcacagcgcaggcncgcctcaacatctcaactttcccttcgatctcattctcaggtgttgttgaagttcctgtgttggcttggtatcctgca

SEQ ID NO: 4871 - DNA, 110 bp, Glycine max
  unsure at all n locations
  Clone ID: 701001734H1
ctagtacatagccacacctgggangggcatcttggcngcagatgngagcactngcaccattgggangcgcctntcgaggcattcancgtctnacgaacattgacggacca

SEQ ID NO: 4872 - DNA, 229 bp, Glycine max
  unsure at all n locations
  Clone ID: 701001736H1
gnagacgtgtattttgacaagtaatgtactaattgntantccttcctgntcttattataagantcattcttattataagattgncattaaaagtataatttaatcctttttataataagattcaatttacaatttcctatatatnaattatcttntcacaaaaatacctttaattaacatgagtncttcgtagaggaacatnttnnccctcatgtntgggcattttgtc

SEQ ID NO: 4873 - DNA, 98 bp, Glycine max
  unsure at all n locations
  Clone ID: 701001737H1
gcaacccttgagcttccgatatanaagcntagacaacagaggantgattgttccagcaananggcaggcantngagttcctganggtgtnatggaaag

SEQ ID NO: 4874 - DNA, 195 bp, Glycine max
  unsure at all n locations
  Clone ID: 701001738H1
ttggtggtagtagcaaatattcaaatgagaactttgaaggccgaagaggggaaaggttccatgtgaacggcacttgcacatgggttagtcgatcctaaggcacgggggaagcccgtctgatagcgctctgtgcgcgtactccgaaagggaatcgggttaanattcctgaaccgggactggcggctgacggcaaac

SEQ ID NO: 4875 - DNA, 206 bp, Glycine max
  unsure at all n locations
  Clone ID: 701001739H1
ctgaaaatccacaatccatcattgaatctttgttcaagaagctcatggcggatgctggtgaagggtgcaagtccttgcacctttctgacacacagtggtagtaagcgaagagggtttggcaaagtaagagttactgctgaagactcagtttctccttctgagaccattgcngatgactattatgaagttcctggacgccnccagat

SEQ ID NO: 4876 - DNA, 117 bp, Glycine max
  unsure at all n locations
  Clone ID: 701001740H1
tctttttccttcttttgtcttcccttagtttgaagatcatggggagagggagggttcanctgaagcagatcgagaataaaatcagccgccaagtgacgtatttccaaaaggaggcac

SEQ ID NO: 4877 - DNA, 148 bp, Glycine max
  unsure at all n locations
  Clone ID: 701001742H1
ttaagcgaaaggttatacctatacttatgtngttaggtcaaccctnacctactagtagtactgataggcagcattgggaaagangcactacgcttgggaatcaagaacacgaaaaccttgtatctatatatngagagatanccctccc

SEQ ID NO: 4878 - DNA, 227 bp, Glycine max
  unsure at all n locations
  Clone ID: 701001743H1
cgaacagatcaatgtggagtacaatgtttcgtacgtttatcatgcgatgtttgcctacttcgatagggacaatnttgcgctcaagggtcttgccaagtttttcaaggagtcaagcgaggaggaaagggagcatgctgaganattgatggaatatcagaacaagcgaggtggaaaggtgaagttacaatctatagtgatgccccctactgagtttgaccatgaggaaa

SEQ ID NO: 4879 - DNA, 87 bp, Glycine max
  Clone ID: 701001744H1
aattttctcaaattgctttcggttttcgttctgattctgcaaaatccatggagatcggagcgcatcgttgaattccctcacacatac

SEQ ID NO: 4880 - DNA, 148 bp, Glycine max
  unsure at all n locations
  Clone ID: 701001745H1
gaccctctcctttccctcttcaccaaccaatggctcccccaaaggccgagaagangcccgcggagaaaaagcccgcagagaaggctccggcggagaagaagcccaaggccgagaagaagatatcgaaggaaggaggaagcgagaagaa

SEQ ID NO: 4881 - DNA, 147 bp, Glycine max
  unsure at all n locations
  Clone ID: 701001746H1
gggcaatctttgcgcaacanagccacccatctcgtatctgtcttctcaaccccatctccgattccgacactctcaatcccnaaacctccaaacacccccaaccgacaccaacactgcacctccttctggagaagtaggtgtaggtgg

SEQ ID NO: 4882 - DNA, 191 bp, Glycine max
  unsure at all n locations
  Clone ID: 701001748H1
taaagaggagtttgagaatggcaacgatcagcgcggttcaggtggagttcctggagtttccagcggtggttacttcaccagcctccggcaagacctatttcctcggcggcgcaggggagagaggattgacgattgaggggaagttcataaagttcacaggcataggngtanacttggaggataaggcggtc

SEQ ID NO: 4883 - DNA, 158 bp, Glycine max
  unsure at all n locations
  Clone ID: 701001749H1
taggtgcttccttgttcatccgcaacaagagtatagcatggttccantttcttcaaattctgccacagaagatagagtggctagtgctcgaaacangctccaagtgtcacccctccttcctttatggttcggatggccatgagaatatctagagcnag

SEQ ID NO: 4884 - DNA, 193 bp, Glycine max
  unsure at all n locations
  Clone ID: 701001751H1
ctaagacaaggntggcaaaactgatgcagagaagatcaagaagaaagangatgatgggaaggatgatgaagagaagaaggaaaagangaaaaagtatgacaaaattgatgcagagaaagtcaaggggaaagacgatgatgggaaagctgaagggataaggaaaaganggacaaaganaaaggagacggtgatg

SEQ ID NO: 4885 - DNA, 147 bp, Glycine max
  unsure at all n locations
  Clone ID: 701001753H1
ctgaaacagatactatggantcaatgctttacataagantaatcntcctggtgatgttccattgcanacaaatanntgtnccaaggatagtcaaaactcgcgtacgtctcaaggtgcaacaatttctgntagagagaaaactatagc

SEQ ID NO: 4886 - DNA, 158 bp, Glycine max
  unsure at all n locations
  Clone ID: 701001754H1
ttctttggtgcactgagggccagcntatatgatgatgaagtgaggtagtggatttctggtgttggtgttgacagtgttgggaagaagcttgtgaactcaaaagatggacctccaacctttgagcagcccaagatgactctggagaagctcttgctgta

SEQ ID NO: 4887 - DNA, 158 bp, Glycine max
  Clone ID: 701001755H1
gcacagttatgcttagtgcaatggtgccttctacattttcttaatttccccagttttgattggattcgtgtttacttaatttaacagggttacaaaatgtgagcggcatcaattttcttatcaaagagggtccaaaagtcaatgcaaagttcgagctg

SEQ ID NO: 4888 - DNA, 179 bp, Glycine max
  Clone ID: 701001757H1
aataatatcacaccttccaacaacccctgccacagtaatcttgggttccaaaagaaggagaagatgaacgtggatctggaatcattggcagaggcaacttctggggccataggatcactgatcagcaccactattctctacccacttgacactgcaagaccaagtaccaggctgaggct

SEQ ID NO: 4889 - DNA, 94 bp, Glycine max
  unsure at all n locations
  Clone ID: 701001763H1
tgcaatccgcgtacgttgagaaaatcangagtttcgcggacagcagcagcgatgtncatggtgatgtgcattgatgatgctttttcttatganc

SEQ ID NO: 4890 - DNA, 158 bp, Glycine max
  unsure at all n locations
  Clone ID: 701001764H1
tatgaagataaggccctgcaaacattacccagtacagcatctgtccgtattgaagttgagaaaagcattcaagagatacatacaganacngnattagcagtgacagattaccaaagaggggcagatatccganaatgngtctgaggcaaaaangggna

SEQ ID NO: 4891 - DNA, 178 bp, Glycine max
  unsure at all n locations
  Clone ID: 701001766H1
ggcagaaggtgaagaaggtgcgaantaagcntttacnnggcggcgagaagctaaagcgaagagagaacagtttgtacaacgcactgagatccatctaccaagactccatcttcgtntncganatctctctctatggccctcagctccctctcctcgccaaactccgttgcggcctntg

SEQ ID NO: 4892 - DNA, 254 bp, Glycine max
  unsure at all n locations
  Clone ID: 701001767H1
ctggaccagaaacccagcgacatgcatctgctataaganggaanatcacgatattggggaccagacttgatagcttgcaatctcttttgtcaaaggtccctgcaaaaactgagaaggagatgaatcgtcgcaaggacatgcttttgaatttgaggacaaaagttaaccaatggcttcaacattgaacatgtcaaactttgcaatagggatagtttgtttgggccaganataaatcaatgcatgagcagaactgt

SEQ ID NO: 4893 - DNA, 97 bp, Glycine max
  unsure at all n locations
  Clone ID: 701001768H1
tctctatcttccgtttttnctgagaaagtaacaaatgtgagtcgctaagcgtatcaaactcgtgaacacagttagttaattagttttctcattctca

SEQ ID NO: 4894 - DNA, 224 bp, Glycine max
  unsure at all n locations
  Clone ID: 701001769H1
tgatgacagtggctgacaccaataaggacgggttcgtagagtacgaggagttcgancgcgtggtctcggcggagagaaancccgtggggtactgtngggccatggaggacgtgttcagggtcatggacaaggacggcgacggcaagctcagccaccatgatctgaagacttacatggcctgcgctggttttccggccaccgacaacggacatcaacgncatgat

SEQ ID NO: 4895 - DNA, 145 bp, Glycine max
  Clone ID: 701001771H1
tactcctgcaatgcgtcgggggccagctggaccaaggactttatgtaatgcatgcggccttatgtgggctaacaagggcacacccagagatctcagtaagggtggaaggaatctttctgttgagcaaagtgatctggacactcct

SEQ ID NO: 4896 - DNA, 224 bp, Glycine max
  unsure at all n locations
  Clone ID: 701001772H1
gnaaaaactcaatttgattttgatgatagtgaaatgggtcaagatggatcagagagtgagaactcaagcacaaggacctctacaaagagcaaaaggagaccagagaaaaaatcaagaaggagatcatcctccatggaaaacctggccttatggatattggatacgtgatatattatcacaagccatgcaaaagtccgttagctcagaagccatctagcagaaag

SEQ ID NO: 4897 - DNA, 218 bp, Glycine max
  unsure at all n locations
  Clone ID: 701001773H1
gagcgtgaaagatgccttgggcgtcgctttcagggtctccnaggctcgacgttgctattgacatgggcaatccatttctcaatctcactgttgatggtttccttaagatcggagctgtcgacgccacgcgatcagctgctgaagatattatcatattatccaaaaggggaatatctcaagtcatganttcgagaaaacgttgangaagatgtgcaaga

SEQ ID NO: 4898 - DNA, 177 bp, Glycine max
  unsure at all n locations
  Clone ID: 701001774H1
ttcttccattttcactctctccctaaccgcccgatgcactttggttttgcaaactaattcgttggctaaattactccaatcgtgaactgattctgttggaatatcggaaatggcaaaaggtagcaggggaagacacaggattggcctctcgtcaatttcagagtgatncaataccca

SEQ ID NO: 4899 - DNA, 92 bp, Glycine max
  unsure at all n locations
  Clone ID: 701001775H1
ggntcgagttctctttctcttttccnttcacacaaactcntctnnntgatgggtctngatcangaanntagcagcaantacaggacttcagc

SEQ ID NO: 4900 - DNA, 219 bp, Glycine max
  unsure at all n locations
  Clone ID: 701001776H1
tnacaaagaaganaaaaaaaactcaaacaccttcaagaacttgtatctttctttgttagtatttgttactacaattttacattcttttcatctctacatatttcattagtcatggcacctcaancagtttccttcaagtcctcgccgttgctcttattgtggcgcttttcttctccgcctccgnnctggattagtttcggggcaatcgccggtgccggg

SEQ ID NO: 4901 - DNA, 109 bp, Glycine max
  unsure at all n locations
  Clone ID: 701001777H1
aactcttattcccactcagtggtgaatttgccaaaccgggataaccgtatcncnattcaggaatacaatgnncncgntaagacnccctattcnctcncgantaaaacac

SEQ ID NO: 4902 - DNA, 144 bp, Glycine max
  unsure at all n locations
  Clone ID: 701001778H1
gtggtgagttatggaganggaggaggaataatagcttgattctgctagtggggagattccaaagagtggtggtgtgagtagtactcctagtatgaggggaactgtgtgctatgttgctccngagtgtggcnatggtgggggant

SEQ ID NO: 4903 - DNA, 177 bp, Glycine max
  Clone ID: 701001779H1
actgcatatagcaacccggaaaggtcgtctacaggttgttcagaagttactagattgcagagaaatagacacagatgttattaaacaaatctggagaaactgctttggatactgctgagaaaaatggtcgcctggaaattggccaactttccggcaacatcgtggagctcaaagtgc

SEQ ID NO: 4904 - DNA, 174 bp, Glycine max
  unsure at all n locations
  Clone ID: 701001780H1
gataactgggaagatggaaatccaggctcttgggcagccagtccacagtatcagctggaagccctccttcacggccatatgaagccccaactcctggtgctggttgggntaagcactcctggtggaattatagtgaagctgcctcaccgngggacagctctgcctatggcaatg

SEQ ID NO: 4905 - DNA, 106 bp, Glycine max
  unsure at all n locations
  Clone ID: 701001782H1
tttcctatgattctgtttctgggtctttagattacattaaattagatcagaattgaatcgnagtgtttggggtggtgcagaattcagagcagcattttgtgtccaa

SEQ ID NO: 4906 - DNA, 210 bp, Glycine max
  unsure at all n locations
  Clone ID: 701001784H1
ctacgacttttcttggtctctacttcgcatttccgttctttgcttttctcgggctacgaaaaacgacgtcgttttcccaattttccccggcgaccgggaaatggtggagccggtggagcttcgcggcgaggagcagctctcgttgctgtcagattccagcaatggtgaccggtcgtggcggttgaattcgacnggtttcagctaatcttc

SEQ ID NO: 4907 - DNA, 97 bp, Glycine max
  unsure at all n locations
  Clone ID: 701001786H1
tggtttcgtgctccaagttgaaggacacagaatggatttcaagacaagatccgtacnctttgtnttgagtatggcagacacaaagttccgaaccaga

SEQ ID NO: 4908 - DNA, 187 bp, Glycine max
  unsure at all n locations
  Clone ID: 701001787H1
agtttgttgattttnataataactatcttanaaaaatcatactttggatgattaaattatgattttntttactgtgtgaaagtgcatganaattcaactctattggaaaagccnacttttagatattaatttnactcngttccatcctgttgagaangctttngnnccgtancgtttcngtcatgtg

SEQ ID NO: 4909 - DNA, 144 bp, Glycine max
  unsure at all n locations
  Clone ID: 701001788H1
cnttggaaaggaaacangccgaaggtttgngnatgggaacaaacatgtacccttcatcggcattgcttggccaagacnaggatgcttctatttcagctcttccagttgatgagtngattgagaaggctgatggattgcaggagt

SEQ ID NO: 4910 - DNA, 142 bp, Glycine max
  Clone ID: 701001789H1
gtcccttccctattgtaatttctgccagcctcaaaaaagacttgctctgcctctgccactctctgagtaggactacactgccatggctgcctcagtctccactgttggagctgtcaacggagctccactgagcttgaaacag

SEQ ID NO: 4911 - DNA, 141 bp, Glycine max
  Clone ID: 701001791H1
tcaacattcatgccgccgcctcctgcttctaccttcctagctttccatccccaggataacaacattattgccattgggatggaggattcaaccattcacatctataatgtcagagtcgatgaggtgaaatcaaaattgaaa

SEQ ID NO: 4912 - DNA, 140 bp, Glycine max
  Clone ID: 701001793H1
ttacgggagggcaatgcaatggccaccattctaccgccaagcaacgctcagtttgtttccttcaacgctcgccaccgatcttcctctcccactcctcccaaggtggggatggagaaaagagcaagacgcaagcatagttg

SEQ ID NO: 4913 - DNA, 122 bp, Glycine max
  unsure at all n locations
  Clone ID: 701001794H1
caaaaccaaagatatgggacctagacccatagngtctcctgtttttgtaagtacanncacaaaatgttagtngtcaactcagggacttaatagcctgcttctttgttttttttanaccncgg

SEQ ID NO: 4914 - DNA, 107 bp, Glycine max
  unsure at all n locations
  Clone ID: 701001795H1
cgggtacgctagcgctagcaactctccanattcttttccgaagaagaagcctacgtctccgattagggttanggttcagtgttctntcttccntncggtgtcactgt

SEQ ID NO: 4915 - DNA, 275 bp, Glycine max
  Clone ID: 701001796H1
cattcattcatactcacttccttgcctactacacattcttcatcacttcattcaacatttctccccttagcttgtttcaccaatggctgctgcggttagtgctgcagtctcttttccatccaccaagtctacctctcttccaagcaggacctccctcattgccccagagagagttgtgttcaagaagggcttcaattgcaaaacagagaggtttctagcagtggacgggagtttccatccagagctcagtcaccactgaggcaccagcccaaggt

SEQ ID NO: 4916 - DNA, 109 bp, Glycine max
  unsure at all n locations
  Clone ID: 701001801H1
caccgtccgcccccactcaccacgaggatctcctcgtcggcttccaccggtgtctgcaaagnngtcnccgntaaggcccaaaccggaaacgnaagncntnacaatgntg

SEQ ID NO: 4917 - DNA, 110 bp, Glycine max
  unsure at all n locations
  Clone ID: 701001804H1
ggcggggataagattanagattcaacaatggcctctgcttctgctactcttctcnagtcatctccnggttcttgacaagtggcgannngggtcaanggcnagaccccttc

SEQ ID NO: 4918 - DNA, 93 bp, Glycine max
  unsure at all n locations
  Clone ID: 701001805H1
cacacagncacacttntgngaangcntaggnttgctgcagtcaaacttgaactcnanggtgacgcaggggcngggcagcnacctncttccctt

SEQ ID NO: 4919 - DNA, 103 bp, Glycine max
  unsure at all n locations
  Clone ID: 701001808H1
cgacaggtgatgtanacacaagtgatgtggacctttcagttgcaagcaaggccatcattttgggatttaatgtgaaagcaccaggctctgtggaaaagctatt

SEQ ID NO: 4920 - DNA, 104 bp, Glycine max
  unsure at all n locations
  Clone ID: 701001809H1
agcaaattggccttcacactgacatacccgnttccacttacaccaatctcntccttgtctcctcttctgcttctcgactccaccttcttcaaattcaatggccg

SEQ ID NO: 4921 - DNA, 152 bp, Glycine max
  Clone ID: 701001810H1
cttgtcaatctcgtaaatgtgttacgagaattgtatttgcacagttccagaggaagctcgccaattgagaaggaaagctctctctcgtattgaatggctgcaaaaagctgatgtgctaaccatagcaccagattgcaggagttcccattcga

SEQ ID NO: 4922 - DNA, 99 bp, Glycine max
  Clone ID: 701001811H1
ttaatcaccatatgtcgtagcatgggaaaggccgttattgtggcaacaaatatgctggaaagcatgattgttcacccgacaccaaccagagccgcggta

SEQ ID NO: 4923 - DNA, 101 bp, Glycine max
  unsure at all n locations
  Clone ID: 701001812H1
cactctaacagccaaagcatggcttctctctcttgctccgccaacgaccttnccccactcttcaacgacaccgccgccgccaactaacctctgcgcccaat

SEQ ID NO: 4924 - DNA, 100 bp, Glycine max
  Clone ID: 701001813H1
ggcggcggtcatgccatcattggcttttactttgcaaaggagcttcttggtgctggccactctgtcaccatactcactgttggcgatgaaggctcagaca

SEQ ID NO: 4925 - DNA, 150 bp, Glycine max
  Clone ID: 701001814H1
ttcttcgtctcaaatctcttcgttccttcgattcgttccatttcttccaaaatggccaaagacccagttcgcgttctcgtcactggagctggcagggcaaattgggtatgctcttgtccctatgattgtcaggggagtgatgttgggtcc

SEQ ID NO: 4926 - DNA, 142 bp, Glycine max
  unsure at all n locations
  Clone ID: 701001815H1
cttctctgattacgaaattttttcagcaaaagcaggcaatgggacttcttttttaagggaatgaacagggatggatctgagtgtccctttgatgtgaaaggactccaacggtgtccgtttttaaganacatccaatgaaacc

SEQ ID NO: 4927 - DNA, 107 bp, Glycine max
  unsure at all n locations
  Clone ID: 701001816H1
ggcaagcgaggaggatcattgaagcgattgagngttngagtgatgaagaagctgaagacgaaggaagaggagatagagaaaatcggaaaactgaattgggcgttgga

SEQ ID NO: 4928 - DNA, 90 bp, Glycine max
  unsure at all n locations
  Clone ID: 701001817H1
ggaaaataagagtttatatagcttcatgtnattttcttaactatgttcnctaatttggcctggacntacantttggattggantttncct

SEQ ID NO: 4929 - DNA, 88 bp, Glycine max
  unsure at all n locations
  Clone ID: 701001819H1
aagcctctactatactgcttcaccttctgctctagaaaattcagtgctgaaacanggcnttcggntanttcncncnggtangcnaacc

SEQ ID NO: 4930 - DNA, 106 bp, Glycine max
  unsure at all n locations
  Clone ID: 701001820H1
gtttttcattcactgtcaacgttaatatgaaggcctctcctcgggatcctaaactagtactgatttgctttcctgnaaantcnttcnacangnccnngaggnnttc

SEQ ID NO: 4931 - DNA, 104 bp, Glycine max
  unsure at all n locations
  Clone ID: 701001822H1
attctgttcatcctttgcttcccaaagaacncgacaataaaaagcaatgggtagccttgaagcggaaagaacaacagtaggattgggcagcnagagnanccntt

SEQ ID NO: 4932 - DNA, 102 bp, Glycine max
  Clone ID: 701001825H1
ggaaaaatctagatctcgttcttccttgatctacgttacgcttttagtgaccggatctgtatggatctgaaaccagcatctaacacggccggatggtggttt

SEQ ID NO: 4933 - DNA, 104 bp, Glycine max
  unsure at all n locations
  Clone ID: 701001827H1
taaaaaccaaacactaccctgttgctttggtgatagcttaaaacttcaacaagtaaatgattagactaaatgtctactgttcgctcaattcccaagtgcnagac

SEQ ID NO: 4934 - DNA, 97 bp, Glycine max
  unsure at all n locations
  Clone ID: 701001829H1
gcctcatgcacnagggtaatctgtncganataggtttcanngttgtggtanatctattttgtncaagaatagnatcatcttgcaactaaagttggng

SEQ ID NO: 4935 - DNA, 105 bp, Glycine max
  Clone ID: 701001831H1
ggcaattcagcgggctcaagtgctccccactctcatcttcttctctcttctccaaaccttctctttggacccaacaatcccaaaagcgcgtttcaattaccattg

SEQ ID NO: 4936 - DNA, 86 bp, Glycine max
  unsure at all n locations
  Clone ID: 701001833H1
gtgaatcagtgagagaagcagttactttggcggctagtaaccaagcgtttgaggtgggttattatccttcnancggatactccngg

SEQ ID NO: 4937 - DNA, 92 bp, Glycine max
  unsure at all n locations
  Clone ID: 701001835H1
aaagacactgctttatttctgggaatgaatgaggatgatgctacaaattatgntttgcnngcaanggctgggacngngggcccngccncctc

SEQ ID NO: 4938 - DNA, 90 bp, Glycine max
  Clone ID: 701001838H1
aaatgtcttcccttctaagctttatgcaaaatcaggtgtccatcccatatcgacttccaaaatcagtgtgccagaaaggagagttcttcc

SEQ ID NO: 4939 - DNA, 97 bp, Glycine max
  unsure at all n locations
  Clone ID: 701001839H1
cacaaccctnnatatatgcttccaaattctccaccacggatcgtaacatacttcagcaatggcccagcaaaagcggttaagaggtctggtcaaaaac

SEQ ID NO: 4940 - DNA, 85 bp, Glycine max
  Clone ID: 701001840H1
ttggaaacgaaacctcttctcactagacactgactaacaatggcggctgagggctcagcttcctgaccacttcaagtgtccgatt

SEQ ID NO: 4941 - DNA, 82 bp, Glycine max
  unsure at all n locations
  Clone ID: 701001843H1
ggaanaatggtagtaaccattgtagcttctcattgtgttgttccaaaccaagaaacacccaaggttcgtttatggttatcag

SEQ ID NO: 4942 - DNA, 135 bp, Glycine max
  unsure at all n locations
  Clone ID: 701001844H1
cgataaactaacaacgtccctatttccggtttcaaattccctccggcgacacatncggattccaatatgaggacccgtttatcctcgactcgggtcatcttcgtgggcntcgctctgtttccncncaaaganacg

SEQ ID NO: 4943 - DNA, 103 bp, Glycine max
  unsure at all n locations
  Clone ID: 701001846H1
gnactacnccttaatttctctcttcacttatcatcatacttatatatnatataancccaataattaaatnnaatacatgtnaggcnctttanacattccnntg

SEQ ID NO: 4944 - DNA, 101 bp, Glycine max
  unsure at all n locations
  Clone ID: 701001848H1
gtanatctttgcaacaggaagggctggatgcttcactttccttgcaacagatctggaggtttgagaaagctaaataatgacagatcaagcattatcaatgg

SEQ ID NO: 4945 - DNA, 100 bp, Glycine max
  unsure at all n locations
  Clone ID: 701001851H1
gtcactgaatatgcaagcagtataatatttgatgaggccatgttgcggtaaatgtcnactaatagtgngnncnaggngnggtttccnccnaancnggttt

SEQ ID NO: 4946 - DNA, 103 bp, Glycine max
  unsure at all n locations
  Clone ID: 701001853H1
ggattgtnctcttcctttctggcatggtggcantgattatgctgaggaccatgtaacgtgacatttgcnaagnaacaatgaggcttgcnnaccccaagcagga

SEQ ID NO: 4947 - DNA, 96 bp, Glycine max
  Clone ID: 701001855H1
aaatcttatactcctctcttgtctgtgtaatcaaaacaacaaacattcattcatacttcacttccttgcctactaacacattcttcatcaacttca

SEQ ID NO: 4948 - DNA, 93 bp, Glycine max
  Clone ID: 701001856H1
ggaaaaccaaccaaagttccaaattttttggtttggggatagatagagtgatacgcgtcacattttcataatactaaaaaaatggcagcggcg

SEQ ID NO: 4949 - DNA, 97 bp, Glycine max
  Clone ID: 701001857H1
tcacaacaacttcaccaacactaactcaacccgacacacacccacacaaaaaaaaatgtccctcctttcctccggtggcttcttcggccggcagaag

SEQ ID NO: 4950 - DNA, 92 bp, Glycine max
  unsure at all n locations
  Clone ID: 701001860H1
tgaactcgaagtgatccactccaggtgggccatgctcggagccttgggctgcgtcttcccggantngctgtcccggcaacggggtgaagttc

SEQ ID NO: 4951 - DNA, 97 bp, Glycine max
  Clone ID: 701001861H1
cttgtccgaactgcggtactgaaaacacctctttctttgggactatactttcaatttcaaatggtggttccaccaacactgtcaaatgctccaactg

SEQ ID NO: 4952 - DNA, 144 bp, Glycine max
  Clone ID: 701001862H1
gttttgttgcgtctaactctaaggatgaccctgccaaggaggctgctaacttcacatcccaagttatcatcatgaaccaccctggacagattggaaatggctatgcacctgttccttgattgcccacactccccacattgccgt

SEQ ID NO: 4953 - DNA, 92 bp, Glycine max
  Clone ID: 701001863H1
ctggaagctatatagacagttttcctgattcacccaagtttttttcttttataattgtgctatttgtttgttatcacatctggcgattcaat

SEQ ID NO: 4954 - DNA, 94 bp, Glycine max
  unsure at all n locations
  Clone ID: 701001864H1
atttggctctgcccttcccaattgattaaggcncccactaagaaaattgnaagtttaaatggtggggtgaagatatctgaactgttgaagtatc

SEQ ID NO: 4955 - DNA, 95 bp, Glycine max
  unsure at all n locations
  Clone ID: 701001866H1
gtctcacttgactcgattgcaagtgatccacgacacactgtcngtttcacaaaagntttcnaattcaatttccttcagtaacanttggaaggang

SEQ ID NO: 4956 - DNA, 95 bp, Glycine max
  unsure at all n locations
  Clone ID: 701001870H1
ggaaagttgaaaaaaagatggaccatgacaagactggatgcgnantcccccagaaggtcctatattgtgcatccaccaaactgcgggtttttttg

SEQ ID NO: 4957 - DNA, 98 bp, Glycine max
  Clone ID: 701001871H1
gaagcaatggcatcaaagccaactccttctgaagatcattttgagatgaaggccttaaaagcttatgggggatatggaagatggagactctgtgtttg

SEQ ID NO: 4958 - DNA, 63 bp, Glycine max
  unsure at all n locations
  Clone ID: 701001873H1
aataacaattaaccacacgactcacgaccccagtaaccgggttctgcanatttcgccacttgc

SEQ ID NO: 4959 - DNA, 136 bp, Glycine max
  Clone ID: 701001874H1
tggtttcagatttaaaacaaggtttgtcaaccataagcaatgggaatgtagttgttaatatggtcctgattgagcaggaggtttgggatagagatttaggcttgtcatctcatttgtcaataacacgaggagattg

SEQ ID NO: 4960 - DNA, 87 bp, Glycine max
  unsure at all n locations
  Clone ID: 701001875H1
aacaacccctagtgatctgacaggcactantgttattgttagcactacaagaataatcaacccaatggttttggccgattttagttg

SEQ ID NO: 4961 - DNA, 88 bp, Glycine max
  Clone ID: 701001877H1
gaatggggccagggtgctaagcttgatgttctggaatcaaagattgcttcagatacttcacacactattaaggcaatttgcattgtcc

SEQ ID NO: 4962 - DNA, 98 bp, Glycine max
  Clone ID: 701001878H1
aaattaccattcaaatacccatgaccgtcgaacaagaacaagctattcgtccttcgagaccggtgccctcgtcgttgcccaaaaaacttatgggcctt

SEQ ID NO: 4963 - DNA, 89 bp, Glycine max
  Clone ID: 701001879H1
atcagtgagtggcaaaccaactgagcggtttttagcatcatcacctgcctcttctcaatcagtgctgaagttgaaaaaagatgccatga

SEQ ID NO: 4964 - DNA, 81 bp, Glycine max
  unsure at all n locations
  Clone ID: 701001880H1
ctcaataataatagcacaccatggttgcntccctctcaaccctggttcttctattgtgtgttatttccacggtagcttggt

SEQ ID NO: 4965 - DNA, 103 bp, Glycine max
  unsure at all n locations
  Clone ID: 701001884H1
aaaaacaaaggtttctactttctacgatgagagacatgaaagacgcaggtgccttggggaggcaagacagcaagagctgcgacanctgcgtnagcagaagagc

SEQ ID NO: 4966 - DNA, 72 bp, Glycine max
  unsure at all n locations
  Clone ID: 701001885H1
aatggtaccgctccattcacctctcgaattttgatttccttctctctttcaccaatcaacacaannntaagt

SEQ ID NO: 4967 - DNA, 102 bp, Glycine max
  unsure at all n locations
  Clone ID: 701001886H1
gcctgtgacatggcccagctttagtgatattcacccttttgcaccagttgaccaggctcaaggttatcaggaaatgttcaacaatttggggtgaaatgtntt

SEQ ID NO: 4968 - DNA, 89 bp, Glycine max
  unsure at all n locations
  Clone ID: 701001887H1
gtttcaggttgaattgggcaacttttagtgctggtgagangtcgcgccacgacgattctccagattaacaccatatttgttggtgactt

SEQ ID NO: 4969 - DNA, 138 bp, Glycine max
  unsure at all n locations
  Clone ID: 701001889H1
gcaaaccaagtgtatgccattgactatggccttgcaaaaaaatatagggatcttcagactcataggcacataccatacagggaaaacaagaaccttacagggcacaggcacgctatgcangtgtcaacacttcatttg

SEQ ID NO: 4970 - DNA, 86 bp, Glycine max
  unsure at all n locations
  Clone ID: 701001890H1
tnataatcagatctgacctcattcatagaacacaaaccanattcgcccccaaaatcaaccaaccggatcggttacatgtttcgcga

SEQ ID NO: 4971 - DNA, 268 bp, Glycine max
  unsure at all n locations
  Clone ID: 701001891H1
actcgccccacctcacatcgtccaagtggtggattggatcgcttggtcgcactgccaaccatgctgtggtgatggcacagctgattcattgagggcaaagccttatggcccttcacccggntcgntgtccaatccgcgatctcagacacaccagcnactggagaatatccacattggtgacatcggtcccaagttcggctacaacaccatggacaacggtttcctcttgttnanccacgtccaaggtcccccacatcagcatgcttgc

SEQ ID NO: 4972 - DNA, 87 bp, Glycine max
  unsure at all n locations
  Clone ID: 701001892H1
cncagcttcagttcgtttttgttgatcctgtgaacttatggctgacggggtggttctgttggatacatgggccagcaatgtntgggc

SEQ ID NO: 4973 - DNA, 177 bp, Glycine max
  unsure at all n locations
  Clone ID: 701001893H1
ttcttttgtgctgagtttgacggtgaatcagaggcaggcgtacgtatacgtgtagtagggtgattgagagatggacgctcccctgctgctggtgaacggcgagggggcggcgctggtggcggagaatggtgatacgtgcggtganggaactgaaggaggtgaaganggtgttttgga

SEQ ID NO: 4974 - DNA, 121 bp, Glycine max
  unsure at all n locations
  Clone ID: 701001894H1
gngagatcaatacatgagttacaaatgagtagggaggatggtgatcctaaacaatttactgactctccagctncgcccatggtggcngtgattctggccntatcgaggtcnacgnagtcgg

SEQ ID NO: 4975 - DNA, 102 bp, Glycine max
  Clone ID: 701001895H1
gcttattgactttagaaatcctttggtgattcatatttcattttgatgtattcttggatttgatttttaacagtactgaaatgcaagtactgatgaataatt

SEQ ID NO: 4976 - DNA, 175 bp, Glycine max
  unsure at all n locations
  Clone ID: 701001901H1
cttcggcgagttgacatcgtgcagcaaganactttgttgcagcanngagatcttgaaaagttcttaaaagttcaaaatgatggcggtccatgaaactgtcgaaattatttctgggtcaccaccagacaagccaaaactcattaagggtggaaattacatcaaaaccggacgagtt

SEQ ID NO: 4977 - DNA, 140 bp, Glycine max
  unsure at all n locations
  Clone ID: 701001902H1
cgcagaacatcatcatcttcagaacgtaggccattgantgggcttgaacccacaacaattgctgaactgggtttgaaggatgctganaagcttgttgaactnccaaantaattcagccanatcataccttttaaaggccc

SEQ ID NO: 4978 - DNA, 171 bp, Glycine max
  Clone ID: 701001903H1
tgcagattgatttgggagatattctacttgcaaataattcaacaggtcctcttacatttctattcatcatgttgcttaaatctgcaacgttttttcattgtttcttatagctgtgactgaatatgatgtatgaagagattaaaattgctaggcattgcattataggcctac

SEQ ID NO: 4979 - DNA, 270 bp, Glycine max
  unsure at all n locations
  Clone ID: 701001904H1
gtaatctgagagagaaacaaaaacaatgaaggtttccattgccaagttccactcccttcccctatgttttttccttctcttggccttcaacacaaaacccctcctagcagcagaaccagagccagtggttgataagcaagggaaccctttggagccaggagtagggtactacgtgtggccatttgggctgatgannggaggctcacattaggcccaancanggaacangncatgccccctttaagnaatccggggacccttaatccaatg

SEQ ID NO: 4980 - DNA, 272 bp, Glycine max
  unsure at all n locations
  Clone ID: 701001905H1
ctccagcgttgttgcattgtagaaggcgatggccgcgcgagctctgttgaccagaaaaaccctagccaccgtgctccgcaacgacgcgaannccataatcggagttggcataacagcagcggctactcattcacgcgggttgcacgtgtacacgctacccgatctggattacgactatggcgcactggagccagccatcagcggcgacatcatggcagctgcaccaccagaggcaccaccaggntttacatccccaactacaacnaggnccc

SEQ ID NO: 4981 - DNA, 168 bp, Glycine max
  unsure at all n locations
  Clone ID: 701001907H1
gattccgcaacananagtagaaaanatggcgcggttgatcacagtggtgtggtaccgcggtggcggtgctactgtgcgccgcggcgggcgcgtcgtgggtggaggaggcggcgaacccgatacgaatggtggcgggggtggangcggangtngttcgggtnatannnc

SEQ ID NO: 4982 - DNA, 266 bp, Glycine max
  unsure at all n locations
  Clone ID: 701001908H1
gaatcctctcacccagagttanggtttttaactctattcgatcggcgatttcnaatactcggaggctcgaatcgtgttgggggttttccgttttgattaaaaaagtttccgttttttgtgttgggtgatcaagggttgtttgatttncttcttgcgatcgagaatgggtgaggcttcgggagctggttccgctgattgtttcagcnagatgatgncgtcnatcccgggttnccgtttccaacccnnnnnacnaggncttgnncatc

SEQ ID NO: 4983 - DNA, 269 bp, Glycine max
  unsure at all n locations
  Clone ID: 701001910H1
taaaaacactcaaaagaggagaaaaaaagaagaaaagaatggtaacaatagctggtggtgtgagtctttcaagccctagcagggtatttgctaatgctaagggaatagactcagcacaaaaggcccaggccgtgaggtttccagctctgtcgaggcccattcaaaagtggctggtttggtgaagacccggccccgttcgggcgacgccggacaaggntatcgganaaggtagangagnncctnaagaaccccgannaanctnccccggc

SEQ ID NO: 4984 - DNA, 266 bp, Glycine max
  unsure at all n locations
  Clone ID: 701001912H1
cacctttctcctaaaacatctccagtgggttcttcttcttctattacaacaacgtcgnnccaagaccatgaccatggccatggccacgatcctgctcctgttcacggtcttcgcggtttcatcggccctagacatgtcgataatctcgtacgacaacgcccacgccgccacgtcgcgcagnanangggagctgatgtccatgtacgagcagtggctagtaaagcacggcaaggtgtacaacgcgtcggagagaaggagaagaggtt

SEQ ID NO: 4985 - DNA, 267 bp, Glycine max
  unsure at all n locations
  Clone ID: 701001913H1
tttacaatcaggagantctgtaatnaaaganagtagtccagagcatagtgaagatggtgggaaaatagttagagctggtgatgaaaacggagatgatcttttatctgtaagcanaattggcacaagcaactccagcatagtctctggtccgacgttgtgatgaaagtaatggngatgttgctacaccaacaaacatttatcctccatggngagaatngntnaatctggaaatccaaaggggttcccacngggcccggnttcaaattt

SEQ ID NO: 4986 - DNA, 261 bp, Glycine max
  unsure at all n locations
  Clone ID: 701001914H1
cggcatcagtttgggaacctggcaaagcaagatgtttccggcgtatttctcgatggtgggtgtctgctgcgccgtatcggtggcttcctttggctaccttcacccgtggaaaacttcctccaccactgagagataccaacttgggtttttgctctcttcctttgcgttcaatcttaccaacttgtttgtctttacacccangaccattgacatgntgacncaggggaaanngggggngnaaaaaanaaggggggaaantgg

SEQ ID NO: 4987 - DNA, 164 bp, Glycine max
  unsure at all n locations
  Clone ID: 701001915H1
ttgaatcaaggtcttttctaatgcnaggtgttgaatttggttaaccagtcttggaggtttatctgcnattattaaaagtgttgggatacaagtaccaagcagaantttgccaaggcanctgcttttagctgatgccatcatcatagtanggacttganncattt

SEQ ID NO: 4988 - DNA, 266 bp, Glycine max
  unsure at all n locations
  Clone ID: 701001916H1
acanaaccgaaaatggttgcgactttgagtcttccgatcatagacctctcttctccccatcgttctttccacagccaattccattcgtcaggcatgcgtggaatatggtttcttttaccttgtgaaccatggggtggacaccgattttgtgagcaaagtcttcgaccaaagttgcaagttcttctcgcttcnggtccanggnaaaatggaccggccccgaaaggaatatggggnnancactcctctcaangggaaganattgancc

SEQ ID NO: 4989 - DNA, 271 bp, Glycine max
  unsure at all n locations
  Clone ID: 701001918H1
caaaagtttagaaggtcttgattcacttgagttattcccaactcatatacaagacatatcatttgaaagtcccttgatcttatcaggaagatacagtggaacttttcctgaattagttaaagtcactggtactttggcagatatgactaacttcgtagtagaccttaaagtgaaaagagaaaaggatatgccagctcagtaatgtctttcaaagggccatatggatnaggncaacgcctnaancnnggttgnaaaaagtaaaggncggggg

SEQ ID NO: 4990 - DNA, 269 bp, Glycine max
  unsure at all n locations
  Clone ID: 701001919H1
ggaagcaagggactggctgaatagtgttagaagtgagagtgacacaacaaagttggctgtgctgtgggataacattgagaaatttgagaagtatgctatggaacttattgataataaggaggtgtctgaagatgttcttgctaagaactcaagttacagtatatggatggaagatttaagaggactganggaactccaaagcaaaaggtgaagacgtttncacaccantttaanccgttccgggatgggagagtaatnccntnggaatt

SEQ ID NO: 4991 - DNA, 169 bp, Glycine max
  Clone ID: 701001920H1
cgcagttaagatttgcgtcatcataaccaatttgggggttcttatccatctatttcattattcttggagacgtgctctgtggaaatgagtcgaacggtatcacacacttgggtattctacaagaatggtttggcatcaactggttgacctctcgtgcttttgctcttcc

SEQ ID NO: 4992 - DNA, 170 bp, Glycine max
  unsure at all n locations
  Clone ID: 701001922H1
gnaattgaagttaaaagccttagccttccctacaactccaaacagccaagacatcntcatccatggctgcctccgtctccactgtacggagntgtcaacagagctcttttgaacctgaatggttctggagctggagcttcagctcccagttcagccttctttgggacaag

SEQ ID NO: 4993 - DNA, 269 bp, Glycine max
  unsure at all n locations
  Clone ID: 701001923H1
agaggccgtaacttgtttgttgggaacttgacctatccaagagacgaatatcaaccaaacccatttttttcatttttaggaatataaggaatccccttcttccccgttgcgcttatggttttgtgagcaaccctaatccaccccaacccaaccctattgaattgaattgggggaagaagaacatagaaagaagangaaaaatctgncacaattgtngtaattgnacggatgnctgntgcggtntgcggaacaaggagatnttngtccgg

SEQ ID NO: 4994 - DNA, 133 bp, Glycine max
  unsure at all n locations
  Clone ID: 701001925H1
gccaatatgctcgaaggaggtggcaagacacccatacttaatcctatggagcttcaagatattggttttaaaattgttgcgtatccactttccttgatnggggtttcnanangagcaatgcnggattgactca

SEQ ID NO: 4995 - DNA, 263 bp, Glycine max
  unsure at all n locations
  Clone ID: 701001926H1
cagttatctcttgaggaatatacactgcaggcttttgagatgttaattgcacagttcactgagaagactcgtatttctttccgagatgccctgtaccgccttgctagaaatacaaaacaacatgtaatagaggaccttgatggaggtcttaacatgcaccaggaaatgccagactcagtttaccatgaaaccatgaggtctgaggacaataaaccatgggaatcagngngcaaaattttganaggncgntcgaatcccatntc

SEQ ID NO: 4996 - DNA, 271 bp, Glycine max
  unsure at all n locations
  Clone ID: 701001928H1
gncaaatttcccgaaggaggaggaggttctnatcttctttcttttttgtctggttccctttcttccttcaaccaatttcgancatctcgaaaccggcatcagatccgatccgaaatgtacggattcgaagctctcaccttcaacatccacggcggcttcctagaggccatccgtccgnggccaacngngccggcntcntaacnaanngcggatnaaaaaaacctctgcnaatgngaaaccctggnngaataaggntgcacntccccncnnc

SEQ ID NO: 4997 - DNA, 264 bp, Glycine max
  unsure at all n locations
  Clone ID: 701001930H1
aagccttctccaatttcaccaatgattcgtggncaaaaagcttggcacttttactgtgagtttgggactaagggagttatgtttgactatcgtcgtcatggtggtaactgtctaanaggaagtagcctgctagatactgtgtcgttccgctggaatgatttattgagagcagattctttaactttggaaaaggaagtnagtccaacaggttaatgttgttacgccaanaaccccaccnatttcagnccccacccnggngaaang

SEQ ID NO: 4998 - DNA, 267 bp, Glycine max
  unsure at all n locations
  Clone ID: 701001932H1
ctaatccggaaacccgaattagcctggagtccctgtttgggaacgcgtggtttaagaaatcactaaacccggaaacggcggaanaaaacgcgttggggctgagttatgtgaagagtagttataattacnaagggagtaaaaaaagttcgggagtgacagcgtttgacataatatcgatgtcttcgggtttggatttnacgaggttgttccgaaacgacgtccggntttngggnntaaaggacggnagggnttaatccggccccgaac

SEQ ID NO: 4999 - DNA, 128 bp, Glycine max
  unsure at all n locations
  Clone ID: 701001933H1
gnngaggangcagtgagtgtgcagtcaaaagtnactcagnaaagtatacttcgacgtgagtnttggaaatccagttgggaantttgtgggacggattgtgcattggantgtacggacgacgntgtccc

SEQ ID NO: 5000 - DNA, 264 bp, Glycine max
  unsure at all n locations
  Clone ID: 701001936H1
cgtgaggccattgacaagattgtggaagtccttctggagaaggagactctgagcggagatgaattccgtgctatattgtctgagtttgttgaaattccagctgaaaaccgtgntgctccttcaactccagtaccagccactgtttgaatagcctatatatgtaacatctttcatatgtattatcttagaatacagaatgcctctgaagcctgctccatattggngaaggnttaaaagattctacctacttntccattttggggg

SEQ ID NO: 5001 - DNA, 166 bp, Glycine max
  unsure at all n locations
  Clone ID: 701001939H1
ccanaacgctccatactcgatatagcttacaccacttgggccatcaaaccccaaccaattctaaccatttcttttcgttccgatcagtttttcgtctctctctgttttccgaaaccttaatctcttgcccgataagggaaaattatgaatcccgataagttcaccc

SEQ ID NO: 5002 - DNA, 165 bp, Glycine max
  unsure at all n locations
  Clone ID: 701001941H1
gangaggaggcagtgagtgtgcagtcaaaagtgactcagaaagtatacttcgacgtgagtattggaaatccagttgggaagtttgtgggacggattgtgattggactgtacggcgacgatgtcccccaaacggctgagaacttccgtgccctttgtactggcgag

SEQ ID NO: 5003 - DNA, 164 bp, Glycine max
  unsure at all n locations
  Clone ID: 701001943H1
ctcagcagcaacatcagcatgggatgggcgttgccacaggtgctanccaaatggcctattcttctcactacccgactgctcccatggtggcttctggcacgcctgctgtagctgttccttccccaactcaggctccagctgccttctctagttctgctcancag

SEQ ID NO: 5004 - DNA, 262 bp, Glycine max
  unsure at all n locations
  Clone ID: 701001944H1
cngaattttcactgaatttcttgaatgatagagttaaggttcgagcatcctgtaatggcttgcantgttgctctagtattccagataagggtgtcttctatgtctgcaatccggtcactcgtgagtacaggttgcttccaaagagtagggaaaggcatgtgactcgattttatccggatggtgaggctaccttggttggcttggctgtgattcagcgnatcagaagttccaatgttgttctagcaggctacaatcgcatgtt

SEQ ID NO: 5005 - DNA, 265 bp, Glycine max
  unsure at all n locations
  Clone ID: 701001948H1
cgcaaaaatggacttatcaagcagtttctaaaanatgtctactggggtgaacttgattttctaattgtggatgctccaccgggaacctcagatgaacacatttcccttgttcaatgccttgatgccactggaatagatggtgcaatcatagtcactactcctccaacaaanccccctaattgatgtgngaaangaagngaattttgncaaanaaattggncgnaaaatncctgggggtcnaanaaaaaaggcgnccccccccccc

SEQ ID NO: 5006 - DNA, 262 bp, Glycine max
  unsure at all n locations
  Clone ID: 701001949H1
ggctcccagtgggccagcacctgagaggatcaatggaaggttggccatgattgggtttgtggctgcaatggcagtggaagtagccaaagggcaaggtgtgttagaacaaatatccaatggtggcatcccatggttcttggggacaagtgtggtccttacccttgcttccttgattccactcttccanggtgtcagcgtggantctaantccaanggnttcatncctnagatgnanactgtggatggganttncctatgtggg

SEQ ID NO: 5007 - DNA, 156 bp, Glycine max
  unsure at all n locations
  Clone ID: 701001953H1
actgattctataataataatttcngattcgtttttcgttttttgttaccatggagttgatttcaggtctaccagaggacgtagcccgagactgtttgattagggttccctatgatcaattcccggcggttgnttcagtctgcaaaggctggagcgc

SEQ ID NO: 5008 - DNA, 263 bp, Glycine max
  unsure at all n locations
  Clone ID: 701001956H1
aaaaaagacaaaaactacttccttctctcctttgctgtgttttctttctcaaaaatgggtcgtacctatgttcttatgatggttgctgcattgttgttgagctccaccatggctcaatctccagcttcgtcgccggctttntcccccacccacacgccggtggccacttccacctaggagggcgttgtncgcgtctccgtcgtctgtgtcaacaagggnttcaccgcaacnggaattctcctcggggaacaactattnttcnc

SEQ ID NO: 5009 - DNA, 261 bp, Glycine max
  unsure at all n locations
  Clone ID: 701001959H1
cgtcttcgccgccaccaagaaggccgtcgccgtcctcaaggggacctccgccgtncgaaggcgtcgccactnctcatnccaagaagacgatggcccgacgacagtttctgttcgcatcactggccttactccggggcttcatggttttcacctacatgagtntggtgatacgacaaatgggtgtatttctacgggagcacattttaatctaataattgacacatggtgccccctggggatgacncccnnaggngggncccc

SEQ ID NO: 5010 - DNA, 266 bp, Glycine max
  unsure at all n locations
  Clone ID: 701001960H1
cngaanatgtggctattcggcaganaatgggcttctgggttttcatcatcatccactgcagagcaagtccactnaaggaattgatggaactggtttcactgccattgtcacaggggcatccagtggtattngcactgagactacgcgtgttcttgctttgcgtggtgtccatgtgattatgggtgtgagaaatatgccttgcncgcnaaagatgtcnaaagnaacnancccncngggaggtccccccccgcaaaanttgnccccag

SEQ ID NO: 5011 - DNA, 131 bp, Glycine max
  unsure at all n locations
  Clone ID: 701001963H1
gcattgttggtggggttttagaatcaacnaaagtacctattgcaaaatctgaatgcaaaaatgattctcctagatgagacaataacctatgaagcacatggtgccttcaggaacaatccaagtcaaccatc

SEQ ID NO: 5012 - DNA, 265 bp, Glycine max
  unsure at all n locations
  Clone ID: 701001964H1
ggnatcctccctgatctcacaattcaaggctctataagactccaactaccatatacgtacatttccaaacacatactacttnagctacgccaccaagcgcacaacaaagatcatgggtgttaaagttccttcaagcatacttggaattcacccattgcttttcattagagttttgcagatgtgccagtgggttttcctccagatgttcctcccccttatangggataaggggatggggactgnnaggaanatgatggancanaaa

SEQ ID NO: 5013 - DNA, 167 bp, Glycine max
  unsure at all n locations
  Clone ID: 701001966H1
aaaaatatactgataaagatagannnagananaganagagagaatggaagggagagagagttgtcacccattgctgagaggaggtaggagaagagaggagaaaggttacaaccatggcttatccaccactcagatgcatgtccatggctgccatatgtgatgccccc

SEQ ID NO: 5014 - DNA, 263 bp, Glycine max
  unsure at all n locations
  Clone ID: 701001967H1
gaaatgctcctgaaaattttggcttcattgatgcacaagcattggtagctgttggatgtgtagaaaaataaatcaattgcaaggaatattcattttgagcatggtcagcaggtaatgatgttaggtttctcaatttgaaagtggttccctgaaataaaatgatagtgttgttggcttttattaataatgtctcttttttcacacttccatattatgttgccccaacaaantaaaaggatctaaatncttttttaccgtacnag

SEQ ID NO: 5015 - DNA, 266 bp, Glycine max
  unsure at all n locations
  Clone ID: 701001971H1
aaatttgccatacgtttcgccacaaatcncgcatttaactctctntctaaaatctttgaaaatggtatccaaaaacccgaacccgcccgagggattctacttggatcctagtggtggcatggctcttccggggaagcctcccttcgcttccgtnnnnnnnnnnnnnnnnnnnnngaactcgtcggaggacgccgccaagaagatnccgcaagccctacaccatcaacaaantcaaggggagaantggnncngnccccgaacacgnt

SEQ ID NO: 5016 - DNA, 164 bp, Glycine max
  Clone ID: 701001972H1
caaacatatctcttcctcttctgtccctccaatggaaggatcaggatccggtgtggttacagtctacggcaacggcgccatcaccgagaccaagaagtcccccttctccgtcaaagtcggcctagcccagatgctccgcggcggcgtcatcatggacgtcgtcg

SEQ ID NO: 5017 - DNA, 257 bp, Glycine max
  unsure at all n locations
  Clone ID: 701001973H1
tgactgcctccaaggatcgcgagancttcgtctacatcgccaaactcgccgagcaggcngagcgttacgaagagatggtggaatcaatgaagaacgttgcgaatctcgacgttgaactgacggtggaggagcggaatttgctttctgtngggtacaagaatgtgattggtgctcgaaaangtgcntggaggtcctgncttcnattgggcanacggnnganacaaaggnanctttnnaatgcaannggnttggggana

SEQ ID NO: 5018 - DNA, 265 bp, Glycine max
  unsure at all n locations
  Clone ID: 701001974H1
tgcattctgtaatctgcaacagcgccgtttcactttcgccttaccactcttgtcgccggaaacctaaccgattgcgggccaaatcctctctgctcgttcagaaacaggacacccaactcggcgagccactctccgactccgtctccgtctcgcgccgcctgcattctccttcgccatgccaagagttcctgggataaccgctctctccgcgacaatgaccggcctctgagcaagtctggggaaagaggatnctgtgagantttcc

SEQ ID NO: 5019 - DNA, 162 bp, Glycine max
  unsure at all n locations
  Clone ID: 701001975H1
agacacaatacagagtgagttgttgctccttcgccacaactctctgccaacatgggtatctccagagattctatgcacaagaggcgtgccactggtggcaagaagaaggcctggaggaaaannagaaagtatgagcttggtcgccagcctgctaacactaag

SEQ ID NO: 5020 - DNA, 160 bp, Glycine max
  Clone ID: 701001978H1
tggaaatgagtatattgacatggctgaaacactgtgccaaaagcgtgccctagaagcttttagattggatcccgctaaatggggagtgaacgtgcagcctctgtcagggtctcctgcaaatttccacgtttacactgcattgcttaaacctcatgaaaga

SEQ ID NO: 5021 - DNA, 131 bp, Glycine max
  unsure at all n locations
  Clone ID: 701001979H1
gtgtgtttgtaaaaatggccatcacaggcaaccttaacttcaacctccaacctagtacttcctgtggcacgccatatggcgtgcccttccacgcgtcccgtcgtttctcttcactcgcggtcgaggngggt

SEQ ID NO: 5022 - DNA, 164 bp, Glycine max
  unsure at all n locations
  Clone ID: 701001981H1
aaaggattcagaaccttttaagaggaattatgcttcagtactaaagcaattaactgaagcaaatgaacaggtttcttctgccttgttttgcttgaggcaacgcaacacatatcaagcaagctcctctgttttgtcattaaanccctggctaatttnnatgatcc

SEQ ID NO: 5023 - DNA, 265 bp, Glycine max
  unsure at all n locations
  Clone ID: 701001982H1
ggggcgcgggttttagacgggagtgcgaatgcnatgatgaagggaaagggaaccgaagacnatcgtccatgggcaatcttaccacactgtttacacaacccgccaaagcaggaatggaattggttgacaaggagaaagttcaaagggtagtttatgaaatgagcaaaggatccaaatattttcaaaacgaggaacgcaaggnagcttttattaagccagaaatttgataacctgcgattccatgtgcaaacctccacaaaagagt

SEQ ID NO: 5024 - DNA, 261 bp, Glycine max
  unsure at all n locations
  Clone ID: 701001983H1
ctggaacttgttggaagttgagtggaaactgagattctgagaggaatcagcccttttccgtatactttacttgaacaagccgtttgagttcggcgtgtttaataaataaaatcacaagacaacgttgtcttgcgcctgaaagtgttgtggagacaaaaccacaatacagttttagaatggagaagacagcagttaaagttcgatgcccagaggattgggtgcgacgcaatgttccccgagngcngaaaaccccgangntcc

SEQ ID NO: 5025 - DNA, 163 bp, Glycine max
  unsure at all n locations
  Clone ID: 701001984H1
atttgactcaggttttcatggctgcatttcctatgttctacaaaacgccttacannggaccaaaatctgccaacccaaaatgtaatgaggcagaatgagaagaggttcatgtatgagtgtgataatatgaagaggttcatctcttcaatcctggtccaaattt

SEQ ID NO: 5026 - DNA, 102 bp, Glycine max
  unsure at all n locations
  Clone ID: 701001987H1
ttcccaaccatttttnttctatcccaaacaccgttgaccacacacactgcgaggtnttatccattaaagtttccggctttttattccctgggtcctttntta

SEQ ID NO: 5027 - DNA, 258 bp, Glycine max
  unsure at all n locations
  Clone ID: 701001988H1
gatggaggacgcggtgagctcggagatagggtttgcagcgaagtgcgacttctttgcggtgtacgacggccacggcggantncaggtggcggaggcgtgcaaggagaggctgcaccggctggtggcggangaagtggtggggagtagtgagagtccacgtggaatgggactggcggggagtgatggaagggtgttttcggaaaanggaaanccaagnccccgttaaacnngccctcaaanangggttccnanancttt

SEQ ID NO: 5028 - DNA, 150 bp, Glycine max
  Clone ID: 701001990H1
gcttcaaaggcatcctatgagaatgcagcttaccttaaatctctaataaaaaaccactggaagatggaattcgtgagattttttgattgctggaatgattttcaagaaaaggccacaacccaagtcttgattgttttggacaagcatgag

SEQ ID NO: 5029 - DNA, 258 bp, Glycine max
  unsure at all n locations
  Clone ID: 701001992H1
ccaaaatatattccttttggcacatttcctaggccacaaattttataacacaccaaattgttcttgtcaggtatccctgaactggctggtagcacaaggcaatgttgtgccaattccaggagccaagacagcagaacaagctgaggaattcagaggtgcacttggctggagataactnatgaagaggtagctgagctgcgtaatgtggctnccnaaattaaancccgttaagggttnccccattgaaaaacnctaaaa

SEQ ID NO: 5030 - DNA, 135 bp, Glycine max
  unsure at all n locations
  Clone ID: 701001993H1
gaatatatagcagtnattaaacntgacaatattctttnatatcaggaattatctgtattttgcaatttgcaatgatatttggttttacattgtgtctatctggctaaaataataatggttgnatnatttttcnnt

SEQ ID NO: 5031 - DNA, 88 bp, Glycine max
  unsure at all n locations
  Clone ID: 701001994H1
attcngttctgggtcttcncgtgtcttgataaccactgatcttttggntccgtggtattgatgtgcaacaagtgtctcctagtnanaa

SEQ ID NO: 5032 - DNA, 167 bp, Glycine max
  unsure at all n locations
  Clone ID: 701001995H1
gtgatgataacttaattagtgttcatgaatatgtcaagccttactttagtggttctaaattgaaaagctttctagctggtcataatatcaccattactgatggtattgacaaaactagtgcaactttgcaatttagaaagttagcagattgtgattntctcaagaga

SEQ ID NO: 5033 - DNA, 259 bp, Glycine max
  unsure at all n locations
  Clone ID: 701001996H1
ctggacttcgccagtacttggacaacaacatggatggattttacattgctccagcttttatggacaaacttgttgttcacattaccaagaacttcatgaccctgcccaacatcaaggttcctctcattcttggtatctggggaggcaagggacaaggaaaatctttccaatgtgagcttgtctttgccaagntggggaatcnnccccatcatgatgcntgctggagntttggaaagtggaatggnggagccccaacaaa

SEQ ID NO: 5034 - DNA, 278 bp, Glycine max
  Clone ID: 701002001H1
acggtgatgatggcaacatctcatcacatataactgaaagattcatcaaagtcttgcttaccatcattgaggcctctgatgacgctgaagcgatggttactgctatgggtatcatctctaaactaccacaggagtctcacatgactcagtggcttctagattctggggcacttaaaactattttgacttgtcttaccgaccaacataagcatgtctcacacaaaaaacaagtcatagagaattctgttcaagctctttgtcgttttactgtctcaaca

SEQ ID NO: 5035 - DNA, 139 bp, Glycine max
  unsure at all n locations
  Clone ID: 701002002H1
aagtgtcggtgatcccctttctccttccttcnctgagagacaatgacaatgacgtgggcgcgattcgattcgtggcagcagcaatactataccacaagcggngtggtggtaggttacgcagtatgcnccancctcctgg

SEQ ID NO: 5036 - DNA, 271 bp, Glycine max
  unsure at all n locations
  Clone ID: 701002003H1
gtttttgcgagcgtaaggttgaggagaagagatggtgggagcacggccacgggacatagatgacttgcccaagancgccgccaactacacagcgcttacgccgttgtggtttctagagagagctgctacggtccaccccaccagaaactccctcatccacggatctcgtcgctacacgtggcagcagacttaccaccgttgccgtcgattcgcctccgctctttctaatcattccatcggtcttggaaacactgtagctgttattgcaccc

SEQ ID NO: 5037 - DNA, 269 bp, Glycine max
  unsure at all n locations
  Clone ID: 701002004H1
cgcttggcgccaatgattcttttatttgagncatatatatanagacaataccatgctattattacttataaaatgtttttattaactgttttntgttgtttcagatgcctgtatatgtcttcagaacaacaacatacctttcaatgttcttatctctgactgtggaaagcaagtctatctgttaccacagtgttatgcagagaaacaagctcttggagaagtggatgctgagcttcttgacacccaagtgaatcctgcgtgtgggaatt

SEQ ID NO: 5038 - DNA, 268 bp, Glycine max
  unsure at all n locations
  Clone ID: 701002005H1
ttttacttcccctatggctcgtcactccttgctcttagccctcctcctcttcgccgccgtggccaccgccgcgatggcggtggccgcgtccgacgccgacgacatcctgatccgtcaggtggtgccagatgttggcgaagcgaagaggaggacaacctgctgaacgccgagcaccactttccgagcttcaaggccaagtncgccaagacctacgccaccaaggaggagcacgatcatcgcttcggcgtcttcaagtccaacctccgca

SEQ ID NO: 5039 - DNA, 266 bp, Glycine max
  Clone ID: 701002006H1
gcaccaaaagcctgcaacttggtgtcagttttgctggtggatatgttgctggtgtactttgtgcaattgtgtctcatcctgctgataatcttgtctcttttctgaacaatgcaaaaggagcaacagttggtgatgcggtgaagaagcttggtttgtggggtctctttacgcgtggtctccccctccgaattgttatgattggaactcttactggagcccaatggggaatatatgatgcattcaaagtcttcgtcggattgccaacc

SEQ ID NO: 5040 - DNA, 266 bp, Glycine max
  unsure at all n locations
  Clone ID: 701002007H1
ttttctggaaatcctgggcctccattggngttatgtgatagggatcctggcatcctttctgtaaccgtatggagtggttttccagatgatataactctcgattcaatcagtcttacattaaatgcaacatataataccgatgaaggtgtaaaggcattgaagagttctacagccattgtgttacaccctggtcggaatactattaccttgaatctaccacctcagncaaccaggatcttatgttctcggngttcttactgggcaga

SEQ ID NO: 5041 - DNA, 268 bp, Glycine max
  Clone ID: 701002008H1
gcgaaaaggaaaagaagggtttcctttctcgaattgcttcttgtttcttcttcttcaccagacgatccagactgacagataagaacaggtcaggtacactgtgtgattgagtgagtggtcaatgaactaccgcagcaacattctcatccaattgttttcctcgcctcctgcatgggcaactctaatcgcagctgcatttctcctcctaactctagccctctccatgtatcttctcttcgagcatctttccgcttacaagaaccccgag

SEQ ID NO: 5042 - DNA, 270 bp, Glycine max
  unsure at all n locations
  Clone ID: 701002009H1
gcacgacactgagcatcagcaatggcaagcgcaagtgttggtaaagaactgacgctgtattcgtattggaggagctcttgttcccaccgagtccgaatcgctctcaacctcaaagggcttaaatacgaatacaagcccgtcaatctgctcaagggagaacaatctcgccctgagtttctccagctcaatcctgttggttgtgtccccgttctagtggatgaccacgttgttctctatgactctttcgccattantatgtatttggaagat

SEQ ID NO: 5043 - DNA, 272 bp, Glycine max
  unsure at all n locations
  Clone ID: 701002010H1
cagatgtgaacggttccttcctccttcattgttcgcctcatcaacattacctccttcttccancgtatnatanaaangaaaccactacctaacacgtttttgcctttttaattaattcctttntttttattcttcccttcnctgagtnttccacattattttccttagnacnantnaagaaattttggtggnagancctgtgagaaatattaaagacgggccactttcaaaatataccatggagccanaattagaatccccntagggaagaa

SEQ ID NO: 5044 - DNA, 266 bp, Glycine max
  unsure at all n locations
  Clone ID: 701002013H1
cangattctccctcgcgccaccgacggcgaactccgttacgctggcggccacaccagagtcctcactgtcgcccgttccatttccttttcagaattgatggtgaagctaagcgagttctgtggttcgtctgtgatcttgcggtgtcaattgcccaagggagacttggagaccttgatctccatcaccaacgacgaagatctcgctagcataatcgaagaatacgaccgtgcctcgttgaaattggcgcatcgttgaagatcaaacc

SEQ ID NO: 5045 - DNA, 268 bp, Glycine max
  unsure at all n locations
  Clone ID: 701002014H1
caaatacatatgtgacatcctctgcatatgggaaccttacaaatacatattcttctatgtccaatgctaccacaggctcagtcaggagttcttatgcgacagcctctgctttctcgctatgaagcatctcttggtgttatgaatcctgtgagcaagtctgtggacttagttaagcctcttacaatgactccccaggaaaaattgaaaaattgaggaggcggcaacaaatgcagcaatgcttgctattcagaaacaacagcagantcgg

SEQ ID NO: 5046 - DNA, 274 bp, Glycine max
  unsure at all n locations
  Clone ID: 701002015H1
tgatggtaaatgatctggntcactgaaaatgttcngtcaganncatcaagctgtgtattcnngctccttctgttgatagtgctgaaaatgntgancgtgttnttanttgtccagcctcaagtcagatttgttctccatcaaggggtctttcagatttggaagagccnccgttgagttctcattcttatccaatggaaataaaatccaatgaagtanaattgacgcaaatngccatggtcncncaatgctgagaanngtgnaaatcatcagcacc

SEQ ID NO: 5047 - DNA, 277 bp, Glycine max
  Clone ID: 701002016H1
cttcttggtttggttgctggaatactatggaatctaatccaacaaccatggacgcaaaacgcgaactcgaagtggaagactgggaactgctccacccaaacgacgacgattcaatcgtgttcggtgggcccccactcgactctatcctccccgatcacttctcccttaatcccaattccagttgcagttccaattccaattccaattcctcctccgaggtcgatcgcaacttcgacgattcctatgttgccaatcagatattcccaaattccaccct

SEQ ID NO: 5048 - DNA, 272 bp, Glycine max
  unsure at all n locations
  Clone ID: 701002018H1
ttgtgttactatttttntnttttaaatgtttgttcttgattttnttataattttcnctgttattattggtgtcgttgctattaattaatttctggtgctaaattgagataactgtgtgtgacaaagagagagagtaatcaanatagctcctttgaattttctatcagaatctgagggcccaaaatctanggttttctgttcttctctggggatctgaagacatgcagtccaagtctgaaactgcaaatcgactgagatcagatcctcattcc

SEQ ID NO: 5049 - DNA, 272 bp, Glycine max
  unsure at all n locations
  Clone ID: 701002019H1
ctcgcagaatctcaggttcatccgctcccagnacaagaagcgtttgccctatactctctctgttaatcattttgctgattggacttgggaggagttcaaaagacacagactaggagctgcccaaaattgctctgccactcttaacggcaaccacaagctcaccgatgctgttcttcctccaacgaaagactggagaaaagaaggtatagtgagttcagttaaagatcaaggcagctgcggatcatgctggacattcagcacaactggggctt

SEQ ID NO: 5050 - DNA, 270 bp, Glycine max
  unsure at all n locations
  Clone ID: 701002020H1
ggtaacaacacttgatccaatacntctggaagcctttgtacttcaggaaactgaggtttctgntgttaaatatatctcttatgaagagtataaaaggttactggccaaagaagattcaggctatgtcccctatgatgttaatggacaatatggtcaactctttncatataattgaaaagatgtacaaggncaaatactgtagcccgcagtttgactctacagaagcaaataagtcgttatgctcctatttccctcagtgctgagttgaca

SEQ ID NO: 5051 - DNA, 267 bp, Glycine max
  Clone ID: 701002021H1
gttcggagaagccgtgtggttcaaggccgggtcccagatcttcagcgagggtgggctcgactacttgggcaacccaagcctgatccacgcccagagcatcctcgccatctgggccacacaagttatcctaatgggtgccgttgaaggttaccgtattgctggtggccccctcggtgaggtcactgacccaatctacccaggtggcagcttcgacccattgggccttgctgatgacccagaggcttttgctgagcttaaggtgaagga

SEQ ID NO: 5052 - DNA, 266 bp, Glycine max
  Clone ID: 701002022H1
caatactgatattctcgagactgagtctttgaacttgctcgcagaagccacatttgtagatactctcttgactgcattgcctgttttgtccgaggaggagcagcacgccctatctgctactccggctcacccggctggtttacacgctttttatgctagttgcttaactgcaaatgtagtggagcagctttggaattttgcttggccttctgccattgccttgattcatccaagccttttgccagttgctgtaatgagtttcttca

SEQ ID NO: 5053 - DNA, 270 bp, Glycine max
  unsure at all n locations
  Clone ID: 701002023H1
anaccaaccaaaaaccctttctttcactttggttgtctcttctacaccactttcnatannaaattccgttctccactcactactactaanataaattaaaaacacntcatgaacaacaacccaacaacaatcatcggttccactacccacggatcancaagaagaagatgaacacatcactgaaataagggaaatccacgcgttaaccccgccgccgccacgtggcagagcctgggagacagtgcatacccacaggtcaagctctctctc

SEQ ID NO: 5054 - DNA, 269 bp, Glycine max
  Clone ID: 701002024H1
ctaaagcaccaccctggacagattgaagctgctgctatcatggaacacattttggaaggaagctcttacatcaaagctgctaagaagttgcatgagattgatcctttgcaaaagcctaaacaagaccgctatgcacttaggacttcaccacaatggcttggtcctcaaattgaagtgattagattctctaccaagtcaattgagagggagataaactcagtcaatgacaaccctttgattgatgtctcaaggaacaaggcccttcatgg

SEQ ID NO: 5055 - DNA, 270 bp, Glycine max
  unsure at all n locations
  Clone ID: 701002026H1
caatatattccattctctctgtgtatttccctacctctcccttcaagatgcagatcttcgtcaagaccctcaccggcaagaccatcacccttgaggtggaaagctctgacaccatccgacaacgtcaaggccaagatccaggacaaggaaggaatccccccggaccagcaangtctcattttcgncggaaagcaacttgaggacggccgtacccttgctgactacaacattcagaaggagagtatcttcactcgtcctccgtctccgtgg

SEQ ID NO: 5056 - DNA, 268 bp, Glycine max
  unsure at all n locations
  Clone ID: 701002029H1
aaatttganttgnttgcagaagacaaggagacccaattcactaattcttgaggctcttgataaagacattggacaagataagcgattgggaatagcacagttaccccttattgatctagaaatacaaactgaaaaggagattgaattgaggctgctgccctcacttgatacactgaaggtgaaagatnagaaggatcgaggaaccttaacagtaaaggtcagtattatcatttaacaaggaagagcagcnggttgcactagaggcaga

SEQ ID NO: 5057 - DNA, 274 bp, Glycine max
  Clone ID: 701002033H1
atgcagggcttcttccactccttgagagttccgaggctggtttggttaaagtgaaccttagtggttgcacaaacgttaccaataaagtagtttcgtccttggccaatctgcatggttggactcttgagaatctaaaccttgatggttgcaaaaacatcagcgatgctagcttgatggcaattgctgaaaactgtgcattgctatgtgatctcgatgtctccaagtgtgctataaccgatgctgggattgaagccctggcacatgctaaacagat

SEQ ID NO: 5058 - DNA, 270 bp, Glycine max
  unsure at all n locations
  Clone ID: 701002036H1
aaaaaccaaantaaaaaancaaaacttnnccaatttcgtnggagatgctcaggagcagcacgctaacacagagtgttacagtcacctgtgttcatcacagtacacagacaatggttccaatcaattcccgtannttatagattctgtgacgctgctcggaactctctatcatccaactccgccatcttcaagtggaaaantnnngctaattataatcgtaaccgttctggaatgggaaccttcaccacgcgcgcgttggcgcagcgctcc

SEQ ID NO: 5059 - DNA, 266 bp, Glycine max
  unsure at all n locations
  Clone ID: 701002038H1
cacttctcnnacacnnnanananaaaantccattgattttgattttgaggggatagaaaaatcaatgntaggatcagnntccggtgtggttacagtgtacggcaacggtgcaatcaccgagaccaagaagtcccccttctccgttaaagtgggcctggcccagatgctccgcggcggcgtcatcatggacgtcgtcaacgcggaacaggcccgcatcgcggaggaggccggtgcctgcgcggtcatgncccttgagcgtgtccccg

SEQ ID NO: 5060 - DNA, 264 bp, Glycine max
  Clone ID: 701002039H1
tcccattggagcagcatttccattaatgtttggtgctgttttgtatccaatggcacgtccttcatcctactatgcaaagatttgggaaattctgtggcattgttactatggaatcttttgctgcatctgctatgggtcttactgttggtgctatggttccaaccactgaagcagcaatggcagtaggcccctctctcatgacagtttttattgtatttggagggtactatgtcaatcctgagaataccccaatcatcttccgtt

SEQ ID NO: 5061 - DNA, 265 bp, Glycine max
  unsure at all n locations
  Clone ID: 701002040H1
gnattcagcacccacttcattgttcattttattgatgagtaaatcaacaattagacttaaaatccattcattcagctctccaatcatcaatttgttgtctagactctggaaggttccaaaggggatcagaactcacaactggggatggaactcgattccttttcatcgtgaattgattttctgaagggacaattgtggagatttactgcttgctctgaatcatcttgacactagatattccaaagtgacatttgttccatacttc

SEQ ID NO: 5062 - DNA, 268 bp, Glycine max
  unsure at all n locations
  Clone ID: 701002041H1
accagctctcccctataggtaagccttttcagagggctgctttctacatgaaggaggcttngatgtcactgcttcattcaaatgctgcacagtntcatggcttnttcgccaatnngtttcatattcaaaatcggagcntataagtccttttcngagatatcacctgtacttcagtttgccaattttactgcaaccaagccctcatggaagctgtggaaaggtttgaccgaattacatgttattgattnagatattgggtttggagtac

SEQ ID NO: 5063 - DNA, 270 bp, Glycine max
  unsure at all n locations
  Clone ID: 701002042H1
aggnattgttgtaactttttgattcctanntctctaaaattcgaaattctaatntcgtnaggggnnagagatttctntgtgtgtagagtgagtatggctggnaaaggcgagggncctgctatcggaatcgatttgggaangacgtactcttgngtcggcgtgtncacaatacgatcntgttgactntcatagccaacgatcagggtaacagaatancccatgcctacgtgggnttanaccganacagaacgnccgatcggngatgcggcg

SEQ ID NO: 5064 - DNA, 268 bp, Glycine max
  unsure at all n locations
  Clone ID: 701002043H1
cnacattagcattggttagggactgncaaatgggtccgaaattggcgaaaacggggtcgttccgtcatggattggcggagaagaaggagaggcttctgtcggcgaagatgcggcaggaggaagaggaagaggaagaggnngaacgcaggtggtggtggtcgaagtggaacagtgtgaaacgcgtggctgagaaggcttgggagatgggtcggtctgatccaaggaagataatcttctctgcaaaaatgggattgctttgaccctnatt

SEQ ID NO: 5065 - DNA, 265 bp, Glycine max
  unsure at all n locations
  Clone ID: 701002046H1
tctccaacaagtgtttctgtaaccatgggcatccaccactctatcccctacaaccccttctccagctatgctcaggaaagagtgggattttcagtccctcacaggcacttcttgtgaagccagtgaagaggcagatgatggggaagagcaagggaatgagattgcatgccaagccaccagcattctgctgatagagtcctgacatgggcaaaagacagctcatgaatctgcttcttctnggtgccntnnacnccctctgnnggag

SEQ ID NO: 5066 - DNA, 273 bp, Glycine max
  unsure at all n locations
  Clone ID: 701002048H1
gcagcagtggcggcaagcaactccatccgcaatgggaatcgatttgaaggcaggaggtaagtccaagaagaccaagcgaaccgcccccaaatccgatgatatctacctcaagcttctcgtcaagctgtaccgttttcttgttcggaggactgggagtaacttcaatgctgttgtcctcaagcgccttttcatgagcaaggtcaacaagcccccgctatccctctctagattgatccgttacacganggaaaggaggatagatagctgtggttg

SEQ ID NO: 5067 - DNA, 273 bp, Glycine max
  unsure at all n locations
  Clone ID: 701002049H1
cttcctccttgcacttcagatggcagtggaagccgataatccttanccttcgattggnttacaacagcttgggtgcttttgcaactatcaaccatctncacttccaggcttattatttggctctgcccttcccaattgagaaggcccccactaagagaatngcaagtgtanatggtggggtgaagatatctgaactgttgangtatccggttagaggctttgtctttgagggcggcgaaatgctggnagatcnatcaaacgttgtttcagatg

SEQ ID NO: 5068 - DNA, 271 bp, Glycine max
  unsure at all n locations
  Clone ID: 701002050H1
gtcttgcaattgangttgaagtcttgcccttctctcttcaactccaaacacaagacatcatcatccatggctgcctccgtctccactgtcggagctgtcaacagagctcttttgaacctgantgggtctggacctggggtttcagctcccagttcatccttctttgggagcagcttgaagaaggttattggctcaagggtccccaacacaaagatttcctctggaagcttcaagattgttgctgtagaagagaagaaagagattgaagaga

SEQ ID NO: 5069 - DNA, 266 bp, Glycine max
  unsure at all n locations
  Clone ID: 701002056H1
gctatttggatctgttcacggacttcatatccgtttacaacaccttcatgaaggtggtgttcattgcaagctccttagccattttttggtgcatgcgttttcatcccatggtcaggagaagctacgatagggacctagacacttttcgccactattnccttgttggggcaagctttgctttggcactcatcttgcatgaaaagttcactgttcaagagattttctgggcatttcaatatacttggaggcagttgcaatattacctc

SEQ ID NO: 5070 - DNA, 267 bp, Glycine max
  unsure at all n locations
  Clone ID: 701002057H1
ccacaggncaaaatgcngagaanccctaganctgtagangatggagtngatagagctaaaccanggcagctgtctgaaattgtggatgctgtccaatgtcggttagttaccatgcctgacagtacagattcttccagcaaggttgttcgacttttatatacaaactctggtgctggtgttttggcacttggttcaaatggtgttcagaagctgtggaagtgggctcgtagtgaacaaaatcccaatgggaaggcaactgccagtgtt

SEQ ID NO: 5071 - DNA, 268 bp, Glycine max
  unsure at all n locations
  Clone ID: 701002058H1
gtacttgtgagtgtatacccaacacaaactaagatcaacatggactactacacccgcgtttcagangttgagagggaacctatcatggagtattccacaccacgaccaatgntgggcaactaccaccaccctaatgctcaccgtgtcctcaacgagaagattgtttatgaggaggatgtgattggaggatcccgccacaaccacatgcatcaccaccaccctgagactcatgagagagtcaaggtggtggagtatgaacaagttcctg

SEQ ID NO: 5072 - DNA, 229 bp, Glycine max
  unsure at all n locations
  Clone ID: 701002059H1
tctatataaacctcaccttaattacttctactcttctctctaattacaattttctattttgttttaattagtgaaattacttgcatagatagataatcatggctatgatgaaacgtgtcgcttcctctgcgcttcgctctcttattgcctcatcctccaccttcaccaganaccttcatgcctcaggtgaaaagaagaagattgtgggggtgttctacaaagggaatga

SEQ ID NO: 5073 - DNA, 274 bp, Glycine max
  Clone ID: 701002063H1
ctcaagggatttgcagaaggatcctcctacgtcatgcagcgcaggtcctgtggctgaagacatgtttcactggcaagccacaatcatgggacctgctgatagcccatatgcaggtggtgttttcttagtttcaattcattttcctcctgactatcccttcaagccaccaaaggttgcttttcggactaaggtgttccacccaaacatcaacagcaatggcagtgccatgtcttgacattctcaaggaacaatggagcccagctctaaccattcc

SEQ ID NO: 5074 - DNA, 274 bp, Glycine max
  unsure at all n locations
  Clone ID: 701002064H1
ggtacacnagaggaggatactcaacaaaatcttggtgaggatgaagcacgagcaggattaagcaagacattatgggtaaacaactgtggctcctgaccgttcatttgcttgcgtaatttggccagttctattacaccccattgcattttctctatgtttagtttcatatctctcctctcttgggagaagctttctctgttggcttcattggaccaaaactaattgggagtgttcatccntggatctcagttactatgtcantgtngaaatttng

SEQ ID NO: 5075 - DNA, 152 bp, Glycine max
  unsure at all n locations
  Clone ID: 701002065H1
gttganctgagtagagaganagangatggtggcgcgcaggtttctggtggtccacgacgactctgactttgatctacattacgacacagacgacggcttcgaagtctttcaattcgagctttattccctcacttccgntccacannananac

SEQ ID NO: 5076 - DNA, 270 bp, Glycine max
  Clone ID: 701002066H1
gttccatggcatgctctccttctacaactcttgtgtcaaattctcttctccttaacaaaacgactagtcagtgtcggcttcatgttcatcccaccctttcacttaatcaaaaccttccaatatattctaataacctaccacaaactctcaacaattcaataccatgcaacaaccacaccctttgttgctgcttctgcaggagttgagtctccggtgttgggtgaggataccacgagttcactggattcggtgaaagtgtttgatttgaat

SEQ ID NO: 5077 - DNA, 266 bp, Glycine max
  unsure at all n locations
  Clone ID: 701002067H1
ccaaganggagcaagtgttctctacntactcagacaaccaacctggtgtcttgattcaggtgtatgagggagagagagctagaaccagggacaacaacttgttgggtaaatttgagctttctggcattcccccagcacccaggggtgttcctcagattactntctgctttgatatcgatgccaatggtatcttgaatgtctctgccgaggacaagaccacagggcagaagaacaagatcaccatcaccaacgacaagggtagacta

SEQ ID NO: 5078 - DNA, 265 bp, Glycine max
  Clone ID: 701002068H1
cagagagtgatttcagtgagtgatcggtgttcacttgatctcatcataatcgtcagcgtcaattgaagaagatgccgatcagaaacatcgccgtcggaaggcctgaagaggcgactcaccccgacacgttgaaggcggctttggctgagttcatctcaaccttcatcttcgtgttcgccggctcaggctccggcatcgcctacaacaagctcaccgacaacggcgctgccacccctgccggcctcatctccgcctccatcgccca

SEQ ID NO: 5079 - DNA, 263 bp, Glycine max
  unsure at all n locations
  Clone ID: 701002070H1
gacaattcaggtttgaanatgaccaaggctgaaagagggagtcctatatctttgccaccaaagcttactcaaataaaggagaaaccagntgtttctggcactccaaatgatcaatctgatgatggaaagaatgttgataatcaaancattagcaagatgaagcttgctcacattgagaanaggcctactagggtgcctagacctccncctagaccatctggtggagctgctgttaccgcaactgcaaatccttcnaacggagt

SEQ ID NO: 5080 - DNA, 262 bp, Glycine max
  unsure at all n locations
  Clone ID: 701002071H1
tgagttttctgatgacaacaggtcaggtattgataggtctttgcatcggatangcgcgattncggaatcggaaaatgcaaatccattgggcttacttgtcgggtgggtcgagctgtgggtggcagtgctgaaattatacgtgatttggttgaggatggaggttctatcttggtcattggacctcctggagttggcaaaacaaccttaatcagagagattgctaggatgctggcctgatgagttcaggaagcgtgttgtaata

SEQ ID NO: 5081 - DNA, 265 bp, Glycine max
  unsure at all n locations
  Clone ID: 701002073H1
ggccgattctccaggacaattcccttcacccaacctaattgcaattagtgtagaagatgantacgttggatgcaacaagggctgaacttggtcttcttgttttatatttgggcaaggctgaagcaagggacaaaatatgcagggcaatacaatatggttccaaatttttgagtaacggggaacctggtactgctcagaatgtcgacaaaacaaccagcttggcacgaaaagtctccgtcctttttaagtttgtcaatgacctaca

SEQ ID NO: 5082 - DNA, 265 bp, Glycine max
  unsure at all n locations
  Clone ID: 701002074H1
gaggaaggggattgttcccctcctacacaagaggaattggcagcagaaattcataggttagagttgcatgcctatcgttgtacaattgaggcattgcatgcatcaggccccttaagttgggaacaggaagcattaatgacaaacctccgtctttcgctccacatatcaaacgatgaacacttaatggagctaagaaatttgatttcttctgaaaacagcattctttaagangacaggntttttttncctctccnanttaggannt

SEQ ID NO: 5083 - DNA, 268 bp, Glycine max
  Clone ID: 701002075H1
cccaaactaacaaacaaatcccagggagccaccaaccatggcttccaagctctgcgactcatgcaaattcagccactgctaccttgtactgccgccccgacgcggccttcctctgcggcgcctgtgactctaaggttcatgccgccaacaagctcgcatcgcgccacccgcgcgtccgtgctctgcgaggtgtgcgagcaggcgcccgcgcatgtgacctgtaaagccgacgccgccgcgctctgccttgcctgcgatcgcgatatcc

SEQ ID NO: 5084 - DNA, 263 bp, Glycine max
  unsure at all n locations
  Clone ID: 701002077H1
ctttgattttnataagataggtctgtgctgtggggaaaattggaagcatcgatcggaaaatgcaatcgttatcgttgagtatgagtctgaggagtagtagcttagtgaattttcttttgctgggttcagagacgagagngnagaagcagaaggagtgtcatcgtagcgtgtgcttcagagggagacagtggcagcagtagcacaagctcgtttctctctcggacccaaacctacgctcttcttaagcacaattgcaatagctg

SEQ ID NO: 5085 - DNA, 265 bp, Glycine max
  Clone ID: 701002078H1
gtctcaagcaaccatggcaatggcaacccaagcctctctcttaaccccacccctctccggtctcaaagccagcgaccgcgcctccgtgccatggaagcaaaactccagcctctccttctccagcccgaagcccctcaagttctccagaacaatcagagcagcagccgccgacgagaccacagaggcaccagcaaaagtagaggctgcaccggtcgggttcaccccaccagaattgacccaaacacccttccccgatcttcggggg

SEQ ID NO: 5086 - DNA, 269 bp, Glycine max
  unsure at all n locations
  Clone ID: 701002079H1
cnaaaacggaaaactctcggatttaatcggcgagcttcagttgctggtgaagggattggaaaaatctggggagcatgctgaaggtgaaggtgaatatgctgatgccatagctgctcaggtgcgtcgcctggcgaatgaagttcggcagctagcatcaaacaggccaatcacagtactgaatgggggttctgaacaaagtaatttatcatcccttgtcgtnccagctgctgccttgggcgctctgggtnatggctacatgtggtggaagg

SEQ ID NO: 5087 - DNA, 273 bp, Glycine max
  Clone ID: 701002080H1
gcttttgctagtggtactgtcttagctttgattctctgttctctgttttgttctgtttcgcgtattgtcttcatacaggaacttgaacaatgaagaatgcaaagggcaagggagcagcaagggcctcaaaagaatcactgaagcccgttgatgaccgaaaggttggaaagcggaaggcttccggtaagcctgggagaagtagtgcaccaaagaaggagaagaaggccaagaaagaccccaacaagcctaaaagaccacccagtgctttctttg

SEQ ID NO: 5088 - DNA, 271 bp, Glycine max
  unsure at all n locations
  Clone ID: 701002081H1
ctantcctcantangagcncntcncgcactggttcttcatcngcatgcacacagntgcatagttttggaaaccaagaagggtaagcatcancaagcnnttctgaanatggagatcacnaatgtcantgngnatgaggctntngcaanncagaagttgccaaagatggcgtttgactactacgcatctngtgcagangaccagtggactctgcaagagaacanaaatgcctttccagaattttgtttcggccacgtatncttattnatgtga

SEQ ID NO: 5089 - DNA, 266 bp, Glycine max
  unsure at all n locations
  Clone ID: 701002082H1
gcaagtcgtggcggaagaaccatccccatggttttgttgcgaancggagacgctgcccgatggaaccgtgaacttgatggtgtggcattgcactattcccgggaagactgggactgattgggagggtggctacttcccgcttacgctgcactttagtgaagactacccaagcaagcctccaaagtgtaaattcccacaaggtttcttccaccctaatgtttatccttctgggactgtttgcttgtctatacttaatgaggatagtg

SEQ ID NO: 5090 - DNA, 258 bp, Glycine max
  unsure at all n locations
  Clone ID: 701002083H1
caaagattaagccatccatgtgtaancatgaactaattcagactgtgaaactgcgaatggctcattaaatcagttatagtttgtttgatggtatctactcggataaccgtagtaattctagagctaatacgtgcaacaaaccccgacttctggaagggatgcatttattagataaaaggtcaacacaggctctgcctgttgctttgatgattcatgataactcgtcggatcgcacggcctttgtgccggcgcagcatc

SEQ ID NO: 5091 - DNA, 269 bp, Glycine max
  unsure at all n locations
  Clone ID: 701002084H1
gnttttaagaaaaccggcagtattgccgttagcgacgcagccaaaaccctaatcagtgccaaacgatggaatcaccgtcaccaccttccccgttccgagancttcttctccgtttatccgaccggaatcgcggagtctctggccaccgttccctacactccacaccantcctccaagcgtctccgtcaaagcctttctacgaacccctacctcgttcccaccgccaccgtcagagacttcgctctcgcgtgcgctctcatttcctcttc

SEQ ID NO: 5092 - DNA, 221 bp, Glycine max
  Clone ID: 701002087H1
gtctcgatgtgccccttcgtttcgtcggcatgatcgcagccagcgctcttttcggcgctgtccttgtcttctaagcgtaacgtgtgagcatgcgtatcgaaaagatgtagagcacttgttttctggtttctggagtttttttgactgccgtcgtcggcattacatatatacctgattcgtcattgcaggcgcagggccttttgtatagtaatacatatacg

SEQ ID NO: 5093 - DNA, 263 bp, Glycine max
  unsure at all n locations
  Clone ID: 701002088H1
tctaaattgtgtacatccatcttcttctcaaagaagttatgacagcacattacttgcttgacattccctaattcatttgttcatgtttganagttgcactttaattaagaagataacaatanagtgtttttntgccctttaacccaaagtagcttattcttttggatgaggtgaaattgtgggaaatgtatggctttttcagtgatttgttcttgtgttagagcatataacataatgatctatattctttaatgggatgcaca

SEQ ID NO: 5094 - DNA, 265 bp, Glycine max
  unsure at all n locations
  Clone ID: 701002089H1
atggcaattttctatattcttcttcccaccggtcatcatcttttggctgtngctgtggctgttgcaggntnctctccgaagcttcaaagttaacagagaaagaccctaacaacctaatcctccctcgtcactcattcntccaccttcacttaacggtctcacataattgaagatntatcgaagggatntgtntntgtttgtgtgctgtgttgaaagtganattaagcattaatgtgtngggagctatgagattgtattgttnagc

SEQ ID NO: 5095 - DNA, 249 bp, Glycine max
  unsure at all n locations
  Clone ID: 701002090H1
catcnttcaatttcaatcaacggttatacccttttctatttgagcatcattcatgtccaccgcagcgcagcccaaggccaagaaaacggcgtcgtccaagaagcccctctcccatcctaccttcgccgcgatgatagcggaggcgataggagtctgaaggagagaaccggttcgagccaatacgcgataaccaaattcatcgaaggcaagcacaaggagttgcctccaacctacaagaagcttgttctc

SEQ ID NO: 5096 - DNA, 266 bp, Glycine max
  unsure at all n locations
  Clone ID: 701002091H1
tgacatcctccatgtctgattacaagaagagattagatgttgcaggttacgtacccatacagacaagatctaaagccaatcagcaagaagatagagatttccaagccaaatacaatctaccggacaccgaattcgtcatcacttattacggctgttcttccagcagtctggtggcgggttacatctacatcacacctagatatgtncatttttgacgcttatgttggagcactgagtgtacctgtcgtcatagcaatcaccgacat

SEQ ID NO: 5097 - DNA, 261 bp, Glycine max
  unsure at all n locations
  Clone ID: 701002092H1
cnacattagcattggttagggactgaaaatgggtccgaaattggcgaaaacggggtcgttccgtccatggattggcggagaagaaggagaggcttctgtcggcgaagatgcggcaggaggaagaggaagaggaagaggaagaacgcaggtggtggtggtcgaagtggaacagtgtgaaacgcgtggctgagaaggcttggnaaatgggtcggtctgatccaaggaagatatncttctctgcaaaatgggattgtttncncc

SEQ ID NO: 5098 - DNA, 264 bp, Glycine max
  unsure at all n locations
  Clone ID: 701002093H1
cgctcagcgattgcaccgacctaacagtccccacttgagcatctaccngccccagctcacatggtacccatcgatcttcaaccgaatcaccggagtgggactctctggtgtgctatacgcggcttcgttggtctacctcttccacccactataccccgctctcgactcggcccaccttatctcgctagtgcacagtctgccgacttgggtcaagggcggtatcaagttcgtcttcgcngtccattcacttnccacangttnang

SEQ ID NO: 5099 - DNA, 270 bp, Glycine max
  unsure at all n locations
  Clone ID: 701002094H1
gacaaaatgattcacttatcaaattttaatttaaagttttttagctaaaaaganaataactttgctttttcccttctttttaacccccttaaatgaaaaaaggggttccccgacttggataggganctatgcgagtgacctncctaatcttattgtngaaattttcaggatcaatgattagnccatgcaaacnagaaatgctttttcttgtataaaggaagggattactcgatccatttcccatatcgatcatgatacatataataattc

SEQ ID NO: 5100 - DNA, 262 bp, Glycine max
  unsure at all n locations
  Clone ID: 701002095H1
tcagaagtttgggattgtgagactattgtttcgatgtactcaaatttagataaccaccctggaaagattgaagcacctggagtaaccaggaaaaagaaattgtctgaaaccgtgtctgcagtcttgagttcctctagtcaaataataccccttagaggaaaagagaaactccccgtagacttcttgcctggtggtaggaaacctgccaccgnaaaggttaaaggccagagcattgcaaaaactgagcagtacaagagaaaac

SEQ ID NO: 5101 - DNA, 272 bp, Glycine max
  unsure at all n locations
  Clone ID: 701002096H1
gcggggttagctacagtgaatccatngccatgncggctgcatttgcanctacaactgcaacactgagactgcnaaatnntggaganagcaaaagtttncagctccgtaagtntaaccctaatcccaataagcttaaggttatgcgggggtttggcggttnttctggagtggcagttnagtgtgagattggaattggaagggttcgggcganttcgaattctnctncttccgaggaggagcagaggcatnantntnnattcaaaantgncncc

SEQ ID NO: 5102 - DNA, 279 bp, Glycine max
  unsure at all n locations
  Clone ID: 701002101H1
gcaaaggcctaaacggaaacagatggaagatgatctcgatattaacgtggaggcaacgtttcagagagacctgactgtgaaagccgtcaactgtcagctacctaatgataaaaaagttaagcatatagatctttcagatacagttgtggaggcttctgcagtnagttgtcagaaaatgccttggaatgaggtaaatggcaaatttgaagacagagaaagttatagcagggagctgcgaacaagttttggtggaattcacggatgttatgattctggagc

SEQ ID NO: 5103 - DNA, 269 bp, Glycine max
  unsure at all n locations
  Clone ID: 701002103H1
agggatggtgcctcggaaggtcaagcctcagaccttgagcatggtgatgcagtgccggcggcaaatgtgggattctgtagggtgctttcacttgcaaaacctgaggctggaaagttggtgatcggtactgtggctctgttgattgcagccacatcaagtatcttagttcaaaaatttggtgggaagataattgacatngtctctagggaaatgaaaactccagaggagaaacatgaagctttgantgctgttaagancaccatactagt

SEQ ID NO: 5104 - DNA, 269 bp, Glycine max
  unsure at all n locations
  Clone ID: 701002105H1
ggaggttatcataatgttacgactaccagatgctcaatgcaaccacagaatgataatcttcattcttctattcagtttgataacactgcatttccactacaaaaccagctncatgagtgcttcacaccattctcagtttccaagaaatgaaaatgggctaactcttggtacacgacaaccagccactcctggatttcagaatgtcagcatttcaaatcctaattatagaggattggaggactattccnagaggatgagattngaactng

SEQ ID NO: 5105 - DNA, 264 bp, Glycine max
  Clone ID: 701002106H1
tttcttcctcctccactggctgcacctcgctgccgtgtctctgcctagcgtgaaattggcctcatttcccatctgggttctgtgaattgcgattggaaccgcgttttccccgcttctgggcttggctcagaagtagtcagaatgatgtctgtcacaggcaaaagcattgattttgctggcaaaaacttggtctcttgtggctgctcttccaatgcttcttcgtttgataggtacactgtgaggaatatgccaagctgaatagta

SEQ ID NO: 5106 - DNA, 264 bp, Glycine max
  unsure at all n locations
  Clone ID: 701002108H1
aagagatggacaacaaggcaagaaggtcattgtcggttttgaggtttatgcaaagagcatcgaggctggtaacaganatgctcaaggcatacctgtttccatcaccgacgtcagcaacggcatggaattgactatgcgcaaaaacggtactgctgccgctgctgcttcttactactcctccgacttcgacctaccacccggcgaccatccgacgacgttgatgaggangctactcttacattccctacacgtatctgtgtnctc

SEQ ID NO: 5107 - DNA, 266 bp, Glycine max
  unsure at all n locations
  Clone ID: 701002109H1
gnagttatctcttgaggaatatacactgcaggcttttgagatgttaattgcacagttcactgagaagactcgtatttctttccgagatgccctgtaccgccttgctagaaatacaaaacaacatgtaatagaggaccttgatggaggtcttaacatgcaccaggaaatgccagactcagtttaccatgaaaccatgaggtctgaggacaataaaccaatggaatcagagagcaacagtgttgacagagcagttgcaaatctcatgt

SEQ ID NO: 5108 - DNA, 266 bp, Glycine max
  unsure at all n locations
  Clone ID: 701002113H1
gtcattgcctttaccatctcagtctcaactctctccaacaaccacaatggctctcttgggcgccgcctcctcctccgctcgcatcattccctccgtctcactctcttcctcttctcgctccttcttctcactctcatcctcttcttccaaactccaatgcttgcgctcctctcctcgtatttcgcacctctttctcaatcagcngaagagcgggaggttngcgtttngagtggaggatacgaanntgtgtnggnacggaataaatt

SEQ ID NO: 5109 - DNA, 195 bp, Glycine max
  unsure at all n locations
  Clone ID: 701002114H1
ctgagaccaattttnaaaaccatttgtttacaacaaccacgagacntctctcaactgatgccgcnaaacttacaaatagagaaacaagcaaagctgggcctcttgttgagtatgaacgaaggattactaatggtgaacttgtagaaggtgatgcttgccaggtagacatctgacngaanttccngggacgtatgt

SEQ ID NO: 5110 - DNA, 272 bp, Glycine max
  unsure at all n locations
  Clone ID: 701002117H1
tactggnntcccacaggcggcgattctnagtcacgactcggtgggtgggttcgtgactcactgcggttggaactcggtgttggaagcggtgtgtgaaggggtgccgatggtggcgtggctctctacgcggagcagaagatgancaggatggttatggtgaaggaaatgaaggtggctttggcggtgaacgagaacaaggatgggttcgtgagttcgactgagttgggggaccgagttagggaatcatggaatcagacaaagggaaaganntc

SEQ ID NO: 5111 - DNA, 264 bp, Glycine max
  unsure at all n locations
  Clone ID: 701002122H1
ctgatgtttggtcatgtggagtcanacctatatgttctaatggctgnatatcttccttttgaggaggcagaccttccaacactgtatagaaggataaatgctgcagaatttgtttgcccattctggttttctgcagacacaaagtcattcatacaaaaaattctggatcctaatcctaaaacacgggtgaaaattgaagaaataaggaaagagccatggttcaagaaaaactattttctgtcaaactcggggaanacgagcaat

SEQ ID NO: 5112 - DNA, 258 bp, Glycine max
  unsure at all n locations
  Clone ID: 701002125H1
tgctanaacagttggccttggatatgagcagcataanaggagaatggatggtggaacaaatgaacctttattcacaaatgtaactagagattttattggncactctagattacatattttacacagcggattcattggttgtggagtncattattggagttactggatgaggaganttcgaggaaggacacagcanttccttcacngaaatggcccncagatccacacngctctctnngnnntttccgntggaagaaa

SEQ ID NO: 5113 - DNA, 263 bp, Glycine max
  Clone ID: 701002127H1
catactctcaacttcaaaaggtggaaactagcctgcagatcaaggcttctgctgaacagttctatgatgttttttgcaacaagccacacactattgccaacatttcaccagaaaatattcagtcagttgaagttcataaaggtgaatggggcaaagagggatcaatcgtctcctggaactatttacatgagggaacagtttgtgtagccaagcaagtgcttgaaggcatagacaaggaaaataacaaaatgacaatgaaggtc

SEQ ID NO: 5114 - DNA, 264 bp, Glycine max
  unsure at all n locations
  Clone ID: 701002129H1
gcttaaagttttatttttctggagattacgngtcaacttataaggaagatcttgaagaattaattgaagtgnggggaggtactgttttgagaatcaaggaagaattggaagcacacagacatgaatgcaaaggggattcttcaaagttgctagttgtttacaaccttgatcccccacaaggatgcaagttgggggaggaagtttcaattctttggcaaaggctaaacgacgcagaggatttagctgcgaacatttacaagtcat

SEQ ID NO: 5115 - DNA, 272 bp, Glycine max
  unsure at all n locations
  Clone ID: 701002131H1
cnaaagcaagaagaactagtctaagcagaaatggcctcttcagtgatggcatctgtggccctcaaacctgcccctttcactgttgagaagtcctcagttagaggccttccctccctctcaaggaactcctcttcattcagagttgtggccagtggtggcaagaagatcaagactgacaagccttatgnnnttaatggtggcatggctttgagggaaggagttgatgcatctggcaggaaaggaaagggaaanggcgtttaccagtttgtaga

SEQ ID NO: 5116 - DNA, 273 bp, Glycine max
  Clone ID: 701002133H1
gcgcttcttggcacacaatgggaatctttgagatccatgagagccaagaagatcatgaactaacatatgctctaacccctgcatcaaagcttcttgtcaatagtagtgatcattgtctatctccaatggttctagcgtttaccgatccacttcggaacgttaaataccatcacttgggggaatggattcgtggggaggacccctcagtatttgagacagcccacggaacaagcgcttggggattcttgagaaaaatcctgaatttttagtctc

SEQ ID NO: 5117 - DNA, 268 bp, Glycine max
  unsure at all n locations
  Clone ID: 701002134H1
ctattttctgttcccaatttgtttcggatctctgttcacgaacccnaaatctgacgttaattcaccatgatctgaacacaacgtggttcccatctgatccactgcatcgtctttctcaattgtcgaaagatgagtacaagtggttaatgagattgaggaacttgcgttgtttgagcgaaacaaagcagagatgtactgaagnanccgntatggantgaaacagggaaaggcgatggaantccaaanacgaggttatggtgcattgccc

SEQ ID NO: 5118 - DNA, 266 bp, Glycine max
  unsure at all n locations
  Clone ID: 701002135H1
tcattgaagaaataaaagtnaagttctaattggtgttattgagcagancagcatggagccacagtgtagaatncaagaaggatgccactgaattgatagggaataccccaatggtatatctgaacaacattgtggatgggtgtgtagcccgtattgctgctaaattggagtacatgcaagcntgctgtagtgtcaaacataggattgctttgagcagattgaagatgctgagaaaaaaggccttattacaccggaaanactgttcg

SEQ ID NO: 5119 - DNA, 265 bp, Glycine max
  unsure at all n locations
  Clone ID: 701002137H1
tagaatttgttagggacaacaaatcacttggtagcttccgcttggatggtatccctcctgcgcctgcgtggtgttccccagattgaggtgaaatttgacattgatgccaatggcattctatccgtcactgctatcgacaaaggcacagggaagaaacaagatattaccatcactggtgctagnacttgcnttcnnnntgnggtggagagaatggtaaacgaagctgngaattttcgaaggaagacaaagagaagagggatgctat

SEQ ID NO: 5120 - DNA, 253 bp, Glycine max
  unsure at all n locations
  Clone ID: 701002139H1
ctcttttacgccggggttntggttgctcacaccgtgttctctgccgcacgagataactagggtttagaatctcgcagttacagaaaacatggcgactgtggtgccaacctccgaagaagacgctgcactctccgtcgttcgattcgcctctgaacttgcctggnccgatgccggtncctgaggttgctgagccccaagttagcagactctgcacggaggctgnaagagttcatgttagggaaatggttggagt

SEQ ID NO: 5121 - DNA, 262 bp, Glycine max
  unsure at all n locations
  Clone ID: 701002140H1
caatttcacccttcacacgtggnggtggtgttgttcttcttctcttcccctttctttttcttcttctgagcttgtttaagctctttctatttgattccattaacatatattatacacaatgtgtggnattcttgctgttcttggttgtnctgatgactctcgagccaaaagggtccgcgtgcttgagctctctcgcagattgaagcaccgtggccctgactggagtgggctcnatnaacatggggantgnttttaagnaaac

SEQ ID NO: 5122 - DNA, 267 bp, Glycine max
  unsure at all n locations
  Clone ID: 701002141H1
agaagttaacaaccaatggccaccatcattgcttcttcctgcatccactgtgctcttctctgcatcctcttccctacctcctcccattttcacacccttctanttcgcgcctttctttctcttnttccctttcctcntcctcctcttctctatcantttctccttcttttttatcatacacttcttcaaattctanacactttgccactncatgctgccttcagcatcagtgcnagcncccgccgagaagaagaaggtgctcatcgt

SEQ ID NO: 5123 - DNA, 231 bp, Glycine max
  unsure at all n locations
  Clone ID: 701002146H1
cttcgcgcctcactnccttcttaacattcattattcacacgtaacagcctcaacctgcaacctccaaactcanttcatttttggccgcaaaaaacccaaatcaccctctcaacgatgcaagtttcatcctcatggttcggaacaatagtactttccaaccgctactgcacgcaaccgctccctccctntggaaccgtgttccacacaacatagannngacncnanngtnnc

SEQ ID NO: 5124 - DNA, 270 bp, Glycine max
  unsure at all n locations
  Clone ID: 701002149H1
aattgtggtgtttgtatgggaaaatacttctgtggaacatgcaagctttttgatgatgatatatctaagcagcagtaccattgctgtggctgtggaatttgcagaactggaggaagcgaaaatttcttccattgctacaagtgtggttgttgctantcaactcttctgaaaaacagtcacccttgtgtagaaggagcaatgcatcatgattgccctgtttgttttgagtatttgtttgaatcaagaaacgatgtcatgttatgccatgtg

SEQ ID NO: 5125 - DNA, 186 bp, Glycine max
  unsure at all n locations
  Clone ID: 701002152H1
tattgcctcatttcttctcagacatccntaaaggcacacagattcctttgaaaagcactattgtncactggtgtctttgcagctactcttgcattctttatggacgtttctcaattagcagggatggttagtgtgggaacactgcttgcatttaccactgttgnagtttnngtttnganaatcaga

SEQ ID NO: 5126 - DNA, 256 bp, Glycine max
  unsure at all n locations
  Clone ID: 701002153H1
catggacgcttcaattccttcttcgnttcaaganaccgatggaattacgatactctcaaaaacttccgtcagatttctccggtcgtgcagaatcactgaagcaggtttattttactctgtgttttgccgtggttgctgcggctgtcggggcttaccttcatgtcntcttgaacattgggggttttcttnctacagtggcatgcatggnaagcagcttttggttatctccacactcttttgaagagaggaagagggt

SEQ ID NO: 5127 - DNA, 259 bp, Glycine max
  unsure at all n locations
  Clone ID: 701002154H1
cttcacttaagccttcgatttgtataagatgcttccgagggctttattggccaaattcattctcaaaccctccactgtttctccattccagttcaatcagcaganagcattgcatagtaggaacaagaaagccttggagttcattgcaaaaggctggaatgctttgaaggaggttgatagagtcatcgattattccgatcccaagcattcgggcattgtttctcttcncnggncagcnnggagttnncgagttgttaga

SEQ ID NO: 5128 - DNA, 147 bp, Glycine max
  unsure at all n locations
  Clone ID: 701002156H1
tttcacgactccttcggagttttctctgctcgcccataatccaacnnncggcaaatacgggaaatttagacgcggcgatagagcaattgctgnacgtggagaagcagatgaggctcgccggtgacgtggcaggtaccagaanggcgg

SEQ ID NO: 5129 - DNA, 263 bp, Glycine max
  unsure at all n locations
  Clone ID: 701002157H1
gtgtagctagggagggatatatatctgagtaagatgggcatcagagcttgaattgcccccaggcttcagattccatccaacggacgagnagctggtgttgcantatntctgccgcaaatgcgcgtcgcagccaatcgccgttcccatcatcgccgaaatcganntntacaaatangacccctgganccttacccggattggctanttatggagagaaagagtggtattnttttcaccangggaccggaaatacccaaanggtt

SEQ ID NO: 5130 - DNA, 260 bp, Glycine max
  Clone ID: 701002158H1
ctcagggtggttttgattctaatgctgtggcaactgcaaacatcttggagagttcaacgcctgtcattgatgggaaacagtactacagtttgactgtgttgacaaggacagctgatggagatgaaggtggcaagcaccagctgattgcagcaactgtgaaagatggcaaactatacatttgcaaggctccaagctggagacaagagatggtttaagggagcaagaagatttgtggagagcacagcaagttctttcatgtt

SEQ ID NO: 5131 - DNA, 264 bp, Glycine max
  unsure at all n locations
  Clone ID: 701002159H1
caaaagtattttgttcgcttattaccacaaaanacgagtgcaacaaggtgcctgcgtgcacatgacgtagcgctagatcttggcanagttgtataaaactcaaacagctttcaacatttgcctcgacaagcgttttatgctcgactcgcntaaagcggccacaaacccagccaatacacgtccaacacccgacagcgcactcgcgactgcagctggcgttgatcccaaagtccgacttccacaagcgcggctggantgagagtt

SEQ ID NO: 5132 - DNA, 192 bp, Glycine max
  unsure at all n locations
  Clone ID: 701002163H1
ttggtctttcagtacgacgggagcnttggaaggagctcattatctggccactggtgagctcgtgagccttagcgagcaacagcttgtggattgcnatcacgtgtgtgatccagaagaatatggagcgtgtgactcaggctgtaatggtgggttgatgaacaacgcatttnngtacatatncnttctggggga

SEQ ID NO: 5133 - DNA, 271 bp, Glycine max
  Clone ID: 701002164H1
aggaattatggactgggttgctaactggagaaaaggtgaggtcaccgggtgaagagtttgacaaattattcacagcaatgtgccaagggaaaattattgatcctcttatggagtgccttggggagtggaatggagctcctcttccaatctcttaaatttattgtaactcttaacaaatattttatttgtacctatgcaagaaaaaccataatcatttggtttgtctatcattaacaaatgttccttcaatgtcaaataggacttgtattta

SEQ ID NO: 5134 - DNA, 271 bp, Glycine max
  unsure at all n locations
  Clone ID: 701002166H1
ctcatctgctaccaatttcaccattctcatcctccaaagttgaaccataatttcaaatccaaccaagagacaccatgtcatncaagtggaaccatttggagctatgaggaagaaaaagcatttgagaatgccatagctatgcattggattgaggaatcctcaaaagagcaatgggagaaaattgcttcagcagttcccagccaaaagcatggaagatgtgaagcaacattnccaggttctagtagaggatgtagtgccaatagaggcggnc

SEQ ID NO: 5135 - DNA, 264 bp, Glycine max
  unsure at all n locations
  Clone ID: 701002167H1
tttcttctgcncntcttctctggnntctggcttccttngtacgntaaagaactcaatcttgtccatttccctttggtttttctttcttcgatctcttcaccttcctttcgaccactctcttatcacngcncgctttcttaactagagccctctccgtngagggtttctccaggtgtggttngatttanagtttntgatgntgaagaaataaaaaagctgaaggctttggcncttnngtgnnaaaaatgtngnaaagtggtgcaa

SEQ ID NO: 5136 - DNA, 262 bp, Glycine max
  unsure at all n locations
  Clone ID: 701002169H1
caaactcataacaacaactccttctgttnacaaactcatcttcaattccttttctgatctacgcaaggttaaggttaattttatctatctacttggacatgaacgaaatcgatgttccttcgttctttctctgccccatttcgctagatatcatganggatccagtgacggtctnaaggggcatcaccngngncggnaaaaccatgnaanacggggntgttctcgaagaaaaacaggacntccccaaataaaaacntnttta

SEQ ID NO: 5137 - DNA, 262 bp, Glycine max
  unsure at all n locations
  Clone ID: 701002172H1
gnccgatcatgcatttcatcgtccatgtccatggatatgaagatgaacatgcttttctttctcgtcctttttgcttctgcaatttcctcttctcttgccaagggttccttgcaacaaacccttncttccttcagaagaattcaatgacggtagtaatgcaagcagtgcaaggcatttattagaggatgagtctcaggctcagacaagtgttgatttggcacaaggatttatgtnccaatgatgaacttgantgggccatcca

SEQ ID NO: 5138 - DNA, 259 bp, Glycine max
  unsure at all n locations
  Clone ID: 701002173H1
caaatcttcaatgaattggttgattctcactgcctgaccgaagtgtctctngaagcntcagagattgtgctcttcaggatattacanctgggtgaatatgttggagttaaagatgattggatggatgtcatctcttcccaagggttgtccttncntncagttgatgntgctggttctcaggtgaccaaanatgnatnnccacncctnanggcnagcncncaaaaaaaaagaatnncccnnanncanngngnaaaattaa

SEQ ID NO: 5139 - DNA, 258 bp, Glycine max
  Clone ID: 701002174H1
cttcacttttcacaaaacgacgtacagtcatatcctaaatcaccgaggagattatataggtagtcttgccacttttaccgaccgaccttgataatcgggtgcgcacacggcgtcgtaccacacaccagcctcggcaacaaccgcacgaacaacgcaaacacgaatcatggaggaagagcgtctctggaagttccgcaagcccgagtggctcaatagcgtctgggctagaaactctggcgtgtacgctctggcgctctg

SEQ ID NO: 5140 - DNA, 256 bp, Glycine max
  unsure at all n locations
  Clone ID: 701002176H1
ctaagaccaaagccgctcctgctaagactaaggttacaaagccaaagtcaaaggttgaagatggtatctttggcacttctggaggatttggttttactaagcagaacgagctctttgtgggtcgtgttgnctatgcttggttttgccagcatcactgttgggtcnaggaataactgggaaangattctagcacaattgaatctggaaactggattccctttatgaagcggngctcttcttcgtttnacaccctccc

SEQ ID NO: 5141 - DNA, 255 bp, Glycine max
  unsure at all n locations
  Clone ID: 701002177H1
caacaatccacactatttgtatcggatgaccattcttcgtgctatctctctgcttgctcctgtgatgggccctgaaatcacttgttcaaacttgttaccggttgttcttgctgcatctaaagacagagtgcccaacataaagttcaatgtggcaaaggtattagagtccatcttccccatcgttgatcagtcggtcgtggagaagactattcgcccatgnctggttgagctcagngnggccctgatgtgggtntt

SEQ ID NO: 5142 - DNA, 267 bp, Glycine max
  unsure at all n locations
  Clone ID: 701002179H1
cagtttccaagaatcttaagctatgggaaagtcttacccaaccgtgagcgctgattaccagaaggccgttgagaaggcgaagaagaagctcagaggcttcatcgctgagaagagatgcgctcctctaatgctccgtttggcatggcactctgctggaacttacgacgtgagctcgaagaccggtggtcccttcggaaccataaagcacccctccgaactcgntcacggcgctaacaacggtcttgacatcgntgttaggcttttgga

SEQ ID NO: 5143 - DNA, 225 bp, Glycine max
  unsure at all n locations
  Clone ID: 701002180H1
caacatacctcagttaaacgcctttatttcaaagcgacaaccccttagtgccaagcaattacggaaccggcgacttttcgacggaccagcctactagtttcaccgcagccgctccggttgaaaacaaataataaactcggtcgctcgagcagttctgtcgactctttcatcgtcttctgcacctctctacacgacagacaagcnccagcacgatggtgtctccag

SEQ ID NO: 5144 - DNA, 271 bp, Glycine max
  unsure at all n locations
  Clone ID: 701002181H1
taccttagcctctccttctccctctttcagttgcttgttacanttacaatgctattactattcccacctctgtctcagttagcttcacaaactcgcttgcctttgccttttcccgtgaaagccaaagtcaaactgaaggttgtgtccgaagctgatgccttcccttcatttcttcccaaagaagttcacagaatcaaagacccttttgctcgaaacttgccatgcggattcacagacttcnagtttctgttaggttctctgaaaatcctat

SEQ ID NO: 5145 - DNA, 267 bp, Glycine max
  unsure at all n locations
  Clone ID: 701002184H1
gagcttgcattatgttaaataatggggatctataatgaataatcatatgacatatttgcataattttaatgggcatttatttatgacaaanatgctaatagttctgctttgaattttcagatgcctttccattgtgcttaatgctcgggctgaattcgtcttatcttcaattttttatgattgatattacttagcccaattacatagtgtatgtcccacataaangtactnatcccccatcaatnataaccttttccngggngggga

SEQ ID NO: 5146 - DNA, 259 bp, Glycine max
  unsure at all n locations
  Clone ID: 701002185H1
tgggatacacagcacctgagtatgcactccatggtcaattatcaaaaaaggctgatacatacagctatggaattgtagtgctagaaatcataagtggtcaaaagagtactgatgtgagannnnnnnnnnnnnnnnnnnnnnngtcccttcttcgacaagcatggaagttgtatgagagaggcatgcacttggagttggtggacgaaaccttgaatgataactatgatgcagaagaatgaagaaaatcatagaattgctt

SEQ ID NO: 5147 - DNA, 261 bp, Glycine max
  unsure at all n locations
  Clone ID: 701002186H1
tncagcaatgantttgtaaatagggcaaaagtaatggataagganttantttctctggatatattagaaaaccgaattcgattgtctaatgatgaaactaaaacaaaatatttaactaaaatatatgatcctttcctgaacggacgctttcgtggacaaatcgaaaatgttttttcaacctcaatccaatatgaaaaanatgaaaaaaaaaataccnttttgataaataaaattcnnggtatccttntttcnaataatnct

SEQ ID NO: 5148 - DNA, 258 bp, Glycine max
  unsure at all n locations
  Clone ID: 701002187H1
gaantatcacgatgaaggctactaccaccgctaccatccttgcnaccgccgctgtggcgtcagtccaggtcgctttgcctgacactatccccatcttgggctaccccttcgggcagcagtgccagcagaccgtccttggtctcttcaccaatggctctttctcacagtgctttcccgctacggctctcttgcctctgctcacctcgacgacggactcgattgtccccgtcctggacaattcatgaccgagttgtgcta

SEQ ID NO: 5149 - DNA, 259 bp, Glycine max
  unsure at all n locations
  Clone ID: 701002190H1
ggcaggacgtcgagggacgntaggagggaaattcagatantgcatcatttagctggtcacaagaacattgtcaccatcaagggtgcttatgaggatcctctctatgttcatattgtcatggagctttgttccgggggtgagttgtttgatcgcatcatccagaggggccactataccgagaggaaggccgcggagttgaccaaaattatgtnggggttgttgaggcttgccattcccttggggtcatgcatagagatcc

SEQ ID NO: 5150 - DNA, 261 bp, Glycine max
  Clone ID: 701002191H1
cacaggcttcactttacagggatggaacttctcactacatgaaagggccttgttctcctgctgtgctacattgttattggggcatgcttcttcgtacaaagaacaccctttaataaccaagctgatgttactaacatcacacttaaaccagccactaatgcagttttaagcgcttaattagtaggctttggcctatttcttgtcctttcctgagatgaagaatggtggtatcgatccaaacccaaaatcagattcaaattc

SEQ ID NO: 5151 - DNA, 139 bp, Glycine max
  unsure at all n locations
  Clone ID: 701002192H1
cnatgaagctgcagccaaacttgaaantatatataaactcagccctgtatctgatacctgtaatgtggaagatatagatagtaaaatcgagagagtcttgcggaggaggaanaaggttagtgaggaactgatgatggaa

SEQ ID NO: 5152 - DNA, 272 bp, Glycine max
  unsure at all n locations
  Clone ID: 701002196H1
gagtttggaaaattggaagaagaatgtaggctggagaagtcttcaagtaaaaactctgaagatagcaatagcatcaattccaaacatgaacaatctgtgaagcctaattcacagggctttagcaactattgatcttgaggnttccaaccggtttgacacactgtgggaacatcaagatttgatagaacaattgaagatggagctgaagaaggtcagagccactggcctacctaccatccttgaggattctgantctccaaggatatgnnacc

SEQ ID NO: 5153 - DNA, 270 bp, Glycine max
  Clone ID: 701002202H1
cttgtgatcactctttgaaccaccctcatggatattgatgagtgggagtttctctctgatgatggctaccttgatttcaatgaagagggtgggaagcaaaagcaaaagcaaagttccttggaaaattggactcaaagggtgtctttgacatggactacttttgctcatcaccaccaccaagggtgagaactcaactagtccctttgccaattcaattggagccaagaattgggaaggccccagaagatgttttggtgaaagacatcatca

SEQ ID NO: 5154 - DNA, 268 bp, Glycine max
  Clone ID: 701002204H1
cggagttggcggcgaccctttctctctctgatttcgatcatggcagctgttgctccttcttctgacaaaactgcagatttattgcagaatttgactctggactctgagtccaaagccattggagttgctgagcctgcgaagaagaatggacctgctttttccaatggggcagctaaagggagggccaagccattcaatccaaattcatgctttgttccaaatggatacccatctgcgtattattatggaggttatgatgggcaaggtg

SEQ ID NO: 5155 - DNA, 268 bp, Glycine max
  unsure at all n locations
  Clone ID: 701002205H1
cngattagtaccacaaaaatggagaaatagaataactgaatatcgtatagctcaaaataaagatttaaccaaatgcaattcatatgaaaaaagccaattaattctttacaaagaacaacaagtaaacgcattaaaanaaaaaattagaaaacaatatagatacgatcttttatcctataattttatcattatgcagataagaaagactcatatatttatggatatagatccctatttcangtaaaanaaaaanccaggngttttcttc

SEQ ID NO: 5156 - DNA, 279 bp, Glycine max
  unsure at all n locations
  Clone ID: 701002206H1
cnatcatggaggagttcgaggatgcagtctcattcgtatctaagaacagcggcatgaagacatcacaagatgataaattgagattctattcgatgtacaaattagccacggttcggcccgaacgatacaccacgtccaggattttttgactttgncaggtcgtgcggaaatgggacgcgtggaaattccgtgtggtgaattatccaccagaaggatgcccaagactgaaatacgtccaaactggctaagattcgattagatccggaaattggcgggaac

SEQ ID NO: 5157 - DNA, 265 bp, Glycine max
  unsure at all n locations
  Clone ID: 701002207H1
gttttatgcagcgcagggnaagagctttaaatgccgttgcatcccgcaatgtcaaagttatagtagtgggaaacccttgcaatacaaatgcattaatatgcttgangaatgctcctaacattcctgcaaaaaattttcatgctttaactcgtttagatgagaacagagccnaatgtcagctagccctcaagggcggtgtcctctatgatnaagtgtccaangtgacantatggggccaaccatcanttantcaggtcccgattct

SEQ ID NO: 5158 - DNA, 272 bp, Glycine max
  unsure at all n locations
  Clone ID: 701002208H1
gttaagttgacaaccataaacaatatgtgtgcatatgggctcaatcctggtatttcaggttctcgtcttttgggcaccattcctcagtctatttcacagcaaactgtttggnatcaaatggcaacagtgagaacaccattgaattttgattctagcaagcagagcttttgtccattttctattgaccttctcggtgggagggatttttagtgggacaanactggagattggatccacaacttatacaaattcctccattagtaacttgttga

SEQ ID NO: 5159 - DNA, 265 bp, Glycine max
  unsure at all n locations
  Clone ID: 701002209H1
cgaatctgagaccgacgttctatgttaagaatctcaactcaagagatgtcgttgatcgagattatgatcatgttggaagaatgactgtccctaaattggcgcatacgcaacgaggagatttgtttctggatgatgagaagacgaagtattttgtttgtgggccggaggggtttatgggggatgtgaggnaggggttgagggattgggtgtaaatgacgagaggatcnagatggaagtttttgggacggggatgtngggttcgtna

SEQ ID NO: 5160 - DNA, 266 bp, Glycine max
  unsure at all n locations
  Clone ID: 701002210H1
gnaatcgcaatatctgttatttccttccatatacgagcttgagcctcgagctattgatgctttgaaatccgagttctctatacccatttacactgttggccctgccataccttcttttggnaatagcctcattgatgacattggctacttccaatggcttgcacaaccaaccctctgggctctgtattgtacatctctcaagggnagtttctttcgttttcccaatgaaacaaatgatgaattgcggccggtgttcgcgaaagtgg

SEQ ID NO: 5161 - DNA, 261 bp, Glycine max
  unsure at all n locations
  Clone ID: 701002211H1
tgcatccganacagtgattgtgctaaangcaatagcaatgtcaatggccataacaacagcagctgcaagagtgatggtgctaaaagcaataacaattacactcgcaacagttagggtgccagtagcaattacagccaaaccagtgaggacgctaaaagcaatgccaatggcaataacaatagcagctgcangagtgatggtgctagtgggcatggcaagagcattacaaccgcaacagtgatggtctaaagcatgccttgg

SEQ ID NO: 5162 - DNA, 264 bp, Glycine max
  Clone ID: 701002212H1
aataccatctctcgtccattgtctgcgtctcactcatcctctcccttctcttacattgttcatttctcaactctttctctcttttcttccaaaccctaatctggattagcctctcatcggatttcaattctcacggtcttcaccgaccgccagatctcttagcaccgctcttcttttcatcgattaaataacaaaaaattggcttaattttattctaacatcctaagcaaaaactaacgttttcacccgattttaacattcgag

SEQ ID NO: 5163 - DNA, 269 bp, Glycine max
  unsure at all n locations
  Clone ID: 701002214H1
cnactttcttctcttttttccccttttaacactttctcttccttgcatctctacgttcctcttaccacaaggtaaacaaagatggcagggtgcgataaggaagactatttctctgccccgaatgctgagacaacatccgagggaaagtacggtaggcttgccccaaagaagaagcctttgatatcgaaagataatgaaagagcattctttgattcggcagactgggcattatgcaagcaaggtgctggagtgaatcaacaatctacagc

SEQ ID NO: 5164 - DNA, 271 bp, Glycine max
  unsure at all n locations
  Clone ID: 701002219H1
cgaganaagcagcatagtgagatactacgtatactacgtagtactacacatttcatttgcctcttgtagtagccatggttttccaaacaaacattaatnacgcacttcgtattgtttcctctcatgggctcaaggccacatgatccccatgatggacattgcaagactattggcacggcgtggtgtgattgtttccatattcaccaccccaaaaaatgcatcacgattcaattctgttctttctcgtgatgtttcatcaggcctcccaatc

SEQ ID NO: 5165 - DNA, 271 bp, Glycine max
  unsure at all n locations
  Clone ID: 701002220H1
cgggatttgaaacttggattcttgangtacgaggagctgggttgagtattcagggttcaaattccaaggatattgaacagtctgccaatgcaatgtctganaagatgaaagctgcttcagaaagtgctattgctaccaatggagcagtggcttcaaacaaagaattgaataacgtctntttttgtgccggtatccggaacctgagatttctgcccctaatggagtagaaactggaaaatgtggcatccaaggtgatcctaactaggttagg

SEQ ID NO: 5166 - DNA, 262 bp, Glycine max
  unsure at all n locations
  Clone ID: 701002222H1
gtaaagctcagtgcagaggctattcgaaagaaagaagcaaaagagcgtgctcgtcaaatgaagaaggcaatgccaaggatgaaaatggctcgtggtgcctaattcttgaattgatgattcgtttgccagtagaattgaaggccttccccgcccccagcgtacgttgtattgtagttggcctttgtagatttacggcaatgtacgttttcagtnggcatttccctgctaccatagctagataggcgtgaccagtcttaggcgg

SEQ ID NO: 5167 - DNA, 258 bp, Glycine max
  unsure at all n locations
  Clone ID: 701002223H1
gatattcattctaagggaaaaatgacagaggagcnatccaaaaaggtggctgagactgagagttttccctctaatcctgcacctgaacctgttgttgttccaaaggaggatgtggcagaggagaaatctgtaattccacaaccctctccctctcctgctgatgagtccaaagctcttgtcatagttgagaagactagtgaagttgctgaagagaaacggtttgaggggtcngtgaacggagatgctgtgcttgccana

SEQ ID NO: 5168 - DNA, 217 bp, Glycine max
  unsure at all n locations
  Clone ID: 701002224H1
tccataacttcagagagnnccacgccatggtggcggaaatcgtcggccaaatcagagaggctgcatacgaagccgaagacatcatcgacacctatgtggcggacatgattcgacgtcgaaagatgaacctgttggagaaggtggtcatcgaggccatgcctgatttcaactgatgntgccagcttgatttcagattaggactcagngcagaggttta

SEQ ID NO: 5169 - DNA, 202 bp, Glycine max
  unsure at all n locations
  Clone ID: 701002225H1
tactcctatcaacaccggtttccatgtcctagaataaagttattctcttccaagcaccgctccttctccgtctcagcttctgcttccacctcaaattcgcttcaggctctcatattcgactgcgatggcgtgatcctcgagtctgagcactgcatcgncaggctacaacgatgctttgttccattcaagttcntgccttctt

SEQ ID NO: 5170 - DNA, 263 bp, Glycine max
  unsure at all n locations
  Clone ID: 701002227H1
ggctcgtcactccttnctcttagccctccnnctcttcgccgccgtnnncacngccgcgatggcggtngntgcgttccgacgccgacgacatcctgatccgtcaggtngtgccanatnttngcgaagcgaatgaggaggacaanctnctgaacgncgagcancattcgngacttcaaggncaanttcgccaagacntacgccaccaaggaggancacgatcatcgcttaggcgtnttcaagtcaacctcggcagagccagntgc

SEQ ID NO: 5171 - DNA, 270 bp, Glycine max
  unsure at all n locations
  Clone ID: 701002228H1
gtcactgctgatgacaatggctgtaaacggtgcaactgtaagacgagtaaatntttaaaacttttctgtgattgttttnctgctggaacgtactntaccgacccttgtgcttgccaangnctgcttaaacagaccagancatgtagagacagttgtcgagactaaacaacaaattgaatcccgtantccaattgcntttgctcccaagatcgttccagctaccactcgatanttncttcacatatggatgntncaaatctgacaaacacg

SEQ ID NO: 5172 - DNA, 269 bp, Glycine max
  unsure at all n locations
  Clone ID: 701002229H1
gntaatnntnatctgctgcgtagtncctnctataaggangcatggctaaatgcatggnagangatgatatgaattcagatgatgaaatggnngatgatcngcagctgaggaggactacnncgaagnaaacaagctnaannanaganacttnaacagatgaancaagctcattccctaccaagcgataacgtnaggcatctcggcccataaaacagtgcatcggntgcttgtgnaaatcaaagctctcagcnaaattaacagncttncat

SEQ ID NO: 5173 - DNA, 266 bp, Glycine max
  unsure at all n locations
  Clone ID: 701002230H1
gtggttcattgatgttttggttgttctcttctgtattggtggtattgagggcttgcaaacatgcttggttgctcttttgtccaggtggttcaagcatgccggagagtcatacatcaaagtacctttcttaggagctatctcatacctgactttggctgtttctccattctgtataacattttncattctctgggcagtttatcgcaacgaatccttgcctggattggtcaagatatacttggaataacactgataatcacagttct

SEQ ID NO: 5174 - DNA, 271 bp, Glycine max
  unsure at all n locations
  Clone ID: 701002231H1
gnatcgacagacgagaaccatgacttttaaactattacatctggtcaagccctttatgcccttnctccctgaggtcacagcgcctgagaggaaggtcccattcaaggaaagagtcctgtggacagcgatcactctatttatctacctggtctgctgccacaatccctctatncggtattgtctcaagcgacagtgctgacccattctactggatgagagtcatccttgcctctanacagaggtatcttatggagctcggtatttcacccat

SEQ ID NO: 5175 - DNA, 244 bp, Glycine max
  unsure at all n locations
  Clone ID: 701002234H1
tacaactacaaaggttgctgtaggcgataagatattgaagnagtgtaagtgcctaacacctgcagtgaacaatggcctctgcatcagcatctcttctcaagtcttcattgttcttganaagtctgagtgggtgaagggacaaacacttcgccaaccttctgctgcatcagttgtgagtgcaaccccaccaccccatcaggctcaccatcagagctggttcctatgctgatgagcttcgttaaga

SEQ ID NO: 5176 - DNA, 273 bp, Glycine max
  unsure at all n locations
  Clone ID: 701002235H1
caancccccaccagccatgangantcaanaagctactaaatgcntcagcagctgtctctattttcagactacacgcgtgaccagcttcaacacactgnaannccagatccaaagaagatgngcaacacaatcagnctatanttcttatgagatgttngcgggtcacgtgtggcgaagtgtaagcaaagncaagagcattcctgatgatcaaganaccaaattgtacatgcaactgatggcaggtcaaggttgcagcctcctaccccacccggt

SEQ ID NO: 5177 - DNA, 269 bp, Glycine max
  unsure at all n locations
  Clone ID: 701002238H1
tcggatcnagagtcttcagtttctcctcgttgttcttcgctttcctgttttcnatttcgattcttcgttaatttaataagatgtttgggagggcaccgaagaagagcgataatacgaggtactacgaaatcctcggcgtctccaagaacgtttcgcagggatgatctgaaagaacggcttacaaganagccggccattaaggaatcaaccccgacanggncggtgatcccngagaaggtttaaagagtggggcnaacnttngnaggttc

SEQ ID NO: 5178 - DNA, 203 bp, Glycine max
  Clone ID: 701002240H1
tgaagccatcgatgctcagatctctccactccgccgccacccgcggcgcctctcatctcttccgccgtgggtacgcctccgagccggtgccggagcgcaaggtagccgttctcggcgccgcggcggggatcgggcagctctctcccttctccatgaagctcaattcccctcgtttcgagctcctcctttaggatatcgccgga

SEQ ID NO: 5179 - DNA, 263 bp, Glycine max
  unsure at all n locations
  Clone ID: 701002242H1
ctccttcaatctctttcggaatttcccaaaatccttagtgggaggnagagatggttctgactcagaagcttcacgaagccttcaaaggcaccgtcgagaggattactggcccccgaaccgtttccgccttcaaagaaaaaggagttctcagtgtctctgagttcgtcaccgctggcgataatctcgttgccaaatgccccacctggtcctgggaatcgggtgatccaggcnagnnggaagccatattgcccactgagaaacat

SEQ ID NO: 5180 - DNA, 256 bp, Glycine max
  unsure at all n locations
  Clone ID: 701002243H1
tcaattatgaattatgacatgtggtattagttcttctctggaggctacngttgcatccctgccaagttggtatttaattagagtggctagtaaaagatgctttatccttttcttgaccctatttcatactgtctcttatattgattgccagtcttcacataataatatatgtggtttctgtaatttataagcctttatacaagaatttaataataattgangatgttgctcagtgacacttggatatcattctttg

SEQ ID NO: 5181 - DNA, 262 bp, Glycine max
  Clone ID: 701002244H1
tcacctttcacccagcagaatgtggagggagaaaccgctgatagagctgtggttagtaatgagggttcttcagtgcagaatacacaggaggcaatgcttgcatcaggaagtacaaatccacttgttaagcaggcatatggatggttagccagcatacctgctgcgcctgcacatgctatggagtttcctgctaaggagattgctcttggacttcatcctgtggctcaatcttcccatccagctcatataactactacaggta

SEQ ID NO: 5182 - DNA, 266 bp, Glycine max
  unsure at all n locations
  Clone ID: 701002247H1
gtttcttgcgattcgacgatggccgatcaaaagctttcagaaccggcgcttaaacgtgagcagcttgatgaattcgtgagtngtctatattttgaacaacgaattcttgaactccgacttcttcaagacctcgagaacaatgatgaatgtaggaaacaatgggagcctgcanaaggttaaatgaccagagtgatgtctgtggatttagaagttgcttcaaaatcattatgattcgctccgaatcagaggtgcttgaggaatcgaga

SEQ ID NO: 5183 - DNA, 272 bp, Glycine max
  unsure at all n locations
  Clone ID: 701002249H1
gtcacacttttgtgaaggcctagggattgctgagtcaaacttgaattgaaggtgaagaaggagatggcagcaacttcttccttgtgttcatcgaccctccaatcccaaatcaatggattctgccttcacaaaacctctctttcccatccncgttcctcatttctccaggaagaaatttcaacccacagtgcaaggctacatctcgcgttgacaagttttcaaaaagcgatatccattgtttctccatcnattctttccngcaaatttgcaaa

SEQ ID NO: 5184 - DNA, 266 bp, Glycine max
  unsure at all n locations
  Clone ID: 701002252H1
ggggttataagacctgcttttgttgangaacattctacaatacagaagcataccatctgccaatcaatccagtgatactgacaaangtaaatctatagnnagtanaggggaaaatattggtgtgattaatggnngtgtgctaattcanaatctctggagataatgcggcccagcaggttgaaaaacaangggaatagtgtcatccccctttagcgagacttccattttaccaattggtgatgattaagattccagtgttttccngc

SEQ ID NO: 5185 - DNA, 265 bp, Glycine max
  unsure at all n locations
  Clone ID: 701002256H1
gaagtcttgcncttctctcttcaactcnaaacacaaganatcancatccatggctgnctccgtctccactgtacggagctgtcaacagagctcttttgaacctgaatgggtctggacctggggtttcagctcccagttcatccttctttgggagcagcttgaagaaggttattggctcaagggtccccaaacaaaacagattctctggaagcttcaaggattgttgctgtagaggagaagaagagnttgaagagacccagcngnc

SEQ ID NO: 5186 - DNA, 262 bp, Glycine max
  unsure at all n locations
  Clone ID: 701002257H1
ggcaaaagtaactgcagcagcgctgagtcgagggcgttcagtgttcaccacagtttacacacgagtacccattttctcttctcaatttctcagagtgtgcagagaaaatcatggtggacgcagcagaacgtaggtacttggaggatgacgattcatcactcatgaaaactattaagggggcaacnatggtttagttgctgggcactatctgggggaccgtattgcccactggtatgatgtcccnccgtgtagagagaatgtt

SEQ ID NO: 5187 - DNA, 262 bp, Glycine max
  unsure at all n locations
  Clone ID: 701002258H1
gggagcactcaatgtcgggtttcttctatgaagactgcacagcctactgtgaatggggggactcatgcaattgaaggccttaccacaggattggacttgaagggttattcagaagcccccatttccccagctaggttttttgaagcggttgccgatgatttgctaactctcaataaaaatcttcagtcgattgttggagcagaaaatccgttttgatgtctgcagctgagcagatttttagtgctggtgggnagaggatgac

SEQ ID NO: 5188 - DNA, 258 bp, Glycine max
  Clone ID: 701002265H1
tggttcagtgccaggctttggttttggcaccaacaagggagctagcacagcagattgagaaagttatgcgagctcttggtgattacctgggagttaaggttcatgcttgtgttggtgggacaagtgttcgtgaggatcagcgcattctccaagctggtgtccatactgttgttggcactccctgggcgtgtgtttgacatgctgcggaggcatctcttcgcccagattgcataaagatgtttgttttggatgaggcga

SEQ ID NO: 5189 - DNA, 266 bp, Glycine max
  unsure at all n locations
  Clone ID: 701002267H1
aatgggaacnatcaactccagncngggcaangaatccaagaaactcattgttntggattttactgcttcttngtgtggaccatnccgtttcattgcnnccattcttgagctnagctggctaagaagttcacaagtgtcatattcctaaaggtggatgtggacgaattaaagagtgtttctcaagattgggctattgaggctatgcccacttttgtgtttgtgaaagagggaagcttctggacaaagtggtgggagcaaagaaggat

SEQ ID NO: 5190 - DNA, 260 bp, Glycine max
  unsure at all n locations
  Clone ID: 701002271H1
gcggattcatccttttcttctgcagagcaaagaaccaaccaacacttgtttcttccgccatggccgatcaacctgaatcatcggacgctaagggcaccaagagagatttcagcaccgcgattttggagcgtaaganggctctgaatcggttgtggttgatgaggccgtcaacgatgacaactctgtcgtcgctcttcatccctgataccatggagaaattcaactctttcgtggtgacacaatcttgatcaaagggaaga

SEQ ID NO: 5191 - DNA, 265 bp, Glycine max
  unsure at all n locations
  Clone ID: 701002272H1
cagagcggncangccacctcgccgctgngggaatcgaactncgactgcgtcctggaaacagacgacgacctccggctctcggccggactcctcggcggcggcgcgctgtcgaagccgccgttgcggacgcggctgaaccgcggatgcatcgncatngcgaccgnaatcnaggtcgcngcgttgtnattcggagacgatcnaagccntacgaatgngaacggcggcgcaacaggctanccnncgntggcggctcnatttcgagcga

SEQ ID NO: 5192 - DNA, 262 bp, Glycine max
  unsure at all n locations
  Clone ID: 701002273H1
gngctaagagagaatatggagagtagtgagggaattaggtgtaaggtatgcgtgaccggcggtgctagttacataggctcttgccttntcaagaagcttctgcaaaagggctacaccgtccactccaccctcagaaactttaaggacgagtcaaagataggccttctgagagggttgcctcatgctaatgatgagagactggtgttatttgaagcagacatatataaaccagacgagtacgagccagcaattcanggctgtg

SEQ ID NO: 5193 - DNA, 256 bp, Glycine max
  Clone ID: 701002274H1
tctacgaagctcccctcggatacagcattgaagacgttagaccaaacggtggaatcaagaaattcagatctgctgcttactccaactgcgctcgcaaaccttcctgatatccatccagattgatagttcattgcatgcaaccatagttttattaggttttttcttctttgttttcaattaggtttttgctgctctcctcaaactccgtctttccgaatctctcttgtgattgtgttcgttctgcttcctacggcga

SEQ ID NO: 5194 - DNA, 259 bp, Glycine max
  unsure at all n locations
  Clone ID: 701002275H1
ctctgctcaaggtgcagtgcaaacagtgggaaaatcagtgatgctctgaaaattggctagcacttggttctttgaatttgtttggttcctgtcttacgtcagactgaagttgcagctggtatcatcatccgccatggttagggatgtggctttgtaatgctattgcagctttcctctagatttaatctttctaatttgcttgttctctcttagatatgtataaatttacgtnactatatatgttgtgtgcaagtactat

SEQ ID NO: 5195 - DNA, 263 bp, Glycine max
  unsure at all n locations
  Clone ID: 701002278H1
cctttgttcactcttcttctcttgcggctagggttttagcgcanttcttctagatttaaggaagatgggtaaggaaaaggttcacatcagtattgtggtcattggccatgtcgactctgggaaatccactaccactggtcacctgatttacaancttggaggcattgacaagcgtgttattgagaggtttgagaaggaagctgctgagatgaacaagaggtctttcaagtatgcctgggtgctggacaaacttaaggctgagc

SEQ ID NO: 5196 - DNA, 174 bp, Glycine max
  unsure at all n locations
  Clone ID: 701002279H1
ctttacctttctatcctcanggagtagtaaagaagtaactncatcaaccacaaacctaaacaaccccttttgcctaaagctccttccttttctccaatggcaacctgggttttatcagaatgtggcttaaggcctcttccaccagtgtttccanancacatangaccnncgnnc

SEQ ID NO: 5197 - DNA, 263 bp, Glycine max
  Clone ID: 701002281H1
gttacttcctttattagcttctgcccttgaatttggttcagctgctgcctcagctttgactgcattgttgaaaatgggttcctggctttcagctgaggagtttaatgtcaaggtacttccaacaattgtaaaactctttgcctccaatgatcgagtatacgagttgcccttcttcaacatattgatccaatatggagagtcgttatcagcgcaagtgttgatgagcaagtttaccctcagttgctacggggtcccccgataca

SEQ ID NO: 5198 - DNA, 240 bp, Glycine max
  unsure at all n locations
  Clone ID: 701002282H1
ctaaacaaagncnaaattacatagaaatcaaatactgnactatgatctcactcagacaataatttagctctggagactcaggtgtgcgctgaaactccgtgtcccacgaaaacttacaanttnattgtggtattacgtattcccacagcaccatgtggatttctgccatcccatgacaatcacacagcagttcggctcnnattgagngtctcatctattgctacncctcactccaacata

SEQ ID NO: 5199 - DNA, 262 bp, Glycine max
  Clone ID: 701002284H1
cattgctccagcttttatggacaagcttgttgttcacatctccaagaacttcatgaccctgcccaacatcaaggttcctctcattcttggtatctggggaggcaagggacaaggaaaatctttccaatgtgagcttgtctttgccaagatgggaatcaaccccatcatgatgagtgctggagagttggaaagtggaaatgcaggagagccagcaaaatgatcaggcagagataccgtgaagctgcagacatgatcaagaagg

SEQ ID NO: 5200 - DNA, 263 bp, Glycine max
  unsure at all n locations
  Clone ID: 701002285H1
cngagacccaaaaatggtgttgtagctttgataaggtgtgaatcaaaagagtcatcatncagagttgccagaaaaacattccaagttggagatagggtcacccattattttcattgaagctcccaagatgatcaagactgcagctactatgccctgcctcagggtcattctggtctagtcaaacctggtgatgttggaagcatgaggagtccacatgagaactgggacacgntggtgtacatcacnatacntcgaccaggaca

SEQ ID NO: 5201 - DNA, 274 bp, Glycine max
  unsure at all n locations
  Clone ID: 701002286H1
cntccaatcaanggcttcttctctttccncttctccctcttccctcgaccaaacccttngcgacgtcgacgactacgttctggaaaatgggtcagaaggtttgtcaagggacacacttcattatgtgtacgagcttgtgaagaatgggaatgtngcatttcgagagaacagaatggaagagggcaatcaaacttttactccaagagcccaataaacatccaantccaggtggatccnaatcatncctccagncattcgaagtgcagcttatatt

SEQ ID NO: 5202 - DNA, 258 bp, Glycine max
  unsure at all n locations
  Clone ID: 701002288H1
ggnccatttcnggaaganagangtgcaatggacatcggaacctatggctatcctacaccagcagtgaanaagattgagtcttnctatgatgtgccaganggagtggatattcggggaagatatgatgcagagtttgcaaaaatcctcacaaaagatgcttgaanttcgttgctgacttgcaacgtgcattcaggaaccnatatcagtatgcattagagtgcngaagagaagcaaagcagagtacatgaggggccttcc

SEQ ID NO: 5203 - DNA, 257 bp, Glycine max
  unsure at all n locations
  Clone ID: 701002289H1
aagaagactcctcaatcatccatagacatggccaccgtcacttctgcagcagtttctattccctcattcactggcctcaaggcaagcgcaggcaaagtgagtgccgccgcagttaaagtctcagctccccaagccacaaggttctgcggcatcaaggcttccctcaaagacgttggagtcgctnttgtggccatgctgcgagcgcagttctagctagcaangcatggccattgaagtgttatgggcatgatgacggg

SEQ ID NO: 5204 - DNA, 261 bp, Glycine max
  unsure at all n locations
  Clone ID: 701002290H1
cnaatttccacatattattagatctctccatggagtgggagatgaggcccggcggcatgttcgttcagagacgcgaggcagcggcggataannnnnnnnnnnnnnnnnnnaacatgacgacgacggtgttgatcactgtcgtccacgcttcctcccactacgacctccacctccctaccaactccactttctgggatgttaagagtctgcttgtacatagaatggtttacagcctgcaagagcaacaactcttctttngag

SEQ ID NO: 5205 - DNA, 262 bp, Glycine max
  unsure at all n locations
  Clone ID: 701002291H1
ccgtgatgaaacaatgtatgattcatatgcagggccaggtgtaccgccatttgcctctgatatacctcctaccaccagtgttgatgcctgtccctggtgctgggcctttgggaccctttgttcctgctcccccagaagttgcaatgcagatgttaagagatcaaggaggatcatcatacgatgcctctggnagaaagatgcactctggccctcctatgggtggaggatcatcaatnaattgctgttcctccaacttttagac

SEQ ID NO: 5206 - DNA, 91 bp, Glycine max
  unsure at all n locations
  Clone ID: 701002292H1
gccaatgaagtcataacaagaagangaaaaagaagaaaaaaaaacacntcccagagttcaaagaccnncaaatnccacanaacanangnca

SEQ ID NO: 5207 - DNA, 242 bp, Glycine max
  unsure at all n locations
  Clone ID: 701002293H1
ggtggctagtgcagctgccgctacanncgccgttgccggcgncttatatgccattctttcancctcaacctctgctagctctgagatggaagtgccgtttggcagcgcacggcgtgagagcaaagaacgtgacgatggtggctccgngtctcatcctcgcgagggtgccaccacggtcagtcgttggaagaaacctgagattggttgggtgaagctgaagtggatggttcacgcgacccata

SEQ ID NO: 5208 - DNA, 264 bp, Glycine max
  Clone ID: 701002294H1
gttagcctgtgtcttctgtctgtatcagtatcaggtctgctccaacgcctagagcaccctgtcaaagctgatggctcacttagccttatggtcattggagactggggaaggaaaggaacatacaaccaatctcaagttgccactcagatgggaagggttgctgcaaagttaaatatcggctttgtgatatccactggagacaatttctacgatgatggattgactggtatagatgaccctgcatttgaaatttccttctcaaaa

SEQ ID NO: 5209 - DNA, 265 bp, Glycine max
  unsure at all n locations
  Clone ID: 701002295H1
gtnaaanatggctctactatcatcagtccnaaagcaattgccgcatgagctaagttcaacccattacctaacagttttcttctgcatcttccttatacttcttcagctaataagaagaaacaaatacaatctgccaccatccccaccaaagatacccataatcggcaatcttcaccagctaggcacactgccacaccgctcctttcatgcactctcacacaaatatggccnctccatgatgttgcattgggtcaattccaaccct

SEQ ID NO: 5210 - DNA, 275 bp, Glycine max
  Clone ID: 701002301H1
cggagactttgccgaactatacatgttcaaatggaccacccttcttattcctccaacaaccctttctcataataaacttggtgggggtggttgctggcatctcctatgccatcaacagtggctaccaatcttggggacccctctttggtaagcttttctttgcattttgggtgatcatccatctataccctttcctcaaaggtctcatggggcgccaaaacagaacaccaaccattgtggtggtgtggtccgttctgcttgcatccatttctcat

SEQ ID NO: 5211 - DNA, 274 bp, Glycine max
  Clone ID: 701002302H1
agcacgccgcattcttagaaggcgtcgcagatccttgtcaatggaggaaacatctcctgcacaagttgttgccgaaagcttgactgaaattgcatatggtcgaaatagtaaagataacatttcaatcatagttgttgatctgaaatcaaagagaaaacgtcagcaaaggcctcctttaatttcctaagaaactgattctcttcaatatttttcaatcttgagaagggcaaagagacggtaatgaaactgtagagtggatctataaagcaaaccc

SEQ ID NO: 5212 - DNA, 277 bp, Glycine max
  unsure at all n locations
  Clone ID: 701002303H1
aactattcaggnnncatcaaaaggatnnttcacacgaatcttctgatggaccattgagagtttggcntgatggatggagaaacacnnctttcaattgatcaagttacctcacaaagtggagctncccgctgaggaaataaagttgagtgctgacaacattaatgancanagatttatgactacatcttctgcagtagacattcctccggagcatcttgaaacagatggtagacagctagatcatactgggattacaaganataatctgtattgtgca

SEQ ID NO: 5213 - DNA, 272 bp, Glycine max
  Clone ID: 701002304H1
ctatattgcctacacaaactacccttctcttatttcttttttcctttcaatctcattattattctttttgattcatttagctgatatggagttaaagaaaatgaaagttacaggtggctaaggcttggcaagttctatggcctactctgatacttgggcaatgtgtgagggaaaatacaactctggaagcttaaaatataaattgcagaaagcaagtaagagggattattgtaggaccataacttctgttatggaatttgaatcagactgga

SEQ ID NO: 5214 - DNA, 273 bp, Glycine max
  Clone ID: 701002305H1
cttttcagaaaaataatccttatccagatgttaagtacactttccttccaatattaatcaaatcactatctatggccctcagtaagtacccctttatgaacagttgcttcaaagaggatgcattggaggtcatcctcaaaggttcacacaatgttggaattgccatggcgacatcacatggtttagttgtgccaaacattaaaaatgttcagtctctttccataatggagataaccaaagagctggcaaggttacaacaattggcttcaaata

SEQ ID NO: 5215 - DNA, 271 bp, Glycine max
  unsure at all n locations
  Clone ID: 701002306H1
ctttcgttcacttccgtttccctctcactcacacacttctccccaaaacccaaaaccctaactctctttcgcgctcgttctctcgctcgctgcaaccatgaattgctccatctccggcgaagttccggaagatcccgtcgtgtcccggaactccggtctcctcttcgagaagcgtttgattgagcgacacatctcggattatgggaagtgtccaattactggagaaccacttanctatggatgacattgtaccantcaagacaggnaagat

SEQ ID NO: 5216 - DNA, 270 bp, Glycine max
  unsure at all n locations
  Clone ID: 701002307H1
ttctctctactactgctagctgtgacttgttttgagttcaatcaaatcgcattggtatctgaaatcaggaaagatggttagcgtantgnagatcaggcaggcacaaagggcagaaggcccagcaaccatccttgccattggaactgcaaacccaccaaaccgtgttgatcagagcacctatcctgattactacttcagaatcaccaacagtgaccacatgaccgagctcaaagagaaatttcagcgcatgtgtgacaagtctatgatcaa

SEQ ID NO: 5217 - DNA, 270 bp, Glycine max
  Clone ID: 701002308H1
ggttcgtcatggccaccgttgctaatcccgcggatcaagcaactgatttgctacagaagctatcgttagaaactcagcccaagcccttggagattcctgagcctaccaaaaaggccactgggaatcagtatggatcagttgattcaggaaatgccgcgaatggccagatccagtcgtatgatcggtctgtaactcccgtgttgcaggattttattgatcctactatgtgttacctcccaaatggttacccatctactgcctattattacg

SEQ ID NO: 5218 - DNA, 271 bp, Glycine max
  unsure at all n locations
  Clone ID: 701002310H1
taagcagaaggtggcagcaacaaagcagtacattgaaaatcattacaagggagcaaatgaagaaccttcaggagaggaaggagcgtcgaaccatcttggaaaagaagttggctgatgctgatgtctctgaggaggatcaaaacaacctgcttaaatttttagagaaaaaggaaactgaatatatgcgccttcagaggcataagatgggtgttgatgattttnagttattgacaatgattgggaaaggtgctttggggaggtcatngtctgt

SEQ ID NO: 5219 - DNA, 266 bp, Glycine max
  unsure at all n locations
  Clone ID: 701002311H1
cngcagtctccctctcttcttcctcttctctgtaactgcaacgcttcttcttccaagtataagtgatgtccaactttaacacttcgtctgtgcttgagggtaaaaatcactcaaacaggggctcagcaacggcaacacttaaaattgtcaacaagcgcagtaaggggcgccactttaaagtcgattatgttttcatggcatgcgatgataggaaaattgcagcagtagcgtgatcacacgctcaggggagtgatggtttnctggna

SEQ ID NO: 5220 - DNA, 270 bp, Glycine max
  unsure at all n locations
  Clone ID: 701002313H1
aattcccactcaaccaccaaaccctattcagcatttcccccaaatcaccgtcacaccatgggctcctccgcgatggtgttggacccgaaaccctcatcggagcctccgccgttcctcccgtcgacgaaatcggactaccttcaaggcagcttcggcggcgacgccaccgcctccgacgaggacgacctcnacagccgcctganatccctccagcgccagtggagttcatcgacatccaggaggagtacgtgaaggatgagcagaagaatc

SEQ ID NO: 5221 - DNA, 271 bp, Glycine max
  unsure at all n locations
  Clone ID: 701002314H1
tnnacctcttggtcataggccaaaatggtgtcaccacatctaattctatacataactcttcccatgcttttgttgttcttctaccaatatcncagagcgttcaagaactcaacccttccacctggtcctagaggccttcccataatagggaatcttcatcagctaaatagttcttctctttatctgcaactatggcaactctcaaagaaatacggtcctctattttctcttcaattaggtttaagaccagccatagttgtttcctcccata

SEQ ID NO: 5222 - DNA, 269 bp, Glycine max
  unsure at all n locations
  Clone ID: 701002315H1
aganagcaagctcatcctagagttttaaaaatggcagcagcctcctccatggctctctcttccccatccttggctggcaaggccgtgaagctgggcccatcagcccccgaagtcgggagggtcagcatgaggaagaccgtcaccaagcaggcctcctccggaagcccatggtacggcccagaccgcgtcaagtacttgggcccattctctggcgagcccccgtctaccttcactggcgagttcccaggtgatacggctgggacatgctg

SEQ ID NO: 5223 - DNA, 274 bp, Glycine max
  Clone ID: 701002317H1
acaaggcagaaagcaagctcatcctagagttttaaaaatggcagcagcctcctccatgggctctctcttccccatccttggctggcaaggccgtgaagctgggcccatcagcccccgaagtcgggagggtcagcatgaggaagaccgtcaccaagcaggcctcctccggaagcccatggtacggcccagaccgcgtcaagtacttgggcccattctctggcgagcccccgtcctacctcactggcgagttcccaggtgactacggctgggacat

SEQ ID NO: 5224 - DNA, 274 bp, Glycine max
  unsure at all n locations
  Clone ID: 701002318H1
cnggaatctgcaaactgagaagtcccatcattctttttccacacttccatcgttanctcattttcccgcaaaatatttttctttctctgtgttgtggcttctccttcaccgttcattctaaaatctcagccgctgatcagattaggcctccgtgttgatcttgatcgccgctcatggaggtccgttccaaccccgccgcagacaattcctccgaccaccgtcgaccgcccgccgtttcgtccatgcagccgctgccttctcctaaccccgtcga

SEQ ID NO: 5225 - DNA, 275 bp, Glycine max
  unsure at all n locations
  Clone ID: 701002319H1
gggtaagtgggtttcttggtgcttgtgcaagctccaactaggggcgcacacacacaaagatcatataccacatactccatagtccctctctaattatagatatattaaggaagnaagtgctatttatatcatcattaacatatatattaganctctctaagtgagagcaaaagaaggaaattaaattcaatggaggctaggactaagatgtctgangtgctaccattcatagtgatggtgattatggaaggttggaccataggactcacgatttt

SEQ ID NO: 5226 - DNA, 271 bp, Glycine max
  Clone ID: 701002320H1
aacacaaagacatcatcatccatggctgcctccgtctccactgtcggagctgtcaacagagctcttttgaacctgaatggttctggagctggagcttcagctcccagttcagccttctttgggaccagcttgaagaaggttattgcctcaagggtccccaacagcaaggtttccggtggaagcttcaagattgttgctgtagaagagaagaaagagattgaagagacccagcagaccgacaaggacagatggaagggtcttgcctatgata

SEQ ID NO: 5227 - DNA, 271 bp, Glycine max
  unsure at all n locations
  Clone ID: 701002321H1
ttgcacaccaccatcaccaccacaatgtgaacaacatgtctcacactgcttccttcactgagcttctcactggtgggattgggagcacggtaacagttaaccccaacnnnnnnnnnnnnnnnnnnnnnnnnnnnnnnngtcctaatggatcatcggttcatcagatccatgagggtcatgatcatgaggctaatctattcaacaagggaagtcaacaacagcaacagcaacaacatcaccattggtctcaaacagtgacacctatggacta

SEQ ID NO: 5228 - DNA, 271 bp, Glycine max
  unsure at all n locations
  Clone ID: 701002322H1
gcggtactganaatacctctttcnntgggannatactcncaattncaaatggtggttcccaccannactgtcaaatgctccaactgtggaactgcaatggaatangantcaactacnagattgattacgttancggaaggnagtaacgcctgagttgaggtatgcctganaatcatatntattgttccagcaatgggagatcattaatagcagttcttgtgagagtgacaaatttatcattagcatattgtgatgntnngccacaaatgnt

SEQ ID NO: 5229 - DNA, 272 bp, Glycine max
  unsure at all n locations
  Clone ID: 701002323H1
ttatacatcgtgatctcaaacccagtaatgttctattagatgaatgtatgattccaaaaatttcagattttggtctcgccagaattgttgaaataaatcaagaccaagggagtacaagtgtaattgttggaacatatggttatatgtctccagaatatgcaatgttcggacaattttctgagangtcagatgttttcagttttggtgtcatggttttagagattataagtggaaaaanagaatttcagttcttatgaatcacaccgtattac

SEQ ID NO: 5230 - DNA, 268 bp, Glycine max
  unsure at all n locations
  Clone ID: 701002324H1
gggaataatcaaggagaacattccgttatgtatgtgctggcctacactctaaatatatagctatgtggttttgagttccaccacaaatgctttgtccttgagagattctaaagcaggccaatccatgaaggcaacactacggtacttagcaggacttgctgggccaagtggtttcggctcaaattcaacagctgagcaagtcactcaagattgctcttccttgctcccttcaaatctaaccgntctcatcatggtgggantctggtaa

SEQ ID NO: 5231 - DNA, 267 bp, Glycine max
  unsure at all n locations
  Clone ID: 701002325H1
ggcagaaagcaagctcatcctagagttttaaaaatggcagcagcctccttccatggctctctcttccccatccttggctggcaaggccgtgaagctgggcccatcagcccccgaagtcgggagggtcagcatgaggaagaccgtcaccaagcaggcctcctccggaagcccatggtacggcccagaccgcgtcaagtattgggcccattctctggcgagcccccgtcctacctcatggcgattcccaggtgactacggtgggacntg

SEQ ID NO: 5232 - DNA, 271 bp, Glycine max
  Clone ID: 701002326H1
ggcaatttggaatcggcatgtaaatttcaagttcttcccaaagcgctttcagatcagaatagaaagtagttacagatcgagtaccttgagtgagagcgtaaatctcttgttgaatttctgaaacacgaaccaaatcaccttgtgagaaacgctctttcagatcgagccacacatcggaagcgttatccatgaaaacgatggatcgggaaatggaaggttcaacggagttgagaatccagctatgaatcaacatattgcagcgattccaagc

SEQ ID NO: 5233 - DNA, 271 bp, Glycine max
  Clone ID: 701002329H1
ggcattattcaatggccaccacagcagctctatccggaaccatggtgagcacctccttcatgaggaagcaacctatgacgaccaagagcctaaagacattccccaacgctctttttggtctgaaaggtggacgaggtggtcgtgtaacttgcatggcctcgtacaaggtgaagctcataaccccagaaggagaagtggagtttgaatgcccagatgatgttttcattgttgacaaggctgaggaagaaggcattgaacttccctactcgtg

SEQ ID NO: 5234 - DNA, 270 bp, Glycine max
  Clone ID: 701002330H1
atggctttgaatttgccttctcccgcccaagtgaagcccttatttttctcttccaaataactccacaaaacttccaggtagcttttctttgaagagaaaagatagtgacacaacagtagagagacgagtttattgctctgccgctgctcaatcaccaccaccagcatggccaggaacagctattcccgagccttctgatttcaagacatgggatgggcaaaaacctatttctgtcttaggatctagggttcattggaactcagacactga

SEQ ID NO: 5235 - DNA, 269 bp, Glycine max
  Clone ID: 701002331H1
cgtgttcagtttctgattgaaggcttatttgcaataagaaaagcgaagtttcagggctatccggctgttcgtcctgaactagatcttgtggagcaggaagatcagataactcatgaagtctccttggatgaggagatagatcctgagatttcccttgatatattcaagccagaccccaatttcctggagaatgagaagcgttatgaagagttgaagaaatcaatgttgggtgaggaatctgaggatgatgaggaaggctggattctgag

SEQ ID NO: 5236 - DNA, 266 bp, Glycine max
  unsure at all n locations
  Clone ID: 701002332H1
gtcgccaatatgatgctaagatgagtgaattgctttccactgatgggcaagaattcttcacctcttatgatgaagtgtatgacagctttgatgcatgggattgcaagagaatctctgcgaggcatatatgcttatggntttgagaggccttctgctatacagcaaaggggaattgttcctttctgcaaaggactggatgtgattcaacaggctcantctggaacaggaaagacagcaacattttgtctggattttgcagcagcttg

SEQ ID NO: 5237 - DNA, 275 bp, Glycine max
  unsure at all n locations
  Clone ID: 701002333H1
attgaagttaaaagccttagccttccctacaactccaaacancnaagacatcatcatccatgggctgcctccgtctccactgtcggagctgtcaacagagctcttttgaacctgaatggttctggagctggagcttcagctcccagttcagccttctttgggaccagcttgaagaaggttattgcctcaagggtccccaacagcaaggtttccggtggaagcttcaagattgttgctgtagaagagaagaaagagattgaagagacccagcagac

SEQ ID NO: 5238 - DNA, 274 bp, Glycine max
  unsure at all n locations
  Clone ID: 701002334H1
ctcatacaccatgcagggtccacgcttcccatctcacaagtcgagcacgntcataacatctacaccgtnccagaccaatttcccaaaaaggaacgacacgaacgcaacaaggacgagnnnnnnnnnnnnnnnnnnnnnnnnnncaaccgcgaccaagatgaagagcaacaacagcagcagcgttcaccagaggactcaggagatcagagaccacctgatacaccacctcctctgtcacaagatgtgatagagctgatagacttgctggagatcc

SEQ ID NO: 5239 - DNA, 273 bp, Glycine max
  unsure at all n locations
  Clone ID: 701002336H1
gtgcagtnacttgagaatggccttgcnantggtcgtcgacgcagagtacctcaaagaggtcgacaagggntcgccgcgatctccgcgcactcatcgctannaggaactgcgnctcctctcatgcttcgattggcctggcacgatgccggaacttacgatgngnagaccaagactggtggacctaacggttcgatccgtaacgaggaagagtattctcacggcgccaacaatggcttgaagaaggctattgatttctgtgaggaagtgaaggaa

SEQ ID NO: 5240 - DNA, 273 bp, Glycine max
  unsure at all n locations
  Clone ID: 701002337H1
ggaacggtatgagataattaaagatattgggtcaggaaactttggtgtggcaaagctggtcaagggcaaaatggagtggtgaattatatgctatcaagttcattgagagaggcttcaagattgatgaacacgtgcaaagagagattataaatcataggtccttgangcatcccaatatcattagatttaaagagttgttgcttactccaactccatcttgccaatagtcatggaatatgcttccgggggagaactgtttganagaatntgcag

SEQ ID NO: 5241 - DNA, 269 bp, Glycine max
  unsure at all n locations
  Clone ID: 701002338H1
gcattattcaatggccaccacagcagctctatccggaaccatggtgagcacctccttcatgaggaagcaacctatgacgaccaagagcctaaagacattccccaacgctctttttggtctgaaaggtggacgaggtggtcgtgtaacttgcatggcctcgtacaaggtgaagctcataaccccagaaggagaagtggagtttgaatgcccagatgatgttttcattgttgaacaaggctgaggaagaaggcttgantnccctactcgng

SEQ ID NO: 5242 - DNA, 264 bp, Glycine max
  unsure at all n locations
  Clone ID: 701002340H1
attacttgttttagatgctttatgaagattagtctcttctctgcacacattgaatgctgtttggtgaaccttcctgtaagcttaaatgatggttaaaggagcatgagtgtcaaattccttaacatttagaaccaattatcccaaaggcttaagcagttcaataacatgaatgattttattacatctcttaacatttactatacaaacccaggctgcagtttacaagacaggngttgtagtgcggcttcctgctaacattgccac

SEQ ID NO: 5243 - DNA, 269 bp, Glycine max
  unsure at all n locations
  Clone ID: 701002342H1
cctttttgtctcttgtgcgcatttgcctcggcaccagccacacaccgccacctnccccccaacacccaatactctctagcccatcatggccaacgacgccctcctcatcaaccccgaccggtactcgcagctcggcatcactgtccgtgcctcggactggctgtgggcggttttcgctctgatgacttttgccgatctggtccgttatcgcatggcatttaccattccccgcggccaggncctgttccaccaantcggcnnnnnnatct

SEQ ID NO: 5244 - DNA, 267 bp, Glycine max
  Clone ID: 701002343H1
aaagactaaaactgagaagtactgggactgggaattggccaatgaaacaaagccaatatggatgcgcaacccaaaggaagttgaaaaggaggagtacaatgaattttataagaagacatttagtgaattcttagaaccacttgcacatactcacttcactactgagggtgaggttgagttcagaagtattctgtatgttccgggaatgggacctcttaacaatgaagaagtagtgaaccctaaaacaaagaacatacgcttgtatgt

SEQ ID NO: 5245 - DNA, 264 bp, Glycine max
  unsure at all n locations
  Clone ID: 701002345H1
catcaggatcgctgggataatcttgaaatgaaattggatgatggnaatggttctaaggtttctggtgctgttgagatgaggagaattgagcctgtgactgtgcctttggttgatcttccagaaatttctgaaccttcagttctccttcagatagtataaggaatgttgtctatgtttctctcccgccacttattcatggaaggaaatggctgttgttatacagcacttggaggcaggtatatcactttctactcttaccggaga

SEQ ID NO: 5246 - DNA, 268 bp, Glycine max
  Clone ID: 701002347H1
taggagcagatgtttgccatctcaatctccacaagacattttgcatccctcatggaggaggtggccctggcatgggacctattggtgtaaagaaacacttggcaccatttttaccttcacaccctgtgatagaaactggtggaattcctgcccctgacaaacctcaaccacttggtaccatcgctgctgcaccatggggctcagcactcatattgccaatctcttacacttacatagccatgatgggttctaaaggactcaccgatgc

SEQ ID NO: 5247 - DNA, 266 bp, Glycine max
  unsure at all n locations
  Clone ID: 701002348H1
gggtgatagtacctgactttcagcctaaganagatgtgaaaatagtgacagatgagaaggccaccagtctctctacagcttctatagatgatgcagcggttattaatgatctagtaatcaagttagagaggtgccgggcaaatcttcaccagtgttcaggatgaaaccaatccaatttgagaaggatgatgacacaaactaccatatggatgtgattgctgggctgccaacatgagggcacggaattacagcattcctgaggttga

SEQ ID NO: 5248 - DNA, 271 bp, Glycine max
  Clone ID: 701002350H1
aaagactaaaactgagaagtactgggactgggaattggccaatgaaacaaagccaatatggatgcgcaacccaaaggaagttgaaaaggaggagtacaatgaattttataagaagacatttagtgaattcttagaaccacttgcacatactcacttcactactgagggtgaggttgagttcagaagtattctgtatgttccgggaatgggacctcttaacaatgaagaagtagtgaaccctaaaacaaagaacatacgcttgtatgttaag

SEQ ID NO: 5249 - DNA, 270 bp, Glycine max
  unsure at all n locations
  Clone ID: 701002351H1
gagacncaacacaaaagcaatcaaatcatagattgatttggcaaccccaattcccttttttgatattntngaattgaagcaatgggtttgggcgcttagtgtatttttggacgcacgaagatgattccttggggtggcctcagttgctgtttgagctgccgctgctctttaccttctcggcagaagcagtggcagggatgctgaaattcttaaatccgttacaagggtcaaccagttgaaggnactagctcaatattagatgcagaanta

SEQ ID NO: 5250 - DNA, 273 bp, Glycine max
  unsure at all n locations
  Clone ID: 701002352H1
cacnctatggatgtttggtcatgngatatgtgagctccccaactcggtggaggggaccgagtcccactcgccacccatgaagttcgaaatcgcgagtgagaagaacgacgacaagctggacaactcaactcgttccattcacctgaaagctgagcgaacctccggctcagactcggaagctgcggtgatcttcaccgtatgcttgcaaggctttcacccacacaacgctcncaanccctctatgggtctccgacnagtgccacctctcatcag

SEQ ID NO: 5251 - DNA, 270 bp, Glycine max
  unsure at all n locations
  Clone ID: 701002353H1
ctcttttgctgcatcagaggagttgtaaattaagagcatggctgcacaagcttttgtatcatcatcttctcntaccttctcagcggaggctgcaagacaaagtcttggaccaagatcactccaatctccatttggcttctccagaaaagcctcctttcttgttaaggcagctgctaccccccctgtcaagcaaggatcagacagacctttgtggtttgcatcaaagcaaagtctttcttacttggatggcagccttccgggtgactatgg

SEQ ID NO: 5252 - DNA, 269 bp, Glycine max
  unsure at all n locations
  Clone ID: 701002355H1
attgaagttaaaagccttagccttccctacaactccaaacancaagacatcntcatccatggctgcctccgtctccactgtccggagctgtcaacagagctcttttgaacctgaatggttctggagctggagcttcagctcccagttcagccttctttgggaccagcttgaagaaggttattgcctcaagggtccccaacagcaaggtttccggtggaagcttcaagattgttgctgtagaagagaagaaagagattgaagagacccag

SEQ ID NO: 5253 - DNA, 265 bp, Glycine max
  Clone ID: 701002357H1
catcactattattattaggtctgaaggctcattgccattatcatgtcaaggaggccagtaaatccttcgcgtcggctaggtgatggtggaagtataccatttgttgcatctatccagtccaaatctcaaaactctcccctactatctattgggcttgtcattgtgggtgcaatcctcctgattggttattgttacagcaattcaggtggagctagcggtggtattaaggatgtaaaactgaaggtggcgcatcgtgctcatggaa

SEQ ID NO: 5254 - DNA, 266 bp, Glycine max
  Clone ID: 701002358H1
ttagaacatgtaaaattgcacctatagtggcatgtcagtacaagtgctcatttgcttactaaaggacaacatataccatagcaaattattctagaactattcgtaagagtctgttgcttgtgtagaatccaagactctgaggatgtgaagactgaagtccacaaaatatcatggagagcaacctctgaagagctgcctatagatctttctgctgctcttgatatctgtggttgatcacattcttactcagcatttgagtaccttaa

SEQ ID NO: 5255 - DNA, 266 bp, Glycine max
  unsure at all n locations
  Clone ID: 701002359H1
gtacaatcaaaatcaaccatattatggatatgattcaagtttatattatgctcctaatncaccctgctgagacttaccaaacccaaaccacatcttactcagccacaacgtatagtgacccaaaatctgttgtgtatgttcccaataacggtatgagtcagcttgtgatatcttattctaaagcggaattcaatgtgcctgaatttgatgactatgatccaacaccttatggtgggagtggctatggaggagatgttgtttatgga

SEQ ID NO: 5256 - DNA, 268 bp, Glycine max
  Clone ID: 701002360H1
gtttatcagatgagatttgtgtgtgaagagaatagcgaatagcgaaggtggaaatgtcgaaaggcggttcgcttcaaaaggacgtgccatggagagcatcgtcttcttctgcgaagcccatccccaaaattcaccacagtccccttcttcgcgtatcccaaacacctgtttccgattacggtatctccgtcatgaggcatccggaccctataggtggtggattgggtcatgaggccatagtggaaccagctggccctgattgtctcgt

SEQ ID NO: 5257 - DNA, 241 bp, Glycine max
  Clone ID: 701002361H1
gattatcatcttgtggagaagcttgcaaattttgatagggaacgtatcccagaacgtgttgtccatgccaggggcgctagtgcaaagggtttctttgaggtcacccatgacatttctcacctgacatgtgcagatttccttcgagcccctggagttcagacgcctgtaattgttcgtttctcaactgtcatcatgagcgtggtagccctgaaacctgagggaccctcgaggttttgccgtg

SEQ ID NO: 5258 - DNA, 269 bp, Glycine max
  unsure at all n locations
  Clone ID: 701002362H1
gtcaaatgttcaccacaagcatttcaangacaatccggataacacaaatcctacttataacacgaaanatggaatctacaaagaaggaattggactagacaatgttgtgatgtcatggggacatgatgagtatatgtatttggttgcaaaggaaaacggcaccactttgcctccagtagcattgttcattatcaaataccattctttttacgctttacatagggcaggagcatatacacatttgatgaatgaagaagatattgagaatt

SEQ ID NO: 5259 - DNA, 268 bp, Glycine max
  unsure at all n locations
  Clone ID: 701002363H1
cnaaaatctggaaaagtcgaatccaaacacaaccacaatacttgagttttttcacaaaaaccctccagtgaaaatcaaaaacctcaatttctttcttctcaacatttccaaaatttctgcccttcgaacttcgttcttccgaaaccagtgtacactttggcggcgtggcgaggcataaatggcatgcccgaaaccagcgatggtcctagatctgaagccttcgtcggaggcaccgccattcctcccgttgacgagtccgattacctcc

SEQ ID NO: 5260 - DNA, 259 bp, Glycine max
  unsure at all n locations
  Clone ID: 701002364H1
aagatcngaagtttcggcttcctcactcatcaagttggtggaagaagaggctgtactcntttctacatgataatttgaagcttccagataatcctttgatggtaattttcatcngagtctgaangcatggcttcncataattttgtgggttatccnggctccgttgcccatagatgggatccggacctttgnatatacttgcaactggctttgncncatctttcaanctggaaagcgccaagtggtgacataagtgcat

SEQ ID NO: 5261 - DNA, 280 bp, Glycine max
  unsure at all n locations
  Clone ID: 701002365H1
gntnnngtntgcgtttgntngcaacaatgccaaatataaattccccctttngctngcgtagaatctttgnctcantcctctncactnctnccgtaganctnccgatatcacaatctttacctctttttatccatctccgttacgtcatcgtttttngtngctcgattcctgcaagcncactttagtccattctctacagcggtggagaattgaattcttgaattgaagcctttgtccctgtcaccgagattcaatcttctccatcattgaaattgagaca

SEQ ID NO: 5262 - DNA, 269 bp, Glycine max
  Clone ID: 701002366H1
gcgttgtctccaaagcacgccaaattacccacacgcaaacgacaacaaccgcgcgcgtttcacacttccataacttcggagtagcatacgcagcgtcgttgactcgcaactcgtaacttggcctcgcgcgccgatggcgtcggtccccagcaccgtcgctccccgcaccttcctgccgtcgattcccaagccgagagctcctcttcacgccgcgaaatccgtcgccagcgccgcgcgcaacttcccgagatttcgcacaacctcatttc

SEQ ID NO: 5263 - DNA, 268 bp, Glycine max
  Clone ID: 701002367H1
gctaaggaaggatcaaagagaatggctcaagcaatggcatcaatgactagcttacgtggttcctctccaggctgtgttggaaggtagccttggctccacacgcttgaatgtggggagtggaagcagggtggcctcagtcacacgtgcagggttcacagttagagcacagcaacaacaagtgaatggtggtgaggtacaaagtagccgtaggcagtgctttcacttgttgctgctggtttgaccactggctcttttgttcaagctgtgc

SEQ ID NO: 5264 - DNA, 270 bp, Glycine max
  unsure at all n locations
  Clone ID: 701002368H1
gcgttccatgctcgccgagttgtcacccacccaagccgagacgctccttcggagccgccaccaagctgctncaacccggacgacatggttcacctcctcctcgaagccggcttgagaataatccccaatcccaataatgcccctgatcaagtacacgtggcagatacaaatacaaacataaatgagggagaagaaatatttgaggcttcgaggaacggacacgtggcggaagtggaatcgctgttacgganatgtggtgggagtgtgaac

SEQ ID NO: 5265 - DNA, 267 bp, Glycine max
  unsure at all n locations
  Clone ID: 701002369H1
gaagaacaagtagttgagaactaagaaggagaagcaaatggcttcctcaatgatctctttccccagctgttaccactgtcaaccgtgccggtgccggcatggttgctccattcactggcctcaagtccatggctggcttccccaccaggaagaccaacaatgacattacctccattgctagcaacggtggaagagtgcaatgcatgcaggtgtggccaccagttggcaagaagaagtttgagacnctttctacctgccagacttgat

SEQ ID NO: 5266 - DNA, 268 bp, Glycine max
  unsure at all n locations
  Clone ID: 701002370H1
atattattctcctcattccttcatttttaaacctagctccatctccctccacttcaccataacatggcatcagaagcanatgctgccaacaccaacttctgtgtaaatgttagcaacaatggctacattagtgctaatgaccccttgaactggggtgcggcggcggaggctatggctgggagccacctcgacgaggtcaagcgcatgctcagaggagagaccctgaccatctcgcaggtcgcggcgatcgggcccacgaccagggggt

SEQ ID NO: 5267 - DNA, 261 bp, Glycine max
  unsure at all n locations
  Clone ID: 701002371H1
cgcgcgaagattccgaaagggtgtcttttggtgggcccaccgggaaccggaaagacccttctggcgagggctgtggcgggggaagctggggtgccgtttttctcgtgcgcggcttcggagttcgttgaactttttgtgggantnggtgcgtcgagggtgagagatttgtttgagaaggcgaaggggaaggcgccgtgcattgttttcatgatgagatgacgccgttgggaggcagagaggggcggggctcggaggtgggaa

SEQ ID NO: 5268 - DNA, 263 bp, Glycine max
  unsure at all n locations
  Clone ID: 701002372H1
ctggcatgaatggtggacattagctctcaaagataattccaacccacagatagccttgcttcccctgcatccagagttgcgtgcaagattcaactccactgccgcatgggaatatgcacggagcatgtctggcaagccatatggttatcataatatgatattcagttggattgacacagtagctgacaactatcctccacctcttgatgctcacttggtatttctgtcatgtctatgtggacaagatgcagccagntatgcng

SEQ ID NO: 5269 - DNA, 264 bp, Glycine max
  unsure at all n locations
  Clone ID: 701002373H1
aaccctgacactccttcttctccgcttcctcttcgatcatcgcttcagaatgccgccgaagttcgacccctcccagatcgtcgacgtcttcgtacgcgtcaccggcgntgaggtcggcgcggcgagttccctcntcccgaagatcggtcccctcggtctctcccccaagaagatcggagaagatatcgccaaggaaaccgccaaggatggaagggcctccgcgtcaccgtcaagctcacgtgcagaaccgtcaggccaaggtca

SEQ ID NO: 5270 - DNA, 263 bp, Glycine max
  unsure at all n locations
  Clone ID: 701002374H1
ctttgtctctgttctgtgtgtgcgaganatggcgatggcaatggcgcttcgcaggctttcatcttcaattgacaagcctctgcgccctctcttcaatgccggttccctctactacaagtcgtctttgcctgatgaagctgtttacgacaaggagcgacccggagttacatggccgaagcagttgaatgctccacttgaggtcgtggatcctgagattgctgatattattgagcttgagaaagctaggcatggaagngctagat

SEQ ID NO: 5271 - DNA, 267 bp, Glycine max
  Clone ID: 701002375H1
gggaaaatctagcatgcttaacgcactattccggattgtggagctacaaaaaggaaaaatcattattgatggttgtgatatttctacattcggattagaagatgttcgaaaagttcttactatcataccacaatctccagttcttttctctggaactgttcgtttcaatcttgatccatttaatgaacacaatgatgctgacctatggcaagctttagaaagggcgcatttgaaggatgtaataagaagaaatacgtttggtctagc

SEQ ID NO: 5272 - DNA, 264 bp, Glycine max
  unsure at all n locations
  Clone ID: 701002376H1
acttggtgaaggacttgacccaatctaccctggtggtgcttttnaccctcttggtctggctgatgaccctgatgcattcgctgagttgaaggtcaaggaactcaagaacggtcgcttggctatgttctccatgtttggtttctttgttcaggctattgtcactggcaagggccctattcagaacctttacgaccacgttgctgatcctgttgccaacaatgcttgggcttatgccactaactttgtccctggacaatgaggatg

SEQ ID NO: 5273 - DNA, 264 bp, Glycine max
  unsure at all n locations
  Clone ID: 701002377H1
cactgatgtggagaaggttcctccatttgangtgggccaaganattcatcctgatgccatctgttactcagccacggcttgggtggtcaaatgaatcagcagctactgttggaaaaatagtgagaattgacatggatggtgctctcaatgtgagggtcactggtaggcagagcttgtggaaagtttcacctggagatgcagaacggcttccaggatttgaagttggggatgggtacgatcaaaaccaagcctgggaaccagacc

SEQ ID NO: 5274 - DNA, 268 bp, Glycine max
  unsure at all n locations
  Clone ID: 701002378H1
taattcctacttatccttgcttgtcttgatccttgtagctctgctacntcanccctcangggcttgctgatgaatctgcattcttactataagccaccagtttacaaganaccaccagtgtacaagcccaagcccaagccacncattcacaagcccaagccacccgtttacaagcccaagccacccgtttacaagaaacccccttatggtaagtacccaccagttcaagacaacgatcacttctaaaccatgcaacaaggcatgttaa

SEQ ID NO: 5275 - DNA, 264 bp, Glycine max
  Clone ID: 701002379H1
gggttcgtcaattggagatccgagcactatacaagctgaagaagtgccttgtcaaacaaggacttgatgcttatgtagacttgcttctatagatgagtagacaccaaggttatgtacttcatttcgctgagactttttcggttacaatctgaacagcggtaccaggatcgaacttttgaaggcaagtttaacaataaatactgttattgaggacaaatcagagaacctggctgccacaagaaactgaagtgtgtattaagaggt

SEQ ID NO: 5276 - DNA, 254 bp, Glycine max
  unsure at all n locations
  Clone ID: 701002380H1
cttgacaaatttgatgggaactctgaactggttgcagagttggttaccattaatggatttaaagcagcttatgcaattaaggatggtgcagaaggaccgcgaggatggaagagtagtggtcttccttggatcagcaccacggaaaacattgagtttggacaatctgacagatgctatatctgaagcaataggagatacctctgatggtgtggcatcactcttgggattgctgcagngctgctggacttagtata

SEQ ID NO: 5277 - DNA, 244 bp, Glycine max
  Clone ID: 701002381H1
caaccacagttgctgactggttgtctaaatatgcgcataatattgcatttggtcttcatgtgcttgatgttcctcagcatggttgtgtaaaatacttaactgatgtctctgctggagtttataaactccgtactgtacgtgttaatgactcatgagggacatgttcctctagagagtgtgaaaaactaatatggccatttatagatggttaagattagtttcaaatcaattttgattatcagtt

SEQ ID NO: 5278 - DNA, 270 bp, Glycine max
  unsure at all n locations
  Clone ID: 701002382H1
gncccgccccggttccaaaccttacgattgcgtcaaaagagcttggcacagtgaaatacaccaacccatcagaggaactctcattcaagaaattttcagggttgtcaacgagatacatgggtcttctactaagaagaacaaagagtaccaagagaagctacccgttgttgtgctcagggcagcggaaattatttactctaaagccaattccgaggctgaatacatggatcttaaaacacttttggagagaacaaatgatgctattgatac

SEQ ID NO: 5279 - DNA, 269 bp, Glycine max
  unsure at all n locations
  Clone ID: 701002383H1
tactctctgttcagtagtagtatatccatccacgatgccaaatcattatattaatcttgcagcatgagagaaacagttgaaaacatcncccaggttgctacaaagagctgagacctacctcaataattcatcataggaacctaatgcttcaagaatgctttggcatcgtggatggatatactctctgttcagtagtagtatttttaaagatacatttagcttcaataaagtaaggagagtgtagtgtatattaggaaataaagtggnnt

SEQ ID NO: 5280 - DNA, 267 bp, Glycine max
  unsure at all n locations
  Clone ID: 701002384H1
gaaagtttcagtccccctaataaaaggttggattgccttctatccttgtctttaaggactgacatgctttccttccctgaaaatgtagtagatgttgaaaaattggtgctgggctgtcctttcctccgaaaattgcnggtcgaagggcggatggaaaggctgccagcagcctcactgtttcctccacagctttcaaagttgactttatggggctgtagacttgtggaagacccaatggtaacattagagaagcttcctaacttgaag

SEQ ID NO: 5281 - DNA, 266 bp, Glycine max
  unsure at all n locations
  Clone ID: 701002385H1
anacaattctagagaaagaatggcttccacgaagcaaacaaanngattcttccacaataataataannnaatacattaaaagcaaaacaagttgagcaaccaaagaaaaaaccanttccatgaccactaatttctaacaaaatattttaatttgctcctcctctttcgcccccttctccctctctctattttttttttctttcccgctttttcatagcaaaacgaaaaagaaaaccctagaagggagagtttcattccccaaaaaa

SEQ ID NO: 5282 - DNA, 265 bp, Glycine max
  unsure at all n locations
  Clone ID: 701002386H1
tcatcatccatttgaatgaattgctgtggagacacgtctttctcaggctatgngatcattggatttagtctctttgtaatttttatcatgtttgcttattgtacaaacgacagaataacgacttcgaagtagttgatgaagggcttctgataatttggggaaatcagatgtgatttttaagatagttggatcagattattgtggtttcattacacgtctcatttgattgatattaggttatgtcagctaagcgagatgtatatgg

SEQ ID NO: 5283 - DNA, 263 bp, Glycine max
  Clone ID: 701002387H1
caactttctggatggactccaatgtgttctttcaggcactgctagaggatgtggttggcagaaaattggtgcatttgtcaatctggggtcatactatatagttgggattccatcatctatcgtgtttgcttttgtattgcatattggtgggaagggactctggttggggatcatatgtgcactcattgttcaaatgtgttctttaatgatcataactattcgtactgattgggaccagaggcaaagaaagcaacagatagagt

SEQ ID NO: 5284 - DNA, 269 bp, Glycine max
  unsure at all n locations
  Clone ID: 701002388H1
gtttttgcnagcntaaggttgaggtgtggagaaagcgcgaaagggtgggtggtgaagaagagatgatggtgagagcacggccaagggacatagatcacttgcccaagaacgccgccaactacacagcgttaacgccgttgtggtttctagaaagagctgctacggtgcaccccaccagaaactccctcatccatggatcctcgtccactacacgtggccagcagacttatccacgttgccgtcgattcgctccgctctttctaaccatc

SEQ ID NO: 5285 - DNA, 267 bp, Glycine max
  unsure at all n locations
  Clone ID: 701002389H1
ccaaagaagcatggtagaggaggtcaatcagctttgcgttttgctcgacttaggatggaaaagcgggcacaactatgttaggaaaactgcagaacttgctactcagtttttcatcaatcctgccaccagttcaacctaatgtttctggacttatacttgctggttctgctgacttcaagactgagttgagtcagtcagatatgtttgaccctcgattgcaagcaaaaatattgaatgtggtagatgtttctatggtngggaaaatgg

SEQ ID NO: 5286 - DNA, 265 bp, Glycine max
  unsure at all n locations
  Clone ID: 701002390H1
ggtgttggtgtttttggtctgtggaggttgaggttttggacctgctcggagccagggagattgcggtgcgtgcttgggacgaggccctcaacacccaacctgaaangctcatttggaatgttatgggcatgatgaacaactgctggttcagagtgaaaaccaatgtgtgcaggccccacaagggtgagataggtatagtgtttgaacaccccacccaaccaggcaaccaatccggcggatggatggcaaaagaaaaacacctaga

SEQ ID NO: 5287 - DNA, 265 bp, Glycine max
  unsure at all n locations
  Clone ID: 701002391H1
tccaatccaaagacttcgtttatgaagatttagcgaaaagggttganattnatcatggatttgggaagcgaatccgtggaagagnaatgaagtgaatcatgatgggaatggaanacggtggttcttatgatgatgacgagataattgggtttggtttggagggaaattcggatgtcaatggttcggatcaaaaggnaacggttggtgaagttgaagtgggtagtagtggggaaggtgtgaattccaaagggacaccaacaaaggg

SEQ ID NO: 5288 - DNA, 268 bp, Glycine max
  Clone ID: 701002392H1
gcaagtacaagaacaagaagaaacaatgtcttgctccaatctcacaatgttggtgtcctcaaaaccttccctttccgatccctccaatctctccttccgctctgtcctcaacccttttcagctcccttcacaaaacccaacttcatgcactccttcacgctcctgcaaccacccaaattcagtgtggtctgagagaactcagaacccgcattgattccgtgaagaacactccagaaaatcaccgaggctatgaagcttgtggctgcag

SEQ ID NO: 5289 - DNA, 264 bp, Glycine max
  Clone ID: 701002393H1
aatgggagtgcttctaactgaggtttatatagatacagttggagatgcagggaaatatgaaatgaagctctctaatagttttccatctatcaaatttgtggttgcaaagaaggctgatagcctttaccccgttgtcagtggtgcaagcatagttgcaaaggtcacaagggaccgtgctttaagagaatgggtgctgatgagactgctgaaaacatgcagaggaattttggatccggatatcctggagatccccaaaccaagtcc

SEQ ID NO: 5290 - DNA, 265 bp, Glycine max
  Clone ID: 701002394H1
gtagatattcattccccttatctttctctcttctctctccccgcccaaaccctaactccctaccctattccgctttctctcatccatcatgaaaggaggaaagtccaagaccgaatctaagagagccgatgccaaacttgctgtgaataagaagggcgccgccaccaagactaggaaacccgccggaaaggggaaggcagcgaaagatcctaacaagccaaagaggcctccaagtgctttcttcgttttcatggaggattcagga

SEQ ID NO: 5291 - DNA, 262 bp, Glycine max
  unsure at all n locations
  Clone ID: 701002395H1
tagattcagtgacagggaacaaaaggctaatacaagantcagatcttcccaaccttccatacctacaagcctagtcaaagaaacactaaggattcaccctacagcgccactgctagggagagaatcatcagaaagctgcaatgtatgtggctatgacattccagcaaagtcntagtgtttgtnaatctgtggtctatgggagggcccccaaaatttgggaggaccctcttgagttcaagccagagaggtttatgaacaataa

SEQ ID NO: 5292 - DNA, 269 bp, Glycine max
  unsure at all n locations
  Clone ID: 701002396H1
attccattatggtggctgctgactccggttgtgcactcgctgaggtcgtggcttcaggcccaggctcgctncaaccaattcttcttcaatttcaaggacttttagttgtccacctgctctggtggagcccgagtccgagtccaagcccaagcccaagcccaccgactcctctgttgggaaagacggtttcaagaagaggaaacctgacaagcctcaccatccgaagttgttgcagaaaatgataacaaagacaagaggatcaaattcgg

SEQ ID NO: 5293 - DNA, 277 bp, Glycine max
  unsure at all n locations
  Clone ID: 701002401H1
cataattgtctaaagggagaaagaaaaagagagatgcgaanatgggcaagctccgcttcctccgcgaggcattgcagctatcgtcggtgtgggccccaacctcggcctctccatcgctcgcaagttcgctcacgagggctacacggttgccatcctcgctcgtgacttggggaggttgtcaagatttgctgatgaaatagcgagggaagagaaggcgcagtttttgctataagaatagactgttccgattcaagaagcgtgaganaggcatttgaag

SEQ ID NO: 5294 - DNA, 274 bp, Glycine max
  unsure at all n locations
  Clone ID: 701002402H1
cagcaagcagaagatgccctttcacaaggtatggacaaactccgccaaacacttgctgatagtgtagcagctgggccagttccatggaaggnacgtatatncccacagatgacttctgcaatggagangttggaagatctggtganctttgtnaaanangctgaccatcttcggcaaganaccttggagcaaatgtccgaatacttacaatccgtcaggcggctcgatgcttgcttgctttgggggaatatttccaacgcctgagggctttgag

SEQ ID NO: 5295 - DNA, 270 bp, Glycine max
  unsure at all n locations
  Clone ID: 701002403H1
agtaatgcccctcctacttatcctaaagtagancatggagttagtagatcagcaccattcagtgggtcttctggtggtcagaacacaggtttccgcaatccccaatttgnngcgtcaaggcccttgcaaaactcatatgctcgtccacctcagcagcctatgtaccgtcagccatctccaatgtacactaacaggcgccaatgggaaganatgaagctgcccccaggataattccaatagcagcattgaatccataccagagtatgtgga

SEQ ID NO: 5296 - DNA, 269 bp, Glycine max
  Clone ID: 701002404H1
cggaaagccaaatcatgaagtagccaaagaagttgaggatggcaccaatggcgaggacaacccaaggtggagcgacctcgttgattaggcctgagatgaccccaacgttggtgcccaagtccttgaagaaactgaggagattgagagtggtttggtcgtaaccgagggttgttttgatgtcgctggaatagagaccgaacatgtaggtggctccagcggcggccatgattagaaaggaggcgaacaccacgaaccatctcccggtgatg

SEQ ID NO: 5297 - DNA, 264 bp, Glycine max
  Clone ID: 701002405H1
gtcggtgaaacgcagaattcacatgattgctgctcactttgcacccaatgatgatatttcaactacccacgttctgcctatgaactgtagtggcagtctgaactctgtgctccggagatgtgataataaggtgtattttgcacgccaagcatctgcttctcttggttattttatgaggcagacttcaattgagagggtggctcaactggcttattgctcccaaaacccatcctggtgctgctgcatctgaaggtcctctaatgc

SEQ ID NO: 5298 - DNA, 266 bp, Glycine max
  unsure at all n locations
  Clone ID: 701002406H1
acattttctcgggtcgggtcgtgcattctcggagcatcgccggaatcctttccgaccgaaaaagaaaaataatgacgggatccctcgcggcaaggctcgtccttcgtcgttgccgatcgccggcaagtcaattcttcttccgcagggaagcctcctggccggcgacggagcgaacgacaaaggacgtcgttagtcgccgccgaaggaattgccggcgttcgactatcncngccggcgtactccggtccctcccgcgacgagatcat

SEQ ID NO: 5299 - DNA, 268 bp, Glycine max
  Clone ID: 701002407H1
gccattgctaaaacaggctcagggaaaaccttgggatatttaattccagcatttattcacctcaagcgctctggtaataactccaaaatgggccccactgcattggtactttcaccaacaagggagttggcaacacagatacaagatgaagccatgaagtttgggaaatcatctagaatttcatgtgcatgttgtatggaggagcaccaaagggtcctcaactgagagacattgatcgtggagcagatattgtggtagccactcctgg

SEQ ID NO: 5300 - DNA, 265 bp, Glycine max
  Clone ID: 701002408H1
cgcgcttccttttgcctgcttctgagtgtgaatatactctcaatgcgctgctggatgaattgcagacggatcaatggccggttccgcctgggcgccgccctgcacgctgcaccggagttgctttgagtgttgccgcaggttgctgagtgcttgcaatcctgggactggtgctagaatcgtagctttggttgtgggccatgcacggaaggacctggcgcgattgtgtcaaaagatttatctgacccagtgcgttctcataaagatc

SEQ ID NO: 5301 - DNA, 267 bp, Glycine max
  unsure at all n locations
  Clone ID: 701002409H1
cgattccgatgctgaggaagttggtactttcgatgatgaaaatgataacccttctncaaggtgatgtggcattgagcaagccatgtgttgggaatagcaaaagcaagcatatgattgagcaactacttatgaaggagtcattctcaagggaagaatgtgataggctgataaaaataataagatcaagagtggagatcctgcaaatgatgatgatggggataagaggccaacggatatacccaacaagatttttggaagtgattcacc

SEQ ID NO: 5302 - DNA, 267 bp, Glycine max
  Clone ID: 701002411H1
gtcaagtccagtacaaattgaatggctctgtggtgtttttgcataccaaaattcaccatatttatcataatgattggagccaatagagactaacacaatcctacttatttgttatcggaactctataagcgtgaacctgctattgcatgggattctgtacttgaagattttccatgtgttgaaaacctacacaatcattctcttaccttgaaaaccaatggcagtaacacaactggtggggttcagaaagatattgcagcttcgggt

SEQ ID NO: 5303 - DNA, 101 bp, Glycine max
  unsure at all n locations
  Clone ID: 701002412H1
gncactttccctctcctcctcctcccacaccaacaacaccatggntgcactgctgcnttcacatnatnnctcnatnttgcttgctcttcagaccaattcca

SEQ ID NO: 5304 - DNA, 270 bp, Glycine max
  unsure at all n locations
  Clone ID: 701002414H1
gaacaagtagttgagaactaagaaggagaagcaaatggcttcctcaatgatctcttccccagctgttaccactgtncaaccgtgccggtgccggcatggttgctccattcactggcctcaagtccatggctggcttccccaccaggaagaccaacaatgacattacctccattgctagcnacggtggaanagtgaatgcatgcaggngtggccaccagttggcaagaagaactttgagactctttcctacctggccagaccttgatgatg

SEQ ID NO: 5305 - DNA, 272 bp, Glycine max
  Clone ID: 701002416H1
ttttaaaaaaaggcaatcatctgtacatgatacaacaggaactagtccaaaactggatgagaagactgtatattccattggtccaagattgaaagcattctctgattggttactgaaaactatggtgtcgggcaaacttgatgccatctttccagctgctactcgtgaatatgcaccattgattgaggaattatggaatgatgctgccattaaggctacatacgaaaggagaagcgaattagaaatgctgcctactgttgccagttattctt

SEQ ID NO: 5306 - DNA, 264 bp, Glycine max
  unsure at all n locations
  Clone ID: 701002417H1
gagaaaaanagtaggtaaaanaatatgctaagtataaattgtctactgatgaaatacgaaagctgatgatattgaaananaaagaattgtaaataaggttcaggttcgacttccatagagaatatagatgcatattgtctataatgataganaanntanaaaactttcgaaagattttatccaattganatttaaaaatgactgggataaacttaagantcattattganttgaataagtaaacaatttaattggattggtcga

SEQ ID NO: 5307 - DNA, 272 bp, Glycine max
  unsure at all n locations
  Clone ID: 701002419H1
ggattcaagaacgatgcatcctaacgnnttgaacancaccggggcataanacatgattgcnttgatgccccggtgctgttcacacacgttaggattcannaacgatgcatccctgtattctgctgtgataactggggctgtgaacgtgctctccactgttgtatcgatacnctcagtggacaaagtgggacgtcgcattctgttgctggaagctggtgtgcagatgttcttgtctcaagtggtgattgcaatcatactgggaataaaggtga

SEQ ID NO: 5308 - DNA, 265 bp, Glycine max
  unsure at all n locations
  Clone ID: 701002421H1
gggaagagaacccccgtgttcccatcattgtcaccggtaacgatttctcaacactctatgcacctctcatccgtgatgggcgtatggagaagttctactgggcaccaacaagggaagaccgcattggtgtttgcaccggaattttccgcactgatggtattcctgaacaggacattgtcaagcttgttgacacttccctggccaatccattgatttctttggtgcatgagggccagagtatatgatgatgaagtgaggaatggnt

SEQ ID NO: 5309 - DNA, 266 bp, Glycine max
  unsure at all n locations
  Clone ID: 701002422H1
gtcggtactgaaaatacctctttctttgggactatactctcaatttcaaatggtggttccaccaacactgtccaaatgctccaactgtggaactgcaatggaatatgattcaactacaagattgattacgttaccggaaggaagtaacgcctgagttgaggtatgcctganaatcatatttattgttccagcaagggagatcattaatagcagttcttgtgagagtgacaaatttatcattagcaaattgtgatgttctccacaaa

SEQ ID NO: 5310 - DNA, 265 bp, Glycine max
  unsure at all n locations
  Clone ID: 701002423H1
ccacaatgcaagtattcaaatgaggagtggcatatgctttcttttattaggtccctaaagggcatggcccggtcttcaaacgctgttattgttgtaacctttccaccttcacttcttcctccatcttgttcaaaaagattgcagcatatggcagacaccttgctttctgtcaaagccattccagatgaggntaggaattgcaaaactcctnannggtnaccaggntnngntngggctcnaaaatgtccacaanttgcanggttaa

SEQ ID NO: 5311 - DNA, 266 bp, Glycine max
  Clone ID: 701002424H1
gtctttgccaagatgggaatcaaccccatcatgatgagtgctggagagttggaaagtggaaatgcaggagagctagcaaaactgatcaggcagagataccgtgaagccgcagacttgatcaagaagggaaagatgtgtgctctcttcatcaacgatcttgatgcaggagctggtcgtcttggtggaaccacccatacactgtcaacaaccagatggtgaatgcccaccctcatgaacttgctgataaccccaccatgtgcacttcc

SEQ ID NO: 5312 - DNA, 269 bp, Glycine max
  unsure at all n locations
  Clone ID: 701002425H1
ttcatttgtttcgagaatgcggtctctctcagccaacccttccttactgcgacaagctgttcccagttttggtcaaaccctacaaatccattctctctcgagcattcctcttcagctcccctgcctccacatctcattctcacaatactcaatttcttagatccgtcacgtttttctctactacttctcttcgtaattttaattcacgcgccacccatctcaangatgctggctctatcgactctcctcttatacagtccatgcagaac

SEQ ID NO: 5313 - DNA, 263 bp, Glycine max
  unsure at all n locations
  Clone ID: 701002426H1
acaacatgaaatgttgttgccttcactttaggatattggttctcaaagattcctgcctcaaggatggaagaacaggtgancaggacgatttcactatgcactggaatgcagagttccacccttgcaggactccttgcaacgcaatttttggatagtagtcaggcagttcctcctgcatgttctgtcattgtatggctataatgggtctctgtcttgcctctttttggggaagtggctttgtaattagaaaccgttgccattac

SEQ ID NO: 5314 - DNA, 265 bp, Glycine max
  unsure at all n locations
  Clone ID: 701002427H1
cttggcaattgaagttgaagtcttgcccttctctcttcaactccaaacacaagacatcatcatccatggctgcctccgtctccactgtcggagctgtcaacaganctcttttgaacctgaatgggtctggacctggggtttcagctcccagttcatccttctttgggagcagcttgaagaaggttattggctcaagggtccccaacacaaagatttcctctggaagcttcaagattgttgctgtagaagagaagaaagagattga

SEQ ID NO: 5315 - DNA, 268 bp, Glycine max
  Clone ID: 701002428H1
ggggctttcatcaacaaatttttgacatgcagcatcccccacaagatccttcccagtttgctgacagacaacaggcagttggtccagaggccccatttcccgagtatccagcaatgcaccctgcacaaccttccaatgttcccttgctggttacttcaaacccaatgctgaacccacccatgacatttggctatcccccatacctaaacgaacgagctcagccattttacggtgctccctatgatatgcctaggcaggactcaggttc

SEQ ID NO: 5316 - DNA, 265 bp, Glycine max
  Clone ID: 701002429H1
tttctttcctttcctcttctttttctccctccaagaacacatttttctttgacccttttgttccctctccacccacttcccctttaagacaatttcatgcttctctgtctcggatcctagatcttgctgtcggtgggttgatcggagtagatgtcgccgtcaaacgggttgcataacggcggcggaggcggcagcggtggtggcggaggtaatggggtgagttatatagagcaccaggtttcaaaacttgacactcttgctggtg

SEQ ID NO: 5317 - DNA, 268 bp, Glycine max
  unsure at all n locations
  Clone ID: 701002430H1
gtgtttatgagtaagtcaacatgatatgaattgtaaatatattaagaaaatattagaacctagttaatgattctacagttgttatttgtatgattctcagttgcgtacaagattttggatcattgataggattcctttaccattaaaaattgaaaatctagttaatgccttaatggtcaagactcgacttctgtattggcagaattcgagatctcaattggaggtctgtnctgtttcaacatcatcaaattatatgccagttggtcaa

SEQ ID NO: 5318 - DNA, 272 bp, Glycine max
  unsure at all n locations
  Clone ID: 701002431H1
cacgaccactgtaattgatccagcagatgttggagccttggaatctgcattggagcagcacaatgtgtctctattcttcactgagtctcctaccaatccattcctgagatgtgttgatattaagctggtttcagagctttgccacaagaaggggactttgctctgtattgatggtacatttgcaactccattgaaccagaaggcccctgcccttggcgctgatctgattctgcactccttaacaaaataccnnncaggacatcatgatgtcc

SEQ ID NO: 5319 - DNA, 273 bp, Glycine max
  Clone ID: 701002432H1
cacagagcaacactgcactgtgtggaaacgaaacatggcaagagtggtggcactccaacagaaccaactatctttctctaccttagcttcctctctttctgacttcagtggaaccagacttcaaactcaacttcagttcaagagaaagcaatgccatccaaaagggtctttctacgtctccgcatcgagcaccaagaaatcctaataatgggaggcaccaggtttattggtgtgtttttgtctaggctccttgtcaaagagggtcaccaggtg

SEQ ID NO: 5320 - DNA, 267 bp, Glycine max
  unsure at all n locations
  Clone ID: 701002434H1
cttccccaaagatacaagctnatcggcaccacttcattggcctttgttatttgtaacatggataaggtgaacttgagtattgccataattccaatgtctcatcaatttgggtggaactcaacaacggcaggnttggttcagtcctccttcttctggggctatgcattgagtcaattgcctgggggttggctagccaaaatatttggtggcggaactgttcttgaggttggagtattgatatggtcagtggctacagcttttgttcct

SEQ ID NO: 5321 - DNA, 266 bp, Glycine max
  unsure at all n locations
  Clone ID: 701002436H1
ccaaggtcggcttcggccggtcgatccgggcggaagacattgtcaggtggggagtttggctggggcggcacatctgttaaaagataacgcaggtgtcctaagatgagccacattcaaagggatagaataatggttctttttcttatatgttgatttggngtcgngtagtgtaatttgttggggcgccactagttggaatagggcccccaacaaattacactaccccactccaaaannnnaanacnaanaannaananccaanaaaa

SEQ ID NO: 5322 - DNA, 265 bp, Glycine max
  unsure at all n locations
  Clone ID: 701002437H1
tgaaaaccaagaaggggttgcaaattttgatgaaatccttgcaaattcagatgcatttatggtggcacgtggtgaccttggaatggaaattccaatagagaagatatttcttgcacagaaagtgatgatttacaagtgcaacatccaaggaaaaccagttgtcactgcaacccagatgttggagtcaatgtcaaatctncccangccaaccagggctgaagctactgatgttgccaatgcagttctggatggcacagactgtgtg

SEQ ID NO: 5323 - DNA, 265 bp, Glycine max
  unsure at all n locations
  Clone ID: 701002439H1
cnaatttcgattcagtaaaatttcagttcctaacgcactcgctcgcaggttcattacttggccagacagacagacaaaaaaatgttacgataacgtgttgcgcttgttgtgggtttggaattggattcattcaaacgagttaacaacatgctcagatcactgccgaagctctcactcctcttttcctcagtaggaatccccattatctggcaagtgttcagcgtttcatatctgtagggagaagagcagcttcaagaggtagtca

SEQ ID NO: 5324 - DNA, 267 bp, Glycine max
  unsure at all n locations
  Clone ID: 701002441H1
catatactagttttctctggaatattgaagatgatgagaatgaagatagaaaacatgaaattcagagtgacatggaaatacaaaagactgaacctgtaaagccctccaaagaagaaagtggacaagtgattgatgcagcaaatgttacaacagctaattttggtgaagaaagcaatgttgaagattatttgnagaagatggttgatgaaaatccaagcaatcctctgtttctgaaaaagtatgctcagtttctgttacagtccaagc

SEQ ID NO: 5325 - DNA, 266 bp, Glycine max
  unsure at all n locations
  Clone ID: 701002444H1
tctcattcaaattcttctcccagttggggtttctttctcggaagatggctcgtaacgaggagaaggcccagtcgatgctcaaccgcttcatcaccatgaanncggnnnnnnnnnnnnnnnnnnnnnnncgccgccccttcctcgcctcagagtgccgcgacctctcggaggccgacaagtggcggcagcagattcatgcgggagatcggccggaaagttgccgagatccagaacgagggtctcggcgaacaccgcctccgcgatct

SEQ ID NO: 5326 - DNA, 271 bp, Glycine max
  unsure at all n locations
  Clone ID: 701002447H1
ggcaagctagaaggtgacttaaaagttatgcaatgtgttagacatgtaatttgggaaagaatggtccagttctctgacaatttgcagttgccaagttctgtcagagtttttgtgctagagcttatgcaatttatctcaggtaaaaatattaagggtttctctacagaaatactagccaatgttcaaccatgggaagaatggancgnattgatttatgctagtagaaagagtgacnctggtgttgaccagcngttcgccagatccacaaanc

SEQ ID NO: 5327 - DNA, 271 bp, Glycine max
  unsure at all n locations
  Clone ID: 701002448H1
cttcctccctctttctcttctgagtaaccaaccaaccaagagagtgagggagcaatggagaagatgggcagcactcactactaatattatccacacccctctcttacccaacaataccactcttccaaagacttcatcttttcaacccttcttctctaaccaactacttggctccccttannnnnnnnnnnnnnnnaaccgtcgctaaacggttctcttgcaggcccatcaagtgttctgtttctgaagccacagagcccaaaacagagaa

SEQ ID NO: 5328 - DNA, 269 bp, Glycine max
  unsure at all n locations
  Clone ID: 701002449H1
tgagtttggaaaattggaagaagaatgtaggctggagaagtcttcaagtaaaaactctgaagatagcaatagcatcaattccaaacatgaacaatctgtgaagcctaattcacaggctttagcaactattgntcttgaggattccaaccggtttgacacactgtgggaacatcaagatttgatagaacaattgagatggagctgaagaaggtcagagccactggcctacctaccatccttgaggattctgagtctccaaggataatgga

SEQ ID NO: 5329 - DNA, 193 bp, Glycine max
  unsure at all n locations
  Clone ID: 701002451H1
gggcagttgtgatattagaacttgttcttgcnantcttcttcattccnttgattgggaattgccacaagggntgatanaggangacattgatgntcaagtatngncaggnctcanncaacacgagnagaacganctttgtctnngtgccaagactaggagccntacntnactantggatggacttanngatna

SEQ ID NO: 5330 - DNA, 268 bp, Glycine max
  unsure at all n locations
  Clone ID: 701002452H1
gcaccttttcttttcactctcagtctccgatccaatatgacggaggaacggaacgtgcggaagacacgtgtggtcgacgtggtcctcgactgcntcatcccttacatcgacgaccccaaggaccgcgacgccgtttcccaggtgtgtcgacgctggtacgagctcgactcgctcacccgcaagcacgtcaccatcgcgctctgctacaccaccaccccggctcgcctccgccgccgcttcccgcacctcgagtcgctccaagctcaag

SEQ ID NO: 5331 - DNA, 266 bp, Glycine max
  unsure at all n locations
  Clone ID: 701002454H1
gngcgacacaggcattcgaagacgctgtctcgcttgcctcctgcctgcaaatcggcggcaagaagaacatcgcagaggccgtcaacgtgcacaagacgttgaggttcacccgcaccgcctgcgcccagaaaatcggcttcgccaacgccgagctactccaaaagaccgactgggctcaagtcaaaattgaccacgcaagttcgtctcctcgcttgccaaagtggatctgggagcacgacgccgaaaggtacgcgcatgacaatnac

SEQ ID NO: 5332 - DNA, 260 bp, Glycine max
  unsure at all n locations
  Clone ID: 701002455H1
gaagattggcgcagaaggctttgctctgatagacaagttctatggtccatcaagggggaacagtgccaatgatgcattccacgggccaaggggagaacattgttgggtggtttataatgtgtccaatgatgtgatggaagaatctgctgtagacccatganattctaagctttttggcttatgcatgttaattattaggtatctcaaatgggtcttgctgtttcatgttaggttactctctgtatgattatgtatagaaa

SEQ ID NO: 5333 - DNA, 261 bp, Glycine max
  Clone ID: 701002456H1
ctggggcggtgacatcccaatggttccgataagtgctctcaaaggaaagaacatagatgatcttttggaaactgttatgcttgttgccgagttgcaagaactgaaagctaatcctgatagaagtgcgaagggaactgttgttgaggcggggctagataaatcaaagggaccattcgcttcatttattgtgcagaatggcaccctcagacggggagatatagtagtttgtggagaagctttggaaaggtgcggcttattgat

SEQ ID NO: 5334 - DNA, 263 bp, Glycine max
  unsure at all n locations
  Clone ID: 701002457H1
ttcattttgggtttctctcttctaagttatggcttctttgagacctaccctctctcaactttccctttcccaatccaattttctcagaaaatctacatggaacaatcatctaccttgttatatacacaaaaggatcgcaaagtngcaaactttnacctcttctaaatcttccactttcagggtccgctgtagttctccaganaccaataagcaaaacaatggtgaagancctccagagtcatatttatgaaggaatgaagagg

SEQ ID NO: 5335 - DNA, 266 bp, Glycine max
  Clone ID: 701002458H1
tgcaactaccacatcaaatggattcggttgccttagatggacaaattactgagatagtttacaaaggcactcataaccatcccaagcctcaagctgcgaagaggaactcattgtctgcctcatcacttgcaattcctcattcaaatcatggcggcattaatgaactaccacatcaaatggattcggttgccactcctgaaaactcatcaatatcaatggaagatgatgattttgatcatactaaatcaggaggagatgagtttgat

SEQ ID NO: 5336 - DNA, 265 bp, Glycine max
  unsure at all n locations
  Clone ID: 701002459H1
gggcagactatatactcataaggagttaggacatttttctttgccatttgcttttattaatttttcttcaattcatgacttatgtgtgttttactctttgtaanttacagaaagcagtacaggctagtcctaaaaataggtatgcttggcatgtatggggcgtttttgaagctaacatgggcaacattgactgggaagaaaacttttaaagataggtcataatctaaacccaagggatgctgttctacttcaatctcttgcttta

SEQ ID NO: 5337 - DNA, 187 bp, Glycine max
  Clone ID: 701002460H1
gctcatcatctggaatttatttggcagtcatggattattcatcatggattaacacttccttggatctcaacattaatctccatagggttcacgaagaacttcccgtaagtataaacgtacatatagcgtccaagatcttctgtggaatgtttccctcagaataataattaattcttcttgtgtcctg

SEQ ID NO: 5338 - DNA, 271 bp, Glycine max
  unsure at all n locations
  Clone ID: 701002462H1
gttgtntaatttgctatgnagttgtgnagtgtaattatgttgtttgcttantgcttanngtagacnanaanccatgtanatacagantnttgtcttngcagaagagnagtggttgtatgnttccatanatttntgttgtcttacatattgaaagcacacattacatgtccacatattttacattagtgacaagcctagtttcanacntanctgttttagntgtcccatattgctntttgcaancatcggtattgatatgncnaaagggtac

SEQ ID NO: 5339 - DNA, 65 bp, Glycine max
  Clone ID: 701002463H1
gatcatgttatgacttatgatgtgaaaatatatataagaaggaaggcaacttcataatttttttt

SEQ ID NO: 5340 - DNA, 264 bp, Glycine max
  unsure at all n locations
  Clone ID: 701002464H1
gagctttttctcgcctataaaatgtccgccactgcttcactctgcgccacttccagaacaactttctcatcatcgaagcccgtcgcgagaagaagtgcttcgtcgcggttcccaaaatcgcgtttcccaagctccgtttcaaacccgtcgctatggctacgctcggcgctcgatggtggcggcgaacccacgtcattccgccggcctngtcgattcgaaacttcgttttaagaggagagntaacctcgccggancgacgagtac

SEQ ID NO: 5341 - DNA, 266 bp, Glycine max
  Clone ID: 701002465H1
aagctcttggtacgcaggtagtatatacatgttgatatgtaagtatgcttgtgcgtggagtgattatgtatgagtttgttgagcagtacttgcaattgcaagattataaggttcaaatctgacttcacagaagtaatgatcgggctttccccctaactgaactggtttaatctaatgaaaaaggaatatggaggccatgttcatcaatctcactctatctatactggtggctcatattgttgatttacctagtgtgtgttgccatc

SEQ ID NO: 5342 - DNA, 264 bp, Glycine max
  Clone ID: 701002466H1
tgaactaccacatcaaatggattcggttgccttagatggacaaattactgagatagtttacaaaggcactcataaccatcccaagcctcaagctgcgaagaggaactcattgtctgcctcatcacttgcaattcctcattcaaatcatggcggcattaatgaactaccacatcaaatggattcggttgcactcctgaaaactcatcaatatcaatggaagatgatgattttgatcatactaaatcaggaggagatgagtttgat

SEQ ID NO: 5343 - DNA, 265 bp, Glycine max
  Clone ID: 701002467H1
cgtttttaagaaaaccggcagtattgccgttagcgacgcagccaaaaccctaatcagtgccaaacgatggaatcaccgtcaccaccttccccgttccgagaccttcttctccgtttatcgaccggaatcgcggagtctctggccaccgttccctacactccacaccaatcctccaacgtctccgtcaaagcctttctcgaacccctcctcgttcccaccgccaccgtcagagattcgctctcgcgtgcgctctcatttcctcttc

SEQ ID NO: 5344 - DNA, 260 bp, Glycine max
  unsure at all n locations
  Clone ID: 701002469H1
cnatgtacagtatgcagcacctggccagcttggaactgggcatgcaatggtaccacatgtgtatccatatccagatccttactatagaagcatctttgctccctatgatacacaaccttatcccccacaagcctatagtgggcagccaatggtccatcttcagttaatgggaattcagcaagctggtgttcctnnncnaccnntnnnntnaggagccgtgtnttgnccagcnnaacacatnntcggggnatntnacccgc

SEQ ID NO: 5345 - DNA, 263 bp, Glycine max
  unsure at all n locations
  Clone ID: 701002470H1
cnatagtgcatagcgtttttcattgtgcattattcaatggccaccacagcagctctatccggaaccatggtgagcacctccttcatgaggaagcaacctatgacgaccaagagcctaaagacattccccaacgctctttttggtctgaaaggtggacgaggtggtcgtgtaacttgcatggcctcgtacaaggtgaagctccataaccccagaaggagaagtggagtttgaatgcccagatgatgttttcattgttgacaagg

SEQ ID NO: 5346 - DNA, 261 bp, Glycine max
  unsure at all n locations
  Clone ID: 701002471H1
cacattgcaacttctccgaagtgaaagatcaacattccaaagcattagacttgaggaacactagaaaagagaagcagtgtgactattctaggctcaaccagaatttggnaaatccgctctactctgaagttggnngagaaaaggcaaagtagggntncatgtgagaagatgatacatntgnggggccaantactcnttcaaanggntatgtgnacgcccattgtcangagangtccatnntagtatccngggtggtncctg

SEQ ID NO: 5347 - DNA, 142 bp, Glycine max
  unsure at all n locations
  Clone ID: 701002472H1
actnctcgaggtcatntttgantttacagatcaagaaagcangntcatgttccattgtgcactgacgtacnattttgacagtnctagnacnctgntcntgntagtggttgcgaagttttgagagnncatgtcatgagtggga

SEQ ID NO: 5348 - DNA, 262 bp, Glycine max
  unsure at all n locations
  Clone ID: 701002473H1
cttcccacgctcctccttctcatacccttcgccaccctcgtctccgnccgcccttcacctgcgccggagactttctccgactgccctccgaaaccgataacgatgacaacgtccagggcacccgctgggccgtcctcctcgcnggttccaatggctactggaattacagacntcaggctgatgtttgtcagcctatcaaatactaaggaaaggtggnctgaaagaagaaaatattattgtttttatgtatgatgacattgca

SEQ ID NO: 5349 - DNA, 260 bp, Glycine max
  unsure at all n locations
  Clone ID: 701002474H1
ctaatttcgcctatttataaccccagcttgttcaatttcgcaacctgtattttttcgtttctcaattttccacttattttcgttccagccagagccagcttttccattttccctttattttttctcggaatccaaacggaaccgtaatcgtgtattccttttttttttttnntntccctctntccccgggcnggttcagatnnttttcngatnccgtngcgaattncngnttcatcgaagangaagagnaanccnaaacc

SEQ ID NO: 5350 - DNA, 258 bp, Glycine max
  unsure at all n locations
  Clone ID: 701002475H1
gcaggtggtgggagaaaggtgacacgtgttgaggtaaccctggacggaggtgaaacgtggcaagtgtgcacactggactgtccggagaaacccaacaaatatggaaagtactggtgttggtgtttttggtctgtggaggttgaggttttggacctgcttcggagccagggagattgcggtgcgtgctgggacgaggccctcaacacccaactgaaangctcattggaatgttatgggcatgatgaacaactgctggtt

SEQ ID NO: 5351 - DNA, 259 bp, Glycine max
  unsure at all n locations
  Clone ID: 701002476H1
gnggtactgaaaatacctctttctttgggactatactctcaatttcaaatggtggttccaccaacactgtccaaatgctccaactgtggaactgcaatgnaatatgattcaactacaagattgattacgttaccggaaggaagtaacgcctgagttgaggtatgcctganaatcatatttattgttcagcaatgggagatcattaatagcagttcctgtgagagtgacaaatttatcattagcaaattgtgatgttctc

SEQ ID NO: 5352 - DNA, 257 bp, Glycine max
  unsure at all n locations
  Clone ID: 701002477H1
cttangtgatagatgtccatctggtagttgatccttggacaagggantcccgtgggtttggctttgtgacaatggagactcttgaggaggcagatcgatgtgtaaagtatctgaatcgctcagtacttgaagggcgtgtcatcacggtggagaaggtatacatttctagcagtgccctattttgtgggcctggattttnattagctattttttttttccaaccccaatgcatggaaatagtgggtgattgttcttta

SEQ ID NO: 5353 - DNA, 261 bp, Glycine max
  unsure at all n locations
  Clone ID: 701002478H1
cnggtccagtngattcctctctttcgattcatttgcttctcgctgatcaaagctgtttattaggtaacttggtatgggagttgtgactgtttctagctcggctgctcggactccattgggattgaatacaaagttttgcaataatcgnctgaagagacctttaattgtagcanttaagggggataagcacaatgactcagctttggttgcaacacnagagaaaattctgtgnccggctganacggcgaagnagacgcanaa

SEQ ID NO: 5354 - DNA, 262 bp, Glycine max
  unsure at all n locations
  Clone ID: 701002481H1
gnagaaaggtgacacgtgttgaggtaaccctggacggaggtgaaacgtggcaagtgtgcacactggactgtccggagaaacccaacanatatggaaagtactggtgttggtgtttttggtctgtggangttgaggttttggacctgctcggagccaggnagattncggtncgtgcttgggacgaggcctcaacacccaacctgaaangctcatttggaatgttatggtacgttcctgtctctgccacattcntnaattgana

SEQ ID NO: 5355 - DNA, 265 bp, Glycine max
  unsure at all n locations
  Clone ID: 701002482H1
tnacacttctgcagaaatggcagccattcgagaagtttcttcagctctcggattctgttccttgcaaaattcgtgccaagcggggctgtgccactcaccctagaagcattgcagagagggttagaagaactaaaattagtgagcgaatgaggaagctacaagatctggtccccaacatggataagcaaacaacacagcagacatgttggacttggctgttgagtacattaaagaccttcaaaaccaagttgaggcatttcggaca

SEQ ID NO: 5356 - DNA, 265 bp, Glycine max
  unsure at all n locations
  Clone ID: 701002483H1
cacaacaacaataacaatggctgcctcactacaagctgcagctaccttcatgcaacccaccaaggttggcatagcctctcgcaacctcaaatctacacaatgcatttctaaggcttttggcttggaacctgctgcagctaaactcacttgctcccttcagcctgatctcaaagaatttgctcaaaaatggtcgangctaccaaaattncnggattcgcccttgccacctctgctctcgttgtttctggagcaagtgcagaaggtg

SEQ ID NO: 5357 - DNA, 244 bp, Glycine max
  unsure at all n locations
  Clone ID: 701002484H1
tnaggatgatcctaaagaaaagcacagaaggcatgacgatggccttggagactatcgtatgggaaganagcatgcaagggatgaggatgatcttggagaacgaaagcatgcaagggatgaggatgattccaaagaagggaagcacagaaggtatgctgatggccgtggagagagaaagaacttgagggatgaagatgaccgtgncagagagaaagcgtggaagggatgaagattaccgaactgg

SEQ ID NO: 5358 - DNA, 262 bp, Glycine max
  unsure at all n locations
  Clone ID: 701002485H1
atctacactgccgtgaccacaagaggcttaccacctcatttcccaacacaattacctcattcacagcctccaccgctattatatccaactctagaacctccgccaccgccaccgccgccgncgccgccaccggcactaccacaatccatgtccaagaaaccaagttttgcgagagttttcgctaaaaaagctcttcagttcatgaacaacaattcaatctgctgccaagaagtatgctttgattcgtgataattctctaccc

SEQ ID NO: 5359 - DNA, 261 bp, Glycine max
  unsure at all n locations
  Clone ID: 701002486H1
ctctttttaanananatggttctcaccatttccaattagacacacatnnaaccattcccantagccgcctctgntaattgattactatcaanccaacttcaagttgtgttcttttgtggngtgtaaccgtattctgtatttgtnttcatcanttggaaactgggttttctcgctttttgcagataagatcaataggntactagatcatggattggtactatgggaacggcattaatgcntatctgggtcccagagatcagg

SEQ ID NO: 5360 - DNA, 263 bp, Glycine max
  Clone ID: 701002489H1
ttccagcgccttcaattctcccttctggactacaaattctggtgctcctatttggaacaacaactcctctttaaccgttggagctagaggtccaattctgctggaggattatcatcttgtggagaagcttgcaaattttgatagggaacgtatcccagaacgtgttgtccatgccaggggcgctagtgcaaagggtttctttgaggtcacccatgacatttctgcacctgacatgtgcagatttccttcgagcccctggagtt

SEQ ID NO: 5361 - DNA, 258 bp, Glycine max
  Clone ID: 701002490H1
ggagcattggaaacggcattcctcttggtgctgttgtgacaactcctgagattgcgaaggcattgactccgccggagttacttcaacacctttggtgggaatcctgtttgcactgctgcaggattggctgttttgagagtgatagagaaagagaagcttcaagaaaatgcttttgtagtgggttcctattgaaagagagactcaatgcatcaaggacaaatatgaatgtatcctcgtcattcacttcttattcctgtt

SEQ ID NO: 5362 - DNA, 259 bp, Glycine max
  unsure at all n locations
  Clone ID: 701002491H1
caaattacaatacaattatccgttttccattcacatttgtcagttagttagcagagtgcagtgacttgagaatggccttgccagtggtcgtcgacncnngtacctcaaagaggtcgacaaggctcgccgcgatctccgcgcactcatcgctaacaggaactgcgctcnctctcatgcttcgattggctggcacgatgccggaacttacgatgctaagaccaagactggtggacctaaggttcgatccgtaacgaggaag

SEQ ID NO: 5363 - DNA, 257 bp, Glycine max
  unsure at all n locations
  Clone ID: 701002492H1
gtaatattgttctcgtatggnagtggcttaacttccacaatgttctctttgcaattacgagaaggtcaacatccattcagcttgtcaaacattgctaaagtgatgtttctagcaaatngaagtcaaggcttgagtttccaccagagaaatttgttgaaaccatgaagccaggaagtcaactgtgcttgcaacatttagaaggttgtttttgtttgcaatagtttctctaagggaggacagatgaacaatannanatc

SEQ ID NO: 5364 - DNA, 261 bp, Glycine max
  unsure at all n locations
  Clone ID: 701002493H1
cgccttgtgtcnaggcaactaaagcttctctcgctttgcaaganagggaggagtgagtganatggaaggagtgatacacagaacagtggaagtgaatggcataaaaatgcacatagcagagaaaggagagggtccagtggtgttgttcctccacggcttccctgagctctggtactcatggcgccaccgattctctctctcagctccctcggctaccgcgccgtcgctcccgatctccgtggctaggtgacaccgaggcac

SEQ ID NO: 5365 - DNA, 257 bp, Glycine max
  unsure at all n locations
  Clone ID: 701002494H1
gagaaccttctcctcgacgacgacggcaacctcaaggtcaccgacttcggcctcagcactttctccgancacctccngcacgacggcctgctgcacactacgtgcggcacgcnggcctatgtcgcgcccgnggtgattgggaaaagaggctacganggcgccaaggccgatatntggtctgtggcgaatcctctacgtacttctgntggttntctaccttncangatgacaancggtggcnctgtacnataaaancc

SEQ ID NO: 5366 - DNA, 268 bp, Glycine max
  unsure at all n locations
  Clone ID: 701002495H1
anagaatccccgtgtgcccatcatcgtcaccggtaacgatttntccanactctatgcgcctctcatccgtgatgggcgtatggngaagttcntactgggcatcancaanggatgancgcantggtgtgtgaattggantttatcgtaccnatgaanttcctgnanaggacgtngttnaagantggtgacacntncctngccaatncattggtttctttggtgnntgaggggccntagtatatgatgcctttatncagnaatggatctt

SEQ ID NO: 5367 - DNA, 268 bp, Glycine max
  unsure at all n locations
  Clone ID: 701002496H1
gggtnnggcctatngnatgtcgngcactgnttgcactctggcgccacttgnagaacaactttctcntgcancgnagcccgtcgngagaagaagctgcttcgtcgcggttcccaaaatcgcgtttcccaagctccgtttcaaacccgtcgtatggctacgctcggcgntcgcatggtggccgccgcacccaccgtcatccgccggnctcgctcgattcgaaactccgttttcaagaaggagaagattaacctcnccggacacgacgagt

SEQ ID NO: 5368 - DNA, 258 bp, Glycine max
  unsure at all n locations
  Clone ID: 701002502H1
acgaaacatgggcaagagtggtggcactccaacagaaccaactatctttctctaccttagcttcctctctttctgacttcagtggaaccagacttcaaactcaacttcagttcaagagaaagcaatgccatccaaaagggtctttctacgtctccgcatcgagcaccaagaaaatcctaatnatgggaggcaccaggtttattggtgtgtttttgtctaggctccttgtcaaagagggtcaccaggtgatttattcac

SEQ ID NO: 5369 - DNA, 261 bp, Glycine max
  Clone ID: 701002503H1
ctctgctcgtggcctctagggttatcatatctccatttccatttctcctctctcagtttccaagaatcttaagctatgggaaagtcttacccaaccgtgagcgctgattaccagaaggccgttgagaaggcgaagaagaagctcagaggcttcatcgctgagaagagatgcgctcctctaatgctccgtttggcatggcactctgctggaacttacgacgtgagcttcgaagaccggtggtcccttcggaaccataaagca

SEQ ID NO: 5370 - DNA, 253 bp, Glycine max
  unsure at all n locations
  Clone ID: 701002504H1
ttgacttcagcaaatctcaagcaatattatgcaacctgtttttctcttattgccgggataattctttttggtggtctccttgcacctagtttggagcttaagcttggactagggggcacatcttatgcagattttattgaaagtttacatcttccatgcaactgagtcaggttgatccaatagnggcaacattccccgggngnacccntggcaaanccccngannaaggggggnaanaaaannnnccnacccc

SEQ ID NO: 5371 - DNA, 256 bp, Glycine max
  unsure at all n locations
  Clone ID: 701002505H1
gagataatgaaaacccatgatctcatctttgcatcgaggcctcacactctagttgcagatatattggcttatgaatcaacaagtattatcacggcaccttacggacgatattggagacagctactaaaaatttgcacggtggagcttttcacccaaaaacgtgtcaattcattcacatnaaggtctttctatcaacctcgctgaaatagtagttttatcaatatataatntctttcaagagccgcttttggcatgc

SEQ ID NO: 5372 - DNA, 260 bp, Glycine max
  unsure at all n locations
  Clone ID: 701002506H1
ggcggggataagattaaagattcaacaatggcctctgcttctgctactcttctcaagtcatctcctgttcttgacaagtgcgagtgggtcaaaggccagacccttcgccaacctctcgtgagatgtaacccttcctccagaatcagctctcaccatcaaaggngcttcccnatgnctnaccgagctcgtnaaaacngcaaaaanagnggcncncgggggcgtggtttttggcganggatnactcaaatcgcnnccncnnc

SEQ ID NO: 5373 - DNA, 252 bp, Glycine max
  Clone ID: 701002507H1
gttggatgctgagaggctgttatcagatatgcttaggaagggttgttcccctagtgttgttactttcaatatcttgattaacttcttgtgccggaaacgattactgggtagagccattgatgtcttggagaaaatgccaaagcacggttgtgttccaaattccttgagctacaatccattgcttcatgggttttgtcaagagaaaaagatggatagggcaattgagtattggaataatggtgtctaggggtt

SEQ ID NO: 5374 - DNA, 257 bp, Glycine max
  unsure at all n locations
  Clone ID: 701002508H1
ggnaggaggtggccctgggcatgggtcctataggtgtaaagaaacacttggcaccatttttaccattcacaccctgtgatagcaactggtggaattcctgcccctgacaaacctcaaccacttggtaccatcgctgccgcaccatggggctcagcactcatattgccaatctcttacacttacatagccatgatgggttctaaaggatcaccgatgcatcaaagatagccattttgaatgcaaatacatggcaaaac

SEQ ID NO: 5375 - DNA, 263 bp, Glycine max
  unsure at all n locations
  Clone ID: 701002509H1
ctataaaggcccattgggaagagtcacggaagttttcgcaatcctacacaattgagaggggttcttctactaataagggtaccacttcctccagtcattctgcatcagtggatcaagtggagtaccatgaattgcctagtgatgaggggcaggnacaagtnacttcagatgccaaanttgcccccgtaaaananaaaaaaacccncttnaaccctntntncggggncaattngggnnnnccttcnggccacnnaaacangngg

SEQ ID NO: 5376 - DNA, 259 bp, Glycine max
  unsure at all n locations
  Clone ID: 701002510H1
gagagagaganatttataaaacaacactttagagagagaaacacaaacctaaaaaactctccaaaaaccatgcgtccaccagaacttcactcgggttttctgtntttcaattcaatccaatttcgaaacanaaaacgcgtttggtgtgtgtgttcgctcgcancactctcatgccantggttaacggaggcgntccttaaaacaaanntnggggggnaanaacnngggngtcnttaccanaananactcggcttcntnc

SEQ ID NO: 5377 - DNA, 258 bp, Glycine max
  unsure at all n locations
  Clone ID: 701002511H1
taacganacatggcaagagtggtggcactccaacagaaccaactatctttctctaccttagcttcctctctttctgacttcagtggaaccagacttcaaactcaacttcagttcaagagaaagcaatgccatccaaaagggtctttctacgtctccggnatccgagcnccangaanncctaatanngggacccaccangnntatgggcgtgtttttgtctaggctccttgtacanagagggtcaccnggtgntttatc

SEQ ID NO: 5378 - DNA, 255 bp, Glycine max
  unsure at all n locations
  Clone ID: 701002512H1
ggggttcctcattttgcaagctttctttggtttcacaccatttttctatncgacttcatcacaatataaaagntcnttagtgtcggtattatcaccaccatattctttggacttcctctgctatttctaggtttcgtnttatttggctttgattttcttctgcaaccttatctactgcaaagctttgattactgagtctaacttaccctgcnacagtttggccttgtttacctgagctcgtttttaatggtcttt

SEQ ID NO: 5379 - DNA, 258 bp, Glycine max
  unsure at all n locations
  Clone ID: 701002513H1
tctattacaataaaaacactcaaaagaggagaaaaaaagaagaanagaatggtaacaatagctggtggtgtgagtcttcaagccctagcagggtatttgctaatgctaagggaatagaccccagccanaaangncccaggcccgtgagntttcaanctctgncgnggcccattcaaaangngnccggntttngtaaacccgggcccntttgggnnacccngnaaacaaatccgcaaaagntcaggggccctaaanncc

SEQ ID NO: 5380 - DNA, 257 bp, Glycine max
  unsure at all n locations
  Clone ID: 701002514H1
ggaagtggaagaggctagaacaacagatcctctcacgtgcacaaccatcnnnnnnnnnnnnnnnnnnnctgtagtaattaatatgtttcctgtctccatgtctaattatgaccggatttcagagctgatatgggagaatggccagctatccattcatgggcttggtgggcttcaacctactnaaccctactcaggaaaggccctttncagnnggggccccanaacactgggantcanagtccaaatnccncgncccc

SEQ ID NO: 5381 - DNA, 260 bp, Glycine max
  unsure at all n locations
  Clone ID: 701002515H1
ctaaagagaagagtctgaaatctgaatcataaatcattggttttgagatgaagaactgcgagctatgcaagcttccagctaggaccttctgcgagtcggaccaggctagcttatgctgggactgcgacgccaaggtccacggagcgaacttcctcgtcgcgagacacacgcgcacgctccnctgccacgcgtgccagtcactccacgccgtggaaggcntccggttctccccnggaaanncagnncccccnnncaaannc

SEQ ID NO: 5382 - DNA, 256 bp, Glycine max
  unsure at all n locations
  Clone ID: 701002517H1
cgntcgngccttctgtctcaatctcaatccaccagaaatggcaacaatagttagccaccaccaccgcctattctccgccgccacgcgcttcaattccactggcagagactcgcggcggcaaaggagcggcgcaaactcggtccggtgcgctgacgtaagcacggtcacgagcgagaatcagcgagtgacggtgagtaacaggagcgatttcgctggagatatgccgcgtgctgaacggnagttgcagaccancggc

SEQ ID NO: 5383 - DNA, 256 bp, Glycine max
  unsure at all n locations
  Clone ID: 701002518H1
ctcggaccnaacccaacccgtaacattatctctctcttctcttccnttgtagctttcactttcatttttctggttccgatttagggcatccgaactcggtctttgactcagaactagctctgatctgctcctcaggttgttatttggtaacaaggaaacacttctcagattgttctgaggactttgagtacaaaggcggaccattttcagcaagggatgattttgggtngaccttttganatcatgccatgtcggg

SEQ ID NO: 5384 - DNA, 254 bp, Glycine max
  unsure at all n locations
  Clone ID: 701002520H1
aggaatgnaagtnttcacatgaggngtggcatntgcttncttntnttaggtccctnaagggcatggcccggtcttcaaacgctgttattgttgtancctttccaccttcacttcttcctccaccnnntncnanaagattgcagcatatggcagacaccttgcttnctgtcaagccattccagatgaggataaggnattgcnaaactcctcactggttaccaggcatatgattgggcntctaaatgtanacaang

SEQ ID NO: 5385 - DNA, 257 bp, Glycine max
  unsure at all n locations
  Clone ID: 701002521H1
ttttcttcctcagctgcaaacaacatttgtcaagtgtctacaggatagtacaagaactgttcgttctagtgctgccctggcgcttgggaagctcagcggactcagtaccagggttgaccctttagttagtgatttgctgtcaagtttgcagggatcagatggtggtgttcgtgacgctattctgactgcttgaaaggtgtcntgaagcatgctgggaagaatttgagcctctnctgttagnaactcgtttttacanc

SEQ ID NO: 5386 - DNA, 256 bp, Glycine max
  unsure at all n locations
  Clone ID: 701002523H1
gtaaaaatanagaagaaaaagcaacgtctggctgctattggtgaagatttattatctattgcagcagaccagcccttccgatttcctgctacattcacatttgttgttagagccttctcagtgttggatggcattggaaaggggcttgacccacgttttgacatcactgagattgccaaaccttatgccctggagttgctcaggtttcgtgaagctggggttgaagttgtcctaaaggacttcaggaagagatggg

SEQ ID NO: 5387 - DNA, 259 bp, Glycine max
  unsure at all n locations
  Clone ID: 701002524H1
ttcaanaagtgatgnaggtatagctaaggnttccaagaaagctgaagatgngaaaactangcagtcagagttcanatctgatgaggcagaggataaagctactgaaggtaaggntgctgcagaaganagcaatgcnaacaaagagcatactgnaganacggaaagttctgatgacaaatctgaggtagctaaagaacanaaaaaggatgtcnctgaaagtggacctnaggctcngaaggntgctcacacacnacgagac

SEQ ID NO: 5388 - DNA, 212 bp, Glycine max
  unsure at all n locations
  Clone ID: 701002525H1
gnataaaaactatatgtagtttcaaaacttcaaaattatgtagtatgtantatgttgcactctggtgttttgtgtctaaacaaacacccttagaataaagtggtcatttcttgcccttgagcaagttcaagtgttttggacttgtgatgggtgtgttaaggccatggttgcccttttntttaatatanatacnnatctatcannnttcnggt

SEQ ID NO: 5389 - DNA, 257 bp, Glycine max
  unsure at all n locations
  Clone ID: 701002526H1
ttgtccagcatcaaggttcctcntcaattcttggtatctggggaggcaaaggacaaggataatctttncaatgtgagcttgtctttgccannatgggaatcaanccccatcatgntgagtgctggagagttggaaagtnganatgcaggaganccagcaaaactgatcaggcgagtaccgtgaagccgcagacttgntcacnatggganagatgtgtgcncncnttcatcaacnatcttgatncaggagnggtccnc

SEQ ID NO: 5390 - DNA, 249 bp, Glycine max
  unsure at all n locations
  Clone ID: 701002528H1
gtcaaaacaacaactaacgacaaagattcttccccaacacaagggaaaaccggagcaacaaaaaaagtaacacacacgcacacacgcatcatcgtataacatttgttttattttttttaaagagcgagtgttgnaccaaatggtgagtcgaagagcgtggcgacacctgcggngnaccaanncgcngggggtttcccgcacagggncccgncaacgactgggggnnnncngncgnaantagncnccccc

SEQ ID NO: 5391 - DNA, 255 bp, Glycine max
  unsure at all n locations
  Clone ID: 701002529H1
gttnaactttaccagagtcggggcaagaagagngtctcttccaatttgaagtagcgaggatggacaagtccagttctttccaaatgctccagttgatgttgacaattctcccagctttgtngccaacnaatgncagcctantgaanngggncaantttccnggnccccngcncattngangtttnccccaaaggnttnccnggaanatccccccctnnncttcaaaagggngggggaaccggaaatcccntttcc

SEQ ID NO: 5392 - DNA, 255 bp, Glycine max
  unsure at all n locations
  Clone ID: 701002530H1
gtnccaagctggaggttcatttcactgtcaccagggatacctctggtgaggttcttggcaggggtactaagatcactctcttcctcaaggaggatcagctagagtaccttgaggagcgccggttnaaggntctgattaanaagcattctgagtncattagctacccaatttctctttgggttgagaagactacngagaaggagatttccnacgatgaggntgcggaagagaanagntgncncgggtaangtngnc

SEQ ID NO: 5393 - DNA, 101 bp, Glycine max
  unsure at all n locations
  Clone ID: 701002531H1
gaggcngtgccataccgaaattcnnatctgtgagaatggnaaaangtggatctctgancgacggcgtggtgaagaagatcgttactctcctacagctacgc

SEQ ID NO: 5394 - DNA, 230 bp, Glycine max
  unsure at all n locations
  Clone ID: 701002532H1
gnnanccccaagagggtgctggtgtgtctgattgagaagganattgagtttgaaacagtacatattgatctcttcaagggagagaataaggaacctgagttcctaaagctgcagccatttggatcacttcctgttnnncaggagggnnacnccccccanacacccncnncaanaaanacactctccnnnaaannaaccnacagggggcccntnttgnacnaaaaanaaaa

SEQ ID NO: 5395 - DNA, 260 bp, Glycine max
  unsure at all n locations
  Clone ID: 701002533H1
tctaattacacttnctatctcatttccaatctcattttcgttcggttcaaacactcttcatggcatcagacaagaagattaggatcggcatcaacggatttggaaggattggccgtttggtggccagggttgctccttcagaggaatgacgttgaacttgttgctgtcaacgatcctttcatcnccactgattacatgacatacatgttcaagtacgacaccgttcatgggcagtggaagcattttgatgtgaagctgaa

SEQ ID NO: 5396 - DNA, 256 bp, Glycine max
  unsure at all n locations
  Clone ID: 701002534H1
cctggctgncgatgttacggattatcttcttcaagagacatttcgngcnncgatatccctcaattaaggggnccaaagttgtaattgataggctaactggacggacaaagggttatggttttgttaggtttggagatgagagtgaacaggttagagctatgactganatgcaaggggttcttgttcaacaaggcccatgcgaattggaccagcctctaataaaaaccctagcactcagtctcagccaaaagcatca

SEQ ID NO: 5397 - DNA, 254 bp, Glycine max
  unsure at all n locations
  Clone ID: 701002535H1
aattgaagttaaaagccttagccttccntacaacttcaaancnnnaagacatcntcatccatggctgnntccgtctccactgtcggagcnntcaacagagntcttttgaacctgaatggttctggagctggagcttcagntcccagttcagncttctttgggaccagcttgaagaaggttattgcctcaagggtccccaacagcaaggtttccggtggaagcttcaagatgttgctgtagagagagaaagagnt

SEQ ID NO: 5398 - DNA, 254 bp, Glycine max
  unsure at all n locations
  Clone ID: 701002538H1
tatccatgaccgtgaccatggcggctgcgtttacaagtacaagtgcaacactgagactgtcaaatgttggagagagcagaggtttgcagctgcgtaagtgtaaccctaatcctaataagctgaaggttatgggggggtttggaggttgttctggagtggcagtggntgtnagagaaagaaaaggaattgnaanggttagggttcgggtntcgggcaantttttcgnnggacnannccatnatccnccnnttccc

SEQ ID NO: 5399 - DNA, 235 bp, Glycine max
  unsure at all n locations
  Clone ID: 701002539H1
gccaaatgcctcgtcatctaattantgacgcgcatgaatgnnttaacgagattcccactntnccctgtctactatccagcgaaaccacagccaagggaacgggcttggcggaatcagcggggaaagaagaccctgttgagcttgactctagtccgactttgtgaaatgacttgagaggtgtaggataagtgggagctggaaacagcgaaagtgaaataccactacttttaacgtt

SEQ ID NO: 5400 - DNA, 250 bp, Glycine max
  unsure at all n locations
  Clone ID: 701002541H1
gtcaaaattntnntttcatgggttaatttagtttttggtgggcaaattacaaccaaaggcagctatttcctctggtttttgtccatcagtatattatgatttgtgttttcttcatgtccaagaagtgttttcnactaagattttnagttacaaaactcngaangccattcttagggatganaaccctntccccngatnacnaggtcccccggaaancngaanaaaaagttcaaanncnggtttgccnncc

SEQ ID NO: 5401 - DNA, 254 bp, Glycine max
  unsure at all n locations
  Clone ID: 701002542H1
angaaaagcatggctaggagagcacattgtcttgtgttaccatatccacttcaaggacacatcaatcccatgcttcaattctccaagctattggaacatcaaggggtgagaataacacttgttacaactcgtttcttctanaatacttncaaaaantgcnaccttttntngnaccaaaaacctcncncaccnggcnaancgggcangacanccnaangcncccngacanaccacacnccatntacacnccccgc

SEQ ID NO: 5402 - DNA, 253 bp, Glycine max
  unsure at all n locations
  Clone ID: 701002544H1
tgcaatggagtgtgttgaagattcaggagctgacaggcccgcaatgagtgatgtggttaaagaaattgaagacatgttgcagtctgttggtatgcacctaacatctgaatcagtaacatccacaacatctagtcatagatatcaggaggtaagtatagtgagtttccatctggaccaaccttacagcaatgagtccttggttcaagtgcagancatattcaaaattngacccgttngttnanttnnccntttc

SEQ ID NO: 5403 - DNA, 250 bp, Glycine max
  unsure at all n locations
  Clone ID: 701002545H1
gnaacacatattcattctcctcacataccaaaantaaattatttttcttgttattttccctttgctaacggaaagccatgaaattcgggaagagcctgagcagccagatcgagaaaaccctgccagagtggcgcgacaagttctctctacaaggagctcnagnagaagttcaggnatttggcccnccgggccccggtttagcggggnaaaaagcccgggaaaggcctaaaaangcnggggaannncgcnc

SEQ ID NO: 5404 - DNA, 250 bp, Glycine max
  unsure at all n locations
  Clone ID: 701002546H1
gcttttcgagtattcagtcttctaccatcatcaatcagcccatcccatntcttgtactcagaaacaacaacacccgcaattaatcaatatgtctgatacatacaagcccaccgagcacganggcctcaagcagganggccccccnganaagtgtgttggccanggngccttcgccnaggggnngccncnncnnacggggnngnaangggggcggcacaccttgggtnggggggaancccnccgngggggg

SEQ ID NO: 5405 - DNA, 256 bp, Glycine max
  unsure at all n locations
  Clone ID: 701002547H1
atacttgaaaatggaaagaatggaatgaagaaaaagaagtgcttaggagtgattgctgcagcaagttggaggagtaaggtaacaaagaaactccaaattgaatccaaggtaaccatnctcnagcatgtggccctctcnaaaactccctccnctaatgatttcnagtggnctaaaaaatccaaacattggaaggaatctcnatccnccccgtccnattngcnnggggttcntccccaaaacctgcaaaaaacttcgc

SEQ ID NO: 5406 - DNA, 210 bp, Glycine max
  unsure at all n locations
  Clone ID: 701002548H1
tcttcttctggagctaantgcctaagcttaaatggcgtcgttttnntcttctctccctgccgtttccgctcgtcccatccccactagtgnacttccctctcagaaaactttctttcaaactncacccanttgcattnccaaaaatcancgncctccagtcaccccncanccaanannncgcagnnccncgcncntnancacccacancnc

SEQ ID NO: 5407 - DNA, 256 bp, Glycine max
  unsure at all n locations
  Clone ID: 701002549H1
cncttctctttctctctgcgacaccagatgatggagacgacggcgaacgaaaacgctgtncgttgcgccaatcgcggcgttgttgttggtggtgctactcgcggcgagtgtggtggtggaggctcaggagaactcggacgtgaagacgctggtgangnacatgcacgggaagaagtactgcgacaaaggatgggaatgtaagggctggtcaatttactgttgtaacctcactattactgattattccagacctacc

SEQ ID NO: 5408 - DNA, 257 bp, Glycine max
  unsure at all n locations
  Clone ID: 701002550H1
ttctcagagaattactgcgaaanatgcacttgatgctgagtattnctggacagatccattaccatgcgatcccaagagtttacccaagtacgagtcatcacatgagtttcagacaaagaaaaagcgccaacaacaacggcaaaatgaaganatggctaagcgtcagaaaatgcagcacccacagccacacactcgtcttccccccatttcagcagcctgggcaacatgccccaaatgcggtcagaccaaaccancca

SEQ ID NO: 5409 - DNA, 191 bp, Glycine max
  Clone ID: 701002552H1
taaattccgattttctccctggaaaaatggcagcctctgccggcggccagataactctctcgtcaaccgtgcagttacatggagtggcctgtagtaggaattggaagctagtgaagttctgtaatggggaagtcatgggacgtaagcttgtgttaaaaagtgcttatggtggcagcactaaggatgttagg

SEQ ID NO: 5410 - DNA, 255 bp, Glycine max
  unsure at all n locations
  Clone ID: 701002553H1
cttgctccagtgtcaaagacaggatagggtatagcatgattgtagatgctgaggagaaaggactncatncacaccgggtgaaagtgtcctcattgagcctactagtggaaacactggcataggtttggcattcatggcagctgctaagggttataaacttattatnnccatgcctcttcgangagtctcgaaagaagaaccattctccgagttttggagctgagttngtcctcacngcatcccgccaaangncnc

SEQ ID NO: 5411 - DNA, 256 bp, Glycine max
  unsure at all n locations
  Clone ID: 701002555H1
gttccccctcacactcaatactccacatcaattcacaacanacaattaaacaaacagtactatggatgtttggtccatggatatgtgagctccccaactcggtggagtggacagagtccgactcgccacccatgaagttcgaactcgcgagtgagaagaaggagaactcaactgcgttccatttcacctganagccgagcgcaacctccggcttcagactcggaagctgcggtgacttcacgtatgctgcnaggcc

SEQ ID NO: 5412 - DNA, 257 bp, Glycine max
  unsure at all n locations
  Clone ID: 701002556H1
gttgactagtatcattaagatggctaattcctacttatccttgcttgtcttgatccttgtagctctgctgcctcacccctcaagggcttgctgatgaatctgattcttactataagccaccagtttacaaganaccaccagtgtacaagcccaagcccaagccacccatttcacaagcccaagccacccgtttacaagcccaagccacccgtttacaaganacccccttatggtaagtacccaccagttcaagacaa

SEQ ID NO: 5413 - DNA, 255 bp, Glycine max
  unsure at all n locations
  Clone ID: 701002557H1
gtttgtntttttgttgagaagagagaatggctgtggcgtcgtcatcatcccttatcacgttgaaggtgaaaccttggcattttcgggtctcctcggagatccgcggtggttcggaattgtgcgaagtcaacggcggggacaatatcgacgagttggagctggacagctggaagggcnaaaaaagggcttaanttcccgggncnccnnagcnnaaaattttagnnccactnncnccanaaancctttntttttccc

SEQ ID NO: 5414 - DNA, 252 bp, Glycine max
  unsure at all n locations
  Clone ID: 701002559H1
cttccgtttgtgtcaggtgacaattatctgaagccgtacgtgatttcagaaccggaggtgatggtgacggagcggacggaggaggacgagtgtttgatactggcgagtgatgggttgtgggatgtggtatcgaatgagaccgcatgtggggtggtgaggatgtgcctcaaggcgcagaagccgccggggtctnccggggagtgacgtggcggctgacggttccgacctgcttgctccgatgcgtcgatctgc

SEQ ID NO: 5415 - DNA, 255 bp, Glycine max
  unsure at all n locations
  Clone ID: 701002560H1
gggatacngtgctcctattcntctggnatctgntctcantgatagcgacctgtttttcttactagccaatgattccgatgaattcaaccgttgggaggctggaccaagttttggcacggaagttgangcttaacttagtggaagattggcaacgcnancaaaccnttgggtttcaaatnccaattggtcananggtcanacggttttnagggncccangnncgacanaaaattttggngnanggcnaannntncc

SEQ ID NO: 5416 - DNA, 255 bp, Glycine max
  unsure at all n locations
  Clone ID: 701002561H1
gttgctgaaaagttacttaacaacaagggcgttggagttctacaaatgggatgatgaccttccacgattgttgcagaatgtgagagacaagttgaataaagttgctgaaccttggagtcgggaagaaaaggaccactgtctggaaganacagaaaaanctttcaagctctctggagagattcnccgtttgattttacccngnaaanagngcccngccaaccgggnaattanngggattaaaaggcctgngggacc

SEQ ID NO: 5417 - DNA, 254 bp, Glycine max
  unsure at all n locations
  Clone ID: 701002562H1
gtgctttaagcagtttaaggaaatgtgaacgtgcagaaggagccaatgatgaagtaaaagggaagacgaaggactanagcaccagctggatgcacttcccccttcttcacataatgctgcacgtaacataaagatctttaccattttattatgatacaaaatagataatgttctgtatcaannttcagtcagacattggctctgtacatagggttatnttatcgatggcactgtatttgtatcaaattccaatg

SEQ ID NO: 5418 - DNA, 191 bp, Glycine max
  unsure at all n locations
  Clone ID: 701002563H1
ccggtgctgatatcatcctcacatattctgctctgcaagctgccagatgtttgtgtggagagaagaggtgaagttctctgattatgcagggcgttgttcatgtagaaggttgaagagtttanaaancccagtnccggngntncgggnnntcnnaaaattttaaaagggnccccgcggtttntcnaaaanga

SEQ ID NO: 5419 - DNA, 257 bp, Glycine max
  unsure at all n locations
  Clone ID: 701002565H1
gnctanatggnggagaanttggnancagcngaagagagctctaattacaaagtgcttttacaccatacgggcgacgaanctcgtngtnntngcagncctcaangtncgnngcctcccgangncgnngcngnagaagtggattcttgcnncttgntcncncctccaccaattaccattttgggaaatgatgaaaacagtcaagataaaanttcgttgtctaaagacactgatagcantgaaggtgaaagtaaaaattg

SEQ ID NO: 5420 - DNA, 256 bp, Glycine max
  unsure at all n locations
  Clone ID: 701002566H1
taacgctgaagctgcctcatacgttgtctcagtcttcacntcctcatacataccatcanacatagtttcctacgaggtttctctcacgtaccctttgtcacgttcgttggttctaataacgaacccttctacaaccttcactcctccancaaganacctacgagggtgatccttatgctgacgtggcagatgaggttgtccccaatttccacgcgtatgccaagtncaggcactgtggctgctcctgtgtgttatg

SEQ ID NO: 5421 - DNA, 251 bp, Glycine max
  Clone ID: 701002567H1
cagtcatttagccctcatttttgcaggttccttcaatgggcagcctgttctttttggcatccattttgcccccttttaaatggctgcatatctgagaacatagctaccgggttctggagtgtaggaatctttgttactggtgttggcacctgatgtttttagctcagctttgcattggttttgccaccatgtgtgtcttagttttctaagtttttacagctagctgtaccactgtatcagtcttgtttacc

SEQ ID NO: 5422 - DNA, 217 bp, Glycine max
  unsure at all n locations
  Clone ID: 701002568H1
tacaattccnaatgattgtggttcnttggangttgccaaagttggaaatcncaaacaaattgtnggtttccatgttgctggaagcanaggaagactgggatatgcttcattgataccatncgttgagcnagttntgnaagctcanaagtgctgangtttactttncatncctccccngggagagnntnnacacnccacaccggnagntacacanntc

SEQ ID NO: 5423 - DNA, 232 bp, Glycine max
  unsure at all n locations
  Clone ID: 701002569H1
gaggaggtctacaacccagaaaatacttcaagctgcaattnnagaagaggaagcacctgtacctgaggttcttgatgaaattcctgatgattcncagatggtagctggattggcntctcaaattgaagaagttccaaagaagtcttntgcttatattgtgaaggncatgnnagagggtgctgcgccctcttccacgtgacacctntttctnnnnaancngcccanaagagcc

SEQ ID NO: 5424 - DNA, 250 bp, Glycine max
  unsure at all n locations
  Clone ID: 701002571H1
gattagtaccttataacaccgtggggtttgcgtcaagagttgaataaattcaagctcctttatgggaatcctcctatatttattcatgaaaatggnnnnnnnnnnnnnnnnnnnnnnnnnnnnnnnnnnnnnnnnnnnnnnnnnnnnnnnnnnnnnnnnnnnnnnngngtgggtntgttttcccctcctatgaccccctcccaaatgacagtgttacataatgacaaaagtgagtaacagttgaagaaga

SEQ ID NO: 5425 - DNA, 253 bp, Glycine max
  unsure at all n locations
  Clone ID: 701002572H1
gttcctggagagngaactagagttcctatgtataaacagagatagtttagaagggtctaatgggtctagtctacttccaaaaaatgtaaaaagtcaccacaaagtggaggtaaaaatgagtttcggatgaacaatattttaggcnataataggtcataatatcnaaaaaataatgtccaaatgtcaagtataattgtaaaatcttatganatgtccaaacacttttatccaagtagncgtgtccaagtnaaac

SEQ ID NO: 5426 - DNA, 254 bp, Glycine max
  unsure at all n locations
  Clone ID: 701002573H1
gtnanattttatccaattganattttaaaaatgactgggataaacttnaganttcaattattganattgaataagtaaacantttaattggattggtcgantggtatcaaaaaantggagtactaactcccatttcttatttnntattganttnnccgatcaccttgcttngttatncgacacattnccnntntgattncaaaattnncnggaaaantttgantctntttttacangcgaancaatcctactcc

SEQ ID NO: 5427 - DNA, 253 bp, Glycine max
  unsure at all n locations
  Clone ID: 701002574H1
cggagtagtcggaggaaaaacttgaggaatttcagggaaccgctagagatgccgctatacgttgtcgaaagacatgtgagtccgctcagaggttttagtgcatgctgctgatattttcacccatctaccagttttcggaaagttgactnctgcaattgatggggttacnggtgaaccncngtnancctctccccnaaattccccctnntnnanaatcnnctggncnacncaaaatggagcnnncccnnacacc

SEQ ID NO: 5428 - DNA, 250 bp, Glycine max
  unsure at all n locations
  Clone ID: 701002575H1
aacagcttgtttgtatgacttaaatttagagatgcttggccacccagctcatttaaggtgcttcaacagcatcatctgcatcaatatcatcgtccttaattgtggagacacaacatcatggattctcctttgttgtcacaagaccatgttttgcccaacaaacacacatggnagatgagcctttgtgctatcgtggctatcacaattgttggactagtagtccagaggcaacactagcctatggatactg

SEQ ID NO: 5429 - DNA, 251 bp, Glycine max
  unsure at all n locations
  Clone ID: 701002576H1
gtttttacaggataaaaagtcaatccagttggggcctgaagacaatttatatctcgagggatttgctttgaatgtgtttggnaaagcagacaagcaagatcgtgccggaagagcagatttgtattataaaataacttttttcntttaatggctagcttgnnatanatnaataantngccttaagcttgtntgcgggtcccgtgccaccnccggnatcccccatggtctccntnaagtttncnngggcttnc

SEQ ID NO: 5430 - DNA, 253 bp, Glycine max
  unsure at all n locations
  Clone ID: 701002577H1
tcacatccagaagatcgtccctgctgtggaccgtaacgccaacccttacatgttcgttggaaagaatctcctcgcaggtggtatagccggaagcattacttcttgtattgtttaccccctggactttgctagaactagactcggagtcgatgtcggnanacaanccggcnagagacanttcaccngngntcagggntnnctntggaaaaacgnttcccacncnagggcntaaagggnnccaannanggggggc

SEQ ID NO: 5431 - DNA, 253 bp, Glycine max
  unsure at all n locations
  Clone ID: 701002578H1
gnaagcttcattnttttcccttccttcactcttttccagttttctactttccttcttcttcttccttccttcactcgtatatcacttccttcctcgtttcgttaaccttctaattcaatccattcctcactnccttttaaccggangcttttcccngaaaacngcngagagaaagaaaggggatggggggaacnnanccngggggggtttnaananggcccccggggggggctnnntngcccccccccccccc

SEQ ID NO: 5432 - DNA, 256 bp, Glycine max
  unsure at all n locations
  Clone ID: 701002579H1
gncacaccccattgctacatagggctatatagcataaacatttgagtcttcattgcacaatgtcaacctcttccataaacgggtggtgcntctcttccatctccccagccaaaacctctctcaggaaggccacattacgcccttccgtcttcgcaacccttaacactccttcttctcccgacccaacctctcccccccctcatnnaaanaacnggggttttncngcnccncgcccnaanaananancaannggggg

SEQ ID NO: 5433 - DNA, 254 bp, Glycine max
  unsure at all n locations
  Clone ID: 701002583H1
ggcaggtggttctattcagcaatcaaactctcttcttcgaccacaatctacttctgatgtaggaatacaatccggaatgggatatatgactgctcaagtttcaaggccatccaacatgtcatctctaaagagagctgcttcccaaccactgtcatccnttgtcccagaatcaacncaggaagactctaccaaatcggtccanactccatccattnccaantgggannaanntgggccccanagcncccaaaccc

SEQ ID NO: 5434 - DNA, 251 bp, Glycine max
  unsure at all n locations
  Clone ID: 701002584H1
ggcgttgccattctcatcctcttctttctctctctaccattgccatggatccctacaagcaccggccatccagcgccttcaattctcccttctggactacaaattctggtgctcctatttggaacaacaactcctctttaaccgttggagctagaggtccaattctgctggaggattatcatcttgtggagaagcttgcaaattttgatagggnncgnatcccngaangtgttntccatgccagggcgctc

SEQ ID NO: 5435 - DNA, 255 bp, Glycine max
  unsure at all n locations
  Clone ID: 701002585H1
gtacaataccctcttgcttcgaaatgccagcgtacttgttcttgcagggaaacagtcttaccggcacgatacctgangcattaataagcaactactcccgaccaacggccatagattttagtgacnacaagtttattggaactattccagatagcatatntanncccttggnnttnaagatttttttattggnaggtnatcagttgcaaggccanctttccagtgcaggncntnccacctcgagccantcantcc

SEQ ID NO: 5436 - DNA, 251 bp, Glycine max
  unsure at all n locations
  Clone ID: 701002586H1
tncagaactagctggagatcggcgaaggacagttatgaggcctcctcaagttcttcgtgagggcacaaagaaaactgtgtttgtcaattttatggatctatgcaaaacgatgcatcggcagccagaccatgtcatggctttcttgcttgctgaattgggtacanntggctcccttgatggacagcagagattggttgtaaagggaaggtttgcaccaaagaactttgaaggaattctgcgacgatatgtca

SEQ ID NO: 5437 - DNA, 251 bp, Glycine max
  unsure at all n locations
  Clone ID: 701002587H1
agcaccatcgtctgttctctctccgtacttcattcaggcacatcatcttcttctataacattaanccagggtcgtctccaaaaatgctanctctgcgtccacaagcacaagttggaggactacaaacatcgctgtctctggtttcctcagaccctctcctgtctcctgatgaacctagatcaaactccaacaatctccatgantctccggctgaaagtgncaagttctcaggnaacttggcctactgctga

SEQ ID NO: 5438 - DNA, 260 bp, Glycine max
  unsure at all n locations
  Clone ID: 701002588H1
gnatttcgatatgcaagantgatcttgtccctggaatcgnaaaaatgtgattacctgctatgngatgaaattctatcattcatgnatttgcagaanatttcgatatgcangaatgnccctgtgccctgaaatcgaanaaatgtgattggctcnatgagatgncttcctatantcatgcatctgcnaaatgtnagtatgccngagtgacccggnnacnggaattncccaantggngngtgcctcaccngagannaaatnnc

SEQ ID NO: 5439 - DNA, 254 bp, Glycine max
  unsure at all n locations
  Clone ID: 701002589H1
ttcattcaacatttctctctcccttagctagtttttaccaatgggctgctgcggttagtgctgcagtctcttttccatccaccaagtctacctctctcccaagcaggacctccatcattaccccagagagagttgtattcaagaaggcttcattgcaatacagagatgtttntaccagtggggggttgtcctccatncnagctcaagncancanngaggccccagcganggtacnaacaagngncacaagancc

SEQ ID NO: 5440 - DNA, 249 bp, Glycine max
  unsure at all n locations
  Clone ID: 701002590H1
cttattgaggaacttgctgatttaagcaaaggcaagactgccacgggtaggagataagattttgttggaagctgtgtatctatccaaatatttctacttcttcaaatattcttctttctcggatgcgtcatncttgntnacacntttacnggggnccgcnaaccacctctttcncnnggggngggatnaaatngtgntggtggaggttgtttatttncccttggaaacaggnnatgaagagcagangcc

SEQ ID NO: 5441 - DNA, 251 bp, Glycine max
  unsure at all n locations
  Clone ID: 701002591H1
tttcctctcagggaagaaaagattctacaggaagtgccgattcttctaagccttcaaagcatgtcattgagacagctgcgccctttgaatctgtcaaagatgctgtgtccaagtttggaggaagaattgattggaaatctcgtcgaacccagagtctggtggaggagagaagcnagctcgtagaagactttagaaaggaaganactgcagaggattgganaacactaagaagcntatagaagaatcaaaac

SEQ ID NO: 5442 - DNA, 255 bp, Glycine max
  unsure at all n locations
  Clone ID: 701002592H1
ggntgagccgggccccggtctgaaanancnnctcaacctgagggaaaagcttgtgctccttcaaccctaagtaactactcgcgagaatcttaaaggtggagaaatcacataaggggnagtgtatgtgcacgtcaatcttcccaggcctccnancgcttgatnaactncctcttagtttcgttcatcgggaacaaccatacggggtnntnntcngcanncacgctcacnantccggncnntnaattcaaacacccc

SEQ ID NO: 5443 - DNA, 254 bp, Glycine max
  unsure at all n locations
  Clone ID: 701002593H1
aagattgcacaccggttcatattgctttcgagccaaagaagaaaccgtttnccgtgattccattgtttcattgaactaaaatttgaaaancaaaacaaaagagaatttcaatggcggatgatagtaaccgcctcgtgaggctgctatgccgcccgaagccactcaacaccaaaggatccgacccgggaatccattnctggcttatcggatccccattcttcccggcnattnacggtggcncntncccnngggnc

SEQ ID NO: 5444 - DNA, 201 bp, Glycine max
  Clone ID: 701002594H1
cctggcatcggatccagatccaaatccagtttaacaaagaaaatgcagtacaagaacctgggccgatcgggactgaaggtgagccagctctcctacggggcgtgggtgagcttcggtaaccagctagacgtgaaggaggccaaggccctcctccagtgctgccgcgaccacggcgtgaacttcttcgacaagccgaggtcc

SEQ ID NO: 5445 - DNA, 253 bp, Glycine max
  unsure at all n locations
  Clone ID: 701002595H1
cgtgatgcagtatggtgacatagggcttagcgagaacaatctcgtcttatatttgggtacaaatcctgctaatgataattttacttttgtgcttaaanactcattggtgccaccttcaaaagcgtcanccacgtgatgcagatctcaatccattttngggnaagntncgcaaaaccccctgngggncctnctanganacnccccctgngnanaacnttnnnncccccccccccccancanancgnacnccnnc

SEQ ID NO: 5446 - DNA, 245 bp, Glycine max
  unsure at all n locations
  Clone ID: 701002601H1
aacaggtgctcgagtttctaatgatgaaatcttaggatttgccaaattatttaatgatgagctcaccctgcgataacattagcaggcctcgcttggtaaatatgtgtaaatatatgggcatcagcccatatggaactgatgcatatttgcgttacatgctccgcaaaanattacaggagtaagattcatttattcatttncccctttctgtnaatctggttcttcnctggtaanttncatttcac

SEQ ID NO: 5447 - DNA, 162 bp, Glycine max
  unsure at all n locations
  Clone ID: 701002602H1
ttcagatgcgaatctgtttttgagttttgggacaaagttagttactgctttactgtagaattgatntttatgttgacgacntggcactgaggccttttattnatttttanaananaaacnnccantcnaacngnnaaaaaaaacnggncgcncccctgnnna

SEQ ID NO: 5448 - DNA, 241 bp, Glycine max
  unsure at all n locations
  Clone ID: 701002603H1
gtttagttatcttactcttttctgcatgtttgttctctcaacgactcctccgcgaaagagtattattcaatattttggttgggttgaatcccggggttgaagcgttgcagacatcacggctattctaagagtgtctcgctccctcattcatgtcccgatctgtacgacggaggacgggtagttgcgtaactgccgttaacccttcgccgcacggtgggcgtggtgnttgccttctgaaggt

SEQ ID NO: 5449 - DNA, 239 bp, Glycine max
  unsure at all n locations
  Clone ID: 701002604H1
cngaaagccaaatcatgaagtagccaaagaagttgaggatggcaccaatggcgaggacaacccaaggtggagcgaccttcgttgattgggcctgagatgaccccaacgttggtgcccaagtccttgaagaaactgaggagattganagtggtttggtcgtaaccgagggttgttttgatgtccgctggaatagagaccgaacatgtaggtggctccagcggcggccagattagaaagga

SEQ ID NO: 5450 - DNA, 237 bp, Glycine max
  Clone ID: 701002605H1
tgggggcatcagcatcatcggtttggtataatgtgagagtgccgcatccaacgaaagaggtgcccatattagactatgatctggctcttctgttccagcctatgctcatgcttggaatcactgttggtgttgctctcagtgttgtcttcccttactggcttatcactgttctcatcatcattctcttcatagggacttcttcaaggtcattctttaaaggaattgagatgtggaggg

SEQ ID NO: 5451 - DNA, 245 bp, Glycine max
  unsure at all n locations
  Clone ID: 701002607H1
tnatgatnttgtaggttgacttggtttccacaattcacatcgctncatgaagagtattttctggcccttccaaaaggaacttcgngagctatgattgtgtgctttacgaaatggtagctagcagggaaagtttagaaaatanangnaatgctactactcacnaaaaggttaaaaagttcacgcacaaggggttttaacattttgggatgcatccaaagnccgatggatcgaattcttcacactgc

SEQ ID NO: 5452 - DNA, 243 bp, Glycine max
  unsure at all n locations
  Clone ID: 701002608H1
ttcctttctttcctttccgaaccttcctcgtttntgatgntttgaccttcttccaattgattctctctctctgctctctgggttctctggcatcaaagttcgtacctttntgtgatttggaaggatctgatgccagtttggttttctggggtggctgtgttccttgtcccactttccctctttttataggatacttgactaattgaaaaaattccttntgtttctcattgttcatattatagt

SEQ ID NO: 5453 - DNA, 242 bp, Glycine max
  unsure at all n locations
  Clone ID: 701002609H1
cttgttcacccttcttccctttctcacttaccactctcccccttctttccaaaacactccctttccctttctattcacttcccctacccttccgtgatgatgtagatagagaataaaaagagaccagtgtgcagtgagaaagagattgctcacttcttgtgtgggtttgttttgttctttgtgttggaatttgttcatgggtgaagaaggagaagaggtgtcaanngagaaggaacaataca

SEQ ID NO: 5454 - DNA, 216 bp, Glycine max
  Clone ID: 701002610H1
cgttctcgccatgccaatgttgtcttcgagaggcttcatcgcttatctcgtatctgctttctcttgtgctgttctgtctgcgctttttcctcaccaaccacatccatcatgatgataacaagccaattactttgttagcctctcgtgtgtctgaaactcttaaagtttggccagacttggagccaagttggagacttgtgttggcaaggttattgg

SEQ ID NO: 5455 - DNA, 242 bp, Glycine max
  unsure at all n locations
  Clone ID: 701002612H1
attctctctgtgtatttccctacctcctcccttcaagatgcagatcttcgtcaagacnntcaccggcaagacnatcacccttgaggtggaaagctctgacaccatcgacaacgtcaaggccaagatccaggacaaggaaggaatccccccggaccagcaacgtctcattttcgccggaaagcancttgaggacggncgtaccttgctgactacaacattcagaaggagnntactcttcactc

SEQ ID NO: 5456 - DNA, 103 bp, Glycine max
  Clone ID: 701002614H1
ggcacagctaacggagtcaacggtcattgatagagtttttgatgatgattggaagtcattgcttcctgtcttttggcaattgtacaacatgcttttccgtttt

SEQ ID NO: 5457 - DNA, 246 bp, Glycine max
  unsure at all n locations
  Clone ID: 701002616H1
ggcagttgtgatattagancttgttcttgctaatcttcttcattcctttgnttggnaattgccacaagggatgataaaggaagacattgatgttcaagtattgccaggactcacccaacacaagaagaacgatctttgtctttgtgccaagactaggagccatatataactactagatggactttgtgatcaanataatanaataatgcatgtnataatgttctatcaaganattttnatgtgcta

SEQ ID NO: 5458 - DNA, 243 bp, Glycine max
  unsure at all n locations
  Clone ID: 701002617H1
ctggacagtgntctgaatgtcaaagtgaagacattcnaccaagcgccgggtaaacggcgggagtaactatgactctcnntaaggtagccaaatgncctcgtncatctaattagtgacgcgcatgaatggattaacgagattcccactgtccctgtctactatccagcgaaaccacagccaagggaacgggttggcggatcagcggggaaagaagaccctgttgagttgactctagtccgattt

SEQ ID NO: 5459 - DNA, 240 bp, Glycine max
  unsure at all n locations
  Clone ID: 701002618H1
tgcaagtgaagcaatggctcaaaccatgttgctcatgtctagtgtctctngcagttattccgtggatttgaagaaagaccttttcctccaattgcagagtccaaagtttaaggctaagttctctcaactctcattcaacccacttccaccatccaacttcttccttttnttcacccgtacattcacaaccgggctcncttcnaaatnnaannnaaaccccgctcctgcnaananggggnc

SEQ ID NO: 5460 - DNA, 239 bp, Glycine max
  unsure at all n locations
  Clone ID: 701002620H1
taatccagaagcacatactttttctttaaaatttagtcaagatataccaccaaccccagggcaatcagttaaggaacccacattncattcctgttgcagtgggtttgcttgattccatgggaaaggacattcctctttcaactgtttaccataatggtactatgcaatctgtttcaagcaatgatcaatcagtctgcactacagtccttagagtgaccaaganagaggaagagtttgta

SEQ ID NO: 5461 - DNA, 177 bp, Glycine max
  Clone ID: 701002621H1
tggttttacatggatcacttgttagattagtagaaacttcaatcttgtgtttatgcaggcatatgtgcattgtatgaaaggaaattgaaagagttaaatccggccatcagaaatctctcttatgatattgtggatctctacaacttcatagatggtctgctgacatgagtgctctag

SEQ ID NO: 5462 - DNA, 241 bp, Glycine max
  unsure at all n locations
  Clone ID: 701002622H1
ttttcactcagccgctgcgaggcgaacagagagacccgaagccagatttcaagatgaagttcaacattgcgaatcccaccactggttgtncagaagaagctggagatcgatgatgacctgaagctacgagcattttgggacaagaggatctcacaagangttgttggtgatgctctgggtgaggaattcaaaggctatgtcttccaaaattactggaggttgcgacaagcaaggatttcca

SEQ ID NO: 5463 - DNA, 243 bp, Glycine max
  unsure at all n locations
  Clone ID: 701002625H1
cttcttctatgggttggcttagtcggttcataactgcccgtggctttcttagccatgcggagtgatattctcaccggagacactggggtcaaaatcaaccacactttccacctaccttcaaactcgntcacctcctctgcttctccaccgccttcggcgccgctctgtgggtaacattcatcggcggcatcatcatgtttaanaatctgccgcggcatcagtttgggaactgcaaagcaagat

SEQ ID NO: 5464 - DNA, 232 bp, Glycine max
  unsure at all n locations
  Clone ID: 701002628H1
caccattactgatggtattgacaaaactagtgcaactttgcaatttaganagttagcagattgtgattttctcaagagaaactttaagcagatgtctaatgttttgtgggtggctcctgaggataaggcgagtttatggtcacaacttcattatgtttcgtgtaataatctggaaatgcaagaagcttatcttgtccaatctcgtaaatgtgttacgagaatgtatttgcac

SEQ ID NO: 5465 - DNA, 242 bp, Glycine max
  unsure at all n locations
  Clone ID: 701002629H1
gngaatgaacaacttgcattttgccctgccattgtggttcctggtgtatactactcagatgataagatgcttcagaccaggatattctcttatgctgattcacaaaggcacagacttggaccaaactatctgcaacttcctgctaatgctcccaagtgtgctcaccacaataatcatccatganggtttcatgaatttcattcacagggatgaggaggtcaatnactncccttcagggnaga

SEQ ID NO: 5466 - DNA, 235 bp, Glycine max
  unsure at all n locations
  Clone ID: 701002630H1
ctcaaaaatcagtntattntccnttgttcantcaattactcttcttnnttcncttcnttcnttcnttaaacccantcgaagaaaaataaaatgttgttccacaatccaccacataagcgantgaaaaaaaaaaactcagtttgggggtttattatactttgatngattaattaattattggttattggttagtnggttaatcaatggaagagtgtcacagggtgttcggaaagta

SEQ ID NO: 5467 - DNA, 239 bp, Glycine max
  unsure at all n locations
  Clone ID: 701002634H1
gtanacncccaagagtactanctccatctcttctgcctgaacaaaccgatctcanttgggnnaatccannaactcgacaagncatntacaagtccgctatgganttttngctanagcgtggtgtcgttggntncccgagttganncngtcaacatnnacagtaagggtgngatgtagacgccccagtccatgntnccaggttgncgaatggcattngntgnacaccagtcnctggaggg

SEQ ID NO: 5468 - DNA, 234 bp, Glycine max
  unsure at all n locations
  Clone ID: 701002636H1
acatttgctaacgtgtttcatgtctgattcccgttccttcaaagccgttgtgcttcacgatgttttcttatttgaatgtttggnttgcgcactgttgccacaaagcgcaaacatgctgctttcaaaccatgttacttgacaactcttttctctaccggctggaccgaagttaatattcattccttaaacaattgtacccatcagtctcgtacaccggactttacgcttccgata

SEQ ID NO: 5469 - DNA, 237 bp, Glycine max
  unsure at all n locations
  Clone ID: 701002637H1
gttattggctcaagggtccccaacacaaagatttcctctggaagcttcaagattgttgctgtagaagagaagaaaganattgaagagacccagcagaccgacaaggacagatggaagggtcttgcctatgatatctcagacgaccaacaggacatcacaagaggaaagggtttggttgactcccttttccaagctccacaggatgctggaacttcatatgctgtccatgagctccta

SEQ ID NO: 5470 - DNA, 236 bp, Glycine max
  unsure at all n locations
  Clone ID: 701002638H1
tgagcctgagcctcaaccacaacaacagaactcacttttcaccaacccctccatgtcctactcatcatcttccgcaaactatgggatatgttccaatgaactgtcaccaacttggtccaaagtttcttcccttcccaaaccctccaatgccaaagcaacagctcagtggattgcncttttccaacaacactgctttctggaattcttcagccgaagcacttaatgacataaganca

SEQ ID NO: 5471 - DNA, 158 bp, Glycine max
  unsure at all n locations
  Clone ID: 701002640H1
ctgtggaatgactggtgatggagtgaatgatgcactgcatcaagaaggccgacatggtatagtgtgtgtgaatgatgagtcgangactantgttacagactgctaggtatatatgagtgcagcgnactcanataatacatangccatcacgagatgta

SEQ ID NO: 5472 - DNA, 241 bp, Glycine max
  unsure at all n locations
  Clone ID: 701002641H1
gtaaaggattctacccgccgctcgatgngaattgcgnttcaaggcgtctcgtatggctaatnncgcctcangagggtcaccaacggcacgtgcctttggnngggccgaggccccctactgctggtccggcaaacggacggcgggcgcacgcgtcgcttctagcccggattctgacttagaggcgttcagtcataatccaacgcacggtagcttcgcgccactggcnntttnacnaagcgcg

SEQ ID NO: 5473 - DNA, 237 bp, Glycine max
  unsure at all n locations
  Clone ID: 701002642H1
tngaattcccatacccccaccaccaggatctcagttcactcctgttccagttccgcgaccttatgttcctctttctgttccaccatcagttatgcctatgatgcatccaccacctttgcctcaaggattgccaccgccaccgccaccagaggaggctcctcctccactcccagaagaaccagaaccaaagaggcagaaacttgatgattctgctctgatcctgaagatcatttctgg

SEQ ID NO: 5474 - DNA, 240 bp, Glycine max
  unsure at all n locations
  Clone ID: 701002643H1
gtnagccctgttgtagtgtcaaggacaggattggttttagtatgataaatgatgctgngcagagaggagctataacacctgggaagagtatattggtggaacctactagncggaacacaggaattggtcttgcctttatagcagcttcaagaggatataagctaattttgacaatgcctgcttcaatgagtttagaaagacgggttcttttgaaagcatttggggccgagcttgttttga

SEQ ID NO: 5475 - DNA, 243 bp, Glycine max
  Clone ID: 701002647H1
tgggagagttggaaagtggaaatgcaggagagccagcaaagttgataaggcaaaggtaccgtgaagctgctgatataatcagcaaggggaagatgtgctgtctcttcataaacgatcttgatgcaggagctggtcgtcttggtggaaccactcaatacactgtgaacaaccagatggtgaatgacaccctcatgaacattgctgataaccccacaaatgttcagcttcctggcatgtacaaca

SEQ ID NO: 5476 - DNA, 243 bp, Glycine max
  unsure at all n locations
  Clone ID: 701002648H1
gataatagccagttgtctgtatgatttgcagccaaaagaattatggagtacagcttttgaagatccaactcccatttagaaaagattganacaaaatggagcactattttatctaaagtanaanatattattatcaagaaagcttctgatgagatttggaaactgcaaacactttgctcagagcttgctataatttttaccgggagagttcttctgtagtgctttacctctggactcaacttt

SEQ ID NO: 5477 - DNA, 241 bp, Glycine max
  unsure at all n locations
  Clone ID: 701002649H1
anaatatatttttccgtaatctgaggtgcaacaaagacgatattagttgttgaatatggcaaaagcacacgtgctgatcttccctcttccattgccaggccatttaggctccatgntcaagctcgccgagcttcttgccctagacaatatccacgtcacctttgtcgataccgagaacatccacattcgcctnactcgtttcggggacattcaagaactctcagaatggcnaccccacgct

SEQ ID NO: 5478 - DNA, 236 bp, Glycine max
  unsure at all n locations
  Clone ID: 701002651H1
ttcaaaaagtgctgaaggtatagctaaggattccaaganagctgaagatgggaaaactaagcagtcagagttcaaatctgatgaggcagaggataaagctactgaaggtaaggatgctgcagaagaaagcaatgcaaacaaagagcatactgaaganaaggaaagttctgatgacaaatctgaggtagataaagancaaaaaaaggatgtcatganagtggaaatgagggctaaga

SEQ ID NO: 5479 - DNA, 183 bp, Glycine max
  unsure at all n locations
  Clone ID: 701002652H1
tnaacacacacatagaaacccaacaacaagaatgaagaagatgatctaaccctcttcttcaatatcattttatctctcctctccctctcccacgctcgtggtggatttctgcgtngactacnagccatggccgagtatcagaggcagaagnagtgagattgtttcgctgacgcgacataaana

SEQ ID NO: 5480 - DNA, 233 bp, Glycine max
  unsure at all n locations
  Clone ID: 701002653H1
tggaatatggtccaaggtgaggnagcagttatttgggctcacagaagctgtttactctggttatacttgttatactggcattgcagattttgtgcctgctgacattgaaactgttggataccgagtattcttgggacacaaacaatactttgtatcttcagatgttgntgcgggananatgcaatggtatgcatttcacaaagaacctcctggtggtgttgatgagcccacgg

SEQ ID NO: 5481 - DNA, 236 bp, Glycine max
  unsure at all n locations
  Clone ID: 701002654H1
gngacgatctaggttttgtggatatagcacttattccattcgacacttggttcaagacttttggcagcctcaacatagagagtgagtgccccaagtttgttgcttgggccaagaggtgcctgcagaaagacagtgttgccaagtctcttcctgatcaacacaaggtctatgagttcattatggacataagaaagaagttcgacattgagtaggttcatgttggattttaatagcca

SEQ ID NO: 5482 - DNA, 247 bp, Glycine max
  unsure at all n locations
  Clone ID: 701002655H1
cacactatggatgtttggtcatggatatgtgagctccccaactncggtggaggggaccgagtcccacttcgccacccatgaagttcgaaatcgcgagtgagaagaacgacgacaagctggacaactcaactcgttccattcacctganagctgagcgaaccttccggctncagactncggaagctgcggtgatcttcaccgtatgcttgcaaggcttccattccacacaacgctncacaanccctct

SEQ ID NO: 5483 - DNA, 240 bp, Glycine max
  Clone ID: 701002656H1
atgtctcagtttgtttcagctccttcaaccttcaatcaccacctatgcaagttatctcttccatgtgccaacagcaaaacttttctgattcaaacggcaacactgtgactactattgtttctcccctgcacagtatcttgggttcttttccccaggatgaaacatctcacctcctgaaccttcctagaacaagctcttggattcctgttcaaaattcaagtgggtggccctcgaagcgtg

SEQ ID NO: 5484 - DNA, 163 bp, Glycine max
  unsure at all n locations
  Clone ID: 701002657H1
cggacaangccgccacgttgcgcaccgaggaggagctgatgtcatgtacgagagtggtctgaagcacggaagttacaagcgtcgcagagggagcgtcagttcaggcactngtctgacgcaatcggagacgactnantgatacgngtntnacggatcggcattg

SEQ ID NO: 5485 - DNA, 155 bp, Glycine max
  unsure at all n locations
  Clone ID: 701002658H1
gttccaattgatgcaacgttnaganagtatacaacacattttatagtgcntaagccaatnactccatcactggncatatgacaagctgatgagagtgntgtggggctganngcgnnagcgntcatgggnncaagtcaagagtctnctgattntcg

SEQ ID NO: 5486 - DNA, 241 bp, Glycine max
  unsure at all n locations
  Clone ID: 701002659H1
gtctctagcagttattccgtggatttgaagaaagaccttttcctccaattgcagagtcaaagtttaaggctaagttctctcagctctncattcaacccacttccatcatcaacttcttccttttcttcaccccgtacattcacaactctggccctcttcaaatctaagaccaaagccgctcctgctaagactaaggttacaaagccaaagcaaaaggttgaagatggtatctttggccatt

SEQ ID NO: 5487 - DNA, 243 bp, Glycine max
  unsure at all n locations
  Clone ID: 701002660H1
atcaccattnctagcttngccattcctcaaggcatcagttnncgccaagctagncaaccttccctcntgtcncttggactttattcgagctttataaccgccattgatctatgcaatgatgggaagctcaagggatttggcagtgggaactgtggctgttggatcgcttcttatggcctccatgttgggtcgagtggtcaatttcaacgagaacccaaaccttttcctccacttggctttcac

SEQ ID NO: 5488 - DNA, 177 bp, Glycine max
  unsure at all n locations
  Clone ID: 701002662H1
acgttgtttacccacgttgtcacacttcactgaccttccctttgagcataatcatcnacaacactccaacaccgacgctgaagatggcgcgcatgttcccgacgccacacaattggctaacgaatttcaagctccaaggagacaagcttgctatggatgggaagtaccgggaagcac

SEQ ID NO: 5489 - DNA, 245 bp, Glycine max
  unsure at all n locations
  Clone ID: 701002663H1
tngcgttggagcaagcagtatcatcgtcatcaagcacattgaggaacgttctcaccttccccaaaaccctaattttcaaaaccccaattccaagttcgctgcttctcccttcatggaaaacacagcggcgttgggggaattgaagtgctccatgacgacaacgccatcataccctaagccctcggagattccgtggcagaaggagctctgcaactccgtcaacctcatcggcaatgtcgcggccc

SEQ ID NO: 5490 - DNA, 242 bp, Glycine max
  unsure at all n locations
  Clone ID: 701002664H1
gnagctgtttcggattcccaggaatagaatgggcagttctaaattaacatagttcgcatatgtgctgttaatttcttcntatattgagataattttgtgttganggtagggagagttgctttgcatgncctgaaaattttgtgctcatgatcttgtcaaagacaaagttaattattcctatagcaattgctatatgcatgtcacatagttttgcaagtcaattcaatattatgaataggaaa

SEQ ID NO: 5491 - DNA, 241 bp, Glycine max
  unsure at all n locations
  Clone ID: 701002665H1
gtctngttagtanccngncntacatctgtcgcaaatcgganntgtaaacctttgnttccactatnttcaacncctcnnttangtttcantgncagcaatctctccggttctttaccttcacggaattccaaccantaatttcgatgactgaatcgtaaagancaccgaacagtttcaaaaccatgggngaggacgccaattgaagagatggngggaaacaacganatccatgttcgatgcc

SEQ ID NO: 5492 - DNA, 151 bp, Glycine max
  unsure at all n locations
  Clone ID: 701002666H1
tttactagctagtagctagagagtagagaacatggagggcaaggttccggagagaagagttggtggtgaatctgacgaatgagagatccagatgtctaattnagattggtgnaaccgatgnctctgagtattctgagaacannaccagctg

SEQ ID NO: 5493 - DNA, 218 bp, Glycine max
  Clone ID: 701002669H1
cgcaccagaacatgtccgagcaaccacaggttatctcatccctacccgacagcgactgacaccgtcgaccgccggccatcgtacccagacgacatgtccaccactagcagctctcgtcagtgagcgaccaggatcagcccaagagcgacccagctgcaggtcgacccgtttgggagagaaaatcagcggcacatcacgtcctccgacaccccaacatc

SEQ ID NO: 5494 - DNA, 115 bp, Glycine max
  Clone ID: 701002670H1
tagatgctaagtttgagatgatcttactatatttttcatattggaccgtcttcctctataattttgagttacagtgtccacttaaattgaatttggtgccttttccttttgtcct

SEQ ID NO: 5495 - DNA, 240 bp, Glycine max
  unsure at all n locations
  Clone ID: 701002671H1
ggcattattgtaggaccataacttctgttatggaatttgaatcagactggataaagcacagaaagtccatcttcttataccgctncatgttattcgttccgcgacatcttttatgccttggtcttgtagaatcccaattggtgatgggtatcatgaatttctttagttagttgtactcattactcagtnagacatttncncattgtttggttgattggtcgccactcgnccaacaaaatt

SEQ ID NO: 5496 - DNA, 237 bp, Glycine max
  unsure at all n locations
  Clone ID: 701002672H1
atatctcagacgnccaacaagacatcacaagaggaaagggtttggttgactcccttttccaagctccacaggatgctggaactcactatgcagtaatgagctcctacgagtacctcagcactggacttcgccagtacttggacaacaaaatggatggattctacattgctccagcttttatggacaagcttgttgttcacatctccaagaattcatgaccctgcccaacattcaagg

SEQ ID NO: 5497 - DNA, 238 bp, Glycine max
  unsure at all n locations
  Clone ID: 701002673H1
ctcatgctattttcagtcctctcttcatgcaagantgctgcancctcagtaatggtagatgatatgatccgacactgctgggaccattgctgagggtgcagcactcttgncatgaacgtngggctagggaagtgtatgcatgctgcactcatgctatttcagtcctcccagcaattgagaggttgtccagtggcttgnnccacgnggtgattatcacaaacaccattccagttgngga

SEQ ID NO: 5498 - DNA, 239 bp, Glycine max
  unsure at all n locations
  Clone ID: 701002674H1
gtctcantctcaatccaccagaaatggcaacaatagttagccaccaccaccgcctattctccgccgccacgcgctttcaattccactggcagagactcgnngcggcaaaggagcggcgcaaactcggtccggtgcgctgactaagcacggtcacgagcgagaatcagcgagtgacggtgagtaacaggagncgattncgctggagatatgccgcgtgctgaacggaatgtggcagacca

SEQ ID NO: 5499 - DNA, 240 bp, Glycine max
  unsure at all n locations
  Clone ID: 701002675H1
gtaatggatgaggantatcaaggnaatnttgangctactggagaggattattccgtggaacctgntgagnagcangagggccattcccgtgtctccttgatgttggtncttattaggactacaaccggtaaccgtgtgtttggtgcccttaagggagctctggatggggggttggatattcctcacagtgataanaggtttgctgggtttgataaggaaaagaaggagcntgctgctgnc

SEQ ID NO: 5500 - DNA, 244 bp, Glycine max
  unsure at all n locations
  Clone ID: 701002676H1
ttccgaccatggaagccacggcctccgcaatgagcttcgcccttccctcaacncnagcccaagcccaagcccaacttcctgacccggcccaccaatccattcaccattccctcccgcagcccagcccaccgccccccgcngcgcnttccccaccatnccgcgccgcaattccccgcacaaagaaagaggcaacggtggagantgtgcgggagcagttcgagaatgttaacctcctcggccggca

SEQ ID NO: 5501 - DNA, 240 bp, Glycine max
  unsure at all n locations
  Clone ID: 701002678H1
taccatttccatgaccactaatttaatttgctcctcctctttcancccttcttcttttcccctttttttgatatcaaaacgaaaaagaaaaccctagaacggaagagatttcattccccatcaaatctcttccttctctctcctcatttccaaagttcccaactttcctaacccgagatctggtgaattgaattgaaattgaaattgttgncgtggttgcctgctgctgcagctgnaagg

SEQ ID NO: 5502 - DNA, 242 bp, Glycine max
  unsure at all n locations
  Clone ID: 701002680H1
ttgnatncgacgcatccntggatggtgacagcccgatgattcanctcgngtctcngtttgggactgggatcaccgccacgtggtgtatganttgnaagctggnggagtggntgaacggcgtttgntcngcgccaagttgganaagctcnccganggagnaanagantcaaaagggaagcngacagaaganatttcggggaggaagtgtccatcaggtgnnttnnatnatgatgatgtcacgc

SEQ ID NO: 5503 - DNA, 240 bp, Glycine max
  unsure at all n locations
  Clone ID: 701002681H1
catcagngatcgctggggataatcttgaaatgaaattggatgatgggaatggttctaaggtttctggtgctgttgagatgangagaattgancctgtgactgtgcctttggttgatccttccagaaatttctgaaccttcagttcctccttncagatagtanaaggaatgttgtcnatgtttctctcccggccacttatncatggaaggaanggctgtnnttatacancacttggnggca

SEQ ID NO: 5504 - DNA, 163 bp, Glycine max
  unsure at all n locations
  Clone ID: 701002682H1
agttcacaagttcccttttacatgttctacctcaatttgacacccaaagtttctgtctttgaattgaggtaccatacccttttagttccatttagccagaagtattagtatcacncttattttgtccactttcgattgaaattggtttctgggtaggttgagt

SEQ ID NO: 5505 - DNA, 175 bp, Glycine max
  unsure at all n locations
  Clone ID: 701002683H1
gnncggcttcaaccttgtagttattctctttcttcttttttagtatccctctcttgaaaaatctagatctcgttcttcttgattacgttacgctttagtgacggattgtnggactgacagantaagcgagtgttgctgctcaaacgagagagnancatgaaaggggnagcgcnnt

SEQ ID NO: 5506 - DNA, 234 bp, Glycine max
  unsure at all n locations
  Clone ID: 701002684H1
gttcaaaccnaacacaaacccgagcacagattctctttgtattcccttttgcttctttcttctcccccctgttcattttttcaaacactgaaaacgcatgcaccagcaccagcagcaagcacgtaaggncgtcgtcgagagaagctcgtttctctcactcgctacaaccctcgaatatctctgggatatgtgaaacttggcaacaagcagtatgggaaacaacgtatttgaggg

SEQ ID NO: 5507 - DNA, 235 bp, Glycine max
  unsure at all n locations
  Clone ID: 701002685H1
tncaancaaagcagcagcgtccaggtgcatccccttcntccgtcaaacccacgcccatttnattnttntcaattccncanttccaaattagggttagggttttcacaatntcaatganttntnttnttcnttnagnttacaatccntattccantacngntactactagtcactttgtcttcgtcgttgtcgttcgtaaggattaatcaattaacntatcgaatcgtttcagtat

SEQ ID NO: 5508 - DNA, 236 bp, Glycine max
  unsure at all n locations
  Clone ID: 701002686H1
gtaatctgctacactcttcaggccanaattnattgttgctggagctagcgcttatgcacgtctctatgattatgaacgtgtacgcaaggtttgcgataaacagaaagctatactattggcagatatggcacacatcagtggattggttgcagctggtgtcatcccatncaccttttgattatgctgatgtagttactaccacaatcacaagttcacttccgaggaccacgnggagc

SEQ ID NO: 5509 - DNA, 238 bp, Glycine max
  unsure at all n locations
  Clone ID: 701002687H1
tgaggtgaaggctaatgaaaggaggaaagctctggaagagatcttgtatgcattggtagtgcagaagtttcatggatgctaatatttctttgataccctctgtaaccccagatctttctggtaaggttgatttgtggccanatgaagatggtaaacttgagctgcttcacttcacacgaagcatatgagatgattcaaaaccacctgggctctccattctcggtaacagagctggaga

SEQ ID NO: 5510 - DNA, 237 bp, Glycine max
  unsure at all n locations
  Clone ID: 701002688H1
gtgatctctgtaacattactgttaacaagaacgctgtttttggtgatancagtgccttggcccctggtggagtgcgaattggtgcccctgccatnacttctaggggtttggttgaaaaagactttgancagattggtgagttccttcaccgtgctgtgactctcacactggagatccagaaggagcatggcaaacttcttcaaggatttcaacaagggtctcctcaacaacaaggta

SEQ ID NO: 5511 - DNA, 235 bp, Glycine max
  unsure at all n locations
  Clone ID: 701002689H1
agaaaccccgtccgtacatggtctgttcacgcggatcgggttgattgaccaccacccaccaccaccaaccaccaccattcgcgcgtgagatgcacaccgcgagcagnagcaacggcggcggcgtgctggcgtcgcggacgagttccgcggtcggtgacgganacgtgaacgggtcgcacaanttcgtgataaagggatactcctggcgaaggggtcggagtggggaaccactncc

SEQ ID NO: 5512 - DNA, 235 bp, Glycine max
  unsure at all n locations
  Clone ID: 701002690H1
ggcaagtggcgagtgaggaatgcagagaaatgagaattcgtcattggctgagtcttctgaggcaggtggccctgccaaacgcagaagctccggcagaaattgctaccgcaaacacgtcgaagacggtagtaatagcactcggtttcattctcccacattcccaattctgngcgttaagatgagtgagaaagngaaaggcaataatagtgagggacantncgncgttnctgccncg

SEQ ID NO: 5513 - DNA, 237 bp, Glycine max
  unsure at all n locations
  Clone ID: 701002691H1
tttcatatttggcagctttatcaataatcattcatgtgtccctctcctggcncattcacaatgcaattcaagtatgggattcctggtggcaatgatttcaacaattttggcatactggattccgaacattggtcaactgatatttattacatgtggttggtgccctgaaacatggaaaggtttctcttttttagcattcaaagatctttggccggttgccaagctttccattcatct

SEQ ID NO: 5514 - DNA, 237 bp, Glycine max
  unsure at all n locations
  Clone ID: 701002692H1
anattatcatcttaaagttggtttgtttttctatgtatttntntttattcatgttcttccttgtgnttttacnattttntaccacttctattttctaaaaatcagtttttgaaaaatatttttaatttaattgtactcagactaactggggaaagcatatttccttgcttatattgttaatacactttcgggcattgttagaaagagcagagacccttcaggcttcagtcctcaagt

SEQ ID NO: 5515 - DNA, 237 bp, Glycine max
  unsure at all n locations
  Clone ID: 701002693H1
ggcaattgaagttgaagtcttgcncttctctcttcaactccaaacacaagacatcatcatccatggntgcctccgtctccactgtcggagctgtcaacagagctcttttgaacctgaatgggtctggactggggtttcagctcccagttcatccttctttgggancagttnaagaaggttattggcncagggtccccaacacaaagattcccctctggaacttcangattgtngncg

SEQ ID NO: 5516 - DNA, 238 bp, Glycine max
  Clone ID: 701002694H1
gctaatttctctctctctttttttatttccgggactgaagaggttgtctatttgaaatctccttcatcctttcctttcttgtagaaaactttttaaatttttttgtcagtgggtgttttaattaaccacctgttcttcaagttttagaaagacgcaggttgaattaattagtatcatggcagctttgatggatttttacagcagcagcccagagtttcaacttcactcagatccattc

SEQ ID NO: 5517 - DNA, 242 bp, Glycine max
  unsure at all n locations
  Clone ID: 701002695H1
gtgaaatggagagtgttacaaatggtctaacatatgtagaatatccattggtatagccaaaggactagagcatcttcacacatcacaggagaagcctattattcatggaaacctcaagtctaaaaacattcttctggaccgctcctaccagccgtacatctcggattccggcctacatcttctgttgaatccaacggctggccaagaaatgcttganagttcagcagctcagggttacaagg

SEQ ID NO: 5518 - DNA, 250 bp, Glycine max
  unsure at all n locations
  Clone ID: 701002696H1
gtcgnngaagggacttcaatctgggcgaacaaccncggagattgatgtgcngnatctgcangtgataaagctgatgccagagcttcaaattccagagagtacgtgagggaaacatttgcgtggatgcnctattactggttcctcaccaacgatggaattgagttccttaggacttcacctcnnccttccatcccgnaattgtccctgccaantctcaagaagcaggccaagcccgccggaagncnatncg

SEQ ID NO: 5519 - DNA, 254 bp, Glycine max
  Clone ID: 700877219H1
aaagaattggcagcacagcccgatgttgatggatttttggttggtggtgcatccctcaaggcggaatttgtggacatcataaacgctgctactgtgaagaagaattgaaattcgtagttaggaactgatatgctgcctttcaagctgcttcggaaattgctgtttttgagttttggttctgtgctttgtggccaatgtattgaactctgtttagtacctgaataaacatgctttcctttgatctcatccatagg

SEQ ID NO: 5520 - DNA, 225 bp, Glycine max
  Clone ID: 700876790H1
aaagaattggcagcacagcccgatgttgatggatttttggttggtggtgcatccctcaaggcggaatttgtggacatcataaacgctgctactgtgaagaagaattgaaattcgtagttaggaactgataatgctgcctttcaagctgcttcggaaattgctgtttttgagttttggttctgtgctttgtggccaatgtattgaactctgtttagtacctgaata

SEQ ID NO: 5521 - DNA, 258 bp, Glycine max
  Clone ID: 700877212H1
aaagaattggcagcacagcccgatgttgatggatttttggttggtggtgcatcactcaaggcggaatttgtggacatcataaacgctgctactgtgaagaagaattgaaattcgtagttaggaactgataatctgcctttcaagctgcttcggaaattgctgtttttgagttttggttctgtgctttgtggccaatgtattgaactctgtttagtacctgaataaacatgctttcctttgatctcatccataggcgat

SEQ ID NO: 5522 - DNA, 247 bp, Glycine max
  Clone ID: 700876711H1
aaagaattggaagcacagcccgatgttgatggatttttggctggtggtgcatccctcaaggcggaatttgtggacatcataaacgctgctactgtgaagaagaattgaaattcgtagttaggaactgataatgctgcctttcaagctgcttcggaaattgctgtttttgagttttggttctgtgctttgtggccaatgtattgaactctgtttagtacctgaataaacatgctttcctttgatctca

SEQ ID NO: 5523 - DNA, 268 bp, Glycine max
  Clone ID: 700873022H1
tcaagcctagcgtctctcaactcaacaatgggtcttcttgacatcgtgcagccaggcgtcctcaacggtggggacgtcatgaaggtgtacaaatatgctcaggagcacaagtttgccatcccggccgtgaacgtgacatcgtcgtcgacgacgaatgccgctctgcaggccgcccgcgacatcaagtcgcccatcatcatccagacatcaaatggcggcgccgccttctacgctggcaaaggtattgacaacaagaaccagaacgcct

SEQ ID NO: 5524 - DNA, 234 bp, Glycine max
  Clone ID: 700872670H1
aagattaaagattcaacaatggcctctgcttctgctactcttctcaagtcatctcctgttgttgacaagtgcgagtgggtcaaaggccagacccttcgccaacctctcgtgagatgtaacccttcctcagcatcagctctcaccatcaaagctgcttcctatgctgacgagctcgtcaaaaccgccaaaacagtggcctcaccggggcgtggtattttggcgatggatgagtca

SEQ ID NO: 5525 - DNA, 248 bp, Glycine max
  Clone ID: 700875532H1
gattgcagtagtgctaagtgctaacacctgcagtgaacaatggcctctgcatcagcatctctgctcaagtcttcacttgttcttgacaagtctgagtgggtgaagggacaaacccttcgccaaccttctgcatcagttgtgagatgcaaccccaccaccccatcaggcctcaccatcagagctggttcctatgctgatgagctcgttatcaccgcgaaaacagtggcttcaccagggaggggtatttt

SEQ ID NO: 5526 - DNA, 249 bp, Glycine max
  Clone ID: 700872948H1
aggttgctgtaggagataagattgcagtagtgctaagtgctaatgcctgcagtgaacaatggcctctgcatcagcatctctgctcaagtcttcacttgttcttgacaagtctgagtgggtgaagggacaaacccttcgccaaccttctgcatcagttgtgagatgcaaccccaccaccccatcaggcctcaccatcagagctggttcctatgctgatgagctcgttaagaccgcgaaaacagtggcttc

SEQ ID NO: 5527 - DNA, 253 bp, Glycine max
  Clone ID: 700876633H1
ggttgctgtaggagataagattgcagtagtgctaagtgctaacacctgcagtgaacaatggcctctgcatcagcatctctgctcaagtcttcacttgttcttgacaagtctgagtgggtgaagggacaaacccttcgccaaccttctgcatcagttgtgagatgcaaccccaccaccccatcaggcctcaccatcagagctggttcctatgctgatgagctcgttaagaccgcgaaaacagtggcttcaccag

SEQ ID NO: 5528 - DNA, 273 bp, Glycine max
  Clone ID: 700872702H1
acgcgttcggctcgagattgcagtagtgctaagtgctaacacctgcagtgtacaatggcctctgcatcagcatctctgctcaagtcttcacttgttcttgacaagtctgagtgtgtgaagggacaaacccttcgccaaccttctgcatcagttgtgagatgcaaccccaccaccccatcaggcctcaccatcagagctggttcctatgctgatgagctcgttaagaccgcgaaaacagtggcttcacctcggaggggtattttggccatggat

SEQ ID NO: 5529 - DNA, 269 bp, Glycine max
  Clone ID: 700872703H1
tcggattctgctcgaggtgaacaatggcctctgcatcagcatctcttctcaagtcttcacttgttcttgactagtttgagtgcgtgaagggacaaacacttcgccaaccttctgctgcatcagttgtgagatgcaaccccaccactccttcaggcctcaccatcagagctgtttcctatgctgatgagctctttaagaccgcgaaaacagtggcttcacctcggaggggtattttggccatgtctgagtccactgctccctgttcgaag

SEQ ID NO: 5530 - DNA, 165 bp, Glycine max
  Clone ID: 700875039H1
caaaggttgctgtaggagataagattgcagtagtgctaagtgctaacacctgcagtgaacaatggcctctgcatcagcatctctgctcaagtcttcacttgttcttgacaagtctgagtgggtgaagggacaaacccttcgccaaccttctgcatcagttgtgag

SEQ ID NO: 5531 - DNA, 257 bp, Glycine max
  Clone ID: 700874831H1
atcaagtggcaggagaaggcatgtggggggttctggagttaggtgcatggctgtgggggaagcagcaaccactgggacaaagaagagaagtggatatgagcttcaaacactcactagctggttgctgaagcaggagcaagctggggtgattgatgcagaactcactattgtgctgtctagcatttccatggcatgcaaacagattgcttctttggtgcaaagagctaacatttccaacctcactggggttcaaggtg

SEQ ID NO: 5532 - DNA, 218 bp, Glycine max
  Clone ID: 700872212H1
ctttgctctcagtgccttagaacacaatccatgtaaccaccacaagcaccataccacactgccaaaatcaacaaaccaaaaaggtaaactttttgcaacaaccatggttgcaatggcagcagcaacagcatccacccagttgattttctcaaagccttgttccccttcacgtctatgccccttccaactatgtgtctttgacactaaacaagtgctat

SEQ ID NO: 5533 - DNA, 246 bp, Glycine max
  Clone ID: 700873337H1
tctgaactctctctctcatctataagtcaacatggctcatcatgaagattcaagtgcatggaattcgagtaaacctcaccctaagctcaatgaaagaattctgtcttctctgtcacggagaactgttgctgctcacccctggcacgacttagagattgggccaggagctccagcagttttcaactgtgtggttgaaattggcaaaggaagtaaggttaagtatgagctggacaagacaagtggact

SEQ ID NO: 5534 - DNA, 246 bp, Glycine max; identical to SEQ ID NO: 5533
  Clone ID: 700873349H1

SEQ ID NO: 5535 - DNA, 221 bp, Glycine max
  Clone ID: 700872206H1
gaagaacttaaccgggttagttgaatggtatggcaagaacaagagactgagaaatttggtgaaccttgtcatagtaggaggcttctttgccccttcaaaatcaaaagatagggaggaaatggcagaaataaaaaatatgcatgacttaattgataagtaccaactcaagggtcaatttagatggattgctgctcagactaataggtatcgcaatggagagc

SEQ ID NO: 5536 - DNA, 166 bp, Glycine max
  Clone ID: 700876641H1
gtcaagggaaagactgtgatgtggaatgacagaattcaaaacccagatgcagtccaacatgtgctgaggagagctgaggagtatcgaggcacagtgcctcctgaaacgcgctactcagagtttgagcacgagggccaggagattggttagaggagagggtggggtg

SEQ ID NO: 5537 - DNA, 340 bp, Glycine max
  Clone ID: 700763827H1
cacacctgccgccagtcacatcatccggatacgaaaggcgaccggtggcatcctcctcactgccagccacaaccctggtggccccgatgaggactttggcatgaagtacaacctcgccaacggtgccccggctcccgagagcgtcaccaacaagatctacgaaacctccaagaccctctcgtcgtacaagatcgccgaactccccgacatcgacttgagcacaattggcacacaaaagtatggcagcctcgaggttgagatcgtccactcaacagaggactacctgaagatgctcaaggacatcttcgactttgacctcatcaagtcgttcctcaagcag

SEQ ID NO: 5538 - DNA, 217 bp, Glycine max
  Clone ID: 700871590H1
accgcaatggccaccgctgccgagaaactctccgctctcaaatccgccgtcgccggattgaacgaaatcagtgagaatgagaagaacggattcatcagccttgtcggccgctatctcagtggcgaacgcagcatgtggaatggttcaagatccagacgcctacggacgaagtggttgtgccttacgacactttggcgccaactcctgaaggttcttc

SEQ ID NO: 5539 - DNA, 247 bp, Glycine max
  Clone ID: 700876656H1
gcgaaggtggtctcacttgactcgattgcaagtgatccacgacacactgttcgcttcacaaaagcttcgaatccaattcctcagtaacatctgcataaagtcttctccttcaccatgccaccaaagcctttagactatgggtcaataaatgacaacgtgaagaagagtcaatatgctgtcagaggtgaattataccttcgagcttctgagcttcagaaagagggcaaaaagattatatttactaatg

SEQ ID NO: 5540 - DNA, 242 bp, Glycine max
  Clone ID: 700874318H1
cccataccgaacactcttcttcaatcaagcgaaggtggtctcgattgcaagtgatccacgatacactctacgcttcacaaaaccttcaaacccaattccacagaattcttaagatacaccatgccaccaaagcctttagactatgggtcaataaatgaaaacgtgaagaagagtcaatatgctgtcagaggtgaattataccttcgagcttctgaacttcagaaagagggcaaaaagattat

SEQ ID NO: 5541 - DNA, 252 bp, Glycine max
  Clone ID: 700874683H1
caaatatttatgggagttatgctccatccacctcaacctggagatatttcttatgacaaatttgttagggagagcaccggaatacttgaatcactgagaagaagagcaaggctaatgactgatggatcaacagttgcagaaatgtggtttgtaattttactgaaggtgccatgtattcatcccctcaaatacgtttgccgccaagagctttgaggctgcctaacaaggctgcaaaggttccagatgttttct

SEQ ID NO: 5542 - DNA, 246 bp, Glycine max
  Clone ID: 700874576H1
caaatatttatgggagttatgctccatccacctcaacctggagatatttcttatgacaaatttgttagggagagcaccggaatacttgaatcactgagaagaagagcaaggctaatgactgatggatcaacagttgcagaaatgtggtttgtaattttactgaaggtgccatgtattcattccctcaaatacgtttgccgccaagagctttagaggctgctaaacaggctgcaaaggttccagatg

SEQ ID NO: 5543 - DNA, 236 bp, Glycine max
  Clone ID: 700874138H1
cacaaaagcttcgaatccaattcctcagtaacatctgcatgaagtcttctccttcaccatgccaccaaagcctttagactatgggtcaataaatgaaaacgtgaagaagagtcaatatgctgtcagaggtgaattataccttcgagcttctgagcttcagaaagagggcaaaaagattatatttactaatgttggcaacccacatgcattgggacagaaaccactgagcttccctc

SEQ ID NO: 5544 - DNA, 258 bp, Glycine max
  Clone ID: 700871122H1
gtctcacttgactcgattgcaagtgatccacgacacactgttcgcttcacaaaagcttcgaatccaattcctcagtaacatctgcttgaagtcttctccttcaccatgccaccaaagcctttagactatgggtcaataaatgaaaacgtgaagaagagtcaatatgctgtcagaggtgaattataccttcgagcttctgagcttcagaaagagggcaaaaagattatatttactaatgttggcaacccacatgcattg

SEQ ID NO: 5545 - DNA, 251 bp, Glycine max
  Clone ID: 700871057H1
gcgaaggtggtctcacttgactcgattgcaagtgatccacgacacactgttcgcttcacaaaagcttcgaatccaattcctcagtaacatctgcatcaagtcttcaccttcaccatgccaccaaagcctttagactatgggtcaataaatgataacgtgaagaagagtcaatatgctgtcagaggtgaattataccttcgagcttctgagcttcagaaagagggcaaaaagattatatttactaatgttgg

SEQ ID NO: 5546 - DNA, 240 bp, Glycine max
  Clone ID: 700872519H1
gtctcacttgactcgattgcaagtgatccacgacacactgttcgcttcacaaaagcttcgaatccaattcctcagtaacatctatacaaagtcttctcttcaccatcccaccaaagcctttagactatgggtcaataaatgaaaacgtgaagaagagtcaatatgctgtcagaggtgagctcataccttcgagcttctgagcttcagaaagagggcaaaaagattatatttactaatgtt

SEQ ID NO: 5547 - DNA, 220 bp, Glycine max
  Clone ID: 700872879H1
ggaggttatatggaggtgactgggttttctgcagaagtgagggaacaaatatataaagtggcatctgtcaacctttgctctaatatctctggtcaaattcttgcaagcttggtcatgagtccacccaaggttggagatgagtcctatgactcattcatggctgagaaggagaatattttggcgtcccttgccaggcgtgcaaagacattagaagatgcat

SEQ ID NO: 5548 - DNA, 242 bp, Glycine max
  Clone ID: 700874484H1
gacagagagaaggggtcttccatttgaggactactattttaccagacgaggaagacatgcccgctattatggatagtttcaaaaagttcaatgatgaattcatggagcaatacgaagacaatagaggttattcaaggttgtaagaaaattatcgtaaaagatgcattatactcttgtgcttttgtaagaaaaacataacctccctttctactatttgtccttggagataattcttaaacctt

SEQ ID NO: 5549 - DNA, 235 bp, Glycine max
  Clone ID: 700872191H1
gtttactactgcctcaagcttttggaagccactggcatatccactgttactggttcaggatttggtcagaaagaaggggtgttccatttgaggagaactattttaccagctgaggaagacatgcctgatatttggatagtttcaaaaagttcaatgatgaattcatggagcaatacgaagacgatagaggttattcaaggttgtaagaaaatcattgtaaaagctgcattatact

SEQ ID NO: 5550 - DNA, 232 bp, Glycine max
  Clone ID: 700874369H1
ctttttatgatgttctgttctgcattattttcaggtcacgcaacaaggaatatattccgttcgttgggcttgctgattttaataaattgagtgctaagcttatttttcgggctgacagccctgctattcaagacaacagggttaccactgttcaatgcttgtctggaactggttctttaagagttgggggtgaatttttggctaaacactatcaccaacggactatatactt

SEQ ID NO: 5551 - DNA, 146 bp, Glycine max
  Clone ID: 700870993H1
gctgccgcaaaatgagacaatgcaagtatgcaactgattcttatgttccaatacgaaattatgctgatttatagacttatttgtatcacctatttcaagcaactctttggtacactaacatttttacgtgaggtggttaagatgcc

SEQ ID NO: 5552 - DNA, 255 bp, Glycine max
  Clone ID: 700874273H1
atcagagacgtgttggagacattccatgtcatagcagagcttccactagacaactttggcgcatacatcatctcaatggcaactgcaccttctgatgtgcttgcagttgagcttctgcagcgcgaatgccatgtcaagcatccactaagagttgtgccattgtttgagaagctagctgatctagaagcagcaccggccgcgttggcgcgattgttctctgtagactggtacagaaacaggatcaatgggaagcag

SEQ ID NO: 5553 - DNA, 257 bp, Glycine max
  Clone ID: 700876401H1
gtgcttgctgttgagcttttacaacgtgaatgccatgtgaagcagccactaagggtggtgccactgtttgaaaagcttgctgatcttgaggccgctccggctgcggtggcacgtctttctctatagattggtacagaaaccgcattgatgggaagcaagaagttatgatagggtactcagactcaggaaaagatgcaggccgtctttctgcggcttgggcgctttacaaggctcaagaagaacttgtgaaggttgct

SEQ ID NO: 5554 - DNA, 254 bp, Glycine max
  Clone ID: 700876063H1
tagagagagagagaaagaaattaagaaaaaatggcagcctgcactgtctactcaacacaatctctgtctgaaattgctccatctcaaccccatcaaagacacagctgagtttcttccaccaaaagcaggtactatctggaggaacagcaacaggggcaacagcagcagcagaagaagctatgtgataacatgtgcagcaggtgactcacagacagtggtgattggccttgctgcagactcagggtgtgggaaga

SEQ ID NO: 5555 - DNA, 267 bp, Glycine max
  Clone ID: 700870864H1
gagccaatgattttgatctcatgtatgaacaagttaaagctcttaaggatggaattgctgttgaaaaaccaatctacaaccatgtcaatgggctcctggatcccgctgagctcatttcaccgcccaaaatcttagtcattgaaggcttgcacccaatgtatgattctcgggtcagagatctcttggactttagcatctacctagacattagcaatgaggtcaaattcgcttggaaaattcagagagacatggcagagcgtggacaca

SEQ ID NO: 5556 - DNA, 243 bp, Glycine max
  Clone ID: 700875430H1
cagaaaggagaagggtgtcactgcccttgaccctagagccaatgattttgatctcatgtatgaacaagttaaagctcttaaggatggaattgctgttgaaaaaccaatctacaaccatgtcactggtctcctggatccccctgagctgcattaaaccccccaaaatcttagtcattgaaggcttgcacccaatgtatgattctcgggtcagagatctcttggactttagcatctacctagaca

SEQ ID NO: 5557 - DNA, 238 bp, Glycine max
  Clone ID: 700873392H1
caggtagttttctggaggaacagcaacaggggcaacagcagcagcagaagaagctatgtgataacatgtgcagcaggtgactcacagacagtggtgattggtcttgctgcagactcagggtgtgggaagagcaccttcatgaggaggctgacaagtgtgtttggaggagcagcagagccaccgaaggtggcaaccctgactcagacacactcatcagtgacaccaccactgtcatatg

SEQ ID NO: 5558 - DNA, 349 bp, Glycine max
  Clone ID: 700763831H1
ctttagagagatagagagatagagagagagagaaagaaattaagaaaaaatggcagcctgcactgtctactcaacacaatctctgagcacaaattgctccatctcaaccccatcaaagacacagctgagtttcttccaccaaaagcaggtagttttctggaggaacagcaacaggggcaacagcagcagcagaagaagctatgtgataacatgtgcagcaggtgactcacagacagtggtgattggtcttgctgcagactcagggtgtgggaagagcccttcatgaggaggctgacaagtgtgtttggaggagcagcagagccaccgaagggtggcaaccctgactcaa

SEQ ID NO: 5559 - DNA, 273 bp, Glycine max
  unsure at all n locations
  Clone ID: 700877128H1
aaattctctttagagagatagagagaggaagaaagaatggcagcttgcactgtctactcaacacaatatctgagtttaaattgctccatctcaaccccatcaaagacgcaactcagttttttccaccaaaagcaggtatttatctggaggaacagcaagaagggcatggnagtcagcagaagaagctatgtgatatcatgtgcagcaggtgactcacagacagtggtgatggccctggctgcagactcagggtgtgggaagagcacttcatga

SEQ ID NO: 5560 - DNA, 263 bp, Glycine max
  Clone ID: 700872439H1
ggaggcgcagcagagccaccaaagggtggcaaccctgactccaacactctcatcagtgacaccaccactgtcatatgcttggatgattaccactctgtggacagaactggaagaaaggagaagggtgtcactgcccttgaccctagagccaatgattgcgatctcatgtatgcacaagttaaagctcttaaggatggaattgctggtgaaagaccaatctacaaccatgtcactggtctcttggatacccctgagctcattaa

SEQ ID NO: 5561 - DNA, 267 bp, Glycine max
  Clone ID: 700877162H1
gaattgctgttgaaaaaccaatctacaaccatgtcactggtctcctggatccccctgagctcattaaaccccccaaaatcttagtcattgaaggcttgcacccaatgtatgattctcgggtcagagatctcttggactttagcatctacctagacattagcaatgaggtcaaattcgcttggaaaattcagagagacatggcagagcgtggacacagtcttgaaagcatcaaggctagcattgaagcaaggaagcctgattttgaag

SEQ ID NO: 5562 - DNA, 255 bp, Glycine max
  Clone ID: 700875857H1
cagagcgtggacacagtcttgaaagcatcaaggctagcattgaagcaaggaagcctgattttgaagcatatattgatccacaaaagcaatacgcagatgcagtgatagaagtgttgccaacccaactcattccagatgacaacgaggggaagattttgagagtgaggttgatacagaaagaaggggttaagtactttagcccagtttacttatttgatgatggctctaccatttcatggataccatgtggaagga

SEQ ID NO: 5563 - DNA, 257 bp, Glycine max
  Clone ID: 700875895H1
cctggatccccctgagctcattaaaccccccaaaatcttagtcattgaaggcttgcacccaatgtatgattctcgggtcagagatctcttggactttagcatctacctagacattagcaatgaggtcaaattcgcttggaaaattcagagagacatggcagagcgtggacacagtcttgaaagcatcaaggctagcattgaagcaaggaagcctgattttgaagcatatattgatccacaaaagcaatacgcagatg

SEQ ID NO: 5564 - DNA, 243 bp, Glycine max
  Clone ID: 700875789H1
cctggatccccctgagctcattaaaccccccaaaatcttagtcattgaaggcttgcacccaatgtatgattctcgggtcagagatctcttggactttagcatctacctagacattagcaatgaggtcaaattcgcttggaaaattcagagagacatggcagagcgtggacacagtcttgaaagcatcaaggctagcatgaagcaaggaagcctgattttgaagcatatattgatccacaaaag

SEQ ID NO: 5565 - DNA, 249 bp, Glycine max
  Clone ID: 700876264H1
ttttgtcaaggcataggattggtgaggtaaacttgaattgaagtgaagaaggagatggctgcaacctcttccttgtgctcatcgaccctccaatcccagatcaatggattcttccttcacaaaaccttctttcccatactccttccctcactttctccaggaggaaaatttcaaccacagtgaaggctacatctcgagtcgacaagttttcaaaaagcgatatcattgtctctccgtccattctttctg

SEQ ID NO: 5566 - DNA, 246 bp, Glycine max
  Clone ID: 700877044H1
tttcctcaaggcataggattggtgaggtaaacttgaattgaagtgaagaaggagatggctgcaacctcttccttgtgctcatcgaccctccaatcccagatcaatggattcttgcttcacaaaacctctcttgctcatactccttccctcactttctccaggcggaaaatttcaaccacagtgaaggctacatctcgagtcgacaagttttcaaaaagcgatatcatgtggtcgctccgtccattc

SEQ ID NO: 5567 - DNA, 243 bp, Glycine max
  Clone ID: 700875943H1
aacatccttaaccctttgaacatcgttttgcagccatggaaacaggcatagcatgctacactcgcgggcctttcttgcctagtgtttcttccaagcactctccaccttccatttctccatcttttggcttgaggagtctgaaatcaagctctttatttggagaatcgctaagagtggcctccaaatcaacaataaagttttcaaagacaaagaatacttcactcgtgaccagatgtgaaattg

SEQ ID NO: 5568 - DNA, 239 bp, Glycine max
  Clone ID: 700872306H1
atccaaatcaacactaaaggtttcaaagacaaagaatacttcactcgtgaccagatgtgaaattggtgacagtctggaagaattcctcacaaaagcaacaccagataaggggttgatcaggttgttggtgtccatgggagaagcattaagaacaatttcctccaaagtgaagacggcttcttgtggtggaacacaatgtgttaatacttttggggacgagcagcttgcagtggatttgc

SEQ ID NO: 5569 - DNA, 241 bp, Glycine max
  Clone ID: 700875128H1
tggaaacaggcatagcatgctacactcgcgggcctttcctgcctagtgtttcttccaagcactctccaccctccatctctccatcttttggcttgaggagtctgaaatcgagctctttatttggagaatctctaagagtggcatccaaatcaacactaaaggtttcaaagacaaagaatacttcactcgtgaccagatgtgaaattggtgacagtctggaagaattcctcacaaaagcaac

SEQ ID NO: 5570 - DNA, 233 bp, Glycine max
  Clone ID: 700871634H1
ctaaactaagtggttggttttggtttagtttcatttttttgaagcgcttaaacttaaggcttaagccatggcatcctcatcctctctgcatctatctcaggcccttctggcacgtgctgtgtaccttcatggctcttcttcttctgaccgtgtctcactctccttcccatcattctctggcctcaagtcacattctacatgcaaagcagcagtagccacgtcctcgcgtagaa

SEQ ID NO: 5571 - DNA, 260 bp, Glycine max
  Clone ID: 700874803H1
aacaagcctgacaatgagattgttgaccattacacatatgttatattgggtgatggttgtcaaatggagggaatttcaaatgaagcttgctcacttgccggtcactggggtctaggaaagctcattgctttatatgatgacaatcacatttccattgatggtgacactgagattgcattcactgagaatgttgatcagcgttttgaagcacttggatggcatgtaatttgggtgaagaatggaaatactggatatgatga

SEQ ID NO: 5572 - DNA, 240 bp, Glycine max
  Clone ID: 700870543H1
cattgatgcagttgagaaggccaactctggtcaccctggtctccccatggggtgtgctctaatgggctcacattctctacgatgagataatgaggtacaattctaagaaccccgcttggttcaaccgtgacgtttcgttctctctgctggacatggctgcatgctccaatatgctctccttcaccttgctggctatgacactgttcaggaacaagaccttaaggaattccgacaatgggg

SEQ ID NO: 5573 - DNA, 263 bp, Glycine max
  Clone ID: 700874020H1
atgagaggtgccataaagctttctgcgctgtctgaggctggggttatttaatgtcatgacccatgattcaataggacttggagaagatgggccaacccaccagcctattgagcacctagcaagcttccgggcaatgccaaacattttgatgcttcgtcccgccgacggtaacgaaacagccggagcatacaaagtggccgtgctcaacaggaagagaccctccattcttgccctatccaggcaaaaactgccccagcttcccg

SEQ ID NO: 5574 - DNA, 258 bp, Glycine max
  Clone ID: 700876408H1
taaagaagcaaaggctgtcaaagacaaacccactttgatcaaggtaaccactaccattggatttggttctccaaacaaggctaattcctacagtgttcatgggagtgcattaggtgctaaagaagtggatgctacaaggaagaatcttggatggccatacgagcctttccatgtgccagaagatgtcaagaagcattggagtcgccatacacctgagggtgctaaacttgaagctgagtggaatgccaagtttgtgga

SEQ ID NO: 5575 - DNA, 245 bp, Glycine max
  Clone ID: 700876984H1
gtggaatgcgaagtttgcagaatatgagaagacatacagtgaggaagctgcagagctgaaggctattattactggtgaattaccagctggttgggagaaagcacttccgacatacactccagaaagccctgctgatgctacaagaaatctgtctcagcaaaatctaaatgcccttgttaaggttcttcctggtctacttggtggcagtgcagatcttgcctcttccaacatgaccttgttgaaat

SEQ ID NO: 5576 - DNA, 242 bp, Glycine max
  Clone ID: 700871885H1
tggaatgccaagtttgcagaatatgagaagaaatacagtgaggaagctgcagagctgaaggctattattactggtgaattaccagctggttgggagaaagcacttccgacatacactccagaaagccctgctgatgctacaagaaatctgtctcagcaaaatctaaatgcccttgttaaggttcttcctggtctacttggtggcagtgcagatcttgcctcttccaacatgaccttgttgaa

SEQ ID NO: 5577 - DNA, 255 bp, Glycine max
  Clone ID: 700873234H1
ctcttggggagttcattctaactcaccctgacatcaagatcccatagaaaggcaagatctattcagtgaatgaaggaaatgctaaaaactgggatggccctactaccatgtatgtataaatccaatagtgttaaaatgtttcaggcattataatgcagtttgtgacactatgatttcctttccttctttctgttcaggtatgtggaaaactgcaagtatccagaagatggttcatcaccaaagtccctaggatat

SEQ ID NO: 5578 - DNA, 249 bp, Glycine max
  unsure at all n locations
  Clone ID: 700874784H1
gaaaaattaaaccaaccatactacaccagacactncttctaaccttcaataattctcttctcacccttataaaaagaaactcattttaactcagactttgcatttcaccttatctatctatcttttctaacatggctgctgggactggactctttgcagagattttggatggagatgtgtacaagtactatgctgatggagaatggaagaaatctgcttctgggaaaagtgttgccatcatcaacccca

SEQ ID NO: 5579 - DNA, 326 bp, Glycine max
  unsure at all n locations
  Clone ID: 700763868H1
atcttttctaacatggctgctgggactggactctttgcagagattttggatggagatgtgtacaagtactatgctgatggagaatggaagaaatctgcttctgggaaaagtgttgccatcatcaaccccactaccagaaagactcaatacaaagttcaagcttgttcacaagaggaggttaacaaggtcatggacttggcaaaatctgcccaaaagttatgggcaaagaccccactatggaaacgtgctgaacttcttcacaaggcagctgctatccttaaagagcacaaagcaccaattgcagagtgcctggtganagaaatagc

SEQ ID NO: 5580 - DNA, 257 bp, Glycine max
  Clone ID: 700874732H1
ctgggactggactctttgcagagattttggatggagatgtgtacaagtactatgctgatggagaatggaagaaatctgcttctgggaaaagtgttgccatcatcaaccccactaccagaaagactcaatacaaagttcaagcttgttcacaagaggaggttaacaaggtcatggacttggcaaaatctgcccaaaagttatgggcaaagaccccactatggaaacgtgctgaacttcttcacaaggcagctgctatc

SEQ ID NO: 5581 - DNA, 244 bp, Glycine max
  Clone ID: 700875340H1
gcaaaatctgcacaaaagttatgggcaaagaccccactatggaaacgtgctgagcttcttcacaaggcagctgctatccttaaagagcacaaaactccaattgcagagtgcctggtgaaagaaatagcaaagccagccaaagatgctgttatggaggttgtaagatctggggatctggtttcttacactgctgaagaaggtgtaaggattctgggagagggaaagttcttggtgtcggatagct

SEQ ID NO: 5582 - DNA, 249 bp, Glycine max
  Clone ID: 700874586H1
aattttcattttattatttttttgacaagcagctctagaaaaatctgcaaagaataaaacaagaggaggaaatgcaacttacttgttgatataaacttcacagagagaaagttgttgtaaagccttgttgtgccatggccacccacgcggctcttgcttctacaaggatcccttcaaacacaaggttcccatccaaggcctctcactctttcccaacccaatgcgccttaaagagacttgaggtgacag

SEQ ID NO: 5583 - DNA, 226 bp, Glycine max
  Clone ID: 700870957H1
gacaagcagctcaagaaaaatctgcaaagaataaaacaagaggaggaaatgcaacttacttgttgatataaacttcagacagagcgagttgttgtaaagctagccttgttgcagccatggccacccacgcggctctagcttctacaaggatccccactaacaccaagttcccatccaaggcttcacactctttcccaaccaatgcgcctcagagagacttgaggtg

SEQ ID NO: 5584 - DNA, 238 bp, Glycine max
  Clone ID: 700876748H1
aggttgtaaagccttgttgctgccatggccacccacgcggatcttgcttctacaaggatcacttcaaacacaaggttcccatccaaggcctctcactctttcccaacccaatgcgccttaaagagacttgaggtgacagaattctctgggcttagatcaaatcatgtgtcacatatggtaaaaggctagagaatcttccttttatgatcttgtagcttcacaactcaatcccaagcag

SEQ ID NO: 5585 - DNA, 238 bp, Glycine max
  Clone ID: 700875986H1
gccatggccacccacgcggctcttgcttctacaaggatcccttcacacacaaggttcccatccaaggcctctcactctttcccaacccaatgcgccctccagagacttgaggtgacagaattctctgggcttagatccacttcatgtgtcacacatgctaacagtgctagagaatcttccttttttgatcttgtagcttcccaactcactcccaagaccaatggatcaactcctgtga

SEQ ID NO: 5586 - DNA, 166 bp, Glycine max
  Clone ID: 700875036H1
cccactaacaccaagttcccatccaaggcttcacactctttcccaacccaatgcgcctcaaagagacttgaggtgacagaattctctgggctaagatccacttcatgtgtgacatatgctaacgatgctagagaatcttccttttttgatcttgtagcttcccaac

SEQ ID NO: 5587 - DNA, 168 bp, Glycine max
  Clone ID: 700875006H1
gtgaatgcagcattcagaaaggcagctgagggtccactgaaaggtgtgttggacgtgtgtgatgttccacttgtgtctatcgacttccgctgctctgatgtttcctctactattgactcctccttgactatggtcatgggagatgacatggttaaggtggttgcttgg

SEQ ID NO: 5588 - DNA, 267 bp, Glycine max
  Clone ID: 700877001H1
gcagccatggccacccacgcggctctagcttctacaaggatccccactaacaccaagttcccatccaaggcttcacactctttcccaacccaatgcgcctcaaagagacttgaggtgacagaattctctgggctaagatccacttcatgtgtgacatatgctaacgatgctagagaatcttccttttttgatcttgtagcttcccaactcactcccaagaccaatggatcatcaactcctgtgaggggagagacagtggccaagttg

SEQ ID NO: 5589 - DNA, 263 bp, Glycine max
  Clone ID: 700872466H1
gtaaagccttgttgctgccatggctacccacgcggctcttgcttctatcaggatcccttcaaacacaaggttcccatccaaggcctctcactctttcccaacccaatgcgccttaaagagacttgaggtgacagaattctctgggcttagatccacttcatgtgtcacatatgctaacagtgctagagaatcttccttttttgatcttgtagcttcccaactcactcccaagcagaccaatggatcaactcctgtgaggggag

SEQ ID NO: 5590 - DNA, 251 bp, Glycine max
  Clone ID: 700876929H1
acgccttgttgctgccatggccacccacgcggctcttgcttctacaaggatcccttcaaacacaaggttcccatccaaggcctctcactctttcccaacccaatgcgccttaaagagacttgaggtgacagaattctctgggcttagatccacttcatgtgtcacatatgctaacagtgctagagaatcttccttttttgatcttgtagcttcccaactcactcccaagcagaccaatggatcaactcctg

SEQ ID NO: 5591 - DNA, 248 bp, Glycine max
  Clone ID: 700876815H1
cttttctctacagtcatgggcaaggtcaagatcggaatcaacggatttggaagaattggccgtttggttgccagagtcgctctgcaaagagacgatgtggagctcgttgccgttaacgaccctttcattaccaccgattacatgacatacatgtttaaatacgacagtgttcacggacactggaagcatcacgatgtcaccgttaaggacgagaagacccttctcttcggtgacaagccagtcactgt

SEQ ID NO: 5592 - DNA, 248 bp, Glycine max
  unsure at all n locations
  Clone ID: 700875936H1
cggctcgatgcttgatgggtttaccatcgaggttgtttcaagcagggagcctcttaagcttccatcgggctagnatcttggaatgtgacatgtgttattgagtggaaccggagtgtttgtggatggccctgtggctggtaaacacatccaagcaggtgccaagaaagttattatcactgctcctgcaaagggtgctgatattccaacttatgttgttggtgtagatgaaggggactacactcagcaga

SEQ ID NO: 5593 - DNA, 249 bp, Glycine max
  Clone ID: 700876923H1
tggaagcttaagagggaacgggagtgtttgtggatggccctggggctggcaaacacatccaagcaggtgctaagacggtgatcatcactgctccagcaaagggtgctgatattccaactgatgttgtcggagtaaatgaaggggactacactcatgagatctctaacattataagcaacgcttcctgcaccacaaactgtcttgctccctttgtgaagatcctggatgcagagtttggaattgtgaagg

SEQ ID NO: 5594 - DNA, 277 bp, Glycine max
  Clone ID: 700877113H1
cgcagccatggccacccacgcggctctagcttctacaaggatccccactaacaccaagttcccatccaaggcttcacactctttcccaacccaatgcgcctcaaagagacttgaggtgacagaattctctgggctaagatccacttcatgtgtgacatatgctaacgatgctagagaatcttccttttttgatcttgtagcttcccaactcactcccaagaccaatggatcatcaactcctgtgaggggagagacagtggccaagttgaaggtggca

SEQ ID NO: 5595 - DNA, 237 bp, Glycine max
  Clone ID: 700876594H1
gagtcgctctgcaaagagacgatgttgaactcgttgccgttaacgaccctttcattaccaccgattacatgacatacatgtttaaatacgacagtgttcacggacactggaagcatcacgatgtcaccgttaaggacgagaagacccttctcttcggtgacaaggcagtcactgtttttggacacagaaaccctgaagagatcccatgggggtcaactggagctgacatcattgttg

SEQ ID NO: 5596 - DNA, 245 bp, Glycine max
  Clone ID: 700875928H1
cggctcgagccttgatgggcttaccatcaaggttgtttcaagcagggaccctcttaagcttcattgggctgaacttggaattgacattgttattgagggaaccggagtgtttgtggatggccctggggctggtaaacacatccaagcaggtgccaagaaagttattatcactgctcctgcaaagggtgctgatattccaacttatgttgttggtgtaaatgaaggggactacactcatcagatct

SEQ ID NO: 5597 - DNA, 234 bp, Glycine max
  Clone ID: 700870652H1
gaaggggactacactcatcagatctctaacattataagcaacgcttcctgcaccacaaactgtcttgctccctttgtgaagatcctggatgaagagtttggaattgtgaagggaaccatgacaaccacacattcctacacaggagaccagaggcttttggatgcttcacaccgtgacttgagaagagccagggctgcagcactgaacattgtcccaaccagcactggagctgcc

SEQ ID NO: 5598 - DNA, 252 bp, Glycine max
  Clone ID: 700874828H1
gcttcccaactcactcccaagaccaatggatcaactcctgtgaggggagagacagtggccaagttgaaggtggcaatcaatggtttcggacgcattggtagaaacttccttcgctgctggcacggccgaaaagactcaccccttgaagtcgttgttgtcaacgacagtggtggtgtcaagaatgcttcgcacctgctgaaatatgattctatgctgggaacctttaaggcagatgtgaaaatactagacaat

SEQ ID NO: 5599 - DNA, 240 bp, Glycine max
  Clone ID: 700874447H1
tataagcaacgcttcctgcaccacaaactgtcttgctccctttgtgaagatcctggatgaagagtttggaattgtgaagggaaccatgacaaccacacattcctacacaggagaccagaggcttttggatgcttcacaccgtgacttgagaagagccagggctgcagcactgaacattgtcccaaccagcactggagctgccaaggctgtgtctctagtgttgccacagctgaagggcaa

SEQ ID NO: 5600 - DNA, 249 bp, Glycine max
  Clone ID: 700873924H1
gtttgatgaccactgttcattccatcactgctacccagaagactgttgatgggccatcagccaaagactggagaggtggaagagctgcttcatttaacatcattcctagcagcactggagctgccaaggctgttggaaaagtcctccctgctttgaatggaaaattgactggtatggcattccgtgttcccactgtggatgtctctgttgttgacctcacagtgaggctggagaaggaagcctcctacg

SEQ ID NO: 5601 - DNA, 254 bp, Glycine max
  Clone ID: 700870706H1
gagcacgagtacaagccagagcttgacattatttccaatgctagctgcacaaccaactgccttgccccgctcgtcaaggttatcaatgacaggtttggcattgttgagggtttgatgaccactgttcattccatcactgctacccagaagactgttgatgggccatcagccaaagactggagaggtggaagagctgcttcatttaacatcattcctagcagcactggagctgccaaggctgttggaaaagtcct

SEQ ID NO: 5602 - DNA, 265 bp, Glycine max
  Clone ID: 700873416H1
gggtcttactgctgaagatgtgaatgcagcattcagaaaggcagctgagggtccactgaaaggtgtgttggacgtgtgtgatgttccacttgtgtctatcgacttccgctgctctgatgtttcctctactattgactcctcttgactatggtcatgggagatgacatggttaaggtggttgcttggtatgacaatgaatggggttacagccaaagggtggtggatttggcacacctagtagcaagcaagtggccaggggcagcta

SEQ ID NO: 5603 - DNA, 215 bp, Glycine max
  Clone ID: 700871765H1
ctctagaaaattcagtgctgtaacatggcttcggctactctctctgtagccaaaccagcccttcaggcaaatgggaaaggcttctctgaattctctggcctccgaagctcatcaggcttccttcccttttctagaaaatcttcagaggatttccattctgtcattgccttccagacctatgaaaaaacaaacagtggaggatacaagaagggtgt

SEQ ID NO: 5604 - DNA, 137 bp, Glycine max
  Clone ID: 700875165H1
gaccaccactcactcctacaccggtgaccaaaggcttcttgatgcgagccaccgtgacctgaggcgtgcaagggcagcagcactcaacattgtccccacttcaacaggagcagcaaaggcagtggcccttgtcctcc

SEQ ID NO: 5605 - DNA, 237 bp, Glycine max
  Clone ID: 700873668H1
cgaaccactcaggcttccttcccttttctggagaatcttcagaggatttccattctgtcattgccttccagacctatgcagttggaagcagtggaggatacaagaagggtgtgacagaagcaaaactgaaggttgccataaacgggtttggaaggattggaaggaacttcttgaggtgctggcacggtcgcaaagactcccctcttgatgtgcattgccatcaacgacaccggcggc

SEQ ID NO: 5606 - DNA, 251 bp, Glycine max
  Clone ID: 700874711H1
gatttggcacacctagtagcaagcaagtggccaggggcagctaaagcagggagtggagacccattggaggaattctgcgagacaaaccctgctgatgaggaatgcaaagtatatgaatagaggagagcgcctttttctgatttgatgattaccattaccagcagcaaaccatttttactctttgccttgtgttaacgtatcatgtgaaaaagaaggaaattgttcgttcagacggtgtctgaggagagatt

SEQ ID NO: 5607 - DNA, 232 bp, Glycine max
  Clone ID: 700873575H1
ctgcttcaccgtctgctctagaaaattcggtgctgaaacatgacttcggctactctctctgtagccaaaccagcccttcaggcaaatgggaaaggcttctctgaattctctggcctccgaagcgcatcaggcttccttcccttttactagaaaatcttcagaggatttccattctgtcattgccttccagacctatgcagttggaagcagtggaggatacaagaagggtgtg

SEQ ID NO: 5608 - DNA, 248 bp, Glycine max
  Clone ID: 700874783H1
caagcctctactatactgcttcaccttctgctctagaaaattcagtgctgaaacatggcttcggctactctctctgtagccaaaccagcccttcaggcaaatgggaaaggcttctctgaattctctggcctccgaagctcatcaggcttccttcccttttctagaaaatcttcagaggatttccattctgtcattgccttccagacctatgcagtttcgagcagtggaggatacaagaagggtgtgac

SEQ ID NO: 5609 - DNA, 253 bp, Glycine max
  Clone ID: 700875643H1
ctgcttcaccttctgctctagataattcagtgctgaaacatggcttcggctactctctctgtagccaaaccagcccttcaggcaaatgggaaaggcttctctgaattctctggcctccgaagctcatcaggcttccttcccttttctagaaaatcttcagaggatttccattctgtcattgccttccagacctatgcagttgtaagcagtggaggatacaagaagggtgtgacagaagcaaaactgaaggttg

SEQ ID NO: 5610 - DNA, 247 bp, Glycine max
  Clone ID: 700876650H1
actgcttcaccttctgctctagaaaattcagtgctgaaacatggcttcggctactctctctgtagccaaaccagcccttcaggcaaatgggaaaggcttctctgaattctctggcctccgaagctcatcaggcttccttcccttttctagaaaatcttcagaggatttccattctgtcattgccttccagacctatgcagttggaagcagtggaggatacaagaagggtgtgacagaagcaaaactg

SEQ ID NO: 5611 - DNA, 252 bp, Glycine max
  Clone ID: 700875104H1
caaggctctactctactgcttcaccttctgctctagaaaattcagtggtgatacatggcttcggctactctctctgtagccaaaccagcccttcaggcaaatgggaaaggcttctctgaattctctggcctccgcagctcatcaggcttccttcccttttctagaaaatcttcagaggatttccattctgtcagtgccttccagacctatgcagttggaagcagtggaggatacaagaagggtgtgacagaa

SEQ ID NO: 5612 - DNA, 312 bp, Glycine max
  Clone ID: 700763760H1
tattcagagagagtgcagacaatgagctcaagggaatcctctctgtgtgtgatgagccacttgtgtccgttgacttcaggtgcactgatgtgtcctcaaccctcaaaggcaaactcaatggcattgcactccgtgtgccaacaccgaacgtctcagtggtggacctcgtcgttcaggtctcaaagaagacctttgcagaagaagtgaatgcagcattcagagagagtgcagacaatgagctcaagggaatcctctctgtgtgtgatgagccacttgtgtccgttgacttcaggtgcactgatgtgtcctcaa

SEQ ID NO: 5613 - DNA, 239 bp, Glycine max
  Clone ID: 700876992H1
tctactgcttcaccttctgctctagaaaattcagtggtgatacatggcttcggctactctctctgtagccaaaccagcccttcaggcaaatgggaaaggcttctctgaattctctggcctccgcagctcatcaggcttccttcccttttctagaaaatcttcagaggatttccattctgtcattgccttccagacctatgcagttggaagcagtggaggatacacgcagggtgtgacag

SEQ ID NO: 5614 - DNA, 233 bp, Glycine max
  Clone ID: 700870942H1
gcttcggctactctctctgtagccaaaccagcccttcaggcaaatgggcaaggcttctctgaattctctggcctccgcagctcatcaggcttccttcccttttcacgaaaatcttcagaggatttccattctgtcattgccttcccgacctatgcagttgtaagcagtggaggatacaagaagggtgtgacagaacaaaacctgaaggttccataaacggatttggaaggatt

SEQ ID NO: 5615 - DNA, 221 bp, Glycine max
  Clone ID: 700871710H1
tccagacctatgcagttggaagcagtggaggatacaagaagggtgtgacagaagcaaaactgaaggttgccataaacgggtttggaaggattggaaggaacttcttgaggtgctggcacggtcgcaaagactcccctcttgatgtcattgccatcaacgacaccggcggcgtgaaacaagcctctcaccttctcaaatacgattccatcctcggaaccttc

SEQ ID NO: 5616 - DNA, 260 bp, Glycine max
  Clone ID: 700874946H1
gtttcttacaaggctctactctactgcttcaccttctgctctagaaaattcagtggtgatacatggcttcggctactctctctgtagccaaaccagcccttcaggcaaatgggaaaggcttctctgaattctctgacctccgcagctcatcaggcttccttcccttttctagaaaatcttcagaggatttccattctgtcattgccttccagacctatgcagttggaagcagtggaggatacaagaagggtgtgacagaa

SEQ ID NO: 5617 - DNA, 245 bp, Glycine max
  Clone ID: 700873965H1
cgtggatggaaaggaaatcaaagttgtttctgaccgcaaccctgccaaccttccttggaaggacttggggatagacttggtgattgaaggaaccggggtgtttgtagacagagaaggtgcagggaaacacattcaagcaggagctaagaaggtgctcatcactgctcctggtaaaggagatatccccacctacgtggttggtgtcaatgagtatgactacagccctgatgaacccatcatcagca

SEQ ID NO: 5618 - DNA, 251 bp, Glycine max
  Clone ID: 700875513H1
ggcagcaatgtcatctccgtggatggaaaggaaatcaaagttgtttctgaccgcaaccctgccaaccttccttggaaggacttggggatagacttggtgattgaaggaaccggggtgtttgtagacagagaaggtgcagggaaacacattcaagcaggagctaagaaggtgctcatcactgctcctggtaaaggagatatccccacctacgtggttggtgtcaatgagtatgactacagccctgatgaacc

SEQ ID NO: 5619 - DNA, 245 bp, Glycine max
  Clone ID: 700874967H1
accctgccaaccttccttggaaggacttggggatagacttggtgattgaaggaaccggggtgtttgtagacagagaaggtgcagggaaacacattcaagcaggagctaagaaggtgctcatcactgctctggtaaaggagatatccccacctacgtggttggtgtcaatgagtatgactacagccctgatgaacccatcatcagcaatgcctcttgcaccactaactgccttgcaccctttgtca

SEQ ID NO: 5620 - DNA, 263 bp, Glycine max
  Clone ID: 700877182H1
ggtgattgaaggaaccggggtgtttgtagacagagaaggtgcagggaaacacattcaagcaggagctacgaaggtgctcatcactgctcctggtaaaggagatatccccacctacgtggttggtgtcaatgagtatgactacagccctgatgaacccatcatcagcaatgcctcttgcaccactaagcgccttgcaccctttgtcaaggtccttgatcagaaattcggtatcatcaagggtaccatgaccaccactcactcct

SEQ ID NO: 5621 - DNA, 256 bp, Glycine max
  Clone ID: 700876055H1
gcttcggctactctctctgtagccaaaccagcccttcaggcaaatgggaaaggcttctctgaattctctggcctccgcagctcatcaggcttccttcccttttctagaaaatcttcagaggatttccattctgtcatgccttccagacctatgcagttggaagcagtggaggatacaagaagggtgtgacagaagcaaaactgaaggttgccatatacggatttggaaggattggaaggaacttcttgaggtgctg

SEQ ID NO: 5622 - DNA, 246 bp, Glycine max
  Clone ID: 700876338H1
agagtgcagacaatgagctccagggaatcctctctgtgtgtgatgagccacttgtgtctgttgacttcaggtgcactgatgtgtcctcaaccgttgactcatcgttgaccatggtcatgggagatgacatggttaaggtgattgcttggtatgacaatgagtggggctactcccaaagggttgtggatttggctgacattgttgccaacaagtggaagtgagagccatcaaattctgaattggtaa

SEQ ID NO: 5623 - DNA, 337 bp, Glycine max
  Clone ID: 700763870H1
ggtgctcatcactgctcctggtaaaggagatatccccacctacgtggttggtgtcaatgagtatgactacagccctgatgaacccatcatcagcaatgcctcttgcaccactaactgccttgcaccctttgtcaaggtccttgatcagaaattcggtatcatcaagggtaccatgaccaccactcactcctacaccggtgaccaaaggcttcttgatgcgagccaccgtgacctgaggcgtgcaagggcagcagcactcaacattgtccccacttcaacaggagcagcaaaggcagtggcccttgtcctcccaaccctcaaaggcaaactcaatggc

SEQ ID NO: 5624 - DNA, 268 bp, Glycine max
  Clone ID: 700876005H1
ctacagccctgatgaacccatcatcagcaatgcctcttgcaccactaactgccttgcaccctttgtcaaggtccttgatcagaaattcggtatcatcaagggtaccatgaccaccactcactcctacaccggtgaccaaaggcttcttgatgcgagccaccgtgacctgaggcgtgcaagggcagcagcactcaacattgtccccaattcaacaggagccgcaaaggcagtggcccttgtcctcccaaccctcaaaggcaaactcaat

SEQ ID NO: 5625 - DNA, 265 bp, Glycine max
  Clone ID: 700873429H1
ctttgtcaaggtccttgatcagaaattcggtatcatcaagggcaccatgaccaccactcactcctacaccggcgaccaaaggcttctcgacgcgagccaccgtgacctgaggcgcgccagggcggcagctctcaacattgtccccacttcaacaggagcagcaaaggcagtggcccttgtcctcccaaccctcaagggcaaactcaatggcattgcactccgtgtgccaacaccaaacgtctcagtggtggacctcgttgttcag

SEQ ID NO: 5626 - DNA, 249 bp, Glycine max
  Clone ID: 700873329H1
ctttgtcaaggtccttgatcagaaattcggtatcatcaagggcaccatgaccaccactcactcctacaccggcgaccaaaggcttctcgacgcgagccaccgtgacctgaggcgcgccagggcggcagctctcaacattgtccccacttcaacaggagcagcaaaggcagtggcccttgtcctcccaaccctcaagggcaaactcaatggcattgcactccgtgtgccaacaccaaacgtctcagtggt

SEQ ID NO: 5627 - DNA, 256 bp, Glycine max
  Clone ID: 700873301H1
cttccttggaaggacttggggatagacttggtgattgaaggaaccggggtgtttgtagacagagaaggtgcagggaaacacattcaagcaggagctaagaaggtgctcatcactgctcctggtaaaggagatatccccacctacgtggttggtgtcaatgagtatgactacagccctgatgaacccatcatcagcaatgcctcttgcaccactaactgccttgcaccctttgtcaaggtccttgatcagaaattcg

SEQ ID NO: 5628 - DNA, 238 bp, Glycine max
  Clone ID: 700870634H1
actgcttcaccttactgctctagaaaattcagtgctgaaacatggcttcggctactctctgtgtagccaaaccagagcttcaggcaaatgggaaaggcttcactgaagtctctggcctgcgaagctcatcaggctaccttccctttactagaaaatcttcagaggatttccattctgtcattggcttccagacgtatgcagtaggaagcagttgaggatacacgaagggtgtgacaga

SEQ ID NO: 5629 - DNA, 208 bp, Glycine max
  Clone ID: 700871731H1
acccacgcggctctagcttctacaaggatccccactaacaccaagtccccatccaaggcttcacactctttcgcaacccaatgcgcctcaaagagacttgaggtgacataattctctgggctaagatccacttcatgtgtgacatatgctaacgatgctagagaatcgtccttttgtgatcttgtagctgcccaactcactcccaaga

SEQ ID NO: 5630 - DNA, 165 bp, Glycine max
  Clone ID: 700875038H1
gctcattggtatccaggttgtcaaggctgaagacagtattggtccagaagtagaaaagttggtggcttctcttccagatggaggtgttcttcttctagaaaatgtgaggttttacaaggaggaagaaaagaatgatcccgagcatgcaaaaaagcttgcctctct

SEQ ID NO: 5631 - DNA, 239 bp, Glycine max
  Clone ID: 700870906H1
gatctcttgctggttgccacactacaccgatatctccaccaaacccgtttgccttgttgtttgcgaataaatggcaactaagaggagcgtgggaacgttgaaggagggtgatttgaaggggaagagggtattcgtgagggtcgatcctgaacgtgcctttggatgacaaccttaacatcaccgatgacactagagtccgtgctgctgttcccacatcaagtacttgactggttatggtg

SEQ ID NO: 5632 - DNA, 252 bp, Glycine max
  Clone ID: 700875149H1
ggctgaagacagtattggtccagaagtagaaaagttggtggcttctcttccagatggaggtgttcttcttctagaaaatgtgaggttttacaaggaggaagaaaagaatgatcgcgagcatgcaaaaaagcttggcctctctggcagatctgtttgtgaatgatgcatttggtactgctcacagggcacatgcatcaacagagggtgttactaaatacctgaagccatctgttgctggttttcttttgcaaa

SEQ ID NO: 5633 - DNA, 245 bp, Glycine max
  Clone ID: 700875409H1
cagattgtcaaggccgaggacagtattggtccagaagtagaaaagttggtggcttctcttccagatggaggtgttctccttctagaaaatgtgaggttttacaaggaggaagaaaagaatgaccccgagcatgcaaaaaagcttgcctctctggcagatctgtatgtgaatgatgcatttggtactgctcacagggcacatgcatcaacagagggtgtgacgaaatacctgaagccatctgttgc

SEQ ID NO: 5634 - DNA, 243 bp, Glycine max
  unsure at all n locations
  Clone ID: 700877067H1
gttctataaggaggaagagaagaatgaccctgagtttgcaaagaagttggcttctcttgctgatctctacgtgaatgatgctttcggcactgcccacagagctnctgcttctacagaaggagtggccaaatacttgaagccctctgttgcaggattccttatgcagaaggaacttgactatctagttggagctgtgtcaaaccccaagagaccatttgctgctagcgttggtgggtcaaggtg

SEQ ID NO: 5635 - DNA, 173 bp, Glycine max
  Clone ID: 700874150H1
attcggctcgagcgcgacggccgccctttttttttttgtacttaaactacattcccatttgttttacgctttatgagatttcatcatcctgtatttttggtttctgttttcggacttcaatggaaattaatggatgagaactaatgaataaaaaaaaaaaaaaggggggcccc

SEQ ID NO: 5636 - DNA, 252 bp, Glycine max
  Clone ID: 700870534H1
aatggcttcatccgtatcattggatttgacaacgttcgccaagtgcagtgcatcagcttgcatcgcctacaagcccccaggcttctaagtcattgaaaaatttgcaaagcatctgtagccaccccactttgtttgttgtcttaaactacattcccatttgtttttgctttatgagatttcatcatcctgtatttttggtttctgttttcggacttcaatggaaattaatggatgagaactaatgaataagct

SEQ ID NO: 5637 - DNA, 234 bp, Glycine max
  Clone ID: 700871648H1
gagagacaagtagttgagagctaagaataacgaaatggcttcctcaatgatctcctccccagctgttaccaccgtcaaccgtgccggtgccggcatggttgctccattcaccggcctcagatccatggctggcttccccacgaggaagaccaacaatgacattacctccattgctagcaacggtggaagagtacaatgcatgcaggagtggccaccaattggcaagaagaagtt

SEQ ID NO: 5638 - DNA, 259 bp, Glycine max
  Clone ID: 700870507H1
gaacaagtagttgagaactaagaaggagtagcaaatggcttcctcaatgatctgcttcctcagctgttaccactgtcaaccgtgccggtgccggcatggtggctccattcactggcctcaagtccatggctggcttccccccagaaagaccaacaatgacattacctccattgctagcaacggtggaagagtgcaatgcatgcaggtgtggccacctgttggcaagtagaagtttgagactctttcctacctgccagac

SEQ ID NO: 5639 - DNA, 233 bp, Glycine max
  Clone ID: 700870628H1
gaccaacaatgacattacctccattgctagcaacggtggaagagtacaatgcatgcaggtgtgtccaccaattggcaagaagaagttcgagactctttcctacttgccagacctcgatgatgcccaattggcaaaggaagtcgaataccttctaaggaaaggatggattccttgcttggaattcgagctggagcacggtttcgtgtaccgtgagcacaacaggtcacctggat

SEQ ID NO: 5640 - DNA, 218 bp, Glycine max
  unsure at all n locations
  Clone ID: 700872884H1
agaagaacaagtagttgagaactaagaaggagaagcaaatggcttcctcaatgatctcttccccagctgttaccactgtcaaccgtgccggtgccggcatggttgctccattcactggcctcaagtccatggctggcttccccaccagatagaccccaaatganattacntcnattgctagnaactgtggaagagtgcaatgcatgnaggtgtggcca

SEQ ID NO: 5641 - DNA, 257 bp, Glycine max
  Clone ID: 700872433H1
cggctcgaggaagaacaagtagttgagaactaagaaggagaagcaaatggcttcctcaatgatctcttccccagctgttaccactgtcaaccgtgccggtgccggcatggttgctccattcactggcctcaagtccatggctggcttccccaccagaaagaccaacaatgacattacctccattgctagcaacggtggaagagtgcaatgcatgcaggtgtggcccacagttggcaagaagaagttctagactcttc

SEQ ID NO: 5642 - DNA, 213 bp, Glycine max
  Clone ID: 700872290H1
agaagaacaagtagttgagaactaagaaggagaagcaaatggcttcctcaatgatctcttccccagctgttaccactgtcaaccgtgccggtgccggcatggttgctccattcactggcctcaagtccatggctggcttccccaccagaaagaccaacaatgacattacctccattgctagcaacggtggaagagtgcaatgcatgcaggtgt

SEQ ID NO: 5643 - DNA, 233 bp, Glycine max
  Clone ID: 700874142H1
aagtagttgagaactaagaaggagaagcaaatggcttcctcaatgatctcttccccagctgttaccactgtcaaccgtgccggtgccggcatggttgctccattcactggcctcaagtccatggctggcttccccaccaggaagaccaacaatgacattacctccattgctagcaacggtggaagagtgcaatgcatgcaggtgtggccaccagttggcatgaagaagtttga

SEQ ID NO: 5644 - DNA, 240 bp, Glycine max
  Clone ID: 700873834H1
gaagctgcctatgttttgttgcactgatgcttctcaggtgttgaaggagcttcaagaggctaagactgcataccccaacggcttcatccgtatcatcggattcgacaacgttcgccaagtgcagtgcatcagcttcatcgcctacaagcccccaggcttctaagtgtgaaaaatttgcaaagcatttgtagccgccatcccactttgtttgtctgtacttaaactacattcccatttgtt

SEQ ID NO: 5645 - DNA, 234 bp, Glycine max
  Clone ID: 700872831H1
aagtagttgagaactaagaaggagaagcaaatggcttcctcaatgatctcttccccagctgttaccactgtcaaccgtgccggtgccggcatggttgctccattcactggcctcaagtccatggctggcttccccaccaggaagaccagcaatgacattacctccattgctagcaacggtggaagagtgcaatgcatgcaggtgtggccaccagtcggcaagaagaagtttgag

SEQ ID NO: 5646 - DNA, 252 bp, Glycine max
  Clone ID: 700871129H1
gaccaacaatgacattacctccattgctagcaacggtggaagagtacaatgcatgcaggtgtggccaccaattggcaagaagaagttcgagactctttcctacttgccagacctcgatgatgcccaattggcaaaggaagtcgaataccttctaaggaaaggatggattccttgcttggaattcgagctggagcacggtttcgtgtaccgtgagcacaacaggtcacctggatactatgatggacgctactg

SEQ ID NO: 5647 - DNA, 245 bp, Glycine max
  Clone ID: 700876824H1
agaagaacaagtagttgagaactaagaaggagaagcaaatggcttcctcaatgatctcttccccagctgttaccactgtcaaccgtgccggtgccggcatggttgctccattcactggcctcaagtccatggctggcttccccaccagaaagaccaacaatgacattacctccattgctagcaacggtggaagagtgcaatgcatgcaggtgtggccaccagttggcaagaagaagattgagact

SEQ ID NO: 5648 - DNA, 231 bp, Glycine max
  Clone ID: 700872171H1
gaagaacaagtagttgagaactaagaaggagaagcaaatggcttcctcaatgatctcttccccagctgttaccactgtcaaccgtgccggtgccggcatggttgctccattcactggcctcaagtccatgctggcttccccaccagaaagaccaccaatgacattacctccattgctagcaacggtggaagagtgcaatgcatgcaggtgtggccaccagttggcaagaag

SEQ ID NO: 5649 - DNA, 245 bp, Glycine max
  Clone ID: 700871089H1
gaccaacaatgacattacctccattgctagcaacggtggaagagtacaatgcatgcaggtgtggccaccaattggcaagaagaagttcgagactctttcctacttgccagacctcgatgatgcccaattggcaaaggaagtcgaataccttctaaggaaaggatggattccttgcttggaattcgagctggagcacggtttcgtgtaccgtgagcacaacaggtcacctggatactatgatggac

SEQ ID NO: 5650 - DNA, 256 bp, Glycine max
  Clone ID: 700876346H1
agaagaacaagtagttgagaactaagaaggagaagcaaatggagtcctcaatgatctcttccctagctgctaccactgtcaaccgtgccggtgccggcatggttgctccattcactggcctcaagtccatggctggcttccccaccagaaagaccaacaatgacattacctccattgctagcaacggtggaagagtgcaatgcatgcaggtgtggccaccagttggcaagaagaagtgtgagactctttcctacct

SEQ ID NO: 5651 - DNA, 248 bp, Glycine max
  Clone ID: 700873322H1
gaagaacaagtagttgagaactaagaaggagaagcaaatggcttcctcaatgatctcttccccagctgttaccactgtcaaccgtgccggtgccggcatggttgctccattcactggcctcaagtccatggctggcttccccaccagaaagaccaacaatgacattacctccattgctagcaacggtggaagagtgcaatgcatgcaggtgtggccaccagttggcaaactgaagtttgagactcttt

SEQ ID NO: 5652 - DNA, 251 bp, Glycine max
  Clone ID: 700872532H1
aagtagttgagaactaagaaggagaagcaaatggcttcctcaatgatctcttccccagctgttaccactgtcaaccgtgccggtgccggcatggttgctccatcactggcgtcaagtccatggctggcttccccaccaggaagaccaacaatgacattacctccattgctagcaacggtggaagagtgcaatgcatgcaggtgtggccaccagatggcaagaagaagtttgagactctttcctacctgcca

SEQ ID NO: 5653 - DNA, 250 bp, Glycine max
  Clone ID: 700876909H1
gttgagaactaagaaggagaagcaaatggcttcctcaatgatctcttccccagctgttaccactgtcaaccgtgccggtgccggcatggttgctccattcactggcctcaagtccatggctggcttccccaccaggaagaccaacaatgacattacctccattgctagcaacggtggaagagtgcaatgcatgcaggtgtggccaccagttggcaagaagaagtttgagactctttcctacctgccagac

SEQ ID NO: 5654 - DNA, 273 bp, Glycine max
  Clone ID: 700872401H1
cggctcgaggaagaacaagtagttgagaactaagaaggagaagcaaatggcttcctcaatgatctcttccccagctgttaccactgtcaaccgtgccggtgccggcatggttgctccattcactggcctcaagtccatggctggcttccccaccagaaagaccaacaatgacattacctccattgctagcaacggtggaagagtgcaatgcatgcaggtgtggccaccagttggcaagaagaagtttgagactctttcctacctgccagacct

SEQ ID NO: 5655 - DNA, 249 bp, Glycine max
  Clone ID: 700876415H1
agaagaacaagtagttgagaactaagaaggagaagcaaatggcttcctcaatgatctcttccccagctgttaccactgtcaaccgtgccggtgccggcatggttgcccattcactggcctcaagtccatggctggcttccccaccaggaagaccaacaatgacattacctccattgctagcaacggtggaagagtgcaatgcatgcaggtgtggccaccagttggcaagaagaagtttgagactctttc

SEQ ID NO: 5656 - DNA, 248 bp, Glycine max
  Clone ID: 700874579H1
caagtagttgagaactaagaaggagaagcaaatggcttcctcaatgatctcttccccagctgttaccactgtcaaccgtgccggtgccggcatggttgctccattcactggcctcaagtccatggctgcttccccaccagaaagaccaacaatgacattacctccattgctagcaacggtggaagagtgcaatgcatgcaggtgtggccaccagttggcaagatgaagtttgagactctttcctacct

SEQ ID NO: 5657 - DNA, 257 bp, Glycine max
  Clone ID: 700872477H1
gaagaacaagtagttgagaactaagaaggagaagcaaatggcttcctcaatgatctcttccccagctgttaccactgtcaaccgtgccggtgccggcatggttgctccattcactggcctcaagtccatggctggcttccccaccagaaagaccaacaatgacattacctccattgctagcaacggtggaagagtgcaatgcatgcaggtgtggccaccagttggcaagaagaagttactgactctttcctacctgc

SEQ ID NO: 5658 - DNA, 246 bp, Glycine max
  Clone ID: 700873947H1
aagtagttgagaactaagaaggagaagcaaatggcttcctcaatgatctcttccccagctgttaccactgtcaaccgtgccggtgccggcatggttgctccattcactggcctcaagtccatggctggcttccccaccaggaagaccaacaatgacattacctccattgctagcaacggtggaagagtgcaatgcatgcaggtgtggccaccagttggcaagaagaagtttgagactctttcctac

SEQ ID NO: 5659 - DNA, 249 bp, Glycine max
  Clone ID: 700876930H1
gttgagaactaagaaggagaagcaaatggcttcctcaatgatctcttccccagctgttaccactgtcaaccgtgccggtgccggcatggttgctccattcactggcctcaagtccatggctggcttccccaccagaaagaccatcaatgacattacctccattgctagcaacggtggaagagtgcaatgcatgcaggtgtggccagcagttggcaagaagaagtttgagactctttcctacctgccaga

SEQ ID NO: 5660 - DNA, 249 bp, Glycine max
  Clone ID: 700874075H1
gcacaattggcaaaggaagtagaataccttcttaggaagggatggattccttgcttggaattcgagttggagcacggtttcgtgtaccgtgagcacaacaggtcaccaggatactacgatggacgctactggaccatgtggaagctgcctatgtttggttgcactgatgcttctcaggtgttgaaggagcttcaagaggctaagactgcataccccaacggcttcatccgtatcatcggattcgacaac

SEQ ID NO: 5661 - DNA, 247 bp, Glycine max
  Clone ID: 700873809H1
ggacgctactggaccatgtggaagctgcctatgtttggttgcactgatgcttctcaggtgttgaaggagcttcaagaggctaagactgcataccccaacggcttcatccgtatcatcggattcgacaacgttcgccaagtgcagtgcatcagcttcatcgcctacaagcccccaggcttctaagtgtgaaaaatttgcaaagcatttgtagccgccaccccactttgtttgtttgtacttaaactac

SEQ ID NO: 5662 - DNA, 259 bp, Glycine max
  Clone ID: 700874925H1
ggacgctactggaccatgtggaagctgcctatgtttggttgcactgatgcttctcaggtgttgaaggagcttcaagaggctaagactgcataccccaacggcttcatccgtatcatcggattcgacaacgttcgcaagtgcagtgcatcagcttcatcgcctacaagcccccaggcttctaagtgtgaaaaatttgcaaagcatttgtagccgccaccccactttgtttgtttgtacttaaactacattcccatttgtt

SEQ ID NO: 5663 - DNA, 264 bp, Glycine max
  Clone ID: 700874210H1
gaacaagtagttgagaactaagaaggagaagcaaatggcttcctcaatgatctcttccccagctgttaccactgtcaaccgtgccggtgccggcatggttgctccattcactggcctcaagtccatggctggcttccccaccaggaagaccaacaatgacattacctccattgctagcaacggtggaagagtgcaatgcatgcaggtgtggccaccagttggcaagacgaagtttgagactctttcctacctgccagaccttga

SEQ ID NO: 5664 - DNA, 155 bp, Glycine max
  Clone ID: 700873832H1
gttttcggacttcaatggaaattaatggatgagaactaacacaacacaatagcttattcattagttctcatccattaatttccattgaagtccgaaaacagaaaccaaaaatacaggatgagaactaatgaataagctattgtgttgtgttaatc

SEQ ID NO: 5665 - DNA, 242 bp, Glycine max
  Clone ID: 700874452H1
gcaggagaacaagtagttgataactgagaaggagaagcagatggcgtcctcagtgatctctgccccagctggtaccactgtcaaccgtgccggtgccggcatggttgcgccattcactggcctcaaatccatggctggctgccccagcagaaggaccaagaatgacgttagctccattgctagcagcggtggaagagttcaatgcatgcaggtgtggccaccagttggcagagaagaagttt

SEQ ID NO: 5666 - DNA, 335 bp, Glycine max
  Clone ID: 700763859H1
gaaggagaagcaaatggcttcctcaatgatctcttccccagctgttaccactgtcaaccgtgccggtgccggcatggttgctccattcactggcctcaagtccatggctggcttccccaccaggaagaccaacaatgacattacctccattgctagcaacggtggaagagtgcaatgcatgcaggtgtggccaccagttggcaagaagaagtttgagactctttcctacctgccagaccttgatgatgcacaattggcaaaggaagtagaataccttcttaggaagggatggatccttgcttggaattcgagttggaggcggtttcgtgtacgtg

SEQ ID NO: 5667 - DNA, 237 bp, Glycine max
  unsure at all n locations
  Clone ID: 700872817H1
ctctttttnatnngttggatgatccatgaaatccagctgtgattgctgataatgttggtgataatgttggtgatatcgctggtatgggatctgatctttttggttcatatgccgagtcatcctgtgctgctcttgttgttgcttccatctcttcttttggggtgaatcatgagttgactgctatgttataccctctaattatcagttctgtgggtatccttgtttgtttgctcacaa

SEQ ID NO: 5668 - DNA, 237 bp, Glycine max
  Clone ID: 700871681H1
cggtatgatgttatttctgcatccaacactggtggttcttgggataatgccaagaagtacattgaggctggtgcttctgagcatgcaagaagccttggtccaaaagggtcagattgtcacaaggcagctgttattggtgacaccattggagaccctctaaaggatacatctggaccttcacttaacatccttattaagctcatggcggttgagtctcttgtgtttgctcccttcttt

SEQ ID NO: 5669 - DNA, 497 bp, Glycine max
  unsure at all n locations
  Clone ID: jC-gmle01810000a03a1
ctctcttctctatctcttcctcgtgtgtgtgtgagatgaaacccaacctcgtagctcgatcttcctttaccaatcattaataaggaatggatctgtggctaaaaaaacaatcaagggctaattgatgtgttcatcagatcacacacaaaatcaagcagaaaagaaaaagaaggtttttctcgtacggatattacgagaaggagaattttgtttgagtggatatggcgacgtactttcatggcagcacttcagaaatcccttcctccgctgaagggttgcagacactttaccttatgaatccaaactacgtaccgtactctgacgcggcacaacacccaacgcaaaacatgctcctcgtcaatcccaacaacaacaacactagtaacactagtcccacttncaccaacgcgctcaaccttggtaacttctcccacgcgccgncaccttcttcttccaacaacaacaacaaccaccgtgaacaacaacaacatcacctg

SEQ ID NO: 5670 - DNA, 519 bp, Glycine max
  unsure at all n locations
  Clone ID: jC-gmle01810000a03d1
aggcatataactccaaatccaatatataatacattacctatccaaacaaaccattcaattccttgtattgtacctagctacttttcaataccatatacaatataccttccccaactcaacttgaatccttaaattaaactaattcagaacatgtaaatctgaattccctgcaagttcataatcttgaaccagtttccatctttatacatggagcaagttaccataaacttctccatttcttttatttctttttttttcccctcctgttgctattcttctgctaagttagtgtgtcgtaacactctgaactgcattgtgttttgtggatatataatatattgcaacatcagaaaaagaagaaaataattcaattctttcaggggggtgttcttcattgattaattatcctagctagctagttaattatcaattcttttaagccacgaaatcccgcaacaactgcgcagcaaacctctntctgttttgaatgtcaatgctctcataactgatacctgagtg

SEQ ID NO: 5671 - DNA, 327 bp, Glycine max
  Clone ID: jC-gmle01810000a04d1
ggtattgtatttaacctttacccatatagaaggactctgtgcatgcatactttatttcaccttagacccatttctgggccaaacaacaaatgacattttaatccactaatactatgctgacatataccctaataaacggacactcttgctatatctttgccctgaattcacggaagtatatcatacgactctcttaatcactgggcgaaactgtttgatgaacaactgggcgttactgaaaagtgttcccctagagctgcttgtgctacaccaccataaacgactgctttaatggttataaatacacggccatgctcctataggaat

SEQ ID NO: 5672 - DNA, 300 bp, Glycine max
  Clone ID: jC-gmle01810000a05d1
gcctgccgtcctttttttattattgtattcttctatatgccaagctacaaagagagtatgtggtcgctacaatacttatgtatagaatctctgaatatcttaattctcgtcatcctagcttagccaatctccaccaacagagactatacccgatggtgattcaaagaatatctgggtatgcctcatcacgactacttacagcacacaaattgtggaattggaaggacttagtctcaacgccctttgatagatctccccgtaccaacgtgcaacggcgtggttatggaataaataggaacc

SEQ ID NO: 5673 - DNA, 394 bp, Glycine max
  Clone ID: jC-gmle01810000a07d1
aaggctcaagcacagcacaatacggtggtgacttaaacggtgacacaatttattcaattatttttaaagcactacggatttgctgaatttgttcataattttagagccttgtttgtgtagaatcacacattcttgtgaaccagctaccaccacagtagggtgttcgcttgtgctgactgcatcaacttctttgacactttcaacgttgacatcctccaattcaccacagccaatggcttcaaaaataagatcattgacttcttgaaacctctcttgagagagggacacctctgcaagaagcctccaagcattggcttcagatgccttatcataatccttcttactctttagaaccatgtgcccactaatttcccacacagcaagatttacttgg

SEQ ID NO: 5674 - DNA, 433 bp, Glycine max
  Clone ID: jC-gmle01810000a08d1
catgtgcctactatcaggcatcaagaactgagtgaggcgggtccctttcataggtaatgtagtcttgatccatatacataaaaccccatcatgcacgctttaacgccgagtatgcatctccaggctgaccatgcaatgcatcttcgcggacaaacaacagatggatgcgttgttaaaaaatgctgaccgcatgatcatggcatgacggtattggaccactcaagcttgctgctattgggcgaaatgattgcccctaaacaccactcccactatcgagaatcgctcctttacattactgcacaattgtgcttctggcactgcaccagatagccctcgtcctgttcagtgcctaatgcgcttcccggcttgcgcactgcacctttgaccgtaatggtttgatctacttcagcatgccaccatcggagtgtttgct

SEQ ID NO: 5675 - DNA, 362 bp, Glycine max
  Clone ID: jC-gmle01810000b02d1
gcctgtcttccttttttttttggatttaacttaagagcagtggattatcatcattatcagcgggtgatgaaacaatattcaacaggtgcacgaactgtatgaatagcaatatgcgttcatcctcaacgggatatgaaagccctctgccatttaacacactatgctgtggctacagctcgcacttaacagcctgagaagctgtcaaaccgccgcttactatgttgggggcaccgtacacacgttcagctctgttctggggagggccagaactctcaagcacggaccctaggtgctgggaatgctgcgtatccccttgagtctggatttgtccatgccttagcctttagcattgctcccagatg

SEQ ID NO: 5676 - DNA, 530 bp, Glycine max
  Clone ID: jC-gmle01810000b04d1
agttgggaatgtctttctaatataccaagagagaacgtatatatacatccatacataaatacaccatggagccatatatgcaaccaaccacaaataaaagctgatttctgaaatacaatgaacagctataacctaaaatacagatactatttctacatttttccccttcaacaacttctatctatcatacacctatataatcaaattattgagactattttaaaaccacaaaagcttaaagaaaagtgttgcaccacagcagcagttggcagagtaaaaaaatcgtagcatctaatgtttatagcaccacaactaggcttctagaggaattcattgtcaaaagacaccagcttccattgaactcattcagagcacaagattcaacgatcagtctttaagggggtcaggtatgaaagaagtccactaatggagctgtgaaatgcttcactcccttggcctagcaagccacaaagaactcagagctcgcagccgtgagaaataatcactgatggcgagaagagctcgagctg

SEQ ID NO: 5677 - DNA, 383 bp, Glycine max
  Clone ID: jC-gmle01810000b06d1
agaatgcaaagcacaatttgcacagttgcactgggggtatggtattgatccataactaaggaagagcattactaatgtactagtaggtgatcaacaaatttaatttaatcccaccaaaaggattttcatttcaatcatcatccaatggcaagtaagaaaattacgagacggattcagtacggcacactaactgcggcagttgctgcgcttgggcgcgttgccctttgatccatttacgcgtgctcgctttccagccgtctgatcctggctcaagccaaagccgatcccatggccatgatcttcccccaccatctacaagaacattccttgtgagtactacaaactgtcccccttcgttttcacattgttcatcattgatatca

SEQ ID NO: 5678 - DNA, 489 bp, Glycine max
  Clone ID: jC-gmle01810000b07d1
gcacgtgcctcctatgaggcatctatatcatggggggggcgtgcctatccatagatagtgtgctctcaaaccatttacaaaaaaccaaaatatgcacgctttaacgcctagaatgctactaacggctgtacatgcgatgcatattagaagacatgcaacatatggatgcgttgttaataaatgctgaccgctttaccataccatgacggtatggaaccaatctagactgctgctataggacgaaatgattgcccctaaacaacacgcccactatcgcgagtagggcctctacattactgcacaattctgcttctggaactgcgcctgatagacctcgtactatcaggtgcctaatgcgctttcaggcttgcgcactgcaactttgaccgtactggtgggacctacttcagcatgccaccataggattgtttgctgttgcgcgccattagtctctgcggatgtcatggtccactagccgccgctgacctc

SEQ ID NO: 5679 - DNA, 470 bp, Glycine max
  Clone ID: jC-gmle01810000b08d1
catgtgcctactatcaggcatcaagaactgattaggctgctccctttcataggtaatgtagtcttgatccatatacataaaaccccaacatgcacgctttaacgccgcgtatgcaactccaggctgaacatgcgatgcatcttcgcagacaaacaacagatggatgcgttgttaaaaaatgctgaccgcgtgatcatcgcatgacggtattggaccactcgagtttgctgcgattggccgaaatgattgcccctcaacaccacgcccactatcgcgactcgcgcctctacatcactgcacaattctgcttctggcactgcgccagatagccctcgtcctcttcggtgcctaatgcgcttcccggcttgcgcactgcacctttgaccgtaatggtttgatctccttcagcatgccaccatcggagtgtttgctgtagcgcgccgttggtctcttcggatgtcatggtccac

SEQ ID NO: 5680 - DNA, 431 bp, Glycine max
  Clone ID: jC-gmle01810000b09d1
gggacaaatccaaatattgctgctgcattgtcacagggtctacagaaccttgaaaactaacagcaatcaaatatgttcgccatttggaatttgaatacaaatacagtgcatcgattatatcaccctctgtacagagccattgtgtgactgaaatttgatacagaacattatctattttggttcataataaaataggaaagatctttatgttacgtgcagcattatgtgaagaagggggaagtgcatccagctggggctttagtccttagtcttcccttttacttaatgattggctccttctgcacgttcacatttccttaaactggttaagcactgatgaccttgttcttacgtccgaaggtccaatggggtttctgtggagtacgccttaatgacttcacttcaaaggggtttgacttgctcctgagaca

SEQ ID NO: 5681 - DNA, 525 bp, Glycine max
  Clone ID: jC-gmle01810000c01d1
aatagaaagatattttccttaacaaaaaatgtcatattcggatacaaactactcatgatatgaactatgaagcatcggaattttacagtgcagacactggcaagttacagatatgaagaatgtaagcaaaatcatgaccggaaaaggatgtggagggcaaacaaaattcaactatcaagtatgagtactagaagttttcttgagtcaggttgacaatattagatccttcttttgatccacgccacatctgaaataggttcttgtaatctaagagtatggatcctcccatcaatcaccacctcgtgaaagcccatgaagcttcccataggtttatctggagggattgaaatttgcccaatgattacatttcaaatgctctaagccgagaaaacactaggtggaataatattcctcctttgcttctcttgtgacagcacataagaataacttaacctcagacaaaaatggatcttgacaataacttgattggatcctatctacgtcataatattaagcccagtcaag

SEQ ID NO: 5682 - DNA, 339 bp, Glycine max
  Clone ID: jC-gmle01810000c05d1
gtgaagaacaagacaagattgattgaacatacatgacctacgttgtggtgaaacctattcagacccttccatatatgccttgaagccgtaactccatgacgatcgtggcgcatgcccctgaggcgatgcactgatgagggctaaactaaaacttctgaaaagtggctcgctccgcaataccggcagttgagcagggtggtcttgaggacaccagcggcatcctccggctgagggctctcgcggagaacacgctccattttgtcgttgaacatatacctggggtactcctggacagcaaacatggtgaacatggggttgagcaacatgatgaagggggtg

SEQ ID NO: 5683 - DNA, 383 bp, Glycine max
  Clone ID: jC-gmle01810000c06d1
agaattaaattctagaatgatcatagatagcttatcaatagaagaatgtaattcaacagataagcacaaaataatacaaactatttccctcctcccttttgttgctctggaggccctatacctcgaattctaggaactttgtgcttgatcataacagaatgctgttaaaataatatatcaaaccaccattactgtgaaatggggttgtaaatatgggtgcgctcatatcgcagggtaaatgaatccaatacatggatcgagtctgaatgaaaatttgttaggacgatattacactgcattcctcatagtcttggactcttggattcctttgaagcgcttgcattggtgaagagctcaatgagagctgtgttcaagctccagtt

SEQ ID NO: 5684 - DNA, 318 bp, Glycine max
  Clone ID: jC-gmle01810000c07d1
atacagacccatattggttttcaaccaaaaaaacatttacacagggtaaatccaaaccaaacccactgaataattgcaatcctaaatttgtaagtggcagcccaaatataaatctccctactggcctactcttcttttgcctaatggataaacagattccaacaacacatacacagaccccaccctacagttaatccttgttgacacaatcagtgttacaggcagctgtaatttaatactacacgaaacctaaaaagaacaaagtttatgaatcaccaccagcctcagcgacaggatgatcatgttgacgtacaaact

SEQ ID NO: 5685 - DNA, 439 bp, Glycine max
  Clone ID: jC-gmle01810000c08d1
gggaaaacgataattggggcttaaacattgaacaatacttgtcaagggtaaataaattaaaaatgtatttggggattaaaaaagcatattcaaattcagttaaaactcgccaccaacgcacatatacaaataaaagctaaaacaaacatatttgaatgttgtcatggttaccttgtcttgtccatttggtacaaagcaaagcaaaagaagcccaacattttgatgatcctgccatggttcattgaacaattggctgccaacacacattctatatttctctgccaaagcaacaatgacaaatacaaaacatagtgaagcttgtaatggcacaaaactaagctaatggttttgaagcatttcatccttaagtaactctttcctactatgttggcaagatggaaagattcaagattgaattattatccttcacaaacagtcg

SEQ ID NO: 5686 - DNA, 498 bp, Glycine max
  Clone ID: jC-gmle01810000d05d1
agaattaaatactagaatgatcatagatagcttatggatagaggaatgtaattcaacagataagcacaaaataatacaaactatttcccttctcccttttgttgctctggaggccctagacctcgaattctaggaactttgtgcttgatcataacagaatgctgttaaaataatatatcaaaccaccattactgtgaaatggggttgtaaatatgggtgtgcttatatcgcagggtaaatgaatccaataaatggatcgagtctgaatgaaaatttgttgtgacaatattaaacttgatttctcatagtcttggactcttggattcctttgaagtgttgcattggtgaagagctcaatgagagcgtgttcaagctccaagtttccagaaacctgaagaactgacaaaggatttgatcgttgcatttccagtaccatgtgggagaaatgcccaacgggaatacttgtaaaacagcacagccagctgctgcagcttctga

SEQ ID NO: 5687 - DNA, 423 bp, Glycine max
  Clone ID: jC-gmle01810000d07d1
gtcatcacaatgtgctggaacctttaatcagaaacatttgccaatgagagcaaatgcccctctactacatatgccattttcattaaaccgtttccatttaaatacaatatttttattataataaatattctattcaaggtacattcatccactttcataagcataatcacaccagaacagagatataggggctcccacttttgagggtctaagtgtaacggtactactgaggtatagaggcaagcacctctaacaaggaagctgcgaattgcatttgagtctcttcatttattgtcacgaagagtggcacgtgcacgaaaagggatttgatcccgttttgctcggcaaagcgaatggaatgatcgttaacataattgcacacaaacctgcctgcatcatctgataccataacttcatattcct

SEQ ID NO: 5688 - DNA, 455 bp, Glycine max
  Clone ID: jC-gmle01810000d08d1
gtcatcacaatgtgctggaacctttaatcagaaacatttaccaatgagagcaaatgcccctctactacatatgccattttcattaaaccgtttccatttaaatacaatatttttattataataaatattttattcaaggtacattcatccactttcataagcataatcacaccagaacagagatataggggctcccacttttgagggtctaagtgtaatggtactactgaggtatagaggcaagcacctctaacaaggaagctgcgaattgcatttgagtctcttcatttattgtcacgaagagtggcacgtgcacgaaaagggatttgatcccgttttgctcggcaaagcgaagggaatgatagtaaacataattgcacacaaacctgcctgcatcatctgataccataacttcatatcccttctctgtcaaggctttggtgatctccacaaca

SEQ ID NO: 5689 - DNA, 494 bp, Glycine max
  Clone ID: jC-gmle01810000d09d1
aaattccaatcatcaaagaaatgaatgggctccgtttaatactctcattccaaatctttgaatttatgagttcccaacaaacatgaattgtaaagcaacacgaacaaggacaagagaggaaggtgtaagaaggaagaacaatgagagagacattacaaccacatcccacattagtattaattatttcttaggagcaagcctagacttaattttctcaacctccttggtacccacctggaacgccttggttaacacattgtctggaaccggtggcgtagctgcaaacaacgttagaacaatggactgtgtgccaggcaattgactgttgaatgctgcaatcactgaagcttgttcctttccattgttcttttggaagtgaaccaacccttttgggaacacaaatatttcacccttgcttatgctcttagatatgagcacgttggctgtggttatgaacccaacatctagtgttccttgaagcacaaacactacct

SEQ ID NO: 5690 - DNA, 526 bp, Glycine max
  Clone ID: jC-gmle01810000e02d1
gcctttcgtccttttttttttttttttttttttttaacaaattttatataattcattttgggaatagggtcaggtgtattggaactctaatgctaaaatttgaaaaagaaaaacaaagagcacaaaataataatgggcaaaaagttatagccctctgatgacttaacaaagaatgaaaattaacccataagagcagatcatcaacatttgatggcaactcctctacagtcacattgtagaacttttgaatatcagacagcattcttgcatcatccaaagtcacaaagtttatggcaacaccttttcttccaaaacgcccacttcgtcctatgcgatgaagataattttcaggtcgggttggcagaacatagtttataaccaaagacacctgctgtacatctataccacgagccaagaggtcagtggtaattagaactcgagaagagccagagcgaaattcccgcatgatgatgtcacgagtgttttcgtccatgtctccatgggtggctgagacttgatggtcatt

SEQ ID NO: 5691 - DNA, 252 bp, Glycine max
  Clone ID: jC-gmle01810000e05d1
ccggggaaaaacccccccaagacctgggagtttttgggtttttattacaaaaaccgggggacaccccatttttgcccgatcccgccgccccgtcccttgaacaaaagcgaatcaaaagccccctactgcgggctggggggccctcaattaaagccaacccacgccgctaaaaaaccccccgggcggggtgccacgggtttgataataagtaaaaaggggccttaaccctcccacccccaagggggaataaaa

SEQ ID NO: 5692 - DNA, 356 bp, Glycine max
  Clone ID: jC-gmle01810000e07d1
ctccccacattgtaagcaaattaaaggggcatgtgaatttgggacaaatccaaatattgctggtgcattggcacataatctacaaaaccttgaaaactaacagcgatcaaatatgttcgccattcggaatttgaatacaaatacggggcatcgattatataaccctatgtacaaagcccatgtctgactgaaatttgatacagaacattatctattttgtctcataagaaaacgcgaaagacctttttgccccctccaccattatctgaagaagggggaagtgcatccacctggagctttaagccttccctttcccttttacttcataactggatgcctctgcacggtcacatttc

SEQ ID NO: 5693 - DNA, 383 bp, Glycine max
  Clone ID: jC-gmle01810000e08d1
aaaaagcaagccagagggcaaacttaaccctaattaaattttttcaacaaacaatctttatccttctttctcccgcgatcttcaacaaaaggtaaaacggatccctcccgggctccctccggttttcaaaatctacctcccctcctcaattacggggggttctctggaattcaaccccccaagctgttgtcaaggtgaatttcctccttaaacaccctggtgttcctccactcgacttacttgatggggagcacccccataaaaagggtgagccccattaacccccacatatctccctgggtcataaaacggtggccaaacctattattaccccccctacccagggccgttgtagttccccccactgcaaattttggcgaaaa

SEQ ID NO: 5694 - DNA, 504 bp, Glycine max
  Clone ID: jC-gmle01810000e09d1
cagagaagttggtaaaacttaaaaatccgtaggtcacacaaccactaatcctgtaactcaccaaatatgtcatagttcctaatgtctccctccaaagtaaataacattttgaattatatactcaaaacctactctactaagaagaacgctgtaatccagttcttccatacttttaaaagagctccattaattgctgcgagacatcttgaagtatggatggtgttgtctggaactcttgccagatgttctgataagctgcgagatccatgttcagaaacttggcagcaagatatgcagctccagcagcaatatgatggggtttaaattgaagccacagagaactccgaagccatccgaggcatcaacttagcatatgttcccaccatgacagatcatgtcagcaactataaaagcagcaactcaggaagaatacaattccaagaatctgtgcaggattgctgataagagtaccaaactatagcaatattttatactcatctagag

SEQ ID NO: 5695 - DNA, 458 bp, Glycine max
  Clone ID: jC-gmle01810000f07d1
agaacaaacagataactgaatttattatttctcagagtcaaggcaagcattatgatacatcataccccaaaacaccaacaacagtactcaggtgagcagttattacatcgtactttcacatgaacgcgtcatataggctgataaaagcaaatacatacaacacaggaccttaaggctcaagcacagcacaatactatgtgacttaaacggtgacacaattcagcaattattcttaaagcactacggatttgctgaatttgttcataattttagagccttggtagtgtagaatcacacattcttgtgaaccagctaccaccacagtagggtgttcgcttgtgctgactgcatcaacttctttgacactttcaacgttgacatcctccaattcaccacagccaatggcttcaaaaataagatcattgacttcttgaaacctctcttgagagagggacacc

SEQ ID NO: 5696 - DNA, 492 bp, Glycine max
  Clone ID: jC-gmle01810000f08d1
aacaaccaagaatagcttcaattgaataaggagagtagggagtaagtcatactacaacaagaggacggatacaactactcatggatatggcatactaaacatttatggcataaaaatcaatgccagttggtgctcaactctgtacagaactcaatcacacgagaggcttacaaaaatattctcacggacacaaaataaagacaataatttggagacaattagcttattaatttgtatgtgcaatcctttgaccagaatggttcacttcttacttttatatgtactaatttttcacctgtgaagattgtagtaggcattcatctataatcgccttgatccttcttttcattagcttttctttcacactagcatgcatgtttcggtagagcatttccaaattaatcagctttgtaccatctgctgcctctaacatgttctcccattcctttgcaatgtcaaatgcacctgaatttttcaatgaagcaggaacat

SEQ ID NO: 5697 - DNA, 379 bp, Glycine max
  Clone ID: jC-gmle01810000f09d1
gtgaagtccatgacaagtttgattgattctagatgtccgacgttgtggtgaaacctattcagctcctcccatatatgccttgatgccgtaactcgttatcgatcgtgtcgcgtgccccggcggcgatgcgcttatttggcctcgtcgaagacgtaggtcaggtggcactttccgcaatactggcggttgtgcatggcggccatgaagacaccagcaccgcactcgggctgggggcactcgcggcgaagacgctcgatcttgccatcgtcgttaaccttgtagtacttgaggacagctagctcggtctccttgcgcttgtgcttgatcttcatgggggtggaggacaaccttcttctagcgcttgttggccataccacca

SEQ ID NO: 5698 - DNA, 363 bp, Glycine max
  Clone ID: jC-gmle01810000g01d1
aagcacaaaatacttcgataactttatattatttgacatgcatgcatagcataaatagcctgctctcaaattagtcagcaggaacaaagatagagagatccaacgatctttaaatttaacgtttgccataaatatataacagaaaagagggtatgggatatgagttaagggttgatctcattcaaatacactgtcgcagaccatgactctgaacactttgaacttcacttgtactacaggatcatgttgttctcaggagctaatccaacacaagcccttaggaagttcttgagcatagctcgctgctatgacagtgcataaaccactggggtagtccgaagaaccagaagggccttgttcaag

SEQ ID NO: 5699 - DNA, 291 bp, Glycine max
  Clone ID: jC-gmle01810000g02d1
catgtgccttcaatcaggcaacaataaccgggggggctggtacctctcaaaggtataggaatctcgacccatattcaaaaaaccctagcgagcatggttaaacccataggtcgcaaatgatagctgaccatgcgatgattcaatgaatacatggataagccggatgcgttgttgtcaaaggctaaccactttagcattgaatgaccttattggaccagcccttttaactattactgggcgctatggttgcacatgaacgcctctcggactattgggaatcgggcctttaca

SEQ ID NO: 5700 - DNA, 498 bp, Glycine max
  Clone ID: jC-gmle01810000g03d1
gtcacgcgttacatagattttatttatactcccacttatttttttgttcagctgaaaatataaagtgtcccgtcatgtctgacgggattcatcatcaatgtaaattcctgaatcccacgcatttgaaactgcgcacatacaatattcactgttggagactatataacatagtaccttttgtgtttcttgcaggttctaattgaaagatggttactatctaactttcttaacagaatcctcggacatgtcaaacaaaaactgaggcagagatgcgatccttggaagattaagaagctaatcggcagctgattccttcctggacataccactaaccccctgcttgcagcctgaagcatcatccggtcgaacttccaaatcaggcactttaattttgcatgctgacaattcactggtgttagagttactgacaccaacttttgcaccctgatctgcatcaagaccattgccatttctgggcattgtgtctgtgtcttctgc

SEQ ID NO: 5701 - DNA, 413 bp, Glycine max
  Clone ID: jC-gmle01810000g05d1
attatgggaaaaaagaccattgtattgccactcttatgctcaattttgaataggaaaaacaccatatctccatgcaataattgggaaaacgtcctagccctccgttgactgaacatagactgaaaattggcccatcacatcagatcatcaacatttgatggacactactctacacccacattcgagaacttccgaatataaaaccgccctcttagatcatccaaagcctcacagtttatggaaacacgtttcctttcgaaactcccagtttggcctatgtgaagaagatccttccctggtcgcgtgggcagataataggttataaccaaagacacctgctgatcatctatgccaccagccaggatgtcagtgggaactagacctggggaagagcccgagcaccattcccgcat

SEQ ID NO: 5702 - DNA, 339 bp, Glycine max
  Clone ID: jC-gmle01810000h03d1
acaactatgaaataagtatatttctatgccttatctttggggttcagtggcaaatacactcatcacataacaattgctgacgatggggtaccactatggttactactacggaacctacctgtactttcttcacacacagaccacgcaatatcaatgtgttgcccatttgccctgaatcttgatgaaccgcgggtgacctggtgctggccaaagatagaagcgattgtggaaccaaacgtccttaacgatgcgcgtgaatggggaatgattacttttggaacaaaacaaccatgtgtaacattttgcccattcggaattgggcactcacaatactgctat

SEQ ID NO: 5703 - DNA, 500 bp, Glycine max
  Clone ID: jC-gmle01810000h06d1
aagcaaataaacaaattttatagaatccattataaaaataaagtcaggtgtattggaactctaatgctaaaatttgaaaaagaaaaacaaagagcacaaaataataattggcaaaaagtaatagccctctgatgacttaacaaagaatgaaaattaacccatcagagcagatcagcaacatttgatggcaactcctctacagtcacattgtagaacttttgaatatcagacagcattcttgcatcatccaaagtcacaaagtttatggcaacaccttttcttccaaaacgcccacttcgtcctatgcgatgaagataattttcaggttgggttggcagatcatagtttataaccaaagacacctgctgtacatctataccacgagccaagaggtcagtggtaattagaactcgagaagagccagagcgaaattcccgcatgatgatgtcacgagtgttttggtccatgtctccatgggtggctgagactgtatggtcatt

SEQ ID NO: 5704 - DNA, 379 bp, Glycine max
  Clone ID: jC-gmle01810000h08d1
catcaaaatactagtgtacatgtatttttgtcttcaactctatttacaactaactagtagaagttcctttggagggaagtgtttaatcaatttcggcatgcacgtaatccacgaattcaaaattcttttggagttgatttagggcaaaagttatggctgcactgacaattgcgagtccagccaaaagtacacgcaactggacatctgatgggatccctgatgttgcacaaaacacaactgttgtaccaattaggactttctgccatgtttggaatccctcatatgctgctttacatgatgaacacttgagagtgtgctgttcaaatctatccaacatctgacgttttgataaaacaggtgatggcaatggttggtcgct

SEQ ID NO: 5705 - DNA, 563 bp, Glycine max
  Clone ID: jC-gmle01810001a04a1
gaattcgaggctcctgaatctgaaaggagatgatggtttcagaatgaatgaagtgctagtatcattgtggtatttaatgggcttgtggccattggtatatagcatgctcttgcttccaaccggaagaagaagctggtttcatatcttccatttgttgttctacagctcaaaaaacaatattcctgtatggccattcctgatactttcatgttttggtggtgcatatgttcttcttccatatttcgtactttggaaaccgccagctcctcctgtcgaagaaactcagcttaaaacatggcctttgaatttcctggaatcaaaagtaactgcaatgatatcacttgcggcaggggtagccatcataacttatgctggtctagctggacaagatgtgtggaaagaattttaccagtacttcagggaaagcaaatttatccatattacgtccattgattctattatactttccacatttgcaccgatgtgggtttacaacgatatgactgctcggaaacggtttgacaaaggttctaggctccttaccatatattgataccatttta

SEQ ID NO: 5706 - DNA, 515 bp, Glycine max
  Clone ID: jC-gmle01810001a09d1
gatcggaagatgcaataatatattcaagtaacaagaatacaatttggtttacatattttgcctaaaaataagtgcacgagatagatcaaacatatgcaactttacctcagcggagagaacatttctgcaattaaaatttcagcctaccatatcacaaggcaacatcgttgtgccaagacctctaatatgatgaagggccagtaatatgatgttgtacaacatttataacttagatgttccaaaaacggtttccgagctaatcaaaccgctcccattcttgagttactttggtggaagacgggttatcggatggagcatccaagctttccattccagagtcaaaggtttcccattgggttgtaactttgacagcattgctactgttgctaaaagggttgagcgttcttgcctttagagaatctaagttatccacaaggttctgcacacgaatcacctatttaatggtggaaaagcttgtggcaggccgtcacagcagtaatccatataattgcatt

SEQ ID NO: 5707 - DNA, 514 bp, Glycine max
  Clone ID: jC-gmle01810001a11d1
agctaaatagacacacttcaaattttattgccatatatggtttttgtcagagttcctgatagaaggacatgacaatacttaatttactcttttagatggataattagtcttggccatcattaaacaaacaaacacttggctattcaattccatcaaaattctgacaatctttttgtaacggttaaacctccaactttcggagtggtgggggcttcctgatcaaagttgcttgctcaaaggaataagcaatttggatgagctttggttccgagcctttcaaacctccaaagataattccaaatggtgcacccttttcatatcccgctggaacagttactccaggataacctccccttgcaagtatactagcaaagaatgaaaaaggtaccaccattgcgtcaaggttatttgttatcattaatttctcaaatccaatatgtgacaatcttgccatgtttagcactgctttcttcagttccctaactccatttggcttttgagctaccagcatgag

SEQ ID NO: 5708 - DNA, 392 bp, Glycine max
  Clone ID: jC-gmle01810001a12d1
atacgaattactttttttttttttcctgtgattggatgaaacttaagagcaggggattatcatcattgtcacatatgatgaagcaatattcaacaagtgcaagaactgtatgaataggaataagagtttatgtacaacgggaaatgaaaatagttggcatttgaacacattatgctgtatcagctgcttgttcttcaacagcctgtgatgctgggagaagggtgcaaatgagggtgcggtcaccgtacacattattaacaacgtctgtggtaggccagaactttgcagtacggatccaaggtgctgggaaggctgcatattccctggagtatggatttgtgcatgcatcagccatgagcagtgatggcggatgaggggcgcccttaagtaca

SEQ ID NO: 5709 - DNA, 412 bp, Glycine max
  Clone ID: jC-gmle01810001b12d1
agcaaaatcataacctgcattaatgcatttagtacatataatatatcactatatatcaactaatcagtatacaattacaagcaagttattctgcagcagggtacaaactaacgtgacaacagtcgaccaaactagtcttggaattcaaagatgaaaatgataaaccaagccaacaaacattttaaaatgtacaggaactctagaagacatttcctaaatgttgacccccacgcattaatttgtatacttcatatatgcatcccttggatatgggtttgactaggctagctttgcccagagctatgtgcaggtaccaaactaaaaaacgcttgaaaatcataaaccacattttgattaaacttgtggtgcgccggggggagagggaatggcaatagctgctagctcattcttc

SEQ ID NO: 5710 - DNA, 539 bp, Glycine max
  Clone ID: jC-gmle01810001c09d1
ataatggtcatcatcatcattggtcaatactagcaagtgatcatacacaatccaagtttcaaagttctatgtagtctcactctcacatcatcttagtaaattataataactctggcctgctcacctaccactctatatacaaaggagtcaactcatttgatcggttacatacccttacaagggcttgtgtcctaattaaaatgctctcaaagggtcaattaaacaactacaaagtactacaaatcctcattcctcatcacactcaaaagccaacaaaaaggggtgcaattaatggtccaagcaagggcacaacaacaaaatatatatccaaaaaaaaaggattttttaggggtcaattttgcaaagtagtgtgcactaatttggtctagccatgccgagcgcccatgaagtaattgaagtcatgatgttggacccttagttgcttcaaccatgaatctgccacgctcaatagtgagactagtctgtcttggtccataccacaattccctgagacccacacacttccttgcatcttatac

SEQ ID NO: 5711 - DNA, 167 bp, Glycine max
  Clone ID: jC-gmle01810001c10a1
gctggtaatgcggctcgagctatgcctgtcgtgcgcctcattggaaggatcacgagccggtgtggctgcactctactgtgacggctccatgaccgagaccaagagggtcgtcttttcttacatggtcggcctagcccagatgcttcgaggcggcgtcatcatggacg

SEQ ID NO: 5712 - DNA, 452 bp, Glycine max
  Clone ID: jC-gmle01810001c11d1
ccttaactcaaaatagacgaaagaaaggtcctttcgatgtcttcatttacttaaaatttgctatcattcctatcgttccattattattatctttaatctacaaatcacggaacaacgcaacaagctcgatcataagcacaaagagagccaagtggcgaattaagaatgaaacgaaaaatcattgcggattctaataaaagaaaagtgaatcattatttcaggatggcccaagtcattaggtccgtgtgtactgtacagaaccacttacataagctcccaatatctacttgctacttgctaggatttttttagcatcaaatttatactaagcaacatggccttaattcagttccctaatgcgatgctgcacgctggattcctagcttccttgtccgcttccaaaacatgaaaccggaaatttagggcaatttaacaaaattgaattgaaccta

SEQ ID NO: 5713 - DNA, 485 bp, Glycine max
  Clone ID: jC-gmle01810001d08d1
gatgagctgtccaaatcgtgccatttgttatgttgttaaaatcggtaactgcaactacaagaaaaataaaattgaaaataccaagaacaaaggaagaaccaaactgagcttattatgtgcaaagaaagattaaaaaaaaaagtaaatgacacgtgcttttcatagcaccctgtaacagctatctcaccgggtccattccacttccaaagactttcttcctttgtagttttgtacaattaggaatgcagtcaccatttgcccggataaaaattattattattttttctttttctttttcttttctccctttctaaagcatcagcagcagcaagaatttttggtttagaacttaaaatttgaattcattagcttttttttttcttactttgtggtccacgtggcacatcgccacaccatcgtgatcggcatgctggcatggcgggtccccaggaatagcatcagccgcacatgctattcagtcattc

SEQ ID NO: 5714 - DNA, 312 bp, Glycine max
  Clone ID: jC-gmle01810001d12d1
gaaaaaaggggggggaaaacctatagctgcccaaagattgggggcccgcggaaagggggcctcagttttaaagaagaacccaattaaaaagggggccacaggggggtttaaaaaggggggggggccggggggtgagggggggaccccgtttaaaaggggaagtttccgaaaccccacaatatttggggggggttattgccggggagggggcctctttacaaaaagggcccccaaaaattgggaacccccccccggggggtcccttatagggggaagggggggccaaggggccagaaaaaaccccctgggggg

SEQ ID NO: 5715 - DNA, 436 bp, Glycine max
  Clone ID: jC-gmle01810001e07d1
attcgaattcattttatttatatattaatattatattcaaatgaaataaaaagatattaaaagatactaattataagaatttgaaagtgaaattataaagttattaaatgattaatcaatttttttctacctgttcctgtagtaaaaagagttccatctgttcttgaatagcttccttcaaaaggacttctgcttacccagtgaatgtcttggtagaagatatgatttctttgaattgaggtttattcgtgtataagtaagcacgtaactcaacaagaaatttccttacctgtccaatttgtaatgaatcaagataaccattcgttccagtataaatagttattatctgttcttccacggtaagaagagctgattgggattgtttaagcaacttgcgcaatcgttgagctcttgctaattgattttgagtcgcttt

SEQ ID NO: 5716 - DNA, 503 bp, Glycine max
  Clone ID: jC-gmle01810001f09d1
gaacaactgatgtgtcttccattatacaacaacagggtgctttctcttttacttgtacttttgtaattcccaaataggttgcacaaaaaaaagctcacttatttgggtttcccgaaagaagcaaactatcttttcatttacatacaggatccaagagagttgttttttggcataatactacatggaatagcattcattgtgaattagatccggtaaataactatgacatcctcgacaaatcagaaagtccgcgagtatttcctaatttcatacatgattgaagatatggaaacaagatccttgttcaatgcagatccaccgacgattctcttaatgcaatccgagagtcttgtgtaataaagcaacaattgagtcaaggcagcccttaaaatctccataccacacaagaagttgctgaaagaagtaataacgtctttatgcatcaactctattgcagccttccacctactcgcaaaatgcttcactagtggctcgactttcgc

SEQ ID NO: 5717 - DNA, 469 bp, Glycine max
  Clone ID: jC-gmle01810001f11d1
aaaagcatgaatgtaattaaaattaaaatttaacattttccataaatatattttgagtacagagatgacagctgaagagaataacttaaaagaaaaaaatgacacactaaagggaagaacaccacagaggaaagtgcaaaaggctccccctgtcatgaaagagactttaatctacacttatccacaatcttgaagacataatcgagagggtcaaagaaacgttgcaaaacacaagccaaaagcattcccaattattattaaacttgccatatcaacctccatctctccaattatcttctttccactagagccatcataaggaagagaaagacaactcaattatgggggttactcctgaatgatccaagagccttagctgcacctgctcttaagatgaactgatggtagaaggctgcaatggctgccccaataaatggtcctacccaaaagatccaatggtcatcccatg

SEQ ID NO: 5718 - DNA, 566 bp, Glycine max
  Clone ID: jC-gmle01810001f12d1
aaaagcaggaatgtaattaaaattaaaatttaacattttccataaatatattttgagtacagagatgacagctgaagagaataacttaaaagaaaaaaatgacacactaaagggaagaacaccacagaggaaagtgcaaaaggctccccctgtcatgaaagagactttaatctacacttatccacaatcttgaagacataatcgagagggtcaaagaaacgttgcaaaacacaagccaaaagcattcccaattattattaaacttgccatatcaacctccatctctccaattatcttctttccactagagccatcataaggaagagaaagacaactcaattatgggggttactcctgaatgatccaagagccttagctgcacctgctcttaagatgaactgatggtagaaggctgcaatggctgccccaataaatggtcctacccaaaagatccaatggtcatcccatggcttatcttggttgtagataacagcaggctccagactcctagcagggttgataccagtaccagtgactgggatggtggccagtgaaccatgaacaca

SEQ ID NO: 5719 - DNA, 465 bp, Glycine max
  Clone ID: jC-gmle01810001g07d1
aaccaatatatatttgagacatctacttctatagtgaaaatacggactacaaatcagttacaaatgacaacaatcaaatttggaacatacatttaaacttcaagagacactgatatattctcctctgtcagatattgaaactgtgtgtacatctagtctcaatgcatgtaagtgtatttcttgtccaaactgattgccaatgacatcttgcagctgtataactcccaagtcccaactaccgaaatcctctctcgggtatagatgaaaagcttcagaaccgcttgggcttggaatctgctaatgagactcgtatagctctgccattcaagtccacaccatctaaggactgaattgcacttttgacctcatcagggctaccgaaagtcacgaatccaaagcctctagatcgggcacttttcctgtcatagattaccctagctttcaagaccttctttcctagttcac

SEQ ID NO: 5720 - DNA, 534 bp, Glycine max
  Clone ID: jC-gmle01810001g09d1
atccaaatggaagttatatatttcaacaaatagtaaataaccatatagttctgtaacgttgttcagatagtcgtaaataccgaaaggaaacattgtctggtaatgctaggtaattgaattacaacatagaagtactttagcatagacgacacataataatttcaccaacaaacaattctaaaataagctactaaactaccatcttcaattggagtcactatcatcccaagccaactatttttttattatcaactctcatacttttttataaggcctaaagtagaaacatatctcatcttcaacactgaaggcattgtctatcaaatattggtaccaaggttcagcaacacattgtaggcctttttgagcatcgagcatggtactaaaatctgacagcccaagtctttcccaataattcatcaaaatagggagggaaaaccttgatctcatcgccactctatgaataaataaacatattaaatgcaatatgaatatagattacatacatggatgattctaattcagaaaacatac

SEQ ID NO: 5721 - DNA, 328 bp, Glycine max
  Clone ID: jC-gmle01810001g10d1
aaaaacaatggggattcatttccaatattttttttttttggccccaaattcaatacctttgaaacaactttaaaatgggttagcggggggggaaccctcgaccccagattaatggacccccctcaagatgggttaccgggggcccgcccttttcccagatttaagtacgccagcttgacaaatgttttcctccggattggggcccctaatgtaaattccgctggccctggtttcaaaacgggggacccgggaaaaacggggggggccccacttgaacggcccctggggacaaccccctttttggagggggcgtaagaccaaagagggc

SEQ ID NO: 5722 - DNA, 492 bp, Glycine max
  Clone ID: jC-gmle01810001h07d1
actaactataaaacatccaaatccatgagtaattagtttcacaatgaaatcctactttattacacttctgaaagacatgctttatatataaaatggatatcaacttatcatgcatcaggggaaatcataaactcccaaagcatactgctcacgctttctagcatcactcatgaaatttgagagtgctgagttatagaaagttcccttaattgctgaatactcattccaccaacacatgtagctgctttgcgccaagaaaatctctggagatactgcatagttcttgaccaacccataaacgtactcctcaaatataaccaatttcttcaatgtctcttccttctctctaacaacgttcaactacttgcatgaaaggagagcctcttcaacattggcccaaaagcaagaatcaaaggttaaaagtggcttcacattcttcttacttgtactgctgtaatcacttgatgcttttctagtcccttcatttaacca

SEQ ID NO: 5723 - DNA, 499 bp, Glycine max
  Clone ID: jC-gmle01810001h08d1
agatgtaacattttaaatctgagtttattagtagaccaaagatcctatggtggctctttctccctcactacacaaactatactatacagcaagttgcaaatattgtacaagaaagcagaagggactgcagatgaactgccgtatgaattgaaatttccatacacattggaggtcaagtggtggtaaaggagaaggaaattaacacatgtatgttcaatgcggcttcaacacctcactttctctcaacagaaaagtggtagtgtaatttccacctccttgcttctagtctaattgctttagatatgaattacccagtctgaggtagctgcctccaattcagcatttggtgagactgaggatgcctttgcaagaaagatgaactgtttgttataccattttccttttctacaaattggcctgagtaactagtaactgggggagaccatactggaactacaccttcatccctttctctcctgggaccacttgaagatctact

SEQ ID NO: 5724 - DNA, 532 bp, Glycine max
  Clone ID: jC-gmle01810001h09d1
gaaattaaactgtacgtttatcaaattaaccgagtatatatagctttatgtatggaattaagcattaattgtgtactatataatagttttgtacgtagctagctaaaagaaaaaaaaaagactaatcttaatttcttcttgattatactcaccattttaatcctcaattcctcaaatgaagaatatatatatatcctaccctgccaagtcatgtagaagctgtgctcccatcaaattcctgtaaggcaggttttgtccttcaccatcgaaaagagagtactgaactggttgacaatcttcaatttggtcccttggatagtacagtgaactctgtgttgctggcgggaacgctaggctcaccccatgttgctgtaaccctagcgtcaaagacaccccactctggttgttgttcccattctgatcattacttccgtaagaaactatacccgaggagtggtgtgtgtatgatgaaaaatcaagctccactgacccaaagcactgttcgtggcccttttggtcgttttggtaatct

SEQ ID NO: 5725 - DNA, 514 bp, Glycine max
  Clone ID: jC-gmle01810001h11d1
aggacaaaaggaaaaggcaccaaattcaatttaagtggacactgtaactcaaaattatagaggaagacggtccaatatgaaaaatatagtaagatcatctcaaacttagcatcttctctttgcacctaagacattgagaatgctaagaatgttacacgcaagttccatcacaacttctagcacttggattagtacaacaaccttcacgaacagaaatatttacttgccaagtttgctttgcctccaattcaagactggaagaaagttcccctctgaatagcatcctcgttagcatttccaagagcagcctcgttcaagtacttgtcagccaattggactctcttgacattctcttgttcttggacaagcatgttaccatacagcaagagcttctccagagtcatcttgggctgctcaaaggttggaggtccatcttttgagttcacaagcttcttcccaacactgtcaacaccaacaccagaaatccacttcctcacttcatcatcatatactc

SEQ ID NO: 5726 - DNA, 532 bp, Glycine max
  Clone ID: jC-gmle01810001h12a1
gctctgaagcaggcttgaggttacacttgcataaggaacatgccttggagatgtataaggaagatcatgcatgatacatggatacgatgaacaaggttgttagtgctcatttacgtgcttatataccagcatcggagaaactacaattggatatagcatcatattatgactaactggagcgagacttcagcattcgcctatgcataagaccaagggaactactggagaatcgatgtgctgcattcgctattggggataggatcaatatattgcaggatattgatgaacctgcattaattcctcatataagctgaagcactgctccaatagatatccatatgaggtcctattcacgagcttgcagaagctgctgatggatactgctacttgataatgtaagctgtgtgatgatttctttggagaagaatctatattcgatgaacatgtgtcaggtccatctggtgtaattgatgagcacttaatgctatacttccaaattgctatgatgctatatgtctcatgcttatgagtc

SEQ ID NO: 5727 - DNA, 504 bp, Glycine max
  Clone ID: jC-gmle01810001h12d1
cctgtcacacactcagcacaaaaacaaaaacaaaactaatttgtacgtacgtctagcatatatcatatgacatagataatactataatagatctaccttggcttagtcatcacatattggacaagtacagtacaaaacaaggcgctgccgacagccccacatgtaattgtaatgtaatatagctaactaactactttggttccgccacgattgggtggttaactagggttcactctcggtttggtttggtctggttcggtgggaaatcgctgtcatttataatatcaatcatcacacattgcttctactgtatggtttaggttttacaaccctgcttctccattcggtaattattatcatcacacatctgaactttgtcgcaccgcacaagcaactacctgagcccactgcctcagcctcgtcttcaccgtctgagggttatcaccggtggtgaagatggcggagtggggactgccgtgggggcaaggagtgctgtcgcaatcc

SEQ ID NO: 5728 - DNA, 495 bp, Glycine max
  Clone ID: jC-gmle01810002a03d1
agtaataataataaaaccaattcaatgtgtagggatgttatttctcccccggggtagtccccacaactttcttatcagttatcacgagaatttcggattgatctgcaaacatagggcattgcagtatgatacaacagagaagcttatttacatctgaatctttaaatgaaataaataatgagattaactatgaccgatcatcattttgctcatttgcactagctgggctttatatatagatcgtcacaaaagcttattgaacacatggctggatcagataacatatatatatgacacttatcaaggactgactataaacatccaaaaagtagttctcctcagaaaagagaaagaattggagttcaacgtatgattgatcactcgcctggaggttcataattatctgctttcatgcaaattcctctctttccccattttgttcctggctgtagagagcaagctgttgttgcaacttgacgtatcttaacttctcat

SEQ ID NO: 5729 - DNA, 427 bp, Glycine max
  Clone ID: jC-gmle01810002a04d1
ggaaattggaatatcacctttatatatcatgaacacgaattgaatgcacgactgtcataccttagacatggcactagatgaaatgtcggagtgacaaatgtttgacgaagcctgatttatagagcctgccagaagaatggtcaggcaaatgaattggaaaacttacatcatgagtagcatgcagattctctttgtctcaatccatctgcagtgccgaaatctacacttcctctcagctggttgtgacataaaattgtgtatctggcagaaacaatgcacctttatcagcctgcggcggcattagaatcatgatcactgttggttttaccattggcagtgtcttgatggatcaattggctgatgaattccgagccatatacgtgacccagtgtcacacgtacggtctctaagggtcggttggtctctt

SEQ ID NO: 5730 - DNA, 484 bp, Glycine max
  Clone ID: jC-gmle01810002a06d1
gaaacctgcaaacaaatcaaaccctattatcatggaggatgtgactttttctgatgtcttttttcaagttttctctttctgcgtaacagttatattaatatttatgattataattaaattttaaaaatcataaaaacgatatcgtttcaaagatgcaccaagcaacacagctgataaaggaaagatacagcagagaagtcaaactccaccaggaacaggtcgaatctagcgcagaaggattagtctcccacaacatagagaatcaaagttcaaattccccatgggagaagtgttgatatttagtgttcaatcataccccaaacaaagattatctcccaagaaacacacttgaaggaagaaaaaaaaaaaccctatacatgatcaaattttacacacgacgtaccgtcgtagacgtgaaagcaacaagcacatgagagaagaaaagagaagaagattgatttaagagcgagaatgaaggggaatg

SEQ ID NO: 5731 - DNA, 354 bp, Glycine max
  Clone ID: jC-gmle01810002a08d1
ctttctccttttttttttttttttttttttttttttttttttctttttttttaaacacttgtattgagactttatatttcatctttcaatataattcatttctctacacttttagaaagccttatatctatatctaatacacctacaaagctttgccaagataaaaaatacactgcaggcaaaattttcatacacgtttagcataattcattctcccccaaaaaatctttggcacacctttatattatccccggattgcaacaccaagaggagccgcatccataggtataaacttctcaatttctacacccttgctgatggactgggttccataggctgaaatgtgcactccaa

SEQ ID NO: 5732 - DNA, 478 bp, Glycine max
  Clone ID: jC-gmle01810002a09d1
gaagttggattcatctatattgcatcatccctcaaaaatagtactagtaaaactggcaatgaagttgttcatgaacagtataaaaatcgtcaaagaaaaattacagggtcgtcatatatctacacaacgcaggagggttgatagacttgctgcagcataaagtaggagatgatatttgtgcaagtgaacagaaattaatagacttcgacattccattgctctgctttcttcaattgcctcttgtactcagtccaatcaatgccatctttggcagccaatgacaccataatgtcatcaattcccttttccattccttttagtccacacatgtacacaaaagtgttatccttcttcagtaattcccaaagctcttctgcgtattgagccattcgggtttggatgtacatcttctcccctttctcgtttgtttgctctcgactcacagcgaagtcaagcctgaagttttcaggacttttct

SEQ ID NO: 5733 - DNA, 507 bp, Glycine max
  unsure at all n locations
  Clone ID: jC-gmle01810002a10d1
gcaaactcgttaatttacagaataaagaaatcatgcttggtaatgttcacaaattcaaaggaatctgatccaaattatagcttcatcaacagccgatctatatggcttacaaatttatatgatacttgcacttaatcataaaaatacaacagcaagcattaattactcagaaataagattcaacctaactacttgctcaattctctttcaagctcatcaaattcccaatcaccaatttcctcagttgaataatcctgactaaccttcccaaactcagattccagtttagctaattcagcttcatgatccaatatctggtctgtcttaactgaaggtgattttggcagctcatccgtttctggctttgaaagctcggcaccttgagttggagcagaaactgaaggagtagcatcagactttttctcaaaaggtggtgtttcagcctttgcaggggtctctatttcaagaattggtctctctatagactcanattgagttcgaactttt

SEQ ID NO: 5734 - DNA, 486 bp, Glycine max
  Clone ID: jC-gmle01810002a12d1
aacgaggaatattaaaaagcagtccctgctcacatatttgcattttgtagcttaagattttaataacatctcaaaaaccaaaatattgaaacatttgcaagcaaaagccaatgcggacacctgatattgtaacaatgatattgggagaactggcgataattcactaacacaaatgatttaaaaataaacatttctaggatgtccctcattgatacataaaaactcatagcaaccaaaaagtactaactgaatgaaattcataacaaaatttgaaaattgcacatgatataatgcctatgatgcacttttcttcagcttagcaagctcttgcctaacaacagctgccctcttgatcttggccaacattatcttgaacctatcaaagtcattaagggatgccctcctgttctgcacaatcagttttctgccccaagaactcttttcccatctgttcttaacatcagcagcctccatggcttgaatgag

SEQ ID NO: 5735 - DNA, 471 bp, Glycine max
  Clone ID: jC-gmle01810002b03d1
cattcagaatttggatttacatatatattacctaagaatttcattaacaacttttatttcattgactgattaacttatgaaaagcaatatctgaaaaacaaataccaaaccaagtcaaaataaacgaaaaatagaatgtgtagttttttccaatgttagccagccgacctaaagttcttgaccaattgcttacacacaatatcaaaatctcatctcatctaataataataaaccaagggagaatgagagtatccgaatcacatcagcaaacgccagtttcctcacatcataggaagcaacaatgtaaatggtagtcctcacttctgcagatggcactgaccttgttcaccacttggtgaatgagacatgagatgcaagctattgaatgtgacttggaaactgcattccaggggttgattgcagtggcaccatggcagatggcgtgtaaggatggttatgcatctgatgcat

SEQ ID NO: 5736 - DNA, 464 bp, Glycine max
  unsure at all n locations
  Clone ID: jC-gmle01810002b04d1
cattcagaatttggatttacatatatattacctaagaatttcattaacaacttttatttcattgactgattaacttatgaaaagcaatatctgaaaaacaaataccaaaccaagtcaaaataaacgaaaaatagaatgtgtagttttttccaatgttagccagccgacctaaagttcttgaccaattgcttacacacaatatcaaaatctcatctcatctaataataataaaccaagggagaatgagagtttcggaatcacatcagcaaacgccagtttcctcacatcataggaagcaacaatttaaatggtagtcctcacttctgcagatggcactgaccttgttcaccacttggtgtatgagacatgagatgcaagctattgaatgtgacttggaaactgcattccaggggttgtttgcggtggcaccatggcngatggcgtgtaaggatggttatgcatct

SEQ ID NO: 5737 - DNA, 481 bp, Glycine max
  Clone ID: jC-gmle01810002b05d1
accatacccgctgctgtagcattatacacattattattactcttgctcccgtcaagataaatctgaccccttcccctgttcccacctacgtatataggatattttaagaaatgaacatctctcttagtagtgggatccggggaaagaataggaaaggttatttctttatatttttgaccaggaacagggcctaccacaagaatatttttttttgtaggacgatagttttgaaaagacagattgcctatcttctctttaatctcaggcgaaatacgatcggggggtgccaattcaaaaccttccggtaaaataagaacagcccccacattcaaagctccctttttaccattagcaagaacttgtttcacttgcatatcataaggaattcgaacaactgcttcaaatacagtatcaggaaataccgcttgtggaacctcaatatccacgggcttattagctaaatggcaattggcacagacaa

SEQ ID NO: 5738 - DNA, 498 bp, Glycine max
  Clone ID: jC-gmle01810002b08d1
catccttaagaactactacaagaacaaacagataactgaatttattatttctcagagtcaagtcaagcattatgatacatcataccccaaaacaccaacaacagtactcaggtgagcagttattacatcgtactttcacatgaacgcgtcataaaggcagataaaagcaaatacatacaacacaggaccttaaggctcaagcacagcacaatactatgtgacttaaacggtgacacaattcagcaattattcttaaagcactacggatttgctgaatttgttcataattttagagccttgttagtgtagaatcacacattcttgtgaaccagctaccaccacagtagggtgttcgcttgtgctgactgcatcaacttctttgacactttcaacgttgacatcctccaattcaccacagccaatggcttcaaaaataagatcattgacttcttgaaacctctcttgagagagggacacctctgcaagaagcctccaagc

SEQ ID NO: 5739 - DNA, 593 bp, Glycine max
  Clone ID: jC-gmle01810002b09d1
gcaaactcgttaatttacagaataaagaaatcatgcttggtaatgttcacaaattcaaaggaatctgatccaaattatagcttcatcaacagccgatctatatggcttacaaatttatatgatacttgcacttaatcataaaaatacaacagcaagcattaattactcagaaataagattcaacctaactacttgctcaattctctttcaagctcatcaaattcccaatcaccaatttcctcagttgaataatcctgactaaccttcccaaactcagattccagtttagctaattcagcttcatgatccaatatctggtctgtcttaactgaaggtgattttggcagctcatccgtttctggctttgaaagctcggcaccttgagttggagcagaaactgaaggagtagcatcagactttttctcaaaaggtggtgtttcagcctttgcaggggtctctatttcaagaattggtctctctatagactcaaattgagttcgtaacttttcaatggcttcaaacagctctttaactctctcttcatctttccttgaaattctccctcgtgagcataaaactgctgtttatgtatc

SEQ ID NO: 5740 - DNA, 464 bp, Glycine max
  Clone ID: jC-gmle01810002b10d1
gcatccattaacctttagttgtgtatacacaaaataaacttctttggtatgttttggtagcaaaagtggtaaccacttgatacacctacgattcaatgttcacactagaggtctcagaagcttgagcttcaacctgaacctgggaaacttccggaggtgggctttcaggttgaacagatgaggatagttcagcctcacttggcacagacacttgagtaatttccggcggcgtgaatttgttgatgtagtaactaagtgatggtccagagtattgagccgtctggatctgaggaggagcattcttaccaacttgtagcagtatcgacgatgctgctgcaatcgatatcagagcaaggccttgaacaattgctgctgtgttctcagctccatcagaagaagagccagcagttcctgaacttatagcactttctgccacataaactgctggctcaactgaatatatg

SEQ ID NO: 5741 - DNA, 358 bp, Glycine max
  Clone ID: jC-gmle01810002b11d1
ggaaaaaaggaaaaaaaaacccgggacaagccggactgaccaaaagggcaacaaccaaaaaaaaaaaagcaagaaacaaaaggggaaaaggagatacccaagacaacaaggaagcaacaaaaagagccaaaaaacaacaaaccaaaaaaataaaagcaggcctgcataacagggctaccaaaaaaacccgaatatgccaaaccggaaaccccaaaagcccaaaaaaaacccccggactttggagcagctaaaaaaagctaaaaaaaaaaggggaaaaaccaacaaggcaaaaaagatgacccacggaaaaaggggaaacaaaccccccgacagttaagtcaaaaaacgtaaaaaacca

SEQ ID NO: 5742 - DNA, 319 bp, Glycine max
  Clone ID: jC-gmle01810002c03d1
gggcaaaggacaagcatatcccataaagaattggctatctgatctaacagtccatagggggaaaaaacataatggatataccacatgataatattggaagaaaattctaacctttaaaactccaaattgctcctttgctaactccaactatgctgaacgacttgcaaagacggccaaacaaggagcccattaaagccctgccaagaatggaatgaccttgaggcccaaaaaggcacttctgaacaagtggaccttttaaatggtgcaccaatgaaggggcacgagaattaacagctgccttaaaggacgctaggcttac

SEQ ID NO: 5743 - DNA, 432 bp, Glycine max
  Clone ID: jC-gmle01810002c04d1
gtcgaagaacaataattaaattaattcatggaattaaattagaacagtaattatattgatcaactaactctaccatatgaaaattccattctttacttgtaaagagccgaaattctcttcaccttaataactggagatgctgaacaataatcatgaatcttcctaaatccacgtaatttcttcgaaaatgctttggccaacacaatgatattgtcacaccagatgctatgcggggtctgccatttgagatcccatccatcgcctggagagttacgatgctgatgacctatttctgcatgacaaacggtgttgcccgaaatcggacttgttactagcagatacactgggcacaagccggcaatacgtacgatccatcttattaggagaaaagttgccgggtgtgcccaatcagatcattacagaagggcgcaa

SEQ ID NO: 5744 - DNA, 504 bp, Glycine max
  unsure at all n locations
  Clone ID: jC-gmle01810002c05d1
gtctcaatcttgtatcaacataactgaatctcagcctcgctttttcttctcggataagtacatacatacatagtgtttttttcattaattatcatgcagaacagcctaataacaattgacaaaataacatgaaatagagtggaattgtggaaaacatgaaagaagaaagaaaatgatgattttgatgatgagagaactcaatttggctgcgttgctcgatcgatatatgtatatatattatggcaggttcaattcctaagcttttgcagctactggagtctcagccttgctggctattagctgctcatatagatctcttatcttcaaaccaactatggtttggaagagacctgttccattgttgctgccgggaaaatcagcatgcttcaacatctgttgagtaacctctccatagaactttgtagagaggttgcttangtggctctcaacgtatattagttcatctagtctgtcaaattgccatccatttctacaactgacacc

SEQ ID NO: 5745 - DNA, 508 bp, Glycine max
  Clone ID: jC-gmle01810002c07d1
atcttcatctttatgtttcttctcttccttactttttgtatgctctttctcaactgatttattcttcagttccgcttctaccttaatcttctcttccttactttttgtatgctctttctcaactgatttatgcttcagttccgcttctgccttaatcttctcttcctttacatcacctagcttgtcatccttgatcttgatgtcatgggagatttccatatctatattatcttcacacagtgatgatgcaaaaaccttaactaaatctgacaggtccctgaaacatgcacatgtgacagtaaagtcaagccattaatttaaataaattgcttgatacaattacttgcaagacattagttaaactccaacatacttgattaacagtttaatgcaccttcctcaaaatcaatgacagaatacccagctcaagctaggcaaatggaaatcaaccaagttcatacagaatactaaaccaggctaatcaaatattaggatgacatgtcacata

SEQ ID NO: 5746 - DNA, 539 bp, Glycine max
  unsure at all n locations
  Clone ID: jC-gmle01810002c08d1
ggacaaaaggaaaaggcaccaaattcaatttaagtggacactttaactcaaaattatagaggaagacagtccaatatgaaaaatatagtaaaatcatctcaaacttggcatcttctctttgcacctaagacattgagaattctaagaatgttacacgcaagtcccatcacaacttctagcacttggatcagcacaaccttcaggaacagaaatatttacttgccaagtttgctttgcctccaattcaagattggaagaaagttcccctgttaatagcatcctcgttagcatttccaagtgcagcctcgttcaagtacttgtcagccaattggactctcttgacattctcttgttcttggacaagcatgttaccatacgtcaagagcttctccagagtcatcttgggctgctcaaaggttggaggtccatcttttgagttcacaagcttcttcccaatgccgtcaacaccaacaccaganatccactttctcacttcgtcatcatatactctggccctcagtgcaccaaagaaatcaatg

SEQ ID NO: 5747 - DNA, 430 bp, Glycine max
  Clone ID: jC-gmle01810002c09d1
aggtattccgatattcgggccccttaacttggtatgaaaacacattggtagcctttactcggggcctaactcggctaaaagctagatttgccccaattggttggcttttgccttccgccttattcaaaatagcttctggtatttcaagagtttgctgggctttttggggaacaatggcactacccttttccggattatttactaaaacaggggtcccattattgggtattctagcaaaaccgcccattaaagccattggtaaccattgggctttaaaaaaacgttttttcaaaatacctatttttacgggtggggcaataggcccctgatttgggaaaaccccaatttggccgctattaggagataaaaggagttccttcactttcgaatcccaaacaattcgattgggggtgcagtcacaaagatttaa

SEQ ID NO: 5748 - DNA, 392 bp, Glycine max
  Clone ID: jC-gmle01810002c10d1
aaggggaccctaaagccaaaaaaataaagggaaaaacacccaaaaaaaaaaaaaaagaaaaacaagcggaaaccggggaaccaaaatgagaccgaaaaaaccggaaaaaaaaaaaaaagaaacaaacaaaccccaaaacaggggctagccccgggaccccaaaaccagagggaaccaaaaaattccccccccaagaccgcaaaacccccaaaaaaaggggggaaaaaacacccccgggaaaaaaaaacctgggcgccaaaggcaagggcaccccaaaaaaagaacggggaaaaaaaccccccgtcaaaaacacccccggggaccgagaaaaaggggcccccataaacaaaaagccaccccaaagccatcttgggccccccaaaggggggggg

SEQ ID NO: 5749 - DNA, 536 bp, Glycine max
  unsure at all n locations
  Clone ID: jC-gmle01810002c11d1
gaaaataaaatttgtcaaatctggatataaaataaaacaaaagttatgtatttctacatagattataaataatgaacatgcatgaaagtgttctaggagtttaggtttgatacaaattgtacagtcttaaggagaatttggcaaatctaaaccgcgttaaatatacattaattatgcacggtggctatcgcttataaaataatataaactatatacatacatacatacataatatataactatatatcactaaatgaatgatatatataacacttagctcaactgctcaaggtcaaggtagataattacctgctaccaagtagtatggtacccatgcatgaatactagattcgcttctcgagacaatagatggctaaaagggacttgctgctaaaaaaaaaaaatgctgccacttgggggttactcgctcagagtatgcagaaaacaaagatgcatgcatgcccatgcattntcgctgctccacttccacatgatcatcagcatcaaataattctctcatctgatgcgcattcccg

SEQ ID NO: 5750 - DNA, 428 bp, Glycine max
  Clone ID: jC-gmle01810002d02d1
agttattccgatattcggacccctcaacttggtatgaaatcacattggtagcccctactcggggcctaactcggctaaaagctagatttgccccaattggttggcttttgccttccgccttattcaaattagcttctggtatttcaagagtttgctgggcttcttggggatcaatggcactacccttttccggatcatttactaaaacaggggtcccattattggttattctagcaaaaccgcccattaaagccatgggtaaccattgggctttaagaagacgtattctcaaaatacctatatctacgggtggggcaataggcccatgatttgggaataccccaatttggccgcttttaggagataaaaggaattccttcactttcgaatcccaaacaattcgattggggggcaggacaccaagattt

SEQ ID NO: 5751 - DNA, 418 bp, Glycine max
  Clone ID: jC-gmle01810002d04d1
agaaaggatctaaatgcttattattccagcagatttcgatagataagagaacaaatttttcacaggatcacctgactactttatcttttcatctagtagaacttttataacttgaaataagacgtcctttagggatgaggaacaaaacaaaagccgcagaacaaacccaaattttggaaggctccactccttttaaaacccattatcccaaatggaataaaaataactttataaataaaaacctatttttcattttacaaacgaaatgggtcaacagcaaacccttaagcgataaaatttggcaaaacttttgatgcaagcttcaggagatggaggcttcgggggaaaggggacatgtcagctattgaaaaactctcacatgaaataactgagggctttctttacttttgaaccccct

SEQ ID NO: 5752 - DNA, 449 bp, Glycine max
  Clone ID: jC-gmle01810002d05d1
ggcacaagattgaccacaggagctgagcttttctcatctttagatgcatcattccccttaggatcacgatcagtagatgtgttcaatgcatccttatttatgcactcagaaactggagggttccgattagcagaagccttaacttgattcacatccttttcagtttcaggttggcttccaaatgtaacattgacaccacaagtattatcagactgattggcaggactgcttccagtttcatgcaacttggtgcaagaatcaggtaaagaattggagccttcatttgcagataaatcatcacctgatacttttgccgacggcttgtcatggttctcttgtattgcctccttgtcatccttggtaaaagaaactgcaactttatcaccctgtttctctgttgatgcacacagaactgcagccacaccaacctcttttgagcattcctgatc

SEQ ID NO: 5753 - DNA, 316 bp, Glycine max
  Clone ID: jC-gmle01810002d06d1
aaaggctaactccaaaataaaaattgttatcaatggtggcattcaatccaaaataaagaagggtgttgaaaggaaataaaaaagaaaaattcattacattgacaaccgagtctagctaagcaatgcgggtgggatggagcaaaaagtgaggaaaatgctgtcccaaaaccaccactaaatctttaccatggttcacttgctaacccaatctatttccaagccttttagcgggtttaaccaattgtccccttaacccttaacacttccggaagccacccgttttgacacactctctataaagggggaggtaaacaat

SEQ ID NO: 5754 - DNA, 545 bp, Glycine max
  Clone ID: jC-gmle01810002d07d1
gacatagagaaatttgatttgacattcatagatcagaatatcagacttacatacgggtgaacatgatacgggtgaacatgataggagcacaatactatacataaaaactgacacaacaccctattagatatgaaaaactagatagcatccaattacaaaacttaagcatacataagaaaattatgcacacataagtttgcacgtttatttgtcaatgagaggtacgttggaaggaaagaaaaccacacaccacacaccacacactctcattagatagagatgctgttgggaattcctctgaaagtaaggccttccccactggtaggaagaagcacagtgtagggcatctgcgccggtccattacggttcctaaggcttgaattcttgttcctccctgagattttgtcctcaatttccttcagcttgtttccaaacttcttaaaggcttgaattgcctttgtgtcatcagtccaatttggatggtccctctgtccaaggtagacctcatcagaagcatgccttgacaatatctctatcactggtag

SEQ ID NO: 5755 - DNA, 529 bp, Glycine max
  Clone ID: jC-gmle01810002d08d1
cacatccacacatttatagaacagaaggaacacgtatccacaaagtacttcgatgaataattcttcatttttagatagttacatggactaagtttgagcttaaaacatcgatttgcaaagtttattgcgccaaagcacttgtgttgtagacaagaagtgcaccaccagcaagaagaccaagtagagtcacagcccagatagccaagccagtcgtaccgccagcgtagacatcaccggttggagaccagtccttggtgtcgtagataggactgtaaccatcgacattagcaccgtatttgtctacaaactggtaaacgccctttccctttcctttcctgccagatgcatcaactccttccctcaaagccatgccaccattaattccataaggcttgtcagtcttgatcttcttgccaccactggccacaactctgaatgaagaggagttccttgaaagggagggaaggcctctaactgaggacttctcaacagtgaaaggcgcaggtttgagggccacagatgccatcac

SEQ ID NO: 5756 - DNA, 529 bp, Glycine max
  Clone ID: jC-gmle01810002d09d1
aaaaatatagaaatagttttttcttgaacttgtaaatttttggcgtacacatgacttacaaatcagaatcagaacatccattccactataacttactataagttgcaactttaaatatttagagttgatacaagcctacaatagagattgcgacatactagtcgcttatttttaaattagcaagctcttagccatttacctagggtatattgccatacttagccttgtagtcttgccaaagctgatcaactgtcttgcccagtaactgaacaaagaattgatcactataaccagtcctcatctgcttgttcaattgtgccacaaacccacttttgagagtattacaatagtccagaaaacgagcagtaacatcataaccctggtcccatttctgtccctcccctgctttcttccagtggctaggtgcatagtttgccttcagcctaacatagtctgcaataccttcaattaatccacttggagcctgaccattcccattccactggccaacgtggaccatttcatgata

SEQ ID NO: 5757 - DNA, 486 bp, Glycine max
  Clone ID: jC-gmle01810002d10d1
gaagccatgaaatgccttgtattgtagtgacatcatatccaatcatgtttctttaaacttcgtgaaatttgctatgcttgtgtaattaaaaagattgaacgattacaaattacaaataagaaaatgaaaatgaggacaactttacacaagtttgaaagaattgaatttgttggtaaccatttatatcattttctcaaacttatcaagcatttttaccctttgcatggatctgacaaatagtgtcataaaaatacctgcaccaatgaaagatccattcgcaatagttatgttgccttggctgctcagagtgataccaagatttagcagagttgctcctaatacggtatacatagttgccatttgtaaagccgttgctttccgagcagctctttcagactcaagcactcgtacccgaagtttcagatcccctgcctcaagttgctttgtaaactcttctattctttgaactctgtatggcatagacat

SEQ ID NO: 5758 - DNA, 455 bp, Glycine max
  Clone ID: jC-gmle01810002d12d1
gaactgataatagaaacacttttattaagacttcaaatcacagcattcaagataatacaatacgctacacttttagaaagccttatatctatatctatacactacaaagctttgccaagataaaagtacactgcaggcaaatttttcatacacgtttagcatagttcattctcccccaattattctttgtcacagctttatattatccctggattgcaacaccaagaggagcagcatccataggtataatcttctcaatttctacacccttggtggtggtctgggtttcataggctgaaatgtgcactccaagtgctgctctaccagaaggatcaaggttgttagaccaagcagcatcccactcaacagctttggctgtgctacatgcaacacttgctcctccaggaacggtgagcctagctgagttctgagggaagaacctctcaagatcattc

SEQ ID NO: 5759 - DNA, 359 bp, Glycine max
  Clone ID: jC-gmle01810002e03d1
acacacttattgttcttttttatgtgctttatataattgaataaaatatttcatactaggtcccatatgcggaaggacattcattagcccaaacttccagactataacacttatcaagaaggcgacgcagcctatggtgagaggaataagaactcacaattccatgtctaactgcacatagaacaggccagatagctaccgaaaaaggatcaactcataattagaaaagccggaaagaaacctatccccagagctgtgcgaatgctttcgaaaacatgtgaggagcgactgttaaccgcccaacaaagccagaacaactgggggtaaacccccccatactctatctcgaggaacattta

SEQ ID NO: 5760 - DNA, 510 bp, Glycine max
  Clone ID: jC-gmle01810002e04d1
aaacacactcattgcacatagtaatgcgctgtatttaagtgaataaaatattacatactagttcacaaatgcaaaaggacattcatcagccaaatattcgagactcttacagttctcaagaaggcgcgtcagcatagggtgagtggcgttagaactcacaatttcatgcttaacggcccaaggaacagccatgaaagctactggaaaaggatcaactctaataagaaaaacaattttcttacctctcccaagtgctgagcgaatccttttgaagatatctgaggagcgattgttaactgcagaactaatccaagcagcggtgggtaaaccaccacgtacactaccacatggaacatttacaacgacagcttctggggggaattgactcacaggataaagacaatgcacaagaattggtaaccaagaattcactggagaattcccatcaaagaattcttgagtgttagccaacacaagcttatcatcgaaaacaatcttgtttggaaaagc

SEQ ID NO: 5761 - DNA, 511 bp, Glycine max
  Clone ID: jC-gmle01810002e06d1
gattctcttcattaaccctaccatttatatccaccagaaacctaaccaacagtaatttcgaaccattattacgaggaaaaactaaaaactattaaactaataacctcctatggcaacacctgaatatcagtataaggaaaagggacaagataagacaaaaaaaaaaactcattaggagctctgtgacaatcacaagagtgataacctttctcagcccctagcaccagctccctccctctccaatttctgcgagaagaacttggtagcgaacatgttgtcctcgaaatagtccttgtaaggatggtccttgggaacaagcctgcgaaacttattgaattgtttatcagcttcatctttcttcctaaggagagtataaataataccctgacacaagtaaggtctaaaatccctaggctcttccttcaccaattcctgataagccttgagtgcttcagtgtaatctccttccatgactttaatctgcgcaatcaagagcctgaagtctctaaca

SEQ ID NO: 5762 - DNA, 306 bp, Glycine max
  Clone ID: jC-gmle01810002e07d1
caaaggcggatctaatgtcagcatatgttaactaacaactatgcaactagtacaatcacatttatcatgacttaaggaatattaaacatactacactactatgactagaaacctaactgcgcattgactaactacaacgcttctcgaaaccacctccgcgatcgcctggtagaactatgctaggctgactcatgacctacccgcgtccaagattgatgatcaggtttaggaaatcgcgtgacatatcgattgggctcaccagagtgtaacaaggcacctattgaacgggaacaggttaatgaggat

SEQ ID NO: 5763 - DNA, 531 bp, Glycine max
  Clone ID: jC-gmle01810002e10d1
aagtacacaactcatagcaaaaggtttattaagctgtaaaggtgcatttaaccataaacaaaaatagtctccaagactataaaaacattacattttagacaaattagtcttccacttcatcgtccgtcaacacctactgtaactgctggtgttgctgcctaacaagtatcatattcactgcaaacatcttagtaggagtagcttttgacgaacaactccttcttggcttcctcggattcaccctcaccagtgtacttcccaagctgagcgagtgagttggacttggcacggaatgcgagtgcatcttgtgctgccttcacgttctctgggcggcctccccatgtcttcaaggcagtgttttggagggctctggcatacgagaatgacacgtgccacgggtttggagattggttcatggcattcaaattgagggtagcttcaacctcagactgtccaccagacaaaaacataattccagggacagcagggggaattctcctgtgaaggagcttgagggtgtaatcagcaact

SEQ ID NO: 5764 - DNA, 503 bp, Glycine max
  unsure at all n locations
  Clone ID: jC-gmle01810002e11d1
gctatacaaagtccatattacttacaagtatacaaagcccatatacttacaagtaggatggtgacacataaattgagatgacaccaattgtgtgtgatagtgattacatatgacttcaagatcatttgtggaagaacatcacaatttgctaaatgataaatttgtcactctcacaagaactgctattaatgatctcccattgctggaacaataaatatgattttcaggcatacctcaactcaggcgttacttccttccggtaacgtaatcaatcttgtagttgaatcatattccattgcagttccacagttggagcatttgacagtgttggtggaaccaccatttgaaattgagagtatagtcccaaagaaagaggtattttcagtaccgcagttcggacaaggaccctttaaaatacaaagtcttttacaatggcatntgttagtgacagagctatccacacaatgaggggaacagcagcaaaccaagtgaaaatgaaacta

SEQ ID NO: 5765 - DNA, 339 bp, Glycine max
  Clone ID: jC-gmle01810002e12d1
aataaaaaaaaaaaaataaaaataaaagaaaaaaaaaaaaaaaaaataaaaaaaaaaaaaaaaaaaaaaaaaaaaaaaaaaaaaaaaaaaaaaaaaaaaaaaaaaaaaaaaaaaaaaaagaaaaaaaagaaaaaaaaaaaatgaaaaaataaaaaaaaaattaaagaatataaaaactaaagcgtaaattaataggggaaaaaaaaagaatacagaaaatgaaagaaattgcataagaagaacacaaaaaaaaggaaacaaaataaaaaatgaaaaaaacagaggaaattaaaagataaatcaaaaaaaagaaaactttaaaagaaaacgaaatggaaa

SEQ ID NO: 5766 - DNA, 457 bp, Glycine max
  Clone ID: jC-gmle01810002f02d1
gttgaaatggtttgttttcttaaacaatgttaaaaataaaaaaattacaatatttaaagttcaagcaaatattctactaaatataaactaatcataaaattaaaatttgtcatgttctattctataccctgtggcatgcaccaatggttcatctggaaaaacaaacttaatccctgataaatttgcccttgagcatcgatactatgcccattacattaacttctgtaagtgatgtaacaaaattacagtatcttgtcagccatgaaacaacactcacctcacatgtacccattccatcggctctttcagtctaaggcctgccccgcctcaagctgcatgatggacatttatattgctttatgctctcagcctttgcaggggtaatcttaacacactttccatggaaccacctctcacatatgtcacagcaaatccaaaactcatcagcgttgtaatt

SEQ ID NO: 5767 - DNA, 310 bp, Glycine max
  Clone ID: jC-gmle01810002f03d1
aaaaaacccaaaaaaaaaacccccctttttaaaagcccaagttacacttaaggggcaaaaaaaatgcccaatttaaaacaaaaccctaaaaaaaatggaaaaaacctgaccgaaaaattaaaacccacaaattttggacccataaaaaaaaattaaccccaaaaaggggggtgaattcccaaaaaaaaaaaagtatgcaatctttattcaccaaaaaaccctttattacttaaaaaaaaccccccaccccttaatatttaaaaaaaaaggtagggaaattacaaggggaccccaaaaaagccccccaaaa

SEQ ID NO: 5768 - DNA, 470 bp, Glycine max
  Clone ID: jC-gmle01810002f04d1
aacaatatgaaaagaacactacattaccaaactaaatccactgcatcagaaggcaatgtatgtctacatataaaaatgttacgcacaacagagcttctggacgggaaaaagttccccagccacacaaatcttgtttaaaaaaaaaagaaatattttatatcaatttattataaacgttaataacattcattatcaagtccattacggatcccatcagcaacaaatcatgaaggaaggacatcaccgagttttctttactcttctgcagcactagcagcactaagatccacactcaggtcaataacctttccagttatcaatgtatacatgttgagaacatcatccacggtcgactcaaagtgagtagtagcatcataacttgttgatacaaagcagttgtccaaagtgggttcattgaccggttcatatctgtcatagatatcaaaaaatatctcatcaacaggtcctag

SEQ ID NO: 5769 - DNA, 481 bp, Glycine max
  Clone ID: jC-gmle01810002f05d1
catggatgatttccacagaatctctgatcatttaatgaaaatagtcactataatcaaaggaaccaccatgagacagtccaagattatccaccatgactgtttattattacatataacaatctgtaattcgaccaaaaaactaacaacctgtaagcataagctgatgttttcgttgtccaatatcacattgggtttgttgtcctgttctataggaaacggcttactgtctcagtatttgttggtcatcctttgcaaaggtatctttctatttagtaccttcaaggacaaaagagccaacaagatctacttcaggtgactcgaggggctgtttggaatcaagttgactgactggcggagcttcaattgtctgatcaacttgttcagaattgagctcctcaagttttaaatgaggtttgctgtggtcaatagggctttcaagttgctggtatttgggcttgtttttctcgaggagaaggtaggt

SEQ ID NO: 5770 - DNA, 503 bp, Glycine max
  Clone ID: jC-gmle01810002f06d1
caatgtactgtaaaatgttacattgattgcatcaaaggcgtatacaagtgactcttatgttcactatttccttaaaaatacagaatgcgcgtgaaaaatgtagatatcaaaccagaagacatcatttgggtttatcaaatcaagaagagtgacaagaaagaataaaacatacatgggaaaaaataatcacgaactctctttcctatggtcctacgcctttctgttaaataggttgcttctaacatgcccccatggtagcataaaaccattcatgtgttcacatcaaggttgccccatgttgttgcagcactttctctgcagcccaaaattgtgatcacttgctacaaatgctgccgccatgagaaatttcacacagatatcttcagatgcaagtttcttatgcccagagtagtccatcagggccaaattcataatttgaaactgggctatcaccaaattcctggtctgctggttggtcaccttctacttctagtgtatcgaca

SEQ ID NO: 5771 - DNA, 308 bp, Glycine max
  Clone ID: jC-gmle01810002f07d1
caaaaaaccccatgaaggcggctacccctctttttccccctcttaaccccggggccaacccgcttacaccccaaggatcccccccctcatacacagaagccctatctcccccaaaacaaatttcaggcccctcaccaccttggggcatccccccaaagataggattgcacacgctttcccctttcttcaaaaaggcctcaccccaaggggattcccccaactgcccgctgccaccccctggaaagctaagcaaccttttttttcttaaaccccccactcggggtttgatcacctttttcaccggccct

SEQ ID NO: 5772 - DNA, 485 bp, Glycine max
  unsure at all n locations
  Clone ID: jC-gmle01810002f09d1
gcaacaaaagttaaatttattaatagtagtaataatagtaacatattaaatactataatcactagccaatcaagacacacccctcttcgagtgagtgatgaaccttgcaatttgcatcaacctttttcaagtttcaaccccaattaaccgaaattggggatccaaccaggtgcttcccatcggaccattctacccttccaaaagcgttttctgtatgctgtggcgaacccgatgacgaaaacgtgacggtgaacgttttcttctcgttctccttgaaactcaacacttgcggttctaccgagattttaacggacgcagtgtctgacgtcacggaagctttgtaagttcccgcgggccccacgttagtgagagtcctcgtgtgcttaaccacgctccctgatgattcanacaacaccgcanacgaagggtagttgaggtcggtcacactgtactgcttgcccgcgtcgcactggaattttctcttg

SEQ ID NO: 5773 - DNA, 541 bp, Glycine max
  Clone ID: jC-gmle01810002f10d1
ataaaaactacttccatatatttacattagacataatgaaaaagtttaacataaaagtctcaaattaaggaaaagaaaaaaaaactatatgcctcacggccaaacagtagtatttctactatataccaatcttcttccttcttttttggtgaaaactacaaaaataaatcccacaaatttccattttccacagccatctgtcatttccaggaccaacatgccttagtcaacaaccaccccccacagaaacgtacgcatcttccaccagaatctttaacttccagcatccaccaatgcacgaccaatgacaattacaaatcaaaatccctaattgcccatcatcataaaaagaaaaatctacgaaaaaagaagacccaagacaaattaaaaaaaaaaagaagtaaaaagtcatgagtatcaaccggagttggatctaacagaagtaacaagtaaccaaggtttgaatccttacaaggaatatgtatccaaatttaatgtttgactaatgagacatgcatattggaaaaaaagatcattcatc

SEQ ID NO: 5774 - DNA, 403 bp, Glycine max
  Clone ID: jC-gmle01810002f12d1
gggaaaaatacccatgaaacattttcataatttactaattctgcaacaattttggaacatttcaaataagcctaagctttctaattactataacaatttaatgaaactgattagattactggctgactcttcctgtacgactgtacctagtgaaagaaaacacgcccaaacacaaactggggaaaaaagggtcaagtgaataagggtgcacttcccgcaatgcttaaggctcttttcactgaaacgaggttttaatagcaaaggccaaactatgatttattttcagtagttccatgaaatttccttccagccttgacaggttccctgaacgcatttacaagctccttattttcaggatcaagctttactccctcataaaaaggatttgcagcttcatcaaatt

SEQ ID NO: 5775 - DNA, 310 bp, Glycine max
  Clone ID: jC-gmle01810002g02d1
aaaaaaacataccctttaaaaaattattaaccaaacaaaaaagagggggaaattagaaagacgacgggggatacaaaagaaacgggcgaagcatagcaccctgtaacagaaaaaaaaaaggaaccaaagaaggaaaaaagaaattcaaaaatagacgggggacacccaggaaggaagacaccagccgcccgcagggaaaaaaaaaaaaggggaacaaaagctaaacccaaactgccaaagaaaaggagaaacacccgcaaagaattaaaggaccggaacctagaaggggaaaaaaaaaggggaacaaaag

SEQ ID NO: 5776 - DNA, 533 bp, Glycine max
  Clone ID: jC-gmle01810002g03d1
gagaaaaggattggttgcttgaccaagtgcattgtcatgcaaattaatgaatatagaaactgagggtgttaaccggaaaattgatgtccagttgcaagtgaacaacatactgaaagggtagtttaaaattaggaattcattcatagaaaaacagcaatacaaaaatttatgaagagcacaaacactcctagttcacccccataaataagtagtcaatgtatgttctcatgatcctttatcactttgcggctgcttcagcaggagtgcttgtagtcatctgatcaacagcatgaactacagtctgaagttcctcccatatagctttataaaccatcctttgcctattaacggctgattgtccctcaaaggcagtagctaccacatcaatgctaacatgccgaccatcaccataagcatccttgacggagaccgattctgcattgagttgttcctttatcttgttctgcatggactgtataagaggagagtcgatagagccagcatcgttgagatgggttgcgcgtgaattaaaa

SEQ ID NO: 5777 - DNA, 501 bp, Glycine max
  unsure at all n locations
  Clone ID: jC-gmle01810002g04d1
gaattggaagatgaggttgattgtggttcacatgcattagattacatcatatcatgtaccatttataaaaaaagtaattacaaaaagagcgcgtaaagatcccatccacatacaaattctccaggctttcctccaatgtagccatccaccctctcttatctagacatccttggcaatgaggtcgccgttgatgagttctctgtaggcagcaacgggccagctgaaacccctgaagagcaagcgagaagccagaggaacatcgatgatgatctccttcatggtgggtttcttctcgtccctgatcgcaatcaggtagctccgacccacccagccgatccatcccgagatgtacaggaatagtattccgggtgtgatgaactcaccccagtgcctctggtctccgctcacgatcaggtgcggcaacccatcgccgncgcacagcaacccctgcttcgcgtagttgtcgaacctcctcttcgtcttcttcacgctcgccttaat

SEQ ID NO: 5778 - DNA, 397 bp, Glycine max
  Clone ID: jC-gmle01810002g06d1
aaaattaaaggggcccctttaaccaaaaattttaggggaaaaccgcccaatttgaaaaatttggaaaaatcttctaaaactgggaatttttttttggccccaaaaacattggaaattttaaaaaggttccccccaagtcccataaaaatttttaaccctgggatcaccaaaacctttgggaacaaaaatttttccttgccaagtttgttttgcccccaattaaaaatgggaaaaaagtcccccggtaaaaaacacccccgttggcttttccaagggcaccctctttaaaaaccttgtaaaccaatgggacttttttgaaaatctttggttttgggaaaaacttgttcccatccgtaaaaagcttttccaaagtaatttggggctgccaaaagggggg

SEQ ID NO: 5779 - DNA, 430 bp, Glycine max
  Clone ID: jC-gmle01810002g08d1
aaaaaatacccttttaatcaatttttgggcgatattcatgaatttcagtccccccaaaatttattattggctgcaaataatggtaaactttgaaaatttttccttaaacaccgtttgaacaaacaatttccttttttttcacatgatacgttaacccaagggaaagagtaaaaatggtttgctgctgggaatgggaatcatcaaatcaaaaaaaggggctctcccttattcaaatactttggattcctcattaacagggtttgtctcgcaaaattcctccaagggggctccactccctggtttaactgcccctggccacttgcttgctactaggggggccaaattcaccaccctttgggtgtaaccccatttattggcattccaagcaaccaccttaaccatgttatttcccatgaccattgtcaagggg

SEQ ID NO: 5780 - DNA, 392 bp, Glycine max
  Clone ID: jC-gmle01810002g09d1
gagaaagaagaccagagtaaatattcaataaatgggggaattccctttaagtctcttgcaggtagaggcaaaacttcaaattaataaacaaccttaatatctaacaatgatgaaacaacagaaacagaacataatggaaacaaaaatactgtacactaatttgttgcataaccttggcgttgatccaaattttcatacagacaaacaatggaagcaagatttaccaatttgtccatcactctagaacagcaacctcgttgtcaaccctccagtaatttgcatcggtgaactccttcacaccaggactgccttcttcagaattttccttatctggaacttttgagactacgtttcttttcaatggacctgcttccccaactatcccttctttg

SEQ ID NO: 5781 - DNA, 390 bp, Glycine max
  Clone ID: jC-gmle01810002g11d1
cagggggaaaactgattttattggacaaaacatgcttacaaaaatatgatttagaataaaggtcaatggatcttgaaattacaaagcatctgccatcaaccagaaatcctctcctgactgtaaaatacaagtatttacatcctaataacaaaaggatagagcaattctatgatatctagcaagctataagaacaaatgcatagatgtatttacaactaagagaaaccataacttatctctataaaggaacagaatatttttttggctgcattcatgggcacaatgtacaatagtaactgaaacttcatgttcttcacaaccttacctgtatttgatttcctcgtttcctaaccatgaaccattttaggacattgcatacctttcttcatc

SEQ ID NO: 5782 - DNA, 403 bp, Glycine max
  Clone ID: jC-gmle01810002g12d1
aaagaagacactttcctggataaaatgaaatccaattacaataaatcacaataaaaatctcacgaaactgaaactaatttcacacacgctccctaaatatcagaaaaaggacatatccagagggtggttgtgttgctgaaacgccagaattgtgtctatcacctaccatacaacctgagcagccaagaggatctgcagagcagttttttctcttctagagagatcccgagtttcactatttgaggctggttaataagaaaattgtggactgatcctgttgatctatagtgtacccagtatccacgacacttgtatgtgtcgtacaagcatggtgcgagtcaagcatttatttctgaatggcattggtgctccctgctggcacttcttctaccccaaaacatgc

SEQ ID NO: 5783 - DNA, 494 bp, Glycine max
  Clone ID: jC-gmle01810002h04d1
gagcagaaaaggcatttatatatattacataacttatataagtgatttctatgtcttgattatttggtagcttacatcatccccaaatgcaggcaaaattttgaatagcctataaaagcgtgatgcctatgtatgtcttaatcacatgaataatcatcatcccaaaaatgagaatcaaaagaaggaaattagatgaaaagaaaacatgtaatgctacaaaatgaagttgttttactttactgcttcacaccttaggacgtgcttcgatcccttgaagcagcagataataatttataagaaaatgaaaatgcaatggttatcctattctgtgtccctaaagctttcactagtcagccacattttcttctggatgataaaaacaacttcgtcaccatcttggacagagtcagaactggaatcaattgcttcccagtgcaaagcacttaggtacttctttataaaatcaatcactggctgtttatctcggatgatca

SEQ ID NO: 5784 - DNA, 536 bp, Glycine max
  Clone ID: jC-gmle01810002h05d1
attgtaagttcagagatgatatagaagaaagtgtaaggtttaagaataatctccaatgaaggacaaatagtagaaacggaggttatgttttttttctctccgagggatggatggatgaagaacttccaaaagcgcaagagtataatgcagcttttacaatgattttcttacaaccttgaataacctctatcgtcttcgtattgctccatgaattcatcattgaactttttgaaactatccataatatcaggcatgtcttcctcagctggtaaaatagttgtcctcaaatggaacaccccttctttctgaccaaatcctgaaccaggaacagtggatatgccagtggcttccaaaagcttgaggcagtagtaaacatctggaacctttccagcctgtttagcagcctctaaagctcttggcggcaagcgtatttgagggaatgaatacatggcaccttcagtaaaattacaaaccacatttctgcaactgttgaatccatcagtcattatccttgctcttcttctcagtgattcaag

SEQ ID NO: 5785 - DNA, 562 bp, Glycine max
  unsure at all n locations
  Clone ID: jC-gmle01810002h06d1
gcagcacaatccattttctttgaaacactgaccaatggtgctatacaaagtcttctttgacataacaatttaataaaatacacaataaacaaggctcagtaacaacctttgcacccccccttataacttggagatttgtttcagtcgatcaacataatttgtgaaatcagttccgaattgctaaccattcatctggacctcaccatttcctgccatgtcacctaactaatacagttgatatggcagttaaattgcaatgacttgtctaaaaaacagacacaggaaactagctagatcaaaatggtcaccacaaagcacaaccaattttacaaattgaatacgactgaaacatttcaaagtttaggacataatatagcctggcctaaaaagtatagcaaatgtaattcagcccaaaaaacaattcatccagcgagatgataattaaacacctcgtgaaagtcatgattgatgagcattcagcagcgctctatagaccatgtcaatgaattgatngtcctgaacaagcaccagaagagcatctcgaacctttctctggaaatac

SEQ ID NO: 5786 - DNA, 444 bp, Glycine max
  Clone ID: jC-gmle01810002h08d1
ccaaaaataatgataaataacaatgtctgtctacgtgctagtgtggaggagacgaaaacttaacatattttacaaaaaaagaatgggattcaatctcatgttccagttagtatcgagctttcctagggaacaagtacaacacaaatctacaataaagacaattatgtaggggggaaaaaaaacaggacagagaggccacaagccattacgaatcagattactctgcacttgtaattatcatagaggcggatagaagtatgaagatatggaaaagccgatgaagagcaagccaccaacagtggctactgagcgttgggaaatcttagatgccagcatgcttcctcccaccacagccagagaggtacagatggtgtgtcctatagtggccccaactgctactccaattgcatttttgtgggttgccagctgcagaaaattaaagga

SEQ ID NO: 5787 - DNA, 410 bp, Glycine max
  Clone ID: jC-gmle01810002h09d1
aaaataactcacacttcacacatcattacgacaattaaaagaggtgtggaaattttcaaatagacagagcatactcaacaagagggtcatgtctaatttcctttattgaattaaacaaacgaacaaacgaaagaaaacacaaattccagatcatgcagaggattccgcattttcagaagatctggcagtagcctgtggaacagaaaaagctggcataagagtattaccagcaatttcaaaatcttgagaaattcccaagagaatatcaaaaactgtagactgtttgggattgtcaataaggaaactcaagtgccatgaagtttgatttgcccactcagaactccacatttcaaaaccattattaggaccacatacctctattgagaagatcaattcccaggaatgtggtt

SEQ ID NO: 5788 - DNA, 476 bp, Glycine max
  Clone ID: jC-gmle01810002h11d1
aaagaagacactttcctggataaaatgaaatccaattacaataaatcacaataaaaatctcacgaaactgaaactaatttcacacacgctccctaaatatcagaaaaaggacatatccagagggtggttgtgttgctgaaacgccagaattgtgtctatcacctaccatacaacctgagcagccaagaggatctgcagagcagttttttctcttctagagagatcccgagtttcactatttgaggctggttaataagaaaattgtggactgatcctgttgatctatagtgtacccagtatccacgacacttgtatgtgtcgtacaagcatggtgcgagtcaagcatttatttctgaattgcattggtgctccctgctgcaacttcttctaccccaaaacatgctagagcaggttggtttatctagtcttggcccttcaattttatcctgatccactgttgatgcttgagagtgatg

SEQ ID NO: 5789 - DNA, 393 bp, Glycine max
  Clone ID: jC-gmle01810002h12a1
cctcggggaattccaattccacattttcaagaaataaggaggcaaaaatgttcatatatgaattggaattatttgttttcttattaggcctatcctgaagccaaaggaaatgagatcggaattcctcggggaattccaattccacattttcaagaaataatgaggcaaaaatgttcatatatgaattggaattattcgctttcttattaggcctatcctgaagccaaaggaaatgagatcggaattcctcagggaattccaattccacattttcaagacataacgaggcaaaaatgttcatatatgaatcggaatcattggctatcttattaagcctatcctgaagccaaaggatatgacatccgaattcctcggaggtaccgagctcgaatt

SEQ ID NO: 5790 - DNA, 396 bp, Glycine max
  Clone ID: jC-gmle01810002h12d1
ggcttgctagactgccatatacgaaaacgggttaccggtttttcctttggctccaggataggcctaataagaaaacaaataattccaattcatatatgaacatttttgcctccttatttcttgaaaatgtggaattggaattccccgaggaattccgatctcatttcctttggcttcaggataggcctaataagaaaacaaataattccaattcatatatgaacatttttgcctccttatttcttgaaaatgtggaattggaattccccgaggaattccgatctcatttcctttggcttcaggataggcctaataagaaaacaaataattccaattcatatatgaacatttttgcctccttatttcttgaaaatgtggaattggaattccccgagg

SEQ ID NO: 5791 - DNA, 475 bp, Glycine max
  Clone ID: jC-gmle01810003a02d1
catggccttctttgctaactcataacctgcaaagttcatagcacctagaggagcaatccaaaagaacctgggtactgctcctttgaacaagccaaggggtccctcatgttttagtatggagaaggctatcaaggtcattgacacagatcggccctgtgcagtcatcattctagttttcatgacatcaaacggcgttgtaacaacagccgccaagccaccagataaagctccaacagcaattgtttccaagggaccgagttcccgctctagtagtcgttctgcaacctttttagattcagcataaagccccatgccagcaacataaaatggaacctcacggcacaaggtagctccggttccacggaagaaacccctaagaccatcctgctcccaagtcgcaacaaaagcctcacccacattgtcaaaaagaccagcctgtaacctctgcttcaacacttcacaggggatccgcaca

SEQ ID NO: 5792 - DNA, 335 bp, Glycine max
  Clone ID: jC-gmle01810003b07a1
tatgctggtagtggggctcgagctcgggcactgtttgggctgcgaatcatgcagagaacagccatggaggacgttcgcttctaccgaaactatgggaaaaccttcaggaagcctggtcggtcgtccgagaaggagcgtttggacgccgagttcgagctggtcagtgagtacagacttcgttagaagagggagttgtcgagggttcagtacgctctcagccgtattcgtgtcaacgccagaaatcttttgaccctcgacgagaagaacccgcgccgtatcttcgagggagaagcccttctgctgagaatgttccgttaacgacttctcgatgagac

SEQ ID NO: 5793 - DNA, 473 bp, Glycine max
  Clone ID: jC-gmle01810003c02d1
aaaggtaatcagccatgtttttttagagggaatatttcatatcaatgtcatggtaactaaaaaaacaacatagagaaagttaataaatttctcaaaattaagaatatacaatgagtgaattaatgcagcagcagcagtagtcacacaagtatcatcatataatgcttaaaagaaattaagcatagagttttccaaatacaaccttaaatgagttctccaaaaaggaaaagaaaggaggttcatgaaacacatatagaactgtttcctccattgttctgcaccacattatacaaacttggctcaaatgaggagcaaatttttcataatcttggcaatgcgcggggaagaatgcgaggttggtcccaatcagtgacaatgtgatcacgagtgatatccttgagtgaggtgcaaccactcaaggccatggttagctcaaactcctcacgtagcatccgcagcacgtttcttacacc

SEQ ID NO: 5794 - DNA, 496 bp, Glycine max
  Clone ID: jC-gmle01810003c12d1
gtaaaaagcaagtaacattaagttggattgggatacacaagataattcacattatctgaagtacattgcaataacatatacttcaccaaacacaaatctaaaaactctcaaaagtccacaagtcatccttttctttcatgctcacttgccggggacgaagttggtggcgtaggcccaggcattgttgttgactgggtccgcaaggtgatcagcaaggttctccaatggacccttaccggtgacaatggcctgaacaaagaacccaaacatagagaacatggccaatctcccgttcttgagttccttcaccttaagctcagcaaaagcctctgggtcatcagcaaggcccaatgggtcaaagctgccaccagggtagattgggtcagtgacctcaccgaggggcccaccagcaatacgataaccctcaacagcacccattaggataacttgggtggcccagatggcgaggatgctctgggcgtggacaaggcttggg

SEQ ID NO: 5795 - DNA, 468 bp, Glycine max
  Clone ID: jC-gmle01810003d02d1
cagtacatatttaatttctttttacttcaaagaaggaaacctacacaaacttttttttttgtaaatggaagagataaatacacaataataaagtaaattaagtatgcatcaagaaacaccaaagaaacccacaaggctgtcatatgatgaaatgaaaacaaagcacaccacaatcatgcatctccaaccaacaaaaaagccttgtctcaatcttaaatatcaatgagcaccactctccttttccttttccttttcctcctctgtcttggagtgataaccaggaagcttctcttttatcttttctaatatacctttcttctccttggcctctccttcatgatgagcaccttcaccatgctccaatgatgcaacaggtggtggtggaagaagagtagtagctgtggcctcctctgtcttcttgtgccctggtagcttctccttaatcttgtcgaggaaccccttcttttc

SEQ ID NO: 5796 - DNA, 410 bp, Glycine max
  Clone ID: jC-gmle01810003e05a1
tctagcgctcgaggctctctgctgacatacactgccaaagaagaacaataccgactattccgttcgactgtacacctgtgctgaagcgttgcacacatcacagttattctaagagtgacgggctctcgaactcatatcccatctgtactacggcggacaggttgtgcgactgtcaccaactgtgccctgcacggctgccgctgtggttaccctggtgaacgttgtcgctctttccactagctggcccaaactgagactggctctggtcgacgcctcatgcacagtcacatggatgagcttccagcacttcgcagactccgagagaagcacgtaaccgtcgccgataccatccgaatgggatagctgaacgtatagctagctcaggatatgcctgtgagccattcattgca

SEQ ID NO: 5797 - DNA, 431 bp, Glycine max
  Clone ID: jC-gmle01810003f09a1
ctcgctatagatgctcgaggtaatactcaaggattagaacaatagtgctttacaaccgatactcacgcaaacgctccctccctctggaaccgtgttgcaccacaaccacatcatcagttactgctacctcgtaccctgctgtattcacgcgcgcgtatacacactttcattactcgtctctcatagaaaaggcttgacactcacctcgctgtcaccgatcagaacaaatctcatgagaagaagagcgtctgtgagggatttcgcagtgttcgagaggctcaccgagagagctataaaggccatagtgttgtcgcagagggaagccctagctctccgaagcgaattagtgcacacgcagcagcctcttgaggagctcatagccgatgaggatcattactgcgacgggttgctcacgtctggtgtcaccgtcg

SEQ ID NO: 5798 - DNA, 336 bp, Glycine max
  Clone ID: jC-gmle01810003f12d1
atcccaaagggaaccttaatgggggaaaacacacaaacgatacttgaaaaaaacaataaacactgataaagacaaaaaacccccttatttaaaaatttcccaaaaggcccttttgaaaaaaaaaattttgccccccggcaaaaaaggccggaccagcaaggggaacaaccccaaaggaatttattctcaaggggaccccttaacggggtggaaaaaaattttaaaccccctgggggggccactaaccccccgcaaaaatcccgagggggaatgagggggaacacccggggaagggggaatagctagaatgccctctataaaacggagccagagggg

SEQ ID NO: 5799 - DNA, 285 bp, Glycine max
  Clone ID: jC-gmle01810003h02d1
ggtaagaaaaaaaaaaaaaaaaaaaaaaaaaaaaaaaaaaaaaagaaaaaaaaaaaaaaaaaaaagaaaagggaaaaaaaaaaaaaagaaataaaagaaaaggaaaaaaaatataaaataaaagaaaagggacgtaaattcaaaccgggaagggggaaagaagacccagaaaacaaaatggggatgcaaaaaaaaaggaaaggggaggggcgcgacctttattggaaagggaaacgttacatgaaaagggaatgggcccgggcatgggccaaagcgaacggggcc

SEQ ID NO: 5800 - DNA, 346 bp, Glycine max
  Clone ID: jC-gmle01810003h08a1
ctctagggcttgagagatcccgctgctgtacccatcatcaatgaccttactacgattttgggctctatatctaagcccatggcagcttgacatgtagtggataacactgcccattcctatgggtatcacatcctagaacatgtcgtccatgctagaccaaccattgccataggatcaatagtagtgcaacatgatgtgacttacaccgacttgtcatgacagcctctcagaactcgtagaatctacggctaatgcagatgatctttcatcagcaaatgctgaccatattgcccacgatctcttcaacctgcgtcaaagctatgacagagaagaccattccacagat

SEQ ID NO: 5801 - DNA, 282 bp, Glycine max
  Clone ID: jC-gmle01810003h12d1
gggaccccctgaaaaaaaatttaaagaaccataaaaaagggtttgcctgaaaattttttacagatgcctgaaacccttaccctaaaaaaaatccctaactaaacatgacgagggggtaaactccatgtttgggacccaaaaaaaagttttttcaccaattaaaaccaaaaaaaaaaggggctagcccttacaacattttgggaaaaaaattgccaaccttttaaaaccctgaagccgtcaggaaggttttccccccctgaaataagggttaaggaccctttt

SEQ ID NO: 5802 - DNA, 407 bp, Glycine max
  Clone ID: jC-gmle01810004a02d1
gcttggcaattagacaattagatcacaactacctaaatcaggtccttatttctcagttttttctctgattaacaccatgattatgaatcatgtaaaaatggaatgtaaggctatgagcacacacgagctcgttgcccctcccttttttccatatcaacaattaaagaatttccatctttttcagataaacatcttttatatggtacaaacccccttgcacgcttctggggtgcagatccttccttgggatatttttgacacttagaatcaacagcatctgagttcttgccttggttttccatgtcacaaactgattcagtgttggaaccagtgcaacaactctcctcctatcttgggcttactttcaaagagggcctaagaggcaagggatttaggacctgattgca

SEQ ID NO: 5803 - DNA, 533 bp, Glycine max
  Clone ID: jC-gmle01810004a03d1
aagaagaaacaagcattaatagaatttttatttctcacacaataaatacaagagattctgcaaactgaaaaagggatttcttactaaagcaaactcaaacaagaacaacttccactcatttggcatctaccgtagtagaacaggatcaaaagcagctctctgatagaacacacgtatgtattatattgaacatcttgcacagtggttcatttctcacagctattgcaacttaaaatacttgcaaagcttctgcaaattccaaactttctttttctcccttctttatggatatgacaaagtgatcagatcatgaaacaataatcaatccattgaatttgaatctgatttttggtttggatcgatgccaccattcttcatcttaggaagggacaacaaataggccaaagcctactaattaagcgcttaaaactgcattagtggttggtttaagtgtgatgttagtaacatcagcttgattattaaagggtgttctttgtacgaagaagcatgccccaataacaatgtagcacagc

SEQ ID NO: 5804 - DNA, 557 bp, Glycine max
  unsure at all n locations
  Clone ID: jC-gmle01810004a07d1
gtcacgcgttacatagattttatttatactcccacttatttttttgttcagctgaaaatataaagtgtcccgtcatgtctgtcgggattcatcatcaatgtaaatttctgaatcccacgcaattgaaactgcagatatacaatattcactgttgaagactatataatatagtagcttttgtgtttcttgcaagttttaattgaaagatggttactatctaactttattaacagaatcctcggacatgttaaacaaaaactgaggcagagatgcgatccttggaagattaagaagcaaatcgccagctgattccttcctggacataccactaaccccctgcttgcagccagaagcatcatccggttgaacttccaaatcaggcactttaattttgcatgctgacaattcagtggtgttagagttactgacaccaacttttccaccctcatctgcatcaagaccattgccatttctggtcattgtgtctgtgtcttctgctgtagaaggatccttctgcagaagacagtntagcgagttcacccttgacatcacatctg

SEQ ID NO: 5805 - DNA, 425 bp, Glycine max
  Clone ID: jC-gmle01810004a08d1
tacgtccttggtcgtcctttttttttttcttttttccacataacatctttgaaaaattcatgtatgcatacaggtacaaatcgatgcttgcttttccgcttttatttcgtgaaaaagacgcaatgccatgctcctggcgaacaacaagcgccttgaacgcctcgctatgcaagtgaaatctctggcagcaggacggacaacctgcgtcgctcaaataccagaacagatccgcataccatctgcaatcacatgccagcccatctattcgtcatcctattccagttcagcagggttctcgtggaagtactgcccggcgttcgtagcaacaatgataccctttcggatgaccaagttcccgaacctttgagcgtaattcctttccaaagcgtattgcttcaacatcgctttcaagatcgacatacttt

SEQ ID NO: 5806 - DNA, 181 bp, Glycine max
  Clone ID: jC-gmle01810004a10d1
gaaaggtgaaagcatgtatgtattctattctatcgcctttcaaaattgaagacctttacagaaaaagcaaagatagtagcaaatagcaatgcaaacccaacaactacacctgcagcaactcctacaaaatcatctctataaccaaagtatcttctaaaaaactctttcactgtctcattta

SEQ ID NO: 5807 - DNA, 515 bp, Glycine max
  Clone ID: jC-gmle01810004a11d1
aaaaaaaacaaaaaacactcttcctttaattagaaacaaattaaataattacatataaggattaaaccaaaaagtggcttaggggagaaattaaaataaaatcagggggtctcggggaaaactttttcctctaaaaatttgatgaaacgttcatcatacatcttgggttcaactactgatattgtcatagggtcaaattgcagcgatttgtatgcatgctcaattttctttctcagattatagttctgcaatatatcaattacgcccatgtagaggacaacatcatatacctcaaaaagctctacttcttttgcctccacctcctcctcaaccttccgagtagcttgagctggcatgttcactccaagctgcactcgcaaccttgcagtaccaggcagtagaagatcaacttcattatcacccatggagtatgccctcaatgtattccctctaatgtggggtccaggtgccgtgttgactttacttggttcgtgggaaactaatagtaagccttt

SEQ ID NO: 5808 - DNA, 566 bp, Glycine max
  Clone ID: jC-gmle01810004a12d1
ggtatcagtgagaaagaagggtttgaaatttactgacatgattgcttctcttggcagaaatattgccagaatgaacaaaattatatccaatttgaaacatgttcaaagttatacaaaattcttgttcaaactgatatgaagattgttggcatcacttttttctttgcacaaaaggacggagggggaggggggtataaaaagaattcttccttaaaacctgattgtattgctttggaagttttgattgggcatagttttcatacacaagtaaacctcttgcattagcttatcgtttaagccaagtacttttccaccttctctacctcttcaacgctcccaatgtacagtggcacacgttgatgaatctctgttggttgaatgtcgagtattctttgatggccatctgacccttttccaccagcttgttctacaatgaagctcataggagcacattcatacaggagccttagtttcccattcttgcttttcttgtccctggggtacccgtaaatgccaccatatagcagtgtcctgtggaaatcttctaccaagctaccaatgtacct

SEQ ID NO: 5809 - DNA, 397 bp, Glycine max
  Clone ID: jC-gmle01810004b02d1
aagagacaaaaattaagggcttagggcattacaaacttgcagtttgctacccataagcatgatgcaagcaatacaattaactaaaccttttatttaaaggggaaaactgaattctgcaaaaatgagaggataacagttacatgggggtctcgacattctttaccctttttaacaatggtaccctattcagcatagccccaccgataaaaacaccaatggggcatttggctatggggcccaaagctaaatatattgcttgaaatatagagttgacagaacattcaatcatccactgatttctgggatacacgacttttcttctcctcaataccagattgggaaaatctcagacgaagaacctgcaaaacattttctattttgacacctttttttgcca

SEQ ID NO: 5810 - DNA, 461 bp, Glycine max
  Clone ID: jC-gmle01810004b04d1
ggaccaattgataattagtcttcctctaatttagtatatcactaaaattgcaatatatcatgtatctcattttcatacatacaaaatagaaatccagttttttcttttcctttttaatatcctctctggcacgatattgctacatctgttagcaaatatggaatacaactcaatgtgaaatggttgggagccagttttaaaatgatcccattatctatgctcttggccactggggactcactacctcaagtgtgctaaagattaatcgcattctgctagcaacaactgacggtttctcagcctgacccatcacagccgtctgttctaactgaagagtctttacaggaagccttcaataaaaacatagtaagcaatactgtgatgtctagtaggctatcgtttacttgtaaacttgatgcaaatccgctagattagagaacgattctggtagataatattct

SEQ ID NO: 5811 - DNA, 538 bp, Glycine max
  Clone ID: jC-gmle01810004b05d1
gcaaaacatatatatgcttgagcaggtttaattttgaataaactgtttgctatgaatacacaaggacaaggaattaaatgtctgagaacatagccacacaattcaataccattcatgtggtaaaattcaccattttgacttaaatctgtagtaaaggaaaaagtgagacgccacgctacttccagtgtggatttgcaataccctataaaatgtatcttgtacgtacaaaaatctcctgagacagccctctataaggcgtacttaaacaaaagctttcactatgaatggactttacaattctgccgcttgttaccacagtgtcataagctggaacgagcataccaatgatacaaattgttcaatcaatgcccaaacttgaataaggttcaattccacctgagcaatcatcatgaacacgccaaacagtctcgcccagaaggtttgccaccgacaagacagttaattgagggaaatagttctgttctgccactggaattgcattagttatgataacttcttggaacaaaccacttgacaa

SEQ ID NO: 5812 - DNA, 537 bp, Glycine max
  Clone ID: jC-gmle01810004b06d1
gctgtgctaattgttttttctccttgaatttgataaaataattattgattcttacagtgtacaagtcagagcgtattttatagtacaaacataattctgtgacttgcgtgtatgattatgcaacatataattcggcttttccatcaatgaatagactcatgaactcttcaccatccacagtttctttttctatgagaagttgagcaagcttgtgaaggatatcaatgtgagttgagataatatgtgttgccctagaatatgctctctctaccagttccctcacttccgcatccactacatccgcagttgccatggagtaatccttttgcgatgacatctgttgacccaagaatggatttccaccaggtccaccaatggcaacttgtccaatttttttgctgaatccaaatctctcaaccatctgccttgccactcgtgaaacttgcatgaagtcgtttgatgctccggtggtgacattttcctggccaaaaataacctcttcggcaacccttccacccagggcaacagccatctgat

SEQ ID NO: 5813 - DNA, 518 bp, Glycine max
  Clone ID: jC-gmle01810004b11d1
gatagatgaattatatagtcagttatattaatagaaagcagagcttaaaagggacagtaaaacagaaagttgcaatatattcaccaaagacaacagccttgtcctctcaaccaacaaccatgaattcaggtcctagcgaagacggacacacctcatgaaaataaataaaaaattaaagaaaataagtatctttagttcagcagttaagctaaccaacaaaaacaaaccaaagtataatctcacaccaaaatatgtataacattgatccagaaaatgtcttaatattcccatttcttcaactccatgccatcaggagcacttccctctaccttctttgatcccacttctttccagtttgtagacagcactgtcccattagactcaacaaaagactttttcattgccctccttgtatcctcatctgcatcttgatatatttcacggaaaaatttgttcaacgcagcatcgccatcaagcttttcgtctttctcctctttcttgacttgagcttcaatctt

SEQ ID NO: 5814 - DNA, 512 bp, Glycine max
  Clone ID: jC-gmle01810004b12d1
aattgtagatgtgcgcgaatgcatgctgaatgagaatttctacctttctatacattccttgccatgtcctctcgtgacaaccgtctcggttgtgtcccagttttcgcgccgtcctcagatactgcccgcttggcgatacagcaacacggccttttcatccccacccaccgcaaactgcttgctgggcccaagcgagcctatctgcacatctgcaggctgccagtcgaatgcccaggcgggcgcggcgagggtggtcgtgtacacggcggaccgctgggcgatgtcccatagtttgacattcttgtccgcacccgtagacccgagcaatcgtccgtctgcagagaggtccaatacccaactctggtggccctgcataattgccacggcgccttcgcctggtcgggagcccgagccggatcggatgtcgtgcaggacgatacgggtatcgtctgacccagagtatagccactgagagtcctcggaccaagcgatagaccgcgccggcatggcat

SEQ ID NO: 5815 - DNA, 520 bp, Glycine max
  Clone ID: jC-gmle01810004c02d1
ctatatagagaaaatttgatttacccgttagaacttagaaccattagcaattacatttacaaaaggaaatgaaggtgcatatcatgagacttaaaaacccttacaagcctctccctatcatagcatcacttactaaagagcgtatgttgctcttagatactctatgatttctgcactttcaaacatttctatcccagtgtttggatcttccaaaaaaggtgcctggaaagttccagttttctgataaagtatatgtctctttgggctacccctagcacaactgacaagcaagtgtggcagctccaattccacaagtacttcacgtacaagtttgcagaaaggagacccctcatatgcccataatttaagaggctttggagggaacttcgctggagtataagtagtcccctttgaaatacgactaagcataccaagaccagccgttagtgtcgttaaaaatccaagtgataaagataaaggaacgtttccatcgcctacataacagacaaaacactaaaat

SEQ ID NO: 5816 - DNA, 502 bp, Glycine max
  unsure at all n locations
  Clone ID: jC-gmle01810004c03d1
attaataaaaaatatgcatttaaatgtgtatataatgcaagacaaagagcaatgaaggtgtcccacacttggattacgtttgtctctgaacaaatattcaaacttataagatacatgaaccatgtaggggcttatccaaattaaaaaacatgaaccctgtatgtatcaaaaggaaatagaaaatacttgtgtttaacagtttatttgaaactcgtagttgcgaagctcaacctaaattccgcaggcggcatttattatgaatgagagaatgagataatgctaattattgaaacgttttccttctacgcagcggaggtaaagttgaagttagcacacgtagttcggcttccatagagcaaagagctgaatcccaatcttgaagtagccaaatcgaactgcacaagattatcctccagctgatatcctccaatcactatcgaagtcctcggattctcacctncattcacaaacccaaggcatagcaccttatcatcgctcacac

SEQ ID NO: 5817 - DNA, 405 bp, Glycine max
  Clone ID: jC-gmle01810004c06d1
ggctgttattgaactcaataaccctcgtgtcagaatcaacgcatccctcatcataactattacttacaattcaaagtgctcttaagttcatgaaggaagataattcttatgactagttgtagtgaacacagtcaacggaaatagtcttgaatataaaacaaacaagtatatagcataggcaaatctacaagagagatctttgataaacaaacaagcatagcataaatccacatggcagatctttgattcagattttttgagattaacaaaatcattcaaatgcccattggttttcccgacgaacttcctcttcctcctcaggggtgaagtcattcttaatgttaaaggtcttgcgaatttcctctggagtcttccccttgatcatgtcggctacagtttgacatg

SEQ ID NO: 5818 - DNA, 433 bp, Glycine max
  Clone ID: jC-gmle01810004c12d1
ggacatgttctggtttaacattaaaatactttaataccgcacacagcttggggatgatgctacaggggaccccgcccctttgtctgggtttgtctaccacgctcaaaacgcctttttttggggccaacaagcttccaaaactggatttgccgttccattttttccaaatccgactttacaaggataccttaacacgacccttaggaccacctgcctgcagggggggcaaaaggtaggtgatgtcctcccaaggatgcctgtaaagaccaatcctcagccttttttgggcggggaagggagcaatcaaaccaatggggcgtccgaggacaaaaagtccgttgaggacacccattttcaggtagttttcggccttttcgggagtgaaagcgccaccgttgcgaacgagggtaacgaagcaaacagggatacagcc

SEQ ID NO: 5819 - DNA, 447 bp, Glycine max
  Clone ID: jC-gmle01810004d05d1
aagtatgtatatgtagtaataatttatatttatgaaatttcaaatattagtatgagcatggtacggacgactctctagtatacataatatgacacactaaataccaaaattgatagaatagtcgggcatcaaagtgacatggaagcttcatccagagctgactttctcagtcaaagaaactttaggcaccttatcttgggaatttgctcgaatggcattcatcattttggacctccttagttcttgagctttcctccgtctggcttcgatcaccatgagttgagcagtgatatcagcggggctcaccccccctactatgcttgcctgaccaatggtttgaggcctaaccttggaaagtttttcgcgagctctaagagacaatgttgtcattgcatagtaatctaagtcttcaggaagtggtctatgttgttgagcaaccacctgttg

SEQ ID NO: 5820 - DNA, 520 bp, Glycine max
  Clone ID: jC-gmle01810004d09d1
ggtcgccctttgttttttttttttaattagatagtgcaccaatggctattccacatatattgatatatatagcacctaaacagcagtatcatataggcatatactaaccatgctagtcgctaagtttagttctattacatgcatttttaccgaaacctctcctccttttccgatcctttttttcgcgtgggtaatttggtgagagaattaagggtttcaactttcatatatatatactggcatgcttgcttaggttgttttaccatgaataagaggcaaatcaacttcatcacaccactccatgtacctagtttcaaaagaagaaccctttgcttggttgggcaaatagctaacccaaaactctccccctattctccacttcatcacactcccttccatctctttgcaaagcctccaccccacttcctctgcatattcatcccctgcaataaccaccgacccgcttttattaaacgctctatttgccctcgcatatcgccctctcagcccatgacccggg

SEQ ID NO: 5821 - DNA, 346 bp, Glycine max
  Clone ID: jC-gmle01810004d12d1
attctaaacattgctgtgttttttagccactaaaatcaaaaggttaattacaacttattccccacaggctatattgctgtaagtacattaacctggaatgaacgtcaacttcatttcttactattctgaaattggcgataaactctagatgccattattaaggttcctcccgactgatgactttaaaggaaaaccatgaccaatttgaacggaggggctttgtggattttcccacccaagtacaccttaacctgttgatgagacacttgctcattgtttgcgggagaacttaccctatgcgccaccccacatggggcttgtaatcgcttgctggctcgtcttttta

SEQ ID NO: 5822 - DNA, 116 bp, Glycine max
  Clone ID: jC-gmle01810004e02d1
caggatgacatagattggaaattaatagacaaaactgggaatgaatcacgtcacatgggccgtacaggtgaatacaaactcgatgaaccccatgaacagatcctaacgaatacact

SEQ ID NO: 5823 - DNA, 473 bp, Glycine max
  Clone ID: jC-gmle01810004e04a1
ctcggaatagcggctcgagcggctcgaggttgcataacctacacgtgtcactttttgcgatgttatccattgctaccatagtaccaaaccctgcgtttgcaaccaaagaatgtgttttccctgccatcttcaacttcggtgactcaaactcagatactggtggcttggctgcttcccttatagcaccaacgccaccatatggagagacctattttcacagacctgcaggaagattctctgatggccgtctcgtcattgatttcatagcaaagagttatggtctcccttatctaagtgcgtatcttgattccctggggaccaacttctcacacggtgcaaactttgcaacatcagcatcaacaattagactcccaactagtattatacctcagggtggatgtagtcccttctaccttgatattcagtgcactcaattcagagatttcaagtctagaacacaattcattagacat

SEQ ID NO: 5824 - DNA, 525 bp, Glycine max
  unsure at all n locations
  Clone ID: jC-gmle01810004e04d1
gggaagaatcattattttctctattaaccatccatgtttacaatccaggaaaatataaaaattaaaaaaatgatcaagaaaaaatattaaaaaaaaataactatctaaaatttaaacaggcacccgtccctagttccgcttttctacattcacaatggcacgagtatattgaggtaaaagccccaaaagaatgtgctatatataaactctagtaaattgtaactgaccctaaggaatattgttcataccacgcgcaaaatgacaaaattcagggcactacaaaaccacaacaccaggaaacaaacaaccagtccataaaatctcttcgtggcaccttgagaagacctcagatagaaatcccagaagctggaaccaactgtcttgatgggacctagtgatgtggcgcaagcacagagacaaaattttgattttcacaccaccccaaccaattgcttttaggctgacggngctccttcattattcgtaccccactcttcgtcagcctcgttaccattaacgagtact

SEQ ID NO: 5825 - DNA, 516 bp, Glycine max
  Clone ID: jC-gmle01810004e05d1
acactaaaaacagtttctcttttatacatactctctgttgtcatttgtcaacactacaaaaaatgaaaaagtaaggtagaatctttaatcattcacaaatatggagcaggctgcagagggcattctgtattctaagataatacatatgaaagatgttacatatataggctattcaaacagtggctggtactggagttgaaggagcaacacggttttcagctggaatttcaacaaactcagacaatatagcacggaattcatctccgctcagagtctccttctccagaaggacttccacaatcttgtcaatggcctcacggttgttccttatatgctccagtgcaatttcatatgcttcatctgagatcctcttgatggcagcatcaatgtcttctgcaagcctctctgacattgagttccttgccatcattctcatgatgacatccccaccttgtgctgatggttccataagtgaccaaggaccaatatcagacattccaaatgtggtcaccatct

SEQ ID NO: 5826 - DNA, 55 bp, Glycine max
  Clone ID: jC-gmle01810004e06d1
atattctatatatttattctcttttacataacatagggcatttttttacctaata

SEQ ID NO: 5827 - DNA, 421 bp, Glycine max
  Clone ID: jC-gmle01810004e08d1
gggggaagtcaaatggtttttggtgttgtacatggcattttttacagggccccaccaaggaacaaaatgtccacatgattttaaaaggttaaaagggtcttgagttttggcaacggaaagaatttgtaaaataacctttaatccattcaggggaacttgggactgggcaaaatgttgttgggcccgggggcagccaaatgatctaggggggtttggtatgggccaacacctgggacaagagcttgaacaaaggaacccaagattggcaacattgccaaccttccatttttcacttccttgggcttaaaaaccttcaagggcttttaatccttaccaaagccttgggggttgaaaaaagggcctcctggataaactgggttaccagaacctccaagacccttttctagtcctaggaagaatt

SEQ ID NO: 5828 - DNA, 513 bp, Glycine max
  Clone ID: jC-gmle01810004e10d1
acaaataaagccttggtaatataaaattatagatgtaaaaaaagaaactcaaaacaactgaagtcacattggaaaggctaattgaaggcaataaattttacaacttttctccttgaattgcaataactcatttgcagcaccaccttattgaccaccaaaattaggctttcgagccaaaaagaagtacattggtgtgaaaatctctttctttccaccttcaagtagtccatctgctgccctttgtaagatttcttgaacttttagacttccccttggagctagtcgaacaaattctaaagcccttatcagacttcttgtgaaaaatcgtccaatagatgttagaggaaaggtactaagtgagaagtgacttgcatccaaatgaaagtaccaaggaactggagaattaactgcaagatctttctcccagattacctcaaaacctgcttgctttagagcttcaacacactttgtggtcaatctaatgtcaggaagtccatcaccaacctcaatttc

SEQ ID NO: 5829 - DNA, 517 bp, Glycine max
  Clone ID: jC-gmle01810004e11d1
gcgttaaaaacaggatccattaatagaaaaataaagacaaaaaataattgtacaacttcaactactagctcaaacactcaagtctccaaaaacaggagaagatctacacccctgaagcaaataatcttttctttttcttaaaaaaaaagggaaaaaaggaaacgaatgaaaacagagtgcacctaaaatgaaactaaagcccaaaatttatctgtagctgtggtgatgatagttgacagggcgccatttaaaagattcaaccatttcaatcttctcgccttggcctccgacgcggagcattagatgcttcctctttctctttggtttcttcattctctgcaccaccttggttattggaagcttctgtgcgttctggtttcttctccacctttgcaggtttcttgccaccaaatatgagcctgaagaaaattgacacgaagacaaccacaaccgctacaagaattccaatagtgagatttggctgtttctcagctttctcaatgagatcgtatatctt

SEQ ID NO: 5830 - DNA, 509 bp, Glycine max
  Clone ID: jC-gmle01810004e12d1
gatacaatattttatgccttgaaaagaaaaaattggttacgacattttcatacaggtataatttgtactaatggttacataaacaatctaagagggaaaaaaattctatagtgaagatgtgaagccaccgaatagacaactttgttccaaaaagtgacccggttaaatgcatgaaccatactgagacctcatgtgaaagaatggatcatgaatatttaacaagtgattataaagtgcggaaaatatataggctttgtgcataaccagatagaccactgaccaactggcctcataaatcacgaggaaaattattgatttgtccttcttcttgtgtctctttgccatttatcttgtatgctatctttatgcgcatgacaagagatttctttccgtgttggctattagtaactttcatattttgtgtgacggacccctttccactagcagggagagtattgccgctagctggatctaagttcaactgaagaaactttggaactgctgcctga

SEQ ID NO: 5831 - DNA, 462 bp, Glycine max
  Clone ID: jC-gmle01810004f06d1
aaaaatcatgatatacatgttgggcatataccctacatcatagtagtcctgaaaagagggaaatcacacacgacgaaacaagccgggtccaactactggtccttgaactttttgccttcgccttgtcgctgcacaccgtatccgggctcgtagaccaacttccctccgatctgggcggagtaaaaaaaaatagggatggcgatagcgctagctgccatgttactacttgggagcaagtgttgagggtgtttgaacgatcggaacacgttccagcccacaatacccgcaacgacggttttcaaacttgcatgtttaaaagtcatatagagcttcgtcccccctttgtccgccttgttccaagcgtccgagatgactttactcaaagaaccgctctgtttgatttgggttctgaacatctgggattcttccccgaaacctgggatgatagatggtaaggagaat

SEQ ID NO: 5832 - DNA, 571 bp, Glycine max
  unsure at all n locations
  Clone ID: jC-gmle01810004f08d1
caatccaaaatggcagagagatcaggtaattaagaaatatacttttgctagctaaaagatacattccgtccagtgagaaccagaaacaactgtttaggctatgccgtcaagaaattaatttgttctctcactaactcatttaaccattcattcaaaaaagtccaactatgtaaaaactgaccaccatcagaatatcatgatctagcctccaaagtgtctgattgcaaatgctctaattagccaatgattaacgcttcttcttgcttccctttgcgctggattttgatggtgaagctaccaagtatatgaacaggaccatgatggagatcaccgcgattagagatccatacttagccagcaacctcttagcccattcaaacttcttctcgggaggtctatcagaaagaacatccaaaggcaatatgggagttgaatatgcctcctgcaaagcagactttgtgggaacacggaactntatgacagctggttcaccagcgaatactccctatgattctgcctacagctcaaatgtgtgagaaatgatgccaccagcatcaagcctttcccatga

SEQ ID NO: 5833 - DNA, 463 bp, Glycine max
  Clone ID: jC-gmle01810004f09d1
ccagggtacaaagcgagcatcaattcgaacctatgaaatccgtgtctaatatttgaaggaaacacgcacccactctccattgacaaaaattattaagaatttggaacagaagaaaacatataatgggggaaaaaatactaacatatactctctattggtaataactagttgcctgctcatttagagtcagtgaaatctgcatcaatgacatcaccgtcgggtcccttgcctgaggattctgaggggccagagtcggcaccgggtggtggtgttggccctcctgcgcctgcagctcctggttggttgtaaagggactgaccaagctgcatgacttcctgatttagtgcagccatggcatccttgatagcttgggttgaacccccagaaatggcgtctttaagctctcctagttttgcttcaaccttctctttcacagggccaggaaccttgtctccaagctctt

SEQ ID NO: 5834 - DNA, 543 bp, Glycine max
  Clone ID: jC-gmle01810004f10d1
gcaacatataaacccaaattgaattgtcgtaattttcaaacaaaacatcaatcaatatttcattcaaatctcaattcaaaattggatttagaattcttaatttctatattttttttttcttaaaggagtagttctagcggttgactcgcttttttcaaattgtttttcattattaagaaaaggtgacatagattaaatacgagcttgttttatagcaattgttattaatcgttgttgttttaaggtcaatctatttacgcgtctggataatatttttccttgttcactaataaatcgactaattaaacccatgtttttataatcaattcggtcccccgattggatcgggggcaaacgcctaccaaaagatcgcttggattttatatagagtcgcttagatttttccatggtttatttatccctattccaaaaatcacatttattcaagaaatactataaagggtttgttcttttattctgactttcttatatatgttggtattttttaaattatgctggttatactgattttggatattttca

SEQ ID NO: 5835 - DNA, 520 bp, Glycine max
  Clone ID: jC-gmle01810004f12d1
ccttaataacatatacacagtgtattaaacaattaatttacacactatgatgagaagttcgcaagaatcagaacagaacccagtatcatgaacattggcatgattcatgatcactaacaaacgcacgtagcctgaaaactataagaattctgcacatacacgacacaaattgcaaacacaaaaaaaataaaaaagaagaagaaagaaaccgtgatgaacctcgcataattaatatgctcataatttaattcaattcaaatttcgtctaagacacagagaaccttctccttcggggcttggtcaaatccacgttcccatcttccaaatgggtcgtatccttcgacccgtttctaaacgggttcaacttccccagcgttttcgacacggaagagaagaacgtggccttcttagggttagggttcgcagcagacgacgtcgttccatgcccctgagggttcgcgccattattagtgttcttattctgctgcaaatccgaaatgtacatcttcatcttcattag

SEQ ID NO: 5836 - DNA, 533 bp, Glycine max
  Clone ID: jC-gmle01810004g03d1
cctataagcactttcattagcagcaataataattctcttcacttgatttactcactgttcagtactgcaaaattctacattgaaatgatgtttggtccccagctaggactctattgtgattgcattgcatgtacgtaacgttacataggaatatatatttttcttcaagggaaaattctacgcgtaagggtagtaatgatatctgtgtacaagtcaactttggccttagtcaccctaatgagctgtggaattagatgtatcagttcccatggacttgtaatacgcgttttcggcatttgccaaccgactctggaacatggtccactcctttctacaccgctccctcaccccctgccaccgtgatttccctgtttgagattcaccctgattccctagtgagggaagaccttggtgaacaatccactgagaatcaacacttcaatcttttcatgggcaggctcaacacatcttctaagagccaaatcaagaccccacccgtggaccaagtcattctgaatcatatgccacacaca

SEQ ID NO: 5837 - DNA, 520 bp, Glycine max
  Clone ID: jC-gmle01810004g05d1
cagagaattcatcttggtattattaaaaatatagataccgtagtaattacatccatttttaaatttcaaatttctcccacaatatcgcgttattgaggggagagtcagagccatgaactttggactcagatctactcaaaagatgcccgatgcagacgaaatgctactctaagaataccaacacttgccttcgagaaaataatgtaaagcttccatattgaaataatgtatctgtcagttacaacagaacttcagaaggggaaccaaatcttgttcatccagcaccctactgccatgactgcgtagggaaccaacccataccctgaaacaaacttccttatgcccactagaacttctagtttaagcaaatgcaccagcacatgcagtggctggagcagcttccagctgtttctttgcagtactgtatttttttgttataaacctaaagaagtccctccatagcaactcaaacatcaaccaatttgttccagttctggacgagccattaccaccatcattc

SEQ ID NO: 5838 - DNA, 550 bp, Glycine max
  Clone ID: jC-gmle01810004g06d1
caaacataagttgcacacaatgtgcaaaaaaataatggaccaagcaatctgaagtctgaacaaagttcagagtcaacatcaacatctagatataaaagtagtggcatgaaattaaaggcactctgttttatattcagcatagactatattgcggcttagaaagagatgagatcatctttcgatgacggctgcttctttgtctcgtgtcccccatctgatgcttccccacctttcttcccaaaaatcatctcatcgagatcatccatcatgtcatcattgctccctccctcgacaccagtccttgatccagctggctttcgaatcaaagcatcttctttactatgatagggtgactcgtctggttcaacagcaacaggtatcatagctggttcaggatgaagtggagtagttgcaggctgcttcaactcttcgtatttggtgaggaccttctgaatctcatcgttaacattcaaggcctcaaaaagcactgcttcattatccccagccgtttcaacaattcgctggacagtagtctgtgaccgacgacact

SEQ ID NO: 5839 - DNA, 373 bp, Glycine max
  Clone ID: jC-gmle01810004g07d1
cttatcactacaaaattttcaagggaacataaaacttttttaacaccaaattaatcccttgataaacatttaaagctcaaaaacttttggaaaaacccttgggaaaagccctatgaaaggggatggtttccattaaaaaaccccccgaaagatcttaatccaaaatgaactttgttgaccccttccctaaaggagacccatcctacaagactctaggcgacggcactcatcgaagaccctaaaaaagtccacgtccattgccctctaaggtcttcccaaaacccacatgcccgcgggaaacgatttcccctacaaaacccctaagagcgacaagggggacttaaaatgcacaattttttggggggatgtataa

SEQ ID NO: 5840 - DNA, 447 bp, Glycine max
  Clone ID: jC-gmle01810004g10d1
aagggatgtagaacatatatattctaaccaaccaagtgacaacattcacaatagtgaaataacttccaaatgacattcaaaggggtgatgcgttaattcactataatacaaaggaagatcgacaaagagaatattggaggactgaaggagaagaaaactaacccctcagtcctccatttgtatttggcaatattgtataagggacaactatgccagcagaagacagaagcattcagctatccctaaagggtaaagcggagataatatccagtattcctcatagctcttggggtggatcgataattggattggtccttcacattgaagcgaacactgataacacttcttccaagtcaactttggctatgcaccaaacatttactaattgtactcgcgctcatcaggtcatgctttagcaccaaaaaatgattgctggaacttggcttt

SEQ ID NO: 5841 - DNA, 492 bp, Glycine max
  Clone ID: jC-gmle01810004g12d1
aatattaaacaataattttggcatcataaattcttccggaataattatacaaaagtgaccagggaaaacccgatctgccagttgcccactgaataaaaacacacatcatattactatgtgttgtcatacatgcattgtaatgagtggatattccaaagcaattggtccctttatccctccttaatccttatgccgtaaatggcaccatcccttgtaaattgtaattgcttcttcagaaatagaattatacaaaggtagttgcaatatctatttgccaaactataaatgtaaagacccttcttcccaatcctagtagtgtcccaattgtatttacaaaggtgggacaagatatgtatatacaagtacaaccatgtaacataatgtaacaataatcatactttggtctttactagtgcacattacagggagttattatgcactgaaacccctttgcagagaactccagggattggaaggaatactgacacaagc

SEQ ID NO: 5842 - DNA, 455 bp, Glycine max
  Clone ID: jC-gmle01810004h02a1
ctacagaccggatgttcttgattcggcgttgttgaggcctggccggttcgacaggcaagttactgtggatagacctgatgttgccggcagagttaaaattcttcaggtgcattctagaggaaaagcacttgcaaaggatgttgactttgaaaaaattgcaaggagaacccctggattcactggggctgatctgcagaatctgatgaatgaagcggctattcttgcagccaggcgtgacctcaaggaaataagtaaagatgagatatctgatgcgcttgaaaggatcatagctggacctgagaagaaaaatgctgttgtctcagatgagaagaagaaattagtagcctatcatgaggctggccatgctctagtgggtgctttaatgccagaatatgaccctgtagccaagatatcaattatttcctcgtggcccagctggtggtctcacatttttt

SEQ ID NO: 5843 - DNA, 511 bp, Glycine max
  unsure at all n locations
  Clone ID: jC-gmle01810004h02d1
gaaagtaaaaagagtgtaatgtaataatttaatatggtacacacacctacacgacaagtttcgtgagctgcagaattagaaaataagcaatacagacaatgaacaaggaaactaagaaataatatatgcaaaactagagattttctttgtgtggttgcatggatatatcaagcatcaagttgaagcctccccattcaagcgtattctcttaggacctttttcttcaccttggttgcaggctgttccgatcctgttttcattggcctctaccgaacatcttttgtaaggtttaaaccctgttggacgagtctttagctttcctggtccaagacctatgattagcagtccctcctcctcattgttatctttgacaaatagcagatttttctgcaccccatcacaattagaactgcatttcttgctttcaaggtcttcatctttgtagtctgtgttttggtcgttatccttgatgctgnctatctgattatcctcatttatcaaatcatgagta

SEQ ID NO: 5844 - DNA, 550 bp, Glycine max
  Clone ID: jC-gmle01810004h03d1
cactaaacacaaccacgattgatattttgacattgacagtagatcacaaagcatcaacaaaaatgaacgcaaggcatgctcgacatgttagcagaagattcagagaagttggtaaaacttaaaaatccgtaggtcacacaaccactaatcctgtaactcaccaaatatgtcatagttcctaatgtctccctccaaagtaaataacattttgaattatatactcaaaacctactctactaagaagaacgctgtaatccagttcttccatacttttaaaagagctccattaattgctgcgagacatcttgaagtatggatggtgttgtctggaactcttgccagatgttctgataagctgcgagatccatgttcagaaacttggcagcaagatatgcagctccagcagcaatatgatggggtttaaattgaagccacagagaactccgaagcctgcaaaacaattttcagtatcagtagaccttacaagacagccatcactacagccagcattgttcaacacaaatagaggttcataaatagtcaaactaac

SEQ ID NO: 5845 - DNA, 325 bp, Glycine max
  Clone ID: jC-gmle01810004h04d1
ggctggtaatgttttacaatttacttgtaaatatacaagggacaaaaaaggaaaagggaaaaagggaaaaaaaaagacaaaacagaagaacaaaaaggcccaaaacccacaaaggccatgataaaagatcgagagagaaaaaggaaagcgaaaaaaaaagagatactaaggatggggggatagcaagggtttaaaataataaaaaaaatccggcaaagccgaaataatccctgggccaaactcaaaattagactccgggcaaaaaaataatgccccaaagacccaattcagataggggcccatatgattttgcgggaagggcgaa

SEQ ID NO: 5846 - DNA, 510 bp, Glycine max
  Clone ID: jC-gmle01810004h07d1
aggacagattgacccctcatgcctcatcagggcagccctcaacttcacaattcgagaacttatgtaaaatcgaatgccctccaatagtgtaataattggcttatgtctgtagtccattattacattattgaatgcctcacacatgttatttacttgcaaatcacactttgtgtttaccttaaaagcagaccttgtccaacaagcaggttataacttttgcagatcattccaagcttcttcatcataatttttaatctgcaacatggctttttgccagtcaggggtagttgttgctcgagctgccatccacatcaactctttcatgtgtgctcccgggtacttattcttccaatagccatacaaatgtttgacacacagctgatgttctacgttttcaccatgctctttgattacctcaaccaaaccctgcaaaaaatagcggaccaattgaatgaaagccatagttcatgttagttccaataagtatttaccttctgctggttagaaatg

SEQ ID NO: 5847 - DNA, 501 bp, Glycine max
  Clone ID: jC-gmle01810004h09d1
gcctctaaaattagtttataatgttaaaataattcttaagcatttgccacaagaaaatgagaaatatatagcatacatctttgaagaaataaagtgtaacttagggactagcaaagaatgtacatgtcttatccaaaagtgtacatgcatatgatataatgcatgtctcatgatcatccctttttcttttatgtagaggacactgatacttttgttcagggacaatggtagatttagtaaagaaactaaaattgccaatggccataaagtttaatcttccccttcctctctattcctttggacagcaccaaaatgctttactagtatgtctaccacaataggcaccaagttcttgcaaggcacacccttcttatacacctcagctagatgtgaatcacttccaattctccctcccaggaaaatatccacaccttcagtggccttaccattctcatccctagccatgcaccccatgaaaccaatgtcagcaacttgcacctg

SEQ ID NO: 5848 - DNA, 502 bp, Glycine max
  Clone ID: jC-gmle01810004h11d1
agaagaaagtgtaaggtttaagaattatctccaaggacaaatagtagaaagggaggttatgtttttcttacaaaagcacaagagtataatgcatcttttacgataattttcttacaaccttgaataacctctattggcttcgtattgctccatgaattcatcattgaactttttgaaactatccataatagcgggcatgtcttcctcgtctggtaaaatagtagtcctcaaatggaagaccccttctctctgtccaaatcctgaaccaggaacagtggatatgccagtggcttccaaaagtttgaggcagtagaaaacatctggaacctttgcagcctgtttagcagcctctaaagctcttggcggcaaacgtatttgagggaatgaatacatggcaccttcagtaaaattacaaaccacatttctgcaactgttgaatccatcagtcattagccttgctcttcttcttagagattcaagtattccggtgctctccctaaca

SEQ ID NO: 5849 - DNA, 412 bp, Glycine max
  Clone ID: jC-gmle01810005a02d1
accatatgtaaatatttctagcatacaattgggtaacattggcatcatctttctttgaacaaattctcttgtcagcttcatttcacatgatctgataaaattgcaacaaaaatactgatggacataactgggcaaaaatgaatgaatgcgctttgggcaggaaccataaccgtatgtatgtcattgatgggaggacattgcaccagttaattacaaattgccaacgcaagatgtgttccaatcctttgagacaatagctcctgtatctccaattcaaatttttaactcttttgatcagggcggaatgggcgtataaatgcataattgatctgccaaacttttacagaggctgtcacagtggcctctgcagcattgtgtgagcaagatcaacctatcacctccatatattgtc

SEQ ID NO: 5850 - DNA, 467 bp, Glycine max
  Clone ID: jC-gmle01810005a03d1
ccagcaaacatcttatattttttattaaatcgtagtcaattaacaaccaaacataaaccattttttatttttcagatccataagagaaaaaatagatacacaacccaaggagagaatgcaacttgaaaagcagcaaatggctcgtataacttcatattcaaggctcgaagaccatgctctctgcttctcgcttcacggattcaaagagcacagatgataaataacgctctccaaagcttgggaagaccgcaataatgagttttccagcattttctggcctctttgctatcttaattgcagcagctgcagctgcaccagatgatattcccaccagcaaaccttctttcaaagcaagaagtttagcagtttcaatggcttcttcacttgaaatttgaacaacttcatcaagtaaatcgacatccagaacaccagggatgaagccagcaccaattccttggatcttatga

SEQ ID NO: 5851 - DNA, 323 bp, Glycine max
  Clone ID: jC-gmle01810005a09d1
ggtcagcctttatcattcataaccttgcatctattattactatagaaagaaggagctaataatatatcaaacgaatcttaacgaagacagaattacaccactctaacaggttgcactcctaaaacgcgggtaatgaaccaagaaaagggggtagaccagttatgcccacggtaccagctaacctaaactacaaagaaacgggaccctagccattcaatgaggaccaccaaacactaaatcatactgaactgactgccgcttatcctccagggggcgccaaccacaggtagtcatacaccatcctacatgatgcggcccatctt

SEQ ID NO: 5852 - DNA, 479 bp, Glycine max
  Clone ID: jC-gmle01810005a11a1
tcgagtgaagagagaaatcgagcggttcgagggtaaggagggctttgagcgttatctcggttacctgcaagagtcgcatcgccactacgaactttccatcatccatgtgctcaagaagaacttttactcatatttgagtatggtgcgaccaactttcttgcaatatctccaaacacttcatccatttgagagcgtgtggggaaggacaagcatgtacttcaagacggagaggctgaggagagtattcacttttgcgagcatgtacatgggcatgagtcctttcgatgcaccaggaacttacagtttgctccaatacacagagttagctgaaggtatctggtatcccatcggtggcttccacaaggtggtggaagcactcgtaaacattggatcgccattgggcgtggagtaccactacgacagaccgataaaagagattcaattatcagccgacggcaaaagagcgaccggtgtcacat

SEQ ID NO: 5853 - DNA, 466 bp, Glycine max
  Clone ID: jC-gmle01810005a12a1
ttcggctcgagcttgcatggcctcgtacaaggtgaagctcataaccccagaaggagaagtggagtttgaatgcccagatgatgttttcattgttgacaaggctgaggaagaaggcattgaacttccctactcgtgcagggctggttcttgcgtttcatgtgttgggaaaattgtgaaaggtgacgtggaccagtcagatggtagcttccttgatgatgaacaaatagaaagtggatgggttctcacctgtgttgctctacctaggtcagacgttgtcattgagacacacaaggatggagagatcgaatgatcgatatatatcataatgtaatcttgtccattgctcttctaatgccatctatctatgtcgtgttttgattttgttagagtgatttggcattggctagttagctagctgaaatcatcgcgagtttattaattacttttgtcatgtttgtggaaacaa

SEQ ID NO: 5854 - DNA, 399 bp, Glycine max
  Clone ID: jC-gmle01810005b03d1
aggcaaaaatttgggtttaaaaagaacttaaaaaatgggctcaatccataatacatttgttctaattttattaggccatctagattgggttatttaattccatttctacttaggggatgttagacccccccttataaaattaaaaataatttagtaaattttggactacttcctaatttggggaaagctaaaattgaatgaagagagattctaaccctttttttttacatttgcttccaatacattgggcttatactcattgggaaaagtagcccagctgaatcaaatttggaatcaaggtttaatcattcggctttcttttctttttttttttttaccgctccattagtaaaaaatggggccggacagtatttttgcaaaaggcccaaagggtgccct

SEQ ID NO: 5855 - DNA, 522 bp, Glycine max
  Clone ID: jC-gmle01810005b05d1
gaaacaagaaaaccaaagtataaagttgtataacaaaagtctaacaaaaaataatatctgtccagtaactaattatttgatgggggatccaagatggatacccctctaatgtctcaaacctgataaatcaaactgaacttcacttacaatttgatcagaaacatgtcccatgaaaaagatggtgacaagaacaaacagctttgccaagcattacagtggcaaaaaaaaattcaaaaattaataaactatcattaagcatactaaatatggggcatctctccagcaatgcactattaaactactggaaccaatcttcctgagtatatcccgcaatctgatgttacacctcaatcaaattccaagaaaggaacctagccttgaaaaataaagacaaacaaaaatcccaaaccttacacaaaaacacttgtgactgatttagcttctgtatgatttcacagtacctcgtcttttttaaccagtttcccttgatctactgttaccataacatatccaattaacata

SEQ ID NO: 5856 - DNA, 513 bp, Glycine max
  unsure at all n locations
  Clone ID: jC-gmle01810005b07d1
aaacaagagttatatattattactttattcatttatttgacattttataacttgggaattgtatatgaaaccagacactacagataaagcatttgcttagtaatggctattgtacatatattgatatatagcacttaaactgcagggccatatatatgtatatatactaaccagctagtggctaagtttagtactagatgcatttttacacaaacttgtgcgtcctcttttggtggttataattaggtgagaagggtttaaagtttgatatgattgcgtggttgcttaggttgtttttccatgaataagaggcaagtcaacttcatcacaccactcgatgtacctagtttcaaaataagaaccctttgcttggttgggcaaatagctaacccaaaactctcccnctattcttcacttcagcacactcccttccatctctttggtaagccttcaccctactttctccccatattcatccccaagcataaccaccgatccgcttttattaaacgc

SEQ ID NO: 5857 - DNA, 501 bp, Glycine max
  Clone ID: jC-gmle01810005b08d1
agttattccgatattcggacgcatcaacttgttatgaaatcacattgatagcctctactcgtgtcctagctcgtctaagagctagatttgcctcaattgtttgtctcttgccttccgccttattcaaattagcttctgctatttcaagagtttgctgtgcttcttgtggatcaatgtcactacccttttccgcatcatttactaaaacagtgatctcattattggttattctagcaaaaccgcccatcagagccatcgttaaccattggtctttaagaagacgtattctcaaaatacctatatctacggctgtggcaataggcgcatgatttggtaatactccaatttgtccgctattagtagataaaatgatttccttcacttccgaatcccaaacaattcgattgggggtcagtacacaaagatttaaagtcatttcttcaaattgctctccatttctaagttcgtagctttcgcagtagcttcatcgatattacctac

SEQ ID NO: 5858 - DNA, 555 bp, Glycine max
  Clone ID: jC-gmle01810005b09d1
atcagtaagcagcagcttgttacacattttgaagtatgctgctatcattcatacatactgcacaggaatcaatgtcaatgtatatagtgaaaagaaaaactacaaaattggaggttcactcttcttttgtggtgcccccgtgataaggagcaccgaacattacctaggtgcatgcatgcatcacaaaggtttccaagaacttcaagtaatgagaataaatatctcagtagcataaaaaccatagaggtcacatctcgtatcttcttctcagtaacttgatccataaatagtctgatccttctcaaatttatcagggtattgtattgccaaattgtagtactaatactgaacatcataaagtatatttactgctgccaaccatactgttgttgattgcggtttccacccatcatgttcgagccacgaccagctgctgagcccccatatggaccaccttgttggggataatttggagctccaacatagccgctggcaccactgccacgaggaccaccaccaggcatactattggacccataatgcgcccccctccct

SEQ ID NO: 5859 - DNA, 598 bp, Glycine max
  Clone ID: jC-gmle01810005b10d1
acacaagaacataagctttatcgataatgtaatagataattctgtccaccaaagcaccttgtactgatttgtacataagctaacttataaagcttcgaatattttaagcaaggcatccaaaggtgcacattactaaaggttgcggagccgtataaagacacaggaaaaatggtaaaaactgacatatcttactatgcacactagaatctatcctaagttacgttttcacaaagggttgggacttataggttaagttcttcctttccataaatgcgttgaagctcccgtgttgctgcttgaaatgattctttccagttgcgaaatgctttttgatgaattggtgcaccaaaaactgtttgaattgtatcaaacaacaaactttcgggggtactcctcaattcctgtactatttgataaatagtcttcccattctcaaaataaatatgattgtttggatgttttgttttgcagccagcatgtctctcaaactcgtaagcattcagaacctttgatagttgcatgattggcacccacaaagatagccagagccttttataatttcacgaagtttctctcgtgacactgagatatactttac

SEQ ID NO: 5860 - DNA, 492 bp, Glycine max
  Clone ID: jC-gmle01810005c02d1
aaaggaaatatcatttattcaaacctaaagaaacacaataacacatcatcacaaactcatgtaaccctgccaataaaataaaccctcatccctaaactccagcaccagcagcagcttgctcacttcaatacacaactcctagaatttctcatgtcaccacgtggtaagcacgctgatgtggagccaagtgttgggctcacacgtaggtataccctccataatacaaccaaagacttaaccatcatataataataatatattaataataaaggaaactaaagaaataaataaaaaaaaaagcttttcaacatgacatgcaaaatggtagacctaatgatccccacaactaggaccatttttaaacttgtttttctcactcacactggccataagtctaagcttcagttttctcaacaggaacctctactggggcttccactgtctcagctgggttgttctcttcctctgtgggtgctgctggtgctgattctg

SEQ ID NO: 5861 - DNA, 356 bp, Glycine max
  Clone ID: jC-gmle01810005c03d1
aagcccaaaagacggggataacttgatttttttttattacatacctgcatagatagcctgcttttaaataagtcggcgggaacaaagatagagagattcaacgatctttaaatttcacatttgcccgaaatttttaacaaaaaagaggggtttgggatatgagttaagttttgatcacatttaactacactatcccaaaccggtacttttaaaactttgaacttcacttgtactctaggatcatgttgttttcaggagctaatccaacacaagccctcaggatgttttccagcataacttggtggtttgacaacgcattcaccactggggtacccgggggaaccaaaggggccttg

SEQ ID NO: 5862 - DNA, 524 bp, Glycine max
  unsure at all n locations
  Clone ID: jC-gmle01810005c05d1
cttgggaaataacaggtataattgaattttttaccataaaaaaattaaagtttttcccttctcttcgctttttacttttgatagatattttgattgatcagtaatagtaatgacactaattttgaattttttatataaatctgaatttacttaatttacttaagaattcttgatttttttacaatcgaattaattcttataaataaaaaaaatggaatccatgcaatttaaatagatataaaggagactttttttatagattcaccataaaaaatggtatacttaaaaaaaacataattttggggattctttttttatctaaggtatatatcagtgaattagtatcaatgccataccataatgcggngtctttatttatgttatgtatctatatctatctatatagatagatatagatattaatttgggcttctatttaccatataaatatgggaaatagaagacaaatttggattaacgaattttcattcgcggatacatatgtatccttactatactgaaac

SEQ ID NO: 5863 - DNA, 442 bp, Glycine max
  Clone ID: jC-gmle01810005c06d1
aaaaattgggcgttcgttcactgaacaagttctccattcataatattaggggtctagattacatccccaataatataaaaaagacactgctcattgcaataatcagcttcgggattgaaagtttttgttatgcgatacgattctgtaaactgcatagcattggcggggaagtaaagtaaagtagacgatgatggatccaatacaaagcttgtttaaaattttcttcaggtattggagggaggaagggtaacattgttgagtcgctctaggaccaaaataagagcctgagtacccaaattaccttccccatgagccctaagcgacacataaagttgttgcgccagagccaagccaggcaaagcaatccccattttctgacactccttcaagcaaatccccaaatccttaacaaaggggtttacaaaaaaccccggatccaaat

SEQ ID NO: 5864 - DNA, 529 bp, Glycine max
  Clone ID: jC-gmle01810005c07d1
ggagagagattctgtcctctggttttatttaaacataaaaaaagacaagactacaaaatgaatatctaaagctactactacattcacgattcatccagcatcaacctaacactgataaacttaaaatcacaggagaaaaaaaaaaacagtggcagaatcaaagcaatatctaaacaaacaacaataccagaatcttacttactgagaccttaacaaaggttaaggctgttgtggcgacgacacagtcttggccttcttcttcttttccgaaatggccttggcaaatgcctccacaatccgctgttgcgattctagaatcatctcagtgcgcttcatctccatctccatccgcatggtctcaatctccctcgccatctccatcttcatctgttccgttctcacaaacccatctcccaaaaccttaatcgcagccactaactcccccaccgggtccctctccctcttattcccgagaataagggttagggtttgattcaaatgggggctgaatttctgattcccaaacacc

SEQ ID NO: 5865 - DNA, 455 bp, Glycine max
  Clone ID: jC-gmle01810005c08d1
ctcgagccgctcgagccgttttttcctctttcttcctcgcctagctagctccagaaaattaggatctgcttcagatctagtgtttccctgtcccaaatcacgagtccattgagtttgattttgtggatgaaaagcatagatagggcttttgcaaaactctccaatgtttcttgaaattatatgaccatgcgtcgaattcgtatgctgcactccttctccgtcgtgttcctctactggttctacgttttctcatgaactccctcttaaatccgtgattaattagatctatctccttagttaatccttgtcttttccaataattaattagatctgcgtctcctttttggattagtttcttttttggttctgttatcaaatcaaataaaaaatctccttctcggaaatggcatcaccgatccaacaacaacaacgctcgactactacaagttctggat

SEQ ID NO: 5866 - DNA, 499 bp, Glycine max
  Clone ID: jC-gmle01810005c09d1
cgtaattgattggctagaagttcattaagtagaaaaggtacaagtaataatcatcattaaaaatagtgtccaagactatataaaccacaaacacaatttagacaaattaatgttggatccttgggttactgtagcatgtgtggcaagatgatcttagtaggagtaacctttgacgaacattccccgagtggcttcctcagattcaccctcggcagtgtactttccaagctgagcgagtgagttggacttggcacggaaaaggagtgcatcttgagcagccttcacgttctcagggagtccaccccatgtcttcaagcaggtgttttggagagctctggcgtaggagaaggacacgtgccatgggtttggagactggttcatagcattcaagttcaaggttgcttcaacctcagattgtccgccagacagaaacatgattccagggacagcaggtgggattctcctgtgaaggagcttgagggtgtaatcagcaacttgc

SEQ ID NO: 5867 - DNA, 511 bp, Glycine max
  Clone ID: jC-gmle01810005c11a1
tcgagttttagaaatgcatgcaaactgcagagaggatgttaaagtagctttagctggtgatattattgcacttgcaggtttgaaagatactattacaggtgaaacattgtgtgaccctgataatccaattgtgcttgagcggatggacttcccagatcctgttattaaggttgctattgaaccaaaaactaaagctgatgttgacaagatggcaactggtttaatcaagcttgcacaggaagacccttctttccacttctcccgtgatgaagagataaaccagacagtgattgaaggaatgggagaattacatcttgaaatcattgttgatcggcttaaaagagaatttaaggtggaagctaatgttggtgccccccaagtaaactacagggaaagcatttccaaaactgcagaagtgaagtatgtgcacaagaaacaatcaggtggacaaggtcagtttgcagatatcaccgtccggtttgaacccatggacccaggtagtggatatgag

SEQ ID NO: 5868 - DNA, 177 bp, Glycine max
  Clone ID: jC-gmle01810005c12a1
tctggctcgagggctcgagaatgggagggataataaagttacatgggtgtggggtgatcttatgtacttggtatgatattatgtctgatttgaacaagttgacgaccaaaaagtgtgggtctcttcttgatcttatgtacttttgtattaatcttttttttatgtaaattttttaat

SEQ ID NO: 5869 - DNA, 495 bp, Glycine max
  Clone ID: jC-gmle01810005d05d1
catcctcattcaatttattgagattgagaatatactacatgttacatccagtaaaatatcacatgagactcaattcatacaaacttatagacttgtagtagtaatagtagagggtatatcaagaaatcaaaactaaactacttcacttgcgatcgacaaaggtaaagcgcaatgaaaacactacctgccgacccaaatttgaatatcaaacatggaacaagaaagtaaacaaaaagagacagcaaagatacctaactaaagaaagcaaaaaactgacaagagattgtgaccctttctgaataccagacaaacactttattagcataaaatcctttaggcattaggtttatgcaatgcaagtatttgtttcagattgaggttactcctttaggcatgccttgcctgaaaatccttcatgaaagccaccaacttctcaaccccagccaagggcatggcattgtaaatagaagccctcatacctcccactgatctatg

SEQ ID NO: 5870 - DNA, 461 bp, Glycine max
  Clone ID: jC-gmle01810005d06d1
aaataacattttattacaaagtcctccatagcatacaataacaaagttacatggaaattcattaactaccactaacaataccgttatagccgggtcaaaatgctgaatttaaacaaaactaaagagatgaagcacatgtacatttatttttatttttatgaaacttagattgaaacaatacaacttaactatatgttgatgctttgccaagtgattctgcaatcttactggcaatacagtaagatgtagactgaatggttaccatggggttgacaccaactgcactaggcaaaacactcccatcacacacatacaagccttctgcttcccaagtctcaccattctcatcgagtgcaccttcttcttcagaggcacccattctacaacttgacatctgatgtgcagtggtaaacactgtccacacttcattccttgaccttggacccccaactattgtcaca

SEQ ID NO: 5871 - DNA, 495 bp, Glycine max
  Clone ID: jC-gmle01810005d07d1
caatattagttgggctacttttataatatttatgcaagaaaagttaatgacacaagttttacatatcaaattaataaaaaataagattcaaaagtgtgacccataaccgacaaatcaatgtttggaaatgaccataaaagacataaaactaaattgatttttttaaaagataaaaaataaccaaaatataaacacaaaagactaaaagtgcatttttgtcattataaaacaatactgtacatagtatataggatataattgccttcgaactcgagaaaaagttcaataggggaaaaatgtacatttgaaacactgtattggtggctatagtatttgtccacattgaaaaatccatgaccttgaaagtatggaaacatcttaacatgtgtggtctttttctttatttgaggctgaagttttatctacatcgtggtggaaagtaaaaaaaccgtgattagtaaataccacagttacttagagcgcatacgaaaaact

SEQ ID NO: 5872 - DNA, 352 bp, Glycine max
  Clone ID: jC-gmle01810005d08d1
gaataacaaaaacaataaaaaaggggggggaaaaccaaaaaccctaacaaaaattaaaaagggaaaacataaaaaaagcccaaaaaaagggaaacaaagagataaaacaaccaaaaaaaaacacaagaaaaccacacggaagaacaacaaaaaataaacccaaggggggaaaaaataaaaacccaaaaaaaaaagacaaaaaaaagggggggaaagatatgaaaatctcagaagggggagaacaaaaagaaaaacttatggaagaaaagggataacaggaaaaaaagaagagggggagcctaggaaaacaaaaaaaaacaataaataggaaaagagaaaaccccaggaaaaa

SEQ ID NO: 5873 - DNA, 555 bp, Glycine max
  Clone ID: jC-gmle01810005d09d1
atccaaaatgagaatagaatttggcaaaatgggaaaaatgaagttattgagtaaaaaaaacacaaagtaaacagtttctagcttggtaatcttaagccgcaaaatacaactttcctaaatgttgagggtatttgaaaaggtacctatctccagagagcaatggtgaaaggaatatacatgttgttgaagagggttaaaaaaaactagccacaaacaaccctactgtaccaactgcaccctaaatcgaaatttgcaactcgtgccaaccaatgggtccactggggaaattcgggttacccaaaaaccaccaaacaccgacaccgacagaacaacatctgtgtgacaaaattatctcaagcttgaagagattcctctttctccttaggagcgttaccctcttcttgctgttgttcctcttgctggttcttcttgagcattacttcgcagaaaaactgggtcaaaacggcctcgtagccgggcattttggcgtacccagggaaatagttgatatcaatgataagataacggttcccgtatcgagcgtctcttatgaca

SEQ ID NO: 5874 - DNA, 478 bp, Glycine max
  Clone ID: jC-gmle01810005d10d1
atagtgatgtaataggatacacatttcattggcaagtgattactgaatacgagtagcagcagttcaacaattgaaattacaccagcattttgtcaaaattgtaagtgtatgttctgatttctgaagtccatgaatggtatctacagtttttccacctgaactcattggcatggtgtactgtcatggaaacaaccaaatctattcagaaaggatttgtgtttcatcacagtggtaagtcacctcaacaaagtattgacactactctgcaacagtcaaggaatggcctaacaacctgattttgaatctgctgcctacttacaatcagtggttgcactccatatgaacttcttgtgcgaacaaaaaacatggaagtggtaacattccgcatgttgtcagatagtttgactaccattctgcatcttatgtttccattagttggtcttgttggatgagtcaccactacgtcaggtatttgaag

SEQ ID NO: 5875 - DNA, 434 bp, Glycine max
  unsure at all n locations
  Clone ID: jC-gmle01810005d11a1
taagctcggtattggttttagaacgtgcccgaattcgatgtcgttcgaggtggaggaggaggaggcgttcgagcacacgctcctggtggtgcgcgaggtgtcggtgtacaagatcccgccgcgaagcacctccggcggctacaagtgcggcgagtggctccagtccgacaagatctggtcggggcggatccgcgtcgtgtcccggcgcgaccgctgcgagattcgcctcgaggatccgagctccggtgagctcttcgccgcctgcttcgtctacgccggccagcgcgagaccgacgtcgagcccgtcctcgactcgtcgcgctacttcgtcctcaagatcgatgatggccaaagcaagcacgccttcattggcctanggttcaatgagcgcaacgaggccttcgattcaacgtcgcgctctacgatcacgagaa

SEQ ID NO: 5876 - DNA, 384 bp, Glycine max
  Clone ID: jC-gmle01810005d11d1
gggcccaaaaaaacccccgccccccttcccaaaaaaaaaatctctttggggggggggaccctttaagaggaaaaaaaaaaaccgggtttcccccccaaaaaaacccaaaaataccccggggaattccaccccccaacccaacaaaaccccggggccccgggggcccccccccctaaaaaaaccccttgggggaaagtccccccggggccttttcccaaaaaaaaccccccaaaaaaacggggaaaaaaaaaccccccccgggaaaaaggccccgaattttaaccgaggggggcccccccccgaaggggggggcccccccagggggggttgggggggaaaaatttcggggggcggaaaaaaacccttaaaaggccggggaaaagg

SEQ ID NO: 5877 - DNA, 507 bp, Glycine max
  Clone ID: jC-gmle01810005e03d1
gattaattagacgggtcttatttattttgataaaatactactaaacagacagacattaagatcgatattcatcattcggtattgaacaatgaacatatcccaaagacagttaaaagtagctgagaataaaagtagactgatatcatcacacagtacaagggctgttgtttaagattggtctctccaacctctgttataatttttaaggctggtgattggtgcttgtagcataacgctcctcttctttataataagagttgaaacctacgatgtccttgatttcttcaaaagatggcatgcttcccggaggaggaacagcgcctcctttaatagcagtgagtgcatcctgcattgctcgtatgcaaaccccaatcaaggaaattggataaatagcaagtttataaccaacgtcttcaagttcttgaggactaagtataggcgttttgcctcctccttcaagcatatttgcgagtttgggaagatggggagaaagttgacagagagctt

SEQ ID NO: 5878 - DNA, 508 bp, Glycine max
  Clone ID: jC-gmle01810005e05d1
acattaaatgcatctaaacttaaataggtatttgtacattgaataatcaatctgtgcatgacaatagaagtaccattttacaagctttcaccaacataaaaactcccccctaaagacatttaagccttacaacttagttaaacaagtttcccaatgtttctccaaggcttgcaatcatagagttgttccaacccttctcacttgggagtgaaagcagcaaaaatagtagcatgaccaggatctgcaaggtgagcaaagaggttgtcaataggaccagtgccagtgtaaatgtgctggaaccatgcccccatcacagccaacatggccaacctcccattcttgatctcctttgttctcaactccttgatcttctcaggagaaccacttccccagccaagtggatcaaaccaaagcccacctgggtacccaacatcagttcctgtgagcttgttgttgggaaagatagggtcagtgttgacacagcctggcttgatgatatcagcccacc

SEQ ID NO: 5879 - DNA, 491 bp, Glycine max
  Clone ID: jC-gmle01810005e06d1
agggggataatgagaataaattaatggaaaagtagactagtttacattcatggaaggaagcaatacaacaaaataatttttttaagaaaatagtaagatcgataattaatatgtaaatgataaaaaaaaaagtcaatttaaattggacttaaattttaagagattttttacgtatgaaacattttttaagggaataattataagagaattttgtcgaggaaactaaagcaagtgtttctgtgtttggaatattactttagggttgagccacccctgaaatttaattccatttttgtaaaaaacagaagaagaaaaatcttatgagctcagccaccacgcacgcaacacttaccataataaagaattttcttccaccatgggagattgattccactcctgaaggccgaaggcttacaggcaagaactttgagaggagtggctccatctttgtttcgcatctcaacaagtccaggatagcaatgaattattat

SEQ ID NO: 5880 - DNA, 538 bp, Glycine max
  Clone ID: jC-gmle01810005e07d1
gatgatgattcttgacaggtaaaatggaagaataccagtcataactcaaaaaggatgcttttaagtattaattgcaaagaccttctttctgaacacaagtttgccaaaagactcggaagataacatccataattccatattatagaccaaaatgatcttacttacaaaatatagccactcgagatttatttcaagttcaaactacaaccactacaagagggaaaagcaacacaacacatccattcctcacaaaaccaggcaggctggcacagatcacctcattcttgtgtagaaagcacacagcgaaggcatcccccttcatgcaaaagatcaaaagccttgttgatctccgaaagtgtcaaagtatgggtaatgtactcatcaaccttgatttccttcttcaagtacttgtctacaagccaaggcacctgtgacctgctcttgaagccaccaaaagctgttcctttccagactcgtccactcaccaactggaaaggacgggttgatatttcctgccctgatgctgcaacacctacaa

SEQ ID NO: 5881 - DNA, 536 bp, Glycine max
  Clone ID: jC-gmle01810005e09d1
gctgtgctaattgttttttctccttgaatttgataaaataattattgattcttacagtgtacaagtcagagcgtattttatagtacaaacataattctgtgacttgcgtgtatgattatgcaacatataattcggcttttccatcaatgaatagactcatgaactcttcaccatccacagtttctttttctatgagaagttgagcaagcttgtgaaggatatcaatgtgagttgagataatatgtgttgccctagaatatgctctctctaccagttccctcacttccgcatccactacatccgcagttgccatggagtaatccttttgcgatgacatctgttgacccaagaatggatttccaccaggtccaccaatggcaacttgtccaatttttttgctgaatccaaatctctcaaccatctgccttgccactcgtgaaacttgcatgaagtcgtttgatgctccggtggtgacattttcctggccaaaaataacctcttcggcaacccttccacccagggcaacagccatctga

SEQ ID NO: 5882 - DNA, 482 bp, Glycine max
  Clone ID: jC-gmle01810005e10d1
aaaatgacaactggtacaattatgtttgggaaaagttgcattatacatcaaagggttagtagaacccagtagtctcttgggcacatatattcaattacataatcagaagaatgtgctgcacaaatcaaacgaatgaataatacatacaagggcgaggaaagaatcatcaaagacctaagtggcaccacaagcacccacctaatgatgaccccacaggaaaatgattctattcggatgctgatcagccaacttgatagctttcgacattaaaacaaaactaggccaatgcacatccgaataaaagccacttgaaatgagattttgcgataagaatacccgatgggtcccttttaaagacactcttccatgccataaaccataacctcatgtagacaattgaaacctaccactaggcttctttcttctccatcccaaggcagcataatatacaaaagtcaatccagccaatgcaacaaatgcaa

SEQ ID NO: 5883 - DNA, 560 bp, Glycine max
  Clone ID: jC-gmle01810005e11d1
aatcacaatttatatatgctctttattgcttttggtttatatacaacacaggtagcacctcctaaatcatagcaccgctcttgtatactaaattgtagaaaaaaccatcacaacattacacacagacgctctcaatattctgtacagtacagcctccaggttaccttaacaggactctggactcattatcctgcattcctatgacaaccatcttcataagatacacacataagcctaaaggacagtaaactacatacacgtgcacgcatgcacacatgcaagtatctgcaacctacaagctgttagtaaaacctgtaatcctttcccctcttgtgccccatatttcaccatttggagttagtggtagctgagaggaaagcttattgtgtttttggaagatatttaaaaactatgttcctgataaaccattggtaacaccttaagcagataagacaacactctctgatctgtcagtgaggggttggcttcgatgactactggatttttccttcttcatgttagcatagtacaatgacagcatccttctttcattctcaaat

SEQ ID NO: 5884 - DNA, 382 bp, Glycine max
  Clone ID: jC-gmle01810005e12d1
gttctaatggttacataatcaatttaagagggaaaaaaatattatagtgaagatgtgaagacaccgaatagcaaacccgcccaaaaggggagcagaaaaaatgcgggaaccagacgggagggggaagaaaaaaaaagggggaggaagcgggggcgggggaaaaaaaagggcgggaaatacataggctatgtgcataaccagaaagaccactgaccaacaggaaaaaaaaagaggaggaaacacaaaagggggggccacagaaagagaaccccggggaggcagcggggatgctaaaaaaaaaaacatgacaggagaaacctctccgggagaaaaaaaacacagggaaaaacagaaaaaaggacccctttccaaaagaaaggag

SEQ ID NO: 5885 - DNA, 319 bp, Glycine max
  Clone ID: jC-gmle01810005f02d1
gcttacgatttgtggcttgtgagttttattcgtctgggaatgacgaatactgacacaggctagggccagggggaaccctaaacatgcccggctcaaaagaacacccggagcggaaagaaacaaagccgccggccagaagagagaggatcccaaaaaaaaggaaaagagaagggggggaacccccggccaaaaaaaaaaataggaaaaaatggagggggccgcccccccacgcaggggcgacacagcgcgcccgaaaaaaggcggcaaccaaaaaggaggggaaaccctaaggggcaggaatgggggccgacaaaaagag

SEQ ID NO: 5886 - DNA, 503 bp, Glycine max
  Clone ID: jC-gmle01810005f03d1
acaagttaattgaagaaattcaatttgtttaatcaaattccccaaccccctctctttttatttgttcactacgtattatatgcaataaaatattatatggcagaaatattctaagttggaaaaaatagaaactaagatataggatttttcaggaaggggttaaaaaagattattttattgatatttttagaatatttctatttcgacacaaacaagaaggaataggaatcggactctaggaaaagacaaaaaatcccccctagagtaccttttccatattttaattgattttgtttcaaattatctatctatatagatatctattttatgtttagtatcgaatccaattttattgtattttacaatcgaaatttctataatagaactctctattatagaaaaatgaaatctgaaaaaaacagtgtcataaccataatattcgaatttattggggggttgaaaaaacaaagtcaaatagtctttctgacaatatccatactcga

SEQ ID NO: 5887 - DNA, 419 bp, Glycine max
  Clone ID: jC-gmle01810005f06d1
gactataaagcaaagcaagttcctttttcaaaaagtttaataaacatgggtttggtgagctgaacttaatagaagtagaaataagtttgggttgtaagaaaattaataagggacacgaaccccttgggacctgagaatttccccaatgagctcccctttgccaaaaccgacggacctgcctttaatggtgccatctttgatgaaaaaaaagggggggacctggatgacttccatgtccttaaaaaactggatgcagcttttgttcttgtccccgtttattcgagcgaacaccaccgagtccatttgcctcgagagcttaaccactggaggataaaccttaacgcagggcccacaatgtttgagacccacattgagcacgatgagcttgggatccaacttgggggcctctatgagctttt

SEQ ID NO: 5888 - DNA, 451 bp, Glycine max
  Clone ID: jC-gmle01810005f07d1
agagaaaactaaccagtttatataaatccaaacatgcataatccactggaatatgaaaaataaatgtctagcaaagtttttggctgattgagcctagcatttaaatatttaattatccaaactctggtggctatcaaaaagatcgggactcatgaaacgtgaagtaacaaaaaacataagcaaaaatgtattaaattccgggatcatgatgctggttaaaaattgggttacctatgggtaaaaaggacctaccaaaagaaagatgacttttatgcaagctttgggatttcacatagaggccactaactattagggttgctaaggcaataaatatctgggattgaattgctctattatgaatgaggggcaattgcactttaacctcaaaaacttggctctcttcaaggaggcgctggaatactaatgtatccggttataagaataaccttca

SEQ ID NO: 5889 - DNA, 525 bp, Glycine max
  Clone ID: jC-gmle01810005f09d1
aaacaattctatttatgatagcattttatatctgcggtaagaaataaatggaagggtcatataccagtttccagaccagagagagttcaagatacaaagtccatgaattcaaatggaaaattgaatcgatacagaattgagaaaaggaaaaaagaaaaaaataaactcagaaaattatttctttccttcaagctaggaaatttatgtcatgagaatcaagtatccagtcgtgtgttcttagaagcacttaaacaaacaacaccagtaacctaagtttatatggaacttcaattatttaatctattcctttgctagatgataccaaagtttgaaaatctcaggtcaatgtaaatgggggaagatgccaatttaaatgtaacaaaatactggttgaaattttaaacatggggggggggaggactgaagagcacctccacataaaacttttctcagctaatcttgagtaatatctgaatcttgtccccatcatccccaacctttgaaagaaaaatattatagaaagaa

SEQ ID NO: 5890 - DNA, 535 bp, Glycine max
  Clone ID: jC-gmle01810005f10d1
aagattgaacaaattacattaaattaatctttcaatatactcccctaaagctttgaaacatttaaacacgaacccgcatatagcatgaggctttacttagaattcacacaatagtatatatagatgggaaaaataaacaaagaccagataacatagtagatatatgaagaagaaaaaaaaggagaaaagaaggggaaacaaaatattcacattctttgctcgcattgcttactcgtcagccatggccaactccaaggcatagtcatctctttccactggtcctcgggcaaaataacgtccaaattgaagccaatatacctcatcttcatcttgagtttccacttcaacatcagaggtcgggaagcccacacaaagaagtgcataacccttgtctctcaattcggcagatatcccaagtgcctctggttgcctaatttgtcccttctttatacgtacagcacagctagtacaacaaccatgcctgcaggcgaatggaagggtaatattctgggcctcagcagtatgtaatatatac

SEQ ID NO: 5891 - DNA, 478 bp, Glycine max
  Clone ID: jC-gmle01810005f12d1
gaggcctaccaggtattccattaaaaactttaggtacattgacaagtaaaacatactatgactatggtttaaacaaattaagtacatagtattagcaaattaaccgcattatacaggaagcgtctctggcaaggattcgggggctccgctgctaccattgagcacaatcacattaccatcagaatcaacatccactataacagagtcgccctccttgatctctctggcaagcatcttctcagccatgctgtcctccaaaagtcgcattatggctcttcttagaggtctagctccataactagggttataaccttcctccaccactctgtccctgaatctttctgtcacttgaagttcaatatctttcaccttcagtctatcaaacacctctttgagcattatgtcagcaatctccttcacctccagttttgtgagctgcctgaagacaatcatttcatccaatctattcaaaaattct

SEQ ID NO: 5892 - DNA, 529 bp, Glycine max
  Clone ID: jC-gmle01810005g01a1
ctcggaattcggctcgaggattttgtccatccaaaccttaaaaagattcagtgaagaacaacgttaatggcatctcttggtgtgcaagcagttcatcctcctccattaacatccacctccgacccacctcctctttttgatggcaccaccaggttgtacatcagttattcttgcccctatgcacaacgtgtatggatcgctcggaacttcaagggactaaaagacaagatcaatttggtccctataaaccttcaagacaggccagcttggtataaggagaaagtctaccctgaaaataaggtgccatccttggagcacaatggcacggtgttgggagaaagtcttgatttgatcaaatatgtagatgaaaactttgaagggacacctttgtttcccagagatcctgccaagaaagagttcggagagcaattgatatcccatgttgatacattcagcagagacctgttcgtttcattgaaggggatgctgtacagcaagccagtcccgctgtagatacttggagatgctc

SEQ ID NO: 5893 - DNA, 482 bp, Glycine max
  Clone ID: jC-gmle01810005g02d1
gcaaaaaaataccttattattgccaaaggtaaagctggtgtttgaacaaattagtccccacacaaagcaaagaagtcaacgattatatatactcagaaaagagacaacaaagacaagtataggtgaattaattgaactaatgtggctttgtacactcgtttaagggtcaagattttggaagtagtctaatatttttttcttatttttggtgaggtatcaaacgcttccaaaatcatcaaataacgaaggatatgtaaatgtatacatatatacccaaaagaaaacatcatcataggattaacaaaacattcttcataacataaccaataacaattaatatatggtttgtcaccgaataaactgaataatccacatagtaataaaacattgatgaaaaaaattcaacacctgttctcgattctcaatccacccgatgtggctcttctaccttcttcaaccaaagccgttcgtgccataacgat

SEQ ID NO: 5894 - DNA, 511 bp, Glycine max
  unsure at all n locations
  Clone ID: jC-gmle01810005g04d1
atacatgaacgttatacacatcttatgaacaataaagaaaccaaggaactcaaatgtcacgtgttctccacaaatcaaaattatcacaaataccttactataacgagaatacacattgacaaaaaaaacaattactgcagagctttacagaggtttgaacatacatttcttctcccatggttgtcgtaagtttcactatctggtttccctttttacgggtaacaaaccctaatgactagcagggtgttagaactttgtcgattttactgttaccaatcatcatcaaggccggcttggtggaaacataaaacagtacatataaaaatgaagaacgatacaagttcaatgagcatcgcgcctgtctcaatcatatgagcgtgcttgaggattataggaatggctatgctcccaacagctgatgctccagtcaaaaattttgcagcatctatccaaccaccaccatcacggctcattagaaattgagtggatccacctncaaagaataagcaag

SEQ ID NO: 5895 - DNA, 422 bp, Glycine max
  Clone ID: jC-gmle01810005g12d1
aaaacaattgcaagagtttccaatatcacaagtcaagacaattgcatgagtttccaataccacaacacaagggagggtaaaaccaagatccttaacaaaaatcaacaagggaaaattttaaaaaagcttattaaaaggggcacagtgagataaaaccccaatttattttacactgttcaaccacacggacgttcactaatcactaagcctgaggggggaaattataagttcccttaatatacagcacattataatgatcgggattgctcatgaaatctgcgagtgctgaattataagaagttcccttaattgccttatactgattccaccaaatcatgtagctgctttgccttaggaaaatctctgatgacacttcatatttcgtgagcaacccataaacatacttttcgaattcaagcaac

SEQ ID NO: 5896 - DNA, 480 bp, Glycine max
  Clone ID: jC-gmle01810005h02d1
atacgaattactttttttttttttttcctgggattggatgaaacttaagagcaggggattatcatcattgtcacatatgatgaagcaatattcaacaagtgcaagaactgtatgaataggaataagagtttatgtacaacgggaaatgaaaatagttgtcatttgaacacattatgctgtggcagctgcttgttcttcaacagcctgtgatgctgggagaagggtgcaaatgaggttgcggtcaccgtacacattatcaacacgtcctgtggtaggccagaactttgcagtacggagccaaggagctgggaaggctgcatattccctggagtatggttttgtccatgcatcagccatgagcagtgatggtggatgaggggcgcccttaagtacattgttgttaatgtcaacctttcctttctcaatctcagcaatttcttgtctaatggaaataagagcatcacagaacctgtctaactc

SEQ ID NO: 5897 - DNA, 525 bp, Glycine max
  Clone ID: jC-gmle01810005h03d1
ggaagtcaatttcgggcaaagcttcctctccaattttttgttggaagctgcatcatactgtataatactgtaatagtaattacaataagagtcatgctacatagaaaaatagtagctgaattttgacagatttcggttaagttcgggcgtggaatgtagtagtgaattgtgaatatatccaaactctacatcatacctatacatgttactatggggcaataacatataatttttttgggagggaggtggggtgtaatgacaaaaatgtggctctaaagccaattggctattgtagagcacaatttttttattaactgaaacaggtgaatggagaaagcccccatcatttgctaattgaaatttttatacttgctgaagtcttccgaaatgttgggtaatgctttttttcagctccccaggtcatttaatccttttcatgctctgaaggttgacttgtaaccatgaccttaacatgagctatttttcgtcctaatcctaaatctgcaataagcccaagcaaaaagc

SEQ ID NO: 5898 - DNA, 480 bp, Glycine max
  Clone ID: jC-gmle01810005h04d1
gatactacataaatctgtttattcatttttaaacgaccgctatgtctacaagtgaactgagaattaccaaatatgaaatctacagagtgaaagtatttaaagacacaatatacatgtgtatgttattgcgcatatggctacaaggacttttttcctactgatcataagtgctcaagaagccaccaacaaagcctgctccattgcaattcccgcataacatcttcttcctgcctccgcaaagccaacaagagtcaccggctttaaactgtccattgaaaatatcaacagagttcaccccactgcctttgcattgagagcatagaacagctccatttccatcacagtcagcacaaatcacactattcggttttgtgtttcggtttgtgctttggttgtcttttgcagccttggtaatgacatagcgatatttggtagcaatagggacttgaaacgcataattgactccaaaatgctttggat

SEQ ID NO: 5899 - DNA, 455 bp, Glycine max
  Clone ID: jC-gmle01810005h06d1
gaaaacgttgcctttctttggcaacaaaaatggaatgagaagtatctgtctctaatgtttcaggtttatatacgaagatcctaattgtttggattaaatacaaaaccggagaaagaggcttcttgggacaaaaatcatcgatatttggccgacatattttttaccaagtctagaatcctaaaataatcaaagaagagagaagatttttttccctccagtccatcccggctgaccctgttgctaccagccaggttattacatggactgccaccaacaattagatcaaaaccaccaaatgtgctcatcagctgttccaagcgatcaccggctagctcccttacatcatccatattatatagattacctttctgggttggttgctcccaccaacttctaacaatattcctattaacttccgattttttaacagacacaacattcttgagagggatgcc

SEQ ID NO: 5900 - DNA, 515 bp, Glycine max
  Clone ID: jC-gmle01810005h09d1
aagtggacactgtaactcaaaattatagaggaagacggtccaatatgaaaaatatagtaagatcatctcaaacttagcatcttctctttgcacctaagacattgagaatgctaagaatgttacacgcaagttccatcacaacttctagcacttggattagtacaacaaccttcacgaacagaaatatttacttgccaagtttgctttgcctccaattcaagactggaagaaagttcccctctgaatagcatcctcgttagcatttccaagagcagcctcgttcaagtacttgtcagccaattggactctcttgacattctcttgttcttggacaagcatgttaccatacagcaagagcttctccagagtcatcttgggctgctcaaaggttggaggtccatcttttgagttcacaagcttcttcccaacactgtcaacaccaacaccagaaatccacttcctcacttcatcatcatatactctggccctcagtgcaccaaagaaatcaatggatt

SEQ ID NO: 5901 - DNA, 549 bp, Glycine max
  Clone ID: jC-gmle01810005h10d1
aagcaaattaaaatagcatgtgaatatgggacaaatccaaatattgctgctgcattgtcacataatctacagaaccttgaaaactaacagcaatcaaatatgttcgccatttggaatttgaatacaaatacagtgcatcgataatataaccctatgtacagagccaatgtctgactgaaatttgatacagaacattatctattttgtatcataataaaatggtaaagatctttatgttacgtgcagcattatgtgaagaagggggaagtgcatccagctggtgctttagtccttcgtcttcccttttacttcatcattggctccttctgcacgttcacatttccttaaactgcttaagcactgctgaccttgttcttacgtccgaaggtccaatggggtttcgctggagtacgccttaatgccttcactccaaaggggttgttcttgctcctgagacaagttccagcgtaagtgttgcagatgggatagtctgcagggcagcaactgtagtggtcatcacagcaggaagcacccttcagaggacagcaa

SEQ ID NO: 5902 - DNA, 548 bp, Glycine max
  Clone ID: jC-gmle01810005h12d1
aagagtgaaaatatactaatatgaatttgatagttgaattgactatgcaatcagggcaacaacaatcgcactggttaacttagacgacagaaagatatttagaaatgaggctggtctaaattaaaaatggaaaaacttcaatcaaaatggctctgccaaagtttagtacaaattagagtcaccagccaactaaaataaatggaaaaataaattgcaacaaagcaaattacactcttatcctctgtttaagataaaaaaattccacctggataaaatctagatactcagataattgcttcactcaatcgtcctcaccgaactaccaagccttgggctgcctgggacccatcctccgttattttgttggcctgaatggtactgatcacatttgcaatgtttcccctccatgtcactagctttgttctcagtgcttgccattggtgctgaccaaacacacgctcagtaggatgactggacactacaacttgattcatttggtccatcttacagtcaatttaagttagcagtaatcctctaactacccatag

SEQ ID NO: 5903 - DNA, 445 bp, Glycine max
  Clone ID: jC-gmle01810006a02d1
ggccacaaacaccagtaggtaattgagtagcttgataatacatgccagtcacttggtcatatacaaatttgtaatacaaaatagtataaaagaatgctggcctaaaattcttaaaacttatacaatatttattgaagctcccatcaaaatggtgcccctgatgtatgggataagaaaaacatcctaattggattttgatacaaataacatacaatgggaagtttaatatacattatgaagtaagtcatatcttacacattctctggtgatgattgatcagaatgtctgacaaggtgctctctgatttgatcttcttgctctgtagtgatctccaatttggaggattttttaccacgatacagaacataatgttgaataatgaaaataatgtcaaagaatacagataccaaagatagcaacacttttcctatattcccatagaagt

SEQ ID NO: 5904 - DNA, 541 bp, Glycine max
  Clone ID: jC-gmle01810006a03d1
atcttagaaatgttcattcatatgtcaagttaatcataaggaagtaacttaagttaatcatagtcattgtccaattacaaaatgctggaagtagtaaaagataaaacttaaatagtttatgacattaattgttcatacattttaaggttgacgagcaatgggaattaagcagaggtcattttcccttcttaaagtaattccatttgactccttcatgtcaagttcttcaatgttcattttgttgggaagcttccaatcaaagtggtaaagcaactgagcaagtggcaactcaatgttgggtatggcaaatgtaatgcctgggcatatcctccttccagcaccaaatgggataaattcaaagtctgtgcccctaaaatcaatggagctattaagaaacctctcgggtttaaaactctcagcttcagcccaatacttaggattccttccaattgcccaagcattgataatgaccctagtcttagagggtatctcatatccattgatttggcacctttctctacttactctaggaaccaacaat

SEQ ID NO: 5905 - DNA, 467 bp, Glycine max
  Clone ID: jC-gmle01810006a05d1
gagaatgaaaaagtcgtggatttcatcataaatgaagagtaacaactaatctttaccgatgaaagaatcataaaaattacgacgacctgaatattcaccagcttggtatggatccatgttgtatctataattgtaagtatcagtgaaattggagcgagacacgaaatagcgaggaagggaggagcaatttgtctgttgatcgactgctgtatcaaccactcggatcgtgaaattatcgtagctgattgcctgcacatgatattttccagagtacaaatgtgacacagtaacattgatttcacaagctagctcatacctattgtcgacgcagctatgagggtggccctttaatcgaaatgggtaagttatgatggtgattatgccgcaggaagacagggggctaccatgatcttgcttcttggtagcacaaatctgctggactagaagcactagcaggatcaccaata

SEQ ID NO: 5906 - DNA, 536 bp, Glycine max
  Clone ID: jC-gmle01810006b06a1
ggctcgaggcgctttactcgtcttggtggtaagcttccgaaaggagttttacttgttggtccacctggcactgggaaaacaatgttagctagagctattgctggagaggctggggttccattcttctcctgcagtgaaagtgaatttgaagagatgtatgttggtgttggtgcacgaagggtgagggatcttttttctgctgcaaggaagcgagcacctgctataatattcattgatgagatagatgctattggaggaaaacgaaatgcaaaggaccaaatgtacatgaagatgacattaaatcagttactggttgagctagatggattcaagcaaaatgagggcataattgtgattggcgctactaattttccacaatcattggataaggcattggtgagacctgagcggtttgatcgccatgttattgatcccaatccggatgtaaaaggaagacagcagattttggaatcacacatgtcaaaggttctgaacgctgatgatagtgatctaatgatcattgccagaggaacacc

SEQ ID NO: 5907 - DNA, 486 bp, Glycine max
  unsure at all n locations
  Clone ID: jC-gmle01810006b08d1
aaaacctacaacagaaaaatatgactcttattacttaaaaagagagtcaaacatcatagtatcccaaattcaccttcagggatcaaaataaaaactcaaccattgacaattttgaagcactaggccagggaacttgcactctcagcattttatcctcataatcaaattttacaactaccccatctagtttgcaactaactggtttctctgatgcaaacaccttcatctccccacaacccctaaccccaattttgaccacatctatgtggttgtcaaactccatggactgaatggcaccaccagtgttaagcatgttcactaatccaattggagcaaattgaattaacttttttgacagcacaatcactggagacactgtcaatagctcaaaagtaaatggctcaagtgaaacttccaatttctctgatgccttcatgagctttangttgtggccttgacaaatatacagcagacacattcatccct

SEQ ID NO: 5908 - DNA, 525 bp, Glycine max
  Clone ID: jC-gmle01810006b09d1
ataataatagtactatattcataataacaaaggaacagttatttgatattgttggaaatctctctagtagacataataggttataatgcttatacatccatgtcacaatcacaacacacatcgtataacaagaaaaacaccactgctatggcatcttaacctgtattttgcatgccagcagcaatacccttcattgtcaaaataagggtgtcctcaagaccaggagcatactcgcttttggggttaagtttaacaagctctgctgctggcttgcttgattccatgtagtcctttgacaagtgtggcctcaacttcacatggtagtcaggatcacggatccgcttcaatgtgtaggcttgcaacacattgagggttgtgatgtatgagtcacgaagacgaagtctttgcttcaagtaggggtctccttcaagaatatccttgtgcccagcaacctggaggagaaacctctttgtttcttcgaatttagatcttaaattctctccaaatggacgcagctcttctgat

SEQ ID NO: 5909 - DNA, 361 bp, Glycine max
  Clone ID: jC-gmle01810006b10d1
agtaaaatcatctcaaacttggcatcttctctttgcacctaagacattgagaattctaagaatgttacacgcaagtcccattacaacttttagcacttggatcagcacaaccttcaggaacagaaatatttacttgccaagtttgctttgcctccaattcaagattggaagaaagttcccctgttaatagcatcctcgatagcatttccaagtgcagcctcgttcaagtacttgtcagccaattggactctcttgacattctcttgttcttggacaagcatgttaccatacgttaagagcttctccagagtcatcttgggctgctcaaaggttgggggtccatcttttgagttcacaagct

SEQ ID NO: 5910 - DNA, 444 bp, Glycine max
  Clone ID: jC-gmle01810006b11d1
aacataaggaccaaatttattacaatacaagatgcctttacacaaaaagctattggtataaaaaccttttgatggggaagtaacgagatggggaaaaacattgaatttacataatttcactcatcccttacccaaaatttgtacacaattggggggtgtagcgtggtataccatttactttaataatgccaaacgcagccggttggtaattgtaaggatcccttaacgaacttaacttaaagatgttaggaaaacaagcattactttaggcatgagagcatgcataagtaactagttacaagtgacatgtgaaagtgctagtaatgataaaataaaaaaactaaaatgtgttggctccaatcaatcttctagttggttgccaagttcaaagcacattgtcatgagtctgagatggtcttggatttgaaaaactttgaactttct

SEQ ID NO: 5911 - DNA, 468 bp, Glycine max
  Clone ID: jC-gmle01810006b12d1
atacaaaacgaaaggttttatatatctttttgactatgtacatgagcatgcattcaaaacagggcaaaacccaattttatgatctctttgactatgtacatgagcatgcattcaaaacagtgcaaaacccaattttatgatctaatactttagtacaggcttcctacttggttctttgaagggtacatttccactgagaacggagctaatgaacttttttgcctcctttattggcatttcgcccataaatacactatacttccctttccgaggtttgtaggcaatcaacaaattatttgatgatttataatctggtttggcaaatgcctttagaaatgatttttgcttcgcagcatttaagagaaccttgaaaatggagtccctagagctgctggatccctgacttgggcgtcttgacaaagatttttgagagacccaagagaggattgattctagcttttctctagc

SEQ ID NO: 5912 - DNA, 526 bp, Glycine max
  Clone ID: jC-gmle01810006c03d1
agaaggaactaacttccaagttccaataacagcactcaatgttgagtcataaaattcaaacagcagcttccttgattcaaagaaagctgtaaagttgcaacttatagaatgacaagtttgataacaataataaaatgcagagatgtataagtaaactatgttgccagcacagaaccttaaactccaacaaaacacttacattaaataacaatttttttttggcagccctgaaaaatgccaacaggtgtcctctaaaatgcattaaacagcatcccctgtcctagcgtctctcagtttttccattggaacgcttcccagaaaacaagtgcttgggcttcagattaggtatgactctatcagcttctccacgacgggcatccttgtttctcttcttgacagatttctttgcaagtttgattgccttgaccttttgagcagaatccttgaagccttctccaggcacaacttcatgtggtgggcgtgacactgacctggaccgtgacagtgatctactcagacgctgttt

SEQ ID NO: 5913 - DNA, 558 bp, Glycine max
  Clone ID: jC-gmle01810006c04d1
ctaaatattcgacaatactgtcaatacaaggttaaaattttaaactttttaattgggcttacatttcactgttttaaaagtagcgtttgcattctgcaatacagacaacagaagaaatatttccccattcatcttcaactggaggggccttaatcgaagaccacaaatattcatacaaggctgtttggcctaaacactgaaagtaaaaatcgctctcttctctatgtcaattagcccatggcatatttctgggtccagcttcttgcagttgactcgtacttgttcctgtctgtcttgtacatgtgtgcaatttcggggaccaaaggatcatcaggatttgggtccgtcaacagggaacaaattgagagcaacaccttggaaatggttagagcagggctccactgctccttcaatatatcaaggcaaatgcttccattgctatttatatttgggtggaacaccttcgtcctgaatgcaaccttgggtggcttaaagggataatctggagggaaatgaatagtcactaggaaaacacctccagcatagggactgtctgga

SEQ ID NO: 5914 - DNA, 503 bp, Glycine max
  Clone ID: jC-gmle01810006c05d1
gataggaatcataaaatgttattgtcatgcagttgaggaccaaattgatccccaaacaagtttacaaaacttgggttcctatgtacacatgaaacgtagataacacaacaaaaaatgagaaatagttatctaggttgaactaatgacactataacagttacatcatcaagcttgccaccaatgaatcccacatagccaacagcttgggctgcatcagcaaaaggacttctcatggatgttgatcttccaacctcttgtgcccttgtcgccaggaattctgctatttcctgaggtgtcaagctagcttctaatgattatgatataattgatgctatttcttgctcatagagattgtcgaagaggccatttgtggcagttactatcacattaccatcatgtagatccattgtgtatccctcaatgagttctgagggatcatctcctttaactatctgtcatggaaagtcgaattcatgaaacagtggagttgattttttaaagat

SEQ ID NO: 5915 - DNA, 459 bp, Glycine max
  Clone ID: jC-gmle01810006c07d1
agttagtaatggctttctaatgtaccaaaagagaacgtataaatacatacaccatggagccttatgtgcaaccaaccacaaaccattaagcaggaaatgaaactaaagagaggtaaataccccctcaaataaaagctgatttctgaaatacaatgaacagctataacctaaaaatacagatgcactatttctacatttttcccttgaacagcttctatctatcatacacctatataatcaaattattgagactattttaaaaccacaaaagcttaaagaaaaatgttgcaccacaccagcagttggcagagtagaaaaattatagcatttaatggttatagcatcacaactaggcttcaagaggaattcattgtcaaaagacaccagcttccattgaactcattcagagcacaagattcaatgatcatcggtgtttaagggagtcaggcatgaaagaag

SEQ ID NO: 5916 - DNA, 477 bp, Glycine max
  Clone ID: jC-gmle01810006c08d1
atctaaaattctcgttatttgattactagtactaattcaagaacgagagccattagcccacttatatagaaagaaatagaaaataaaggagtaaaagaaaaccctcagaaactccaattatatctccctaaactgaatcttttactagggcctaaaaacatccaagacatcccgttggtgtccacacaagacctcaaaagcaactttcttcagcttccatcaaatcctcagattgctccagctgaaaatttcagtcctctgaaactgaaaggcttgtggtttctggtggtgctctctttacatcatagcgctgatttccagatgaaaacggtaaatatttgtatttaatcatatgagatatctgtctcctcattgtaagtgagaataggaccacccagtagaagaggagtataggccagaacacaggaacatcaaacacactaaagaaagtcatcacaaatgcaatgcaaaatgcct

SEQ ID NO: 5917 - DNA, 513 bp, Glycine max
  unsure at all n locations
  Clone ID: jC-gmle01810006c09d1
aaacacactcattgcacatagtaatgcgctttatttaagtgaataaaatattacatactagttcacaaatgcaaaaggacactcatcaaccagatatttgagactcttacagttctcaagaagtcgcgtcagcatagggttagtggcgttagaactcagaatttcattcttaacgccaaaaagaacagccagtaaagctactggaaaaggatcaactctagtaagaaaaacaattttcttacctctcccaagtgctgtgcgaatccttttgttgatatctgaggagcgattgttaactgcagaactaatccaagcagtggtgggtaaaccaccacgtncactaccacatgtaacatttacaacggcagcttctgaaggtaattgacttacaggataaagacaattcacaaaaattggtaaccaagaatccactggaaaatttccatcaaagaaattcttggtgtgtagccaacacaagcttatcatcaaaaacaatcttgttggaaaagctta

SEQ ID NO: 5918 - DNA, 544 bp, Glycine max
  Clone ID: jC-gmle01810006d02d1
gttcttaccaagtgaatcaaattacatatggaacctaataagtaataaataatggacagcctctatcagtcagaaccttgcatctagtattactattgaaagtatgagctaataatatatattacgaatcttatcgaagacagtattactattactctatctgtaggcactctaaaaatgttgtataagttacgatgaagaatgtatagatcagtttgaccaaggtaccatataaaaaatctacaaagtcacgggatcctagtcattcaatgagtaccaccaaacactaaattatacttaactgactgctgcttattctctagtagccgccaaccacaggtagtcatttaccagtatacatgatgcttccgatcttgcaactcagtgaaagaataagaactgagaaaccagtcaggaaaatccagccatgtgacagcacaaatgcagtcttgccagaaacaggcatcaaagcagccgaattaacatcggattgcgaaaacccagtggatatgacagtgctaaacccttcatttttgcccatagt

SEQ ID NO: 5919 - DNA, 488 bp, Glycine max
  Clone ID: jC-gmle01810006d03d1
agaacaacacaatcattcctcttattatgcaaacaagtaaacaaggggctaatttgcatttaaaaacctgaatctaaatttaacacaggatgtatcatctccaagtcattgtaaaattcttggacaaaaatgaaaacaagaagtagcaaccggctccttttaaatgtgaatgggcttgtcataagtggccattgcggcttctttcacagcctcgctcattgttggatgtgcatggcacacacgtgcaatgtcctcactagatgcatcatactgtagtgctattgctgcttcatgaataagctctcctgcattgggtgccataatgtgcactcccaatatcttgtctgtctccttttcagccaatatcttcaccagtccttcagcattgtcaattgccttagctctgctattagccatgaacgggaacttgccaacacggtattcaactccaagttccttcacctgctcctctgtcttcccaacagatg

SEQ ID NO: 5920 - DNA, 388 bp, Glycine max
  Clone ID: jC-gmle01810006d07d1
gcagtaagtttgtatattatttattttctgatgaagctaacttgaaaatcctcaaaatgggggtgaaccaattcttacaattttaaatgccacattttcttattacggaaactttgattccatttttaacccgggttctgcaaaggcttggtaataaaaggttggtttcctaaaaaacaaaccctaccataatgttatgggaaccggccaaaaaaggggggggaactttgaaatgggagaaatcaaagttagattgcatacacgggcttaaacccattttccgatcctgacattattggcatagacattgactgcctacgggtcaatggggccctaaaactttggaatcttgaggccttaagggggggaggaatcccccaataacaga

SEQ ID NO: 5921 - DNA, 267 bp, Glycine max
  Clone ID: jC-gmle01810006d08d1
aaaaggaaaaggccccaaactctattaacggggacacttgtacctgaaattttatgggcaaaacgggtccctttgaaaaattttggaagatccattaaaagctagactataatcttggccccttaaaatttcacaatgcttagaatgctaccccctagcatcttggcacttttcgtcccttggtttgagccacctacttgtggtagcagagaaattgacttgcccagatcgtgagcccttccattcaaaagtggaaaaaagatcccc

SEQ ID NO: 5922 - DNA, 477 bp, Glycine max
  unsure at all n locations
  Clone ID: jC-gmle01810006d09d1
atattattatataaagatagtctataatcactagaatttctatatatttatacttagtatataataattctagtgattatagctaagccaatatatatcataatataatataccctatgcttattcaaagaatttatggctatgccttatcatttttagtcaaagaaaagaaattatggaattgaaataactcactcagaacgccctttaaaagattacgcggtacgattgaatcaaataagcccttatggaataaatattcagctgcttgtgaaccttcaggtactgccttattcaatgtttgttcaattactcttttaccagcaaatgcaatataagcatttggttcggcaataatgatatcccccaacatgccaaaactagcagttacccccccagtagtgggagatgtaagtatggatacatagaataactttntaattttttgataatcatataaagcagaagagatcttag

SEQ ID NO: 5923 - DNA, 313 bp, Glycine max
  Clone ID: jC-gmle01810006d10d1
gttaacattaatgtatataataatagctgactgacccagacagaaaactgattagataaaaaacaaaactaaaaacagaaaaaacagaataataatagaaaaaaaattgaagacttaaagaatacgacaatcaacaaaaaaaagaagaacaaccaaaaaagcaacagaaacgacgggaaagataaaaagggcgagaataatccaatagaagaacatccagacataagaacactgaaaaatcagatcttgagcagtaggaacaggagctcgcaaaaaagaaagccgaaaggatgacagagacagcagataaagc

SEQ ID NO: 5924 - DNA, 442 bp, Glycine max
  unsure at all n locations
  Clone ID: jC-gmle01810006d11d1
cacaaatggacaaattcaccatcattttcaactcaattatacattatagctattattttgcatacaacctaacccgaaatttcatatattcataattgtcacacctttgattgttggaattcaacacattaaaccaaactattcaacaaaagaaaaattattacataattcaagattatcatagacaatctggaataattttcaaatgatacgtaattgagtttttaaactctttttttatattaaaaaactcaattacatatcacataaaatttcagtaggaccatagatatataatggtcttagattatgcaataatttatcttccagacacaatgatttacaaaaatattctaccacttctcaactgaagaaatggctgngggaacgatggggagagaacaggcgaagaggggagagcatccccatgaagcctggggaa

SEQ ID NO: 5925 - DNA, 109 bp, Glycine max
  Clone ID: jC-gmle01810006d12d1
aacactaaagtactaacttctgatgtggggattgaacgtacatatatagcataatagtaccaaaagcagatgagatcatgtatctagtcattgtacatatcttgtaaac

SEQ ID NO: 5926 - DNA, 523 bp, Glycine max
  unsure at all n locations
  Clone ID: jC-gmle01810006e02d1
agcacagagaagaataatggaaatagaattacatttcaagtgttttggcctccaagtacccaatagtggggatttagcctctcatgatcatgagagactttacactccaggggttaatgaaagaaggtgataaatgaataatacaagaagaggggaacaactaaggaagagaggtttctcctaagggagagactcaagttttggatttctgcattggaaagctttgagagtcaatgtgtcttttccgtcagctttctactccttttataggcttaaggtaatttacttttcacgctgactgtatgctgagcgtgcatctgtgcgctaagcgtgtactggacttttctttgtaggccttctcgcgctaagccagatctgcgccctaagcgagtacacgtgctaagcaagacctacgcgccaagtgagatgtgtgttgggcctacagtgtgcgttaagcaaactggcttctttntcttcttcaatttttcgtcaaatttcttctaaatcacttgaaatcttcttt

SEQ ID NO: 5927 - DNA, 528 bp, Glycine max
  Clone ID: jC-gmle01810006e03d1
atacgaattactttttttttttttcctgtgattggatgaaacttaagagcagtggattatcatcattgtcacatatgatgaagcaatattcaacaagtgcaagaactgtatgaataggaataagagtttatgtacaacgggaaatgaaaatagttgtcatttgaacacattatgctgtggcagctgcttgttcttcaacagcctgtgatgctgggagaagggtgcaaatgaggttgcggtcaccgtacacattatcaacacgtcctgtggtaggccagaactttgcagtacggagccaaggagctgggaaggctgcatattccctggagtatggttttgtccatgcatcagccatgagcagtgatggtggatgaggggcgcccttaagtacattgttgttaatgtcaacctttcctttctcaatctcagcaatttcttgtctaatggaaataagagcatcacagaacctgtctaactcggccttgctttcactctcagtaggctcaatcatgagtgtgccaggcacag

SEQ ID NO: 5928 - DNA, 395 bp, Glycine max
  Clone ID: jC-gmle01810006e04d1
aacaaaaaaaacgggacccaagaaacgggaaggacccaaaaacataagccaaaaggggtaaaatcccgggatcctgaggccggttaaaaaaggggtcccccagggggaaaaagggccccccaaaagaaagaggaccctcatgccagcctggggatttcacaaagggggccccaaccttaaggttagccaaggaaaaaaaaatccgggattgatttgccattttatgaaaggggggcaattgccctctaaccccaaaaactgggctcttttcaagggggggccggaaaaccaaaggatcggggtataaaaaaaacccttatttatccaacttttccatttccaaccccaaaaggccccaacggggtctatttacccgggcccccacccaatttagc

SEQ ID NO: 5929 - DNA, 464 bp, Glycine max
  unsure at all n locations
  Clone ID: jC-gmle01810006e06d1
aatgcgtaaagcaacgttcatatcacacgggcaaaacaattagtatcccatccaacaaaaatcataaaagttaaaattcaataaaaaagcatcaaataagttttaaacagataaatggatgaaagcaactacacatttagtccacttcctcaatcttggggccagcaccacttccaccagaaggagcagcataatcatcctcggctgccccagcaccagcaccacccatgttaggaccagcaccaccttggtacatcttggcaatgataggattgcagatgctttccaattccttcattttgtcctcaaattcatctgcttctgcgagctggttgctgtctagccactggatagcttgctcaattgcgtactcaatcttcttcttgtcagtaggatcaagtttctcaccaattntgtcatccttcacagtggtcctcatgttgtatgcatagttttccaaagca

SEQ ID NO: 5930 - DNA, 547 bp, Glycine max
  Clone ID: jC-gmle01810006e08d1
cataataacgttgaaccttcagtgcttcgttaatcagtttcagttcacccgatatgggttcactaatgcaacagacacaaggccaacacaagtcttgtactcttgtcctaattgggtgtgagttgggtagtaaaaatatatgtaccagtgattgtcataacaaataaataacgacgacatacaattgtcttggaagagcttctcagcaataccaaattcaaccagcaaatagtgcaatggatcatgccgctatattcctcccacagatcatttaacgggttttttcaatttccacacatttttaatgggttttttcattgattgccgagattcaaccatgttatattgagacaatcaatcaagtacacaactcacagcaaaaaggtttataagctgtaaaggtacatgtaaccataaacaaaaatagtctccaagactataaaaacattacattttagacaaattagtcttcttccacttcatcctccgtcaacacctactacaactgctgtgttgctgctgcctacatgtatatattcactacaaa

SEQ ID NO: 5931 - DNA, 443 bp, Glycine max
  Clone ID: jC-gmle01810006e10d1
cattcgaaagtgtaactcagccgtagaaccatattttttatttatttattgcgtaagctgctgtgctaattgttttttctccttgaatttgataaaataattattgattcttacagtgtacaagtcagagcgtattttatagtacaaacataattctgtgacttgcgtgtatgattatgcaacatataattcggcttttccatcaatgaatagactcatgaactcttcaccatccacagtttctttttctatgagaagttgagcaagcttgtgaaggatatcaatgtgagttgagataatatgtgttgccctagaatatgctctctctaccagttccctcacttccgcatccactacatccgcagttgccatggagtaatccttttgcgatgacatctgttgacccaagaatggatttccaccaggtccaccaatggcaactt

SEQ ID NO: 5932 - DNA, 433 bp, Glycine max
  unsure at all n locations
  Clone ID: jC-gmle01810006e11d1
gtaaaaagcaagtaacattaagttggattgggatacacaagataattcacattatctgaagtacattgcaataacatatacttcaccaaacacaaatctaaaaactctcaaaagtccacaagtcatccttttctttcatgctcacttgccggggacgaagttggtggcgtaggcccaggcattgttgttgactgggtccgcaaggtgatcagcaaggttctccaatggacccttaccggtgacaatggcctgaacaaagaacccaaacatagagaacatggccaatctcccgttcttgagttccttcaccttaagctcagcanaagcctctgggtcatcagcaaggcccaatgggtcaaagctgccaccagggtagattgggtcagtgacctcaccgaggggcccaccagcaatacgatgacccttaacagca

SEQ ID NO: 5933 - DNA, 499 bp, Glycine max
  Clone ID: jC-gmle01810006f03d1
aatcaaatagaggtttcaatttcaacagttcatgacaggttccataacatccaaattagagaccattgatcttaacacaattccaacagaacattagacgatcaaaatgcaattgaatcgccagatgtgatagcaaacaggtagcacaattataaaggaaaaaaacttgggtgaatcaggaaaactgtctatatagcttccagagcttgcaggacatcagccttgaaatcctcgaaatcttcaactccaaagctgaagcgaaccaggttggcataaatcttgtacttggccctttctgactgaggaagatcccagtgagacaaaatagcaggttgatccacaatgctctcacagccaccaaacgaggccgcaatatatgggattctcaatgaatcagtagattttattgcggtatgtagatctccatcaatctcaaaactgacaacagcaccgaaaccagtcatctgcctcttggcaagctcatgttcagggtgactcg

SEQ ID NO: 5934 - DNA, 524 bp, Glycine max
  Clone ID: jC-gmle01810006f04d1
aacaagattagcaaaatcataacctgcattaatgcatttagtatatataatatatcactatataccaactaatcagtatacaattacaagcaagttattctgcagcaggatacaaactaacgtgacaacagtcgaccaaactagtcttggaattcaaagatgaaaataataaaccaagccaacaaacattttaaaatgtacagtaactctagaagacatttcctaaatgttgacccccacgcattaatttttatacttcatatatgcatccctcgtgtcttgcttgtatatggttttgacaaggctagctttgcccatagctatgtgcaggtacgaaactaaaaaacgcttgaaaatcataaaccacattttgattaaacttgtggtgcatcggcgggagagggagtggtactagcagcaggctcaattttacgcagcatgaaccctactcccctgcttgaaccatcttcatcatcatggtatgcataagcaaacccaccatgcctcgtcaaatccattcccga

SEQ ID NO: 5935 - DNA, 207 bp, Glycine max
  Clone ID: jC-gmle01810006f05d1
ccttggacatgggggccaattctattaccattccagatgcctttacccaaaaagctatggctaaaaaaaccttctggtgggggaatcaccacatggggaaaaacctggaatttacataagccaagtcagccctgaccccaaatctggacacaaatggggggtccatggtggtatcccatttactctcataatgccaaacacccccgg

SEQ ID NO: 5936 - DNA, 507 bp, Glycine max
  Clone ID: jC-gmle01810006f07d1
gaagctacaaaatctttatttctgtacttacagataaatcttgaacaaataaaagtgggtttatacgctgaatctataacactcatttaactaataatgcaactttccccccacattcacaggcatacatcgttacattgtaacttagaaaaaaaaaatgttaacacactattttcgatttcttcccatgttacactttcttggcctctacaaacttttgcttttacaacaggacactagacatgggattccagatattactatataaaaaaaaattatcaatgagactaaatgtttgctcagtaacttattttcttccattcatacaaaatctgaggtcatgctctccctttccttttgtcatccaatgccttactctggaagagtcgcatggttaacacaagtgtgtctcgcattctgacgctatatgtgcttagaggatgagaagacccatttgagcttgttaacacaaattgcgcagagagaccacatggaaccttaatcgat

SEQ ID NO: 5937 - DNA, 512 bp, Glycine max
  Clone ID: jC-gmle01810006f08d1
accaaaccacatatattctataattcatccttttgaggaagcttgtataaaaccaaagatagtgtatgcagttcctatactcctggctgaaaagagataacttataaggcaaaaactaaaaataaataaataaataataaccatagcaatggatacaaaattaagccacaagccacatgaagtaggttgtccaaaaagtgactgcaactgaggccaaaacatatgtccatagcatgataacagaacattcaccttcaccagctccaaacaactgcgcgatggtgcctatagccattgcaggtggaagtgcatattgaaggagaagcacaaactgatacaggggatctggttgcaccaaacccaattgtgttgctcctttaataactagaatacccaaaattggcaggaaaatatatcgaactactataattcctataactgtccaaatagaagtatttgctcccttcaagcctttaacgaggtttgctcccattataaggttataattggaa

SEQ ID NO: 5938 - DNA, 448 bp, Glycine max
  Clone ID: jC-gmle01810006f09d1
cctacacaaggaagcaataactgttcttatattagagttaacaaattcgggctccctaatttactttcaagccatttacgtgtcatggcacaactaaaataactgattagttaaccaaattttatcaagtacactgcaacaacaatggaacagagctaacaaacaaaaaagacaaaattcatttgcaacacaaactttctactatccatttttcaatggctttcaaagttccaagccagcaaactattcatatcagtcactttcggtttcctcgcttatctttcaaatccgcgtccctctggatgtggtcaagaatcaaaagcctaggtccaggaggaatcctcacatctctgagagcactgtctgtgagtaaaggcagagtgttgtctgttaacaagcctttcttgaaattcttttcgtaactctgaaggccaagattgttcaacat

SEQ ID NO: 5939 - DNA, 466 bp, Glycine max
  Clone ID: jC-gmle01810006f12d1
tggtcggcctgtcgtctttttttttatttttttattcttatttatattattatataaagatagtctataatcactagaatttctatatatttatacttagtatataataattctagtgattatagctaagccaatctatatcataatataatataccctaatcttattcaaagaatttatggctatgccttatcatttttagtcaaagaaaagaaattatggaattgaaataactcactcagaacgccctttaaaagattacgcggtacgattgaatcaaataagcccttatggaataaatattcagctgcttgtgaaccttcaggtactgccttattcaatgtttgatcaatgactctattaccagcaaatgcaatataagcatttggttcggcaataatgatatcccccaacatgccaaaactagcagatacccccccagtactgggagacgtaagtatggata

SEQ ID NO: 5940 - DNA, 496 bp, Glycine max
  Clone ID: jC-gmle01810006g02d1
acaggacaataaaagaagcaatgcattaaagctgaaagtagaaagtacgttcatcttcaaaggagtgtaaaagagggtaatatatattttacagaatttctgaaagagcagaaaaaggaagtaaagacaagaatgatttgtgactcaaatcctggaagggatcataggaatagtgttctgtaagtatgcactggcagcagcaactccacttccaagctttacaggataacccacatctttgagtatcatctctacaccagctagacatcccaacagttgcaactcattcaagtggccaagatgtccaattctgaaaaccttcccagcaactttgttcagtccaagacctaagctcaaattgtatctcttccatgccctcctaactatttcagtactatcaatgtaagcaggaacaagaacagcagtcacagtgtcactgtaccactcttccttttgggtgcaattcttcaaaccccatgcctctacagcaagtctg

SEQ ID NO: 5941 - DNA, 341 bp, Glycine max
  Clone ID: jC-gmle01810006g04d1
cccccacaaaaatttcccggaaaaaaaggggaaaaaaaatctccccggggaaatatggggttcccccccgggataccaaacccccccaaaaaaaaccccgggttaaaaaaaaaattccccccccccccaaaaaaaaaatcttaaaagacccaaatttggccccaaaacaaaaaataacgggggggggtaaaaaaacccccccaaaagggaaactcccattgccaaaaccgaaaaaaaccccttttggggaaacccccaaacaggggtggaaaatcaagaaagggggggaaaagccccccaaatccccctattttttggggaaccccctgggaaccccttcc

SEQ ID NO: 5942 - DNA, 206 bp, Glycine max
  Clone ID: jC-gmle01810006g05d1
aaaaaaaaaaacccaaaaaaaaattttaaaaaaaagggaaaaggggcacaaaggaaacccacaaaaaattggaaaattgaaaagggggggccagtgaacgggttcccttgactattttcagctcattatgtatgtcttacacggagccttgttgtcgtaaaggttgagattcagcatgaactacattattatgctggtccaatggc

SEQ ID NO: 5943 - DNA, 261 bp, Glycine max
  Clone ID: jC-gmle01810006g06d1
aacatggggaccaaatttattacaatacaagatgcctttacacaaaaagctattgctataaaaaccttctgatggggaagtaaccagatggggaaaaacattgaatttacataatttcactcatcccttacccaaaatctggccacaattggggggtgtatcgtgggataccatttactttaataatgccaaacgcaatcggatggtaattggaaggatcccttaacgaacttaacttaaatgtgttaggaaaacaagcat

SEQ ID NO: 5944 - DNA, 396 bp, Glycine max
  Clone ID: jC-gmle01810006g07d1
ctcactagccggccgtcgtcctttcactattcccctttttatttttttttttttttttttttttatactaaggtaatggggttattttttttttttttttcttccttttttttttttaaaaagaaagggccccaactaaatataaggggacccctgaaacaaaaaatttctcgggtcaaactcccttaataaaaaaatttaagagaaactcctaaatttcaggttttctttttgcccctaaaaattggacaattctaataatgtcccccccaatgaccatacaaatttctaaccatgggattacgcccaaaccttttaaaaaccaaaattttcaccggccaaaggtgtttcccccccaaattaaagatggaaaaaatgtccccctaaaagacctct

SEQ ID NO: 5945 - DNA, 474 bp, Glycine max
  Clone ID: jC-gmle01810006g09d1
aaccaacaaagtaaactcatttggaaatgaacattgttcaagaacaattagatcaaagctcaatgcaacaccaaggatgccacaaaaccctcttattttgaaacctatcctatattaagcctctacaggagcaagagctcgcagctctcattgtaccttaatccactgttggctgaaacccaaccataataataatataaagcacaaacttcaaaggaacgaatgatttttgctcaagcatcatcaagagcaaggacaccagggagttgctttccctcaagaagctctaagctggcaccaccaccagtggagatgtggctcatcttgtctgcaagtccaaccttctccacagcggcaacggagtcacctccttcaatgatggttgtcactcccttcccactcagctctgccagtttcttggctatagcctctgttcctgtggcaaacttatcaaactcaaaaacacccattggt

SEQ ID NO: 5946 - DNA, 508 bp, Glycine max
  Clone ID: jC-gmle01810006g10d1
ctacttccatttttgttgtaaactgtgacgctcacaaaaataacttggaaattaaccaagataaatacaagggataaatctttaaaaaaattaaataaaaaaacaaatgtgagagagcccttaggacagatgtttttgttttgggtttttatgttagtcaaaattgtttctcaagagagagccttaacaaagaaagaaacttcctcctccctaaggggccatgagtccgtcaattgtgtacgaaagagactttgcccaatcagctttaagtagcaatgtctgcaatgtctgcatcacattgtacccaggatcaagttttcgctgccaaccctcaagaactaaggttgtcaccatgacagtacaaacattgccatcaatattaactctatgacgcctaactttctcaagtaattgttccatgcactctgcaggatgaacaatatcaccttctggggtgccccaaaagtaaatgactcttccacctcctcaatgaaggctctcggatttg

SEQ ID NO: 5947 - DNA, 364 bp, Glycine max
  Clone ID: jC-gmle01810006g12d1
cattagttctcatccattaatttccattgaagtccgaaaacagaaaccaaaaatacaggatgatgaaatctcaaaaagcaaaaacaaatgggaatgtagtttaagtacaaacaaacaaagtggggtggcggctacaaatgctttgcaaatttttcacacttagaagcctgggggcttgtaggcgatgaagctgatgcactgcacttggcgaacgttgtcgaatccgatgatacggatgaagccgttggggtatgcagtcttagcctcttgaagctccttcaacacctgagaagcatcagtgcaaccaaacataggcagctttcacatggtccagtagcgtccatcgtagtatcctggtgacctg

SEQ ID NO: 5948 - DNA, 524 bp, Glycine max
  Clone ID: jC-gmle01810006h02d1
ggagctgcaacaatatacgttgcattaatataattgctattaaactgatttggagcatctgttcaagtataagacgaaacgataagggggttccttcctagtcaaggcaaaatttgcattcttaatttgctatacaagtatttaccaactctgtctacctcccgacaaaagaagcacactaagagcagctggaatttgacgtctcacatttgataacccgggtattgtaagagccacaaaatccacatttgtggtacaaccagtggaagcgtgaagtgcccttccgatcacagtcatggcagagtatgtcctgacaccggtccttgtactcttcaggaagttcctcagcagccaatagggcatcaagcataccaaagtaaaccgccatatctcccaatgacttgctgcagattggacatgtgtagtgactacacgtgtatgcctggaagcaagcagaatgcatatagtggccacaaggtagagctctgactgtggcacttgaagtgaacaggtcatcacaacaa

SEQ ID NO: 5949 - DNA, 539 bp, Glycine max
  Clone ID: jC-gmle01810006h03d1
cattgattgccgagattcaaccatgtttgttatatattgagacataatcaatcaagtacaccactcacagcagaaggtttataagctgtaaaggtacatgtaaccataaacaaaaatagtctccaagactataaaaacattacattttagacaaattagtcttcttccacttcatcctccgtcaacacctactataactgctggtgttgctgctgcctaacatgtatcatattcactacatacatcttagtaggagtagcctttgacgaacaactccttcttggcttcctcggattcaccctcaccggtgtacttcccaagctgggcgagcgagttggacttggcacggaaaaggagtgcatcttgtgccgccttcacgttctctgggcggcctccccatgtcttcaaggcagtgttttggagggctctggcatacgagaacgacacgtgccacgggtttggagattggttcatggcattcaagttgagggtagcttcaacctcagactgtccaccagacaaaaacataattccaggga

SEQ ID NO: 5950 - DNA, 446 bp, Glycine max
  unsure at all n locations
  Clone ID: jC-gmle01810006h04a1
ccgggccccccctcgagatctatgaagcttgatatcgaaggactggtaccatcctgcttgcgtgggcatgactattgaagaagcaaagaaattggaccattttgtttgttcagaatgttcatctgatgatgacatgaagaaaccccaggctacatttcctgtatcaccaggatctgatggcaaggttgagccgaagcggcggaagagatgaccatcatgctgaattaactcatcttgcgaatgcacctcttgctgaatttcacgggctatgtggtagctgctgtgggtgtattgtacagcttctaccagaggctataaacatcattttatgtatttgactccggctatgtatgtattcgtcttagatttatgacagacattgatctgtttcccttgtgtctcaangaaaaattcantngtcatngaagccaacccctcactgacag

SEQ ID NO: 5951 - DNA, 401 bp, Glycine max
  Clone ID: jC-gmle01810006h05d1
cacaaatggacaaattcaccatcattttcaactcaggtatacgttatagctattattttgcatacaacctaacccgaaatttcatatattcataattgtcacacctttgattgttggaattcaacacattaaaccaaactattcaacaaaagaaaaattattacataattcaagattatcatagacaatctggaataattttcaaatgatacgtaattgagtttttaaactctttttttatattaaaaaactcaattacatatcacataaaatttcagtaggaccatagatatataatggtcttagattatgcaataatttatcttccagacacaatgatttacaaaaatattctaccacttcttaactggaagaaatggctgggggaacgatggtgagag

SEQ ID NO: 5952 - DNA, 495 bp, Glycine max
  Clone ID: jC-gmle01810006h06d1
gtaaaaagcaagtaacattaagttggattcggatacacaagataattcacattatctgaagtacttcaccaaacacaaatctaaaaactctcaaaagtcatttcgttctttgacgctcactttccggggacgaagttggtggcataggcccaggcgttgttgttgacagggtcagcaaggtgatcggcgaggttctccaatggaccctttccggtgacaatggcctgaacaaagaagccaaacatagagaacatggccaatcgtccgttcttgagttccttcaccttaagctcagcaaaagcctctgggtcatcagcaaggcccaatgggtcgaagctgccacctgggtagattgggtcagtgacctcaccgagggggccaccagcaatacggtaaccttcaacggcacccattaggataacttgtgtggcccagatggcgaagatgctctgggcgtggatcaggcttgggttgcccaagtagtcgagcccaccc

SEQ ID NO: 5953 - DNA, 361 bp, Glycine max
  Clone ID: jC-gmle01810006h07d1
ggtagcccaaaccattttaaatgaccgggggaagggtcgagtgttggggccaccgtttaaaaagggcctaccactggcgtgcactagtatcttccaatttttacaaaggaaacttaacctaaaatcacatgcaaagcttgaggaaaaagatagctgaaagggggccccattatttagggcgcgccttttaaagggcaaggttttaaacaaactttgttggggaaatatacactcaacactcttcatttaagtttggaattagcataaaacctgggagatgccgatttttctgaaaaagaatgtgctccaaagaatgttgccacctggggacctgggaccagacttaagctacccctaatgg

SEQ ID NO: 5954 - DNA, 406 bp, Glycine max
  Clone ID: jC-gmle01810006h08d1
atacaaaacaaaatattttatatatctttttgactatggacatgagcatgcatccaaaacagggcaaaacccaattttatgatctctttgactatgtacatgagcatgcatccaaaacagtgcaaaacccaattttatgatctaatactttagtacaggcttcctacttggttctctgaagggtacatttccactgaaaacggggctaatgaacttctatgcctcctctattggcatttcgcccataaatacactatacttccctttccgaggtttggaggcaatcaacaaattatttgatgatttataatctggtttgtcaaatgcctttagaaatgatttttgcttcgcagcatctaagagaaccttgaaaatggagtccctagagctgctggatccctgactt

SEQ ID NO: 5955 - DNA, 437 bp, Glycine max
  Clone ID: jC-gmle01810006h09d1
ctcgtataatcatgcttcatttcaaacatttactcggaaaaaaacacagaatcctagctacaacccagccagccatcccatactggcaaatctagccaggccaaaaaaaaaacccgaatgacgcttcacgccctaaacccacgcccagtctacaagcgagcgctctggggctgggtagagccctgcgggtcgaaacggtcggggttcatgaccttggtccacacagcgacaaagtccttgacgaacttgacctgggcgtccgagctgccgtacaccttagcggtggcgcggagctcggggtgcgagccgaggactaggtcggggcggtcggcggaccacttatggccagacttgcggctatggccctcaaaggtctccttgtagctgtcggtcgcgcgccacgagactgaggggtcgaggagggtcacgaagaactc

SEQ ID NO: 5956 - DNA, 525 bp, Glycine max
  Clone ID: jC-gmle01810006h10d1
ggtggaaatatctaaatatttcataagtgtaaagtgctccattacaattaccaaggatcacttcatacttttaacataactctctctttctctcagattgcaaaaacatacaaatcaattagatttcatatatttaccaagaaaatataatatgttgatttggatctcatcacaagagctctgataggaaggccatgcttttttccctcgccccttcctttttgttgcattctgtctttcttgtctccttgtgttctttagctccttttacttttcttttttctcttttgttttctttttagctttctctttctctgattttctcagcgggttccggattctcattccagcgctctaccctctttcagcttcatagaagctaatgaataatatatattcagagggggatcgagatctcaaattaaagtggctggcccaagctgaattccaaatccaaattaggcttctttgggcttgatcctgaaagatttgaggatgaacttccatctgatattctctcatagc

SEQ ID NO: 5957 - DNA, 336 bp, Glycine max
  Clone ID: jC-gmle01810006h11d1
gattaaaaaaaccgacggcataaagaatggctcatctgttaatattgaatgaaatatttacaataagtcaataactgattcggtttacttgttacaagatattcatagaacatggatatgataccttatgtcccatcttaccacaatgttaatgttgttcacatgccaactagaattgtggccaatttttaaagacatggcatgataacaggaacacccctggttgtagacaaaaagatactgggctatgctgctcataatgcttaatcgaagtgagtgcatattaatcgccataggaaacttgatcttgcgcatccgattgctcccaaccccttt

SEQ ID NO: 5958 - DNA, 317 bp, Glycine max
  Clone ID: jC-gmle01810006h12d1
gtaaaagcaaaggatttttcagtctaaggttccaatgaccgacactcacctaaaacacattaaaccaacataccccacttgggcccaattaacgcttattccggggctgaggcactttattcagttttcaacaattgaaattgatggaattaaggttcaattaacccccatattcatcaattttaatttctaaaatagcattactggagaaaaccttgagctaaatttgatgatttaattgagcccctaaacaaggtaaccgtcaattttttgttaaccccaacagccaattagaacaaggtatgaccttaaggaat

SEQ ID NO: 5959 - DNA, 472 bp, Glycine max
  Clone ID: jC-gmle01810007b12a1
acgccctcatgctcggagactcggcatcgcggctcgagataggtctaatagtaaaacagaaactgcgactctgggactagtcaagatcaccgcttcttcttcttcttcttcttcttctacttctactactactactactacttcacctccacaagctgatgctcagaatggatagggctgccactgtcgactaccactaccacaacgacgacgatgcagactgtcctggtgccggcggaggtcgtggtcggcatagacttagaggtcgttgacatgcagatgcaacgctgcctgcgtacagcgatcgctaatgctaaggaaaaggacctgctcctggctgcatgcgaccctgagctctcatctcacgattcacgactcactgcttagtggagagagcgaataccgcatgcacagaggacttatgctgtatgatgctgccgactgtgagacccaggtgatgacctgggaatat

SEQ ID NO: 5960 - DNA, 488 bp, Glycine max
  Clone ID: jC-gmle01810007b12d1
aaaataatagtttcaattcatatatatatattgcaattttagctctcaacatcttccaattcttgttatgcctaagtgaacagatgaataaggatcttaaatatgcctaaaaaaacctcaggaaccaacagaacattataaaaatttccaatgtggtttcactattttgaggattatataaaactgaaactaaatatcatcactttcccctgcaaaagataaacacactttcagttggtagcagtggcataccaagaatgatgttcaacatttgcatccattaacctttagttgtgtatacacaaaataaacttctttggtatgttttggtagcaaaagtggtaaccacttgatacacctacgattcaatgttcacactagaggtctcagaagcttgagctctaacctgaacctgggaaacttccggaggtgggcttttaggttgaacagatgaggatagttcagcctcacttggcacaaacacttga

SEQ ID NO: 5961 - DNA, 393 bp, Glycine max
  Clone ID: jC-gmle01810007c02d1
atagaggaagacggtccaatatgaaaaatatagtaagatcatctcaaacttagcatcttctctttgcacctaagacattgagaatgctaagaatgttacacgcaagttccatcacaacttctagcacttggattagtacaacaaccttcacgaacagaaatatttacttgccaagtttgctttgcctccaattcaagactggaagaaagttcccctctgaatagcatcctcgttagcatttccaagagcagcctcgttcaagtacttgtcagccaattggactctcttgacattctcttgttcttggacaagcatgttaccatacagcaagagcttctccagagtcatcttgggctgctcaaaggttggagggccatcttttgagttcacaag

SEQ ID NO: 5962 - DNA, 513 bp, Glycine max
  Clone ID: jC-gmle01810007c07a1
tgagggtaagcatattcctgtatctaatattagtgcaggggaaaatcatgtagttcaaatacccctaatggcacaggaggaaattctgtcttctagtgcaagtgatttcagaactgcaatggtgagtaaaaatagcaagcctcaagctactgcaatgcatgtgggagctatagaaattatcattgatagtttcgcaagtcctgactgcaacatagttggtgcaatgcttttggttgatacttatcataccaatcctgaaaatgcagttcgtagtatttttgttgcgcctttcagaggcggaaggcccattcgggtggttacatttccgaataccatcgtgcagattgaaccagacatgaattcaaggtttcagcttttgagtaccactaccaatggtgattttgttcaaggaaaagatctcgcaatggttaaagttaatgtagcatgtgctgctgttggcttgacatcaagttacactccaactccattgttggaatctggtttgcaaaaaga

SEQ ID NO: 5963 - DNA, 502 bp, Glycine max
  Clone ID: jC-gmle01810007c12a1
cgggagctcggaatcgaggttggagggtggaggggatcataggaaatcggaagcgattactatactagacagaactagtactaaaaataaagatattactaatataaatataacaagaacaaacacaaagtgaatgtgatcagtcgcggtatttaaaattgaaagtggacgtagacaaatggaaaaggaatggagatgtttgaataataatagttcccgttcatgttcttagagagtgcgaggacatgtcaatgtgaaagtatgctcatgctctatcttcacatgaacatgagaataagatgcagcggctgtgggagtacgtcaacattgctataggcagagagggcaggtccatgcacatgcccaagtacttattgcttcgtgggtggtaattgatcggttataggcatcagccatactaattattcgaaatctagagacgatttccggtataagtcagaagatatggactatgttcatgaattcacttgagacgtgtgca

SEQ ID NO: 5964 - DNA, 392 bp, Glycine max
  Clone ID: jC-gmle01810007d02d1
gagatgaagcacatgtacattcatttttatttttatgaagcttagattgaaacaatacaacttaactatatgttgatgctttgccaagtgattctgcaatcttactggcaatacagtaagatgtagactgaatggttaccatggggttgacaccaactgcactaggctaaacactcgcatcacacacatacaagccttatgcttcccaagtctcaccattctcatcgagtgcaccttcttcttcagaggcacccattctacaacttgacatctgatgtgcataggtaaacactgggcacacttcattacttgaccttggacccctcactattgccacagtgtcaagaaacttctccaatctgtctacgacatgccttacacttgattctttg

SEQ ID NO: 5965 - DNA, 287 bp, Glycine max
  Clone ID: jC-gmle01810007e02d1
cagacagatgatcatgaccagcttccctatttcacagagaattgctttgaaaaaaaaaatgcgctatcaacaattttatttgcctcctattagctgaattttaaacgacacgcacaaaatgtctagcgttaactctaagcacaggtgtgtcatgacgaggtattatagctaacccaacacaagtgtagagtatacatcagggattcatgaaccatgtcagcacgaggctttacaacctacacagtggccttcctccctgaaaatacagttgagtccacgtgttgatt

SEQ ID NO: 5966 - DNA, 346 bp, Glycine max
  Clone ID: jC-gmle01810007e03a1
gctcggaattcggctcgagaaaaaaaaaaacattaaaaatttaaaaaaaaaaaactacaaaagaaccatatagaagaaaaaaaagggcatgccgccagaccagacgagcataacacacccggaacttacttccgaaccggtacctgatggcaccccagatttccctatggagactacttttacagatgggggtcatcatgggcatacctgtgacctgtgcgaaatagcactccgatcacagtggcacacgacctatgacccgggaactctacttgaaagcctgcggaggcttatgagtgagcactctcacattgaggactttgcattcactgccagttttataggc

SEQ ID NO: 5967 - DNA, 390 bp, Glycine max
  Clone ID: jC-gmle01810007e11a1
cctgatacacatatctcagcattgcctaggaaaaaggctaaagacaatgaggcctgaattcaagcaaaagttaagtgccttcaagagcaatcatgaccatgactctgacaaagctcaaagatcatgacatgaagagtcctgataatacatagccaactgacaagtacaaaagtcaacaatctcaagccattcataggatctactacaaagctgaaaactaactgtcttggaggactggctacgtgctcaacactcgaaagtgaaagtgctgctgaagatctaattggctgcggaattaacgattggcggcttatggctaagaaattttatgaacgctctgctaagtcctatgactctgtatcgatgaaacatgtgatatgatatcatgaa

SEQ ID NO: 5968 - DNA, 507 bp, Glycine max
  Clone ID: jC-gmle01810007e12d1
gtcaaacatatagcaccttttattcacaaacttattaagcataaaattcatcatcgcatatccaacattgatacatcaccagaaatagatgctaatatatatgtgtacatcactgcctgaagaaatttgtcaatgatttaccgtccaactctttcgtgaagaaccttgtcataaattcatggaacgtgaagttcctataaagagctggtttctctgttgatgttagctctggtaatggtccaaaatgtttctccctatcacttgggttgaggaaaacggcaatagagactcgtggctcgttagaataattggctaacacccgatgatgagcactcttgtatgtttcattagaaattatctgaaggaaatctccaatgttaataaccaaggcgttaggctgaggcttgacatggatccaaccctgttcagtctcaacctgcaaccccccaatatggtcctgcagcaacaccgtaagagcccctggatccgcatgcgagttaagcccca

SEQ ID NO: 5969 - DNA, 402 bp, Glycine max
  Clone ID: jC-gmle01810007g02d1
ggctatatatttatgaagtcacttttctttctttgtctcttcaataaccaagttacaatttaacaaacactattaacacacaaacatgtaaatgaaagtaaataaacacatttagtacctaagaagttattttgttattacattataagctttactataatcgtgtaatattaaaatcacacaatgaagagcctactaatttatttcatattggcactttacgtagaatgatatgagcaccatactgtggctgagtagtaattgacatagtcggagcatgagcatatgctggagaaagttcaaatgagaaattctgtaaaatcattgaccaagccatctatgcttccaataaggaaaagttttgtccaatgcatattctaggaccccatccaaagggaaaaa

SEQ ID NO: 5970 - DNA, 533 bp, Glycine max
  Clone ID: jC-gmle01810007h11d1
ggacagtaaaacagaaagttgcaatatattcaccaaagacaacagccttgtcctctcaaccaacaaccatgaattcaggtcctagcgaagacggacacacctcatgaaaataaataaaaaattaaagaaaataagtatctttagttcagcagttaagctaaccaacaaaaacaaaccaaagtataatctcacaccaaaatatgtataacattgatccagaaaatgtcttaatattcccatttcttcaactccatgccatcaggagcacttccctctaccttctttgatcccacttctttccagtttgtagacagcactgtcccattagactcaacaaaagactttttcattgccctccttgtatcctcatctgcatcttgatatatttcacggaaaaatttgttcaacgcagcatcgccatcaagcttttcgtctttctcctctttcttgacttgagcttcaatcttgtcccagtctcttggttgttttgaggacgggtaagaaagtctttgaactccagtaactgaagaagc

SEQ ID NO: 5971 - DNA, 462 bp, Glycine max
  Clone ID: jC-gmle01810007h12d1
ctcccggcctgttcttttttttttactcaataacttgcttaattaatttctcaatcggtctaactcggtataatatactgatcggtttataagagagtagcggctactactagctggctagctatatatatataactatgacacaacttcactagtttctttagctctaagatacagtttcaataaattggaaagtttgaaattaagttgaaactgaaactatagctaacactagcagtagtgtccaccgtactggctctgcagggtcatgactgatgctgaggctgaggctgaccccattgcattaaattcaacaaggtcttgttgaagaaaaggtcttcttatagagtcaatactattattatgatctccaacacccaagaaatctcttgttaaaccaagttgttgattcttggtatttgagcttagtgatgagtgcaattgctttcccataattgatgc

SEQ ID NO: 5972 - DNA, 463 bp, Glycine max
  Clone ID: jC-gmle01810008a03d1
aagaataatttttgtatcacgttgaattgatcatgtaaaaaattacaaatgaacatagaagaaacaaaatagaaggaggggaggaggagaagcacacacggagtaagtaagtgacatgaaacaaataatagatatcgtaatggcaacgctcaaaaaactaccagcaaagaacggtggaatgaatggccttaggccttttcccacttgaggggcttgaccacttcccatgtgaagtcagggtcctttctgccaaagtgtccataagcagcagtcttcaagaacctgttattcccaccccttttgagatcaaggttgatggagatcataccgggcctgaaatcaaagttctccttcacaatgttgagaatctccttatcatggatcttcccggggccataggtgtcaacaaagacagacaaaggctcgggcacaccaatggcataagacacttgcacaatgcacc

SEQ ID NO: 5973 - DNA, 620 bp, Glycine max
  unsure at all n locations
  Clone ID: jC-gmle01810008a04d1
agcacaaattcattggccagaaagctgacacaaattttccatatagaaactaaatacactactaatccaggaaacggcacctaactagccaacattccaaaatttcgaaaattcaaaacataaacatagtaaaagactgttccccaatcattgtttctaaaaacacaaaggcaaatcaataattaagttagatttaatcaacttcttccatcttgctaccctcagcatcggcatcagcatcggcgtcctcgagaggaggcatgtcagcatctgcttcaccagcatcttcatcaatgctcagtccaagcttcagcatcctgtgaatcctgttaccgaaagtgttgggatcatcaaggctgaacccagaagttagaagagcagtctcaaagagtaggagaacgagatccttcacagatttgtcattcttgtcagcatcagctcgcttcctcagttcatccatgatggggttctcagggttaatctccatggtcttcttgctcgacatgtatccagccatgctgctgtccctcaatgcctgtgctttcataatccttntcatggtgggctggcacccatattcaccagtcacgagacagcanggagaaatcacaacacgatca

SEQ ID NO: 5974 - DNA, 459 bp, Glycine max
  Clone ID: jC-gmle01810008a07d1
cataatataagttcttccttggtgagtcttcattatattgaattatattatatatcatatgggataaaatgtactacgggaacgcaaataagggggtgaaccatgctcaaagacataccagacccagattccatatcaaccttttctccttttccatctttaccaattttccaatcaaagcactgcaccatagcagcaactgcagtgttcatcaagctgaatgccagtgctgtccctggacaacctctcctcccacctccaaatggaacaaaattgaacttcattctcttaccatcatcactcaaatcctcatgatcttgttcttgcaagaacctttcagggcaaaactcattaggattgtcccaagaatcagggtctctcattatggcatacaaattgattgccactgctgtctttggtggcacatcgaagctgtttattttgcagtgttggcgacac

SEQ ID NO: 5975 - DNA, 549 bp, Glycine max
  unsure at all n locations
  Clone ID: jC-gmle01810008a11d1
acagaaaatgaggatgaatttcaataacaacgatcaaggctacaaaaacatgcacccaagactatcgaagtagattattacaggacagggcatagcacaatcgtttgatgatgatgcagtaaagccaaatctcttgatcaaacagtacatcacttaaattaaatttccttcaagtgaaggacaattaacataaacctcaagcagagagtcataatgtccttccctgcttcttcgcgaaacataaggatgcattatttcatcatctggcagatatctcgctccttcttcagacatctaaactcgacgaatatgtaatacagttgcacaattcttgaaaaaaggccaaatctgatgatgatccaaaacagaagactggaaggaatcttgaagctacactacatgcagttatttacagccatctgtactctcattgccacataagctatccatggcacattntatatataatacatcaagctcccagatatncccaaaagaccaagtcatgtgcaactaaaagctcatattacatggccgcaaacatcaatc

SEQ ID NO: 5976 - DNA, 398 bp, Glycine max
  Clone ID: jC-gmle01810008b03d1
gcaaaaaccggtgcctttaatgaaactttcagccaaaatgggacaacggttttcacttccttaaccaaactttggcccgctgggtttcccaaaccttggcctttaaaaaataccttcccttgacaagatttcattacttccccaattcttcccttggaaacccacgctctctgagaacctccccaaacgggttaattttttggccagcagcagctggtgctccggccctggtgagggccttattgccccctaatgggtttcccaaagcgttggcaactcccggcatttccagaacaaatcttacaggcccccctgcgattacccccggaccgggagaaaccgggctaagccttccctttggccggccaaaacttccatcagatttttgggggaaaggg

SEQ ID NO: 5977 - DNA, 497 bp, Glycine max
  Clone ID: jC-gmle01810008b04d1
aatagaatccattatttatatataacaataaactactatatacacatacaatgtattctagtttagtcccctaaaacacgagcaagttattctgggtgtcgtagcccaacttctccaaattcggctggactgcaaattgaatcataggtggtggtccacaagtcaatgccaaggtatcaggagatgcatttggaatatgctccgtcaggatactttcagtgatgaatcccacactgtattcccacccttctcttatgctttcttgtatcacgtaccacaccttcaacctatcatacttcttagcccactcatcaagctcttccttcagcaatatatcatcctcggttcggttcgcgtaaaccacatgcatctcggtgcagtcctctggatcctttagaatggcttgaaccacttggtaaatgggtgtgattcctgtgccaccagccaacatggctagcctcgtggcaaaccttggtttcccatgaacgaggaagttt

SEQ ID NO: 5978 - DNA, 492 bp, Glycine max
  Clone ID: jC-gmle01810008b05d1
gaaaaacaataaaaattcctttcttttccaactaaaaacaccacaagtacattgcttttcatttgaaagctaacatttcaccaaaacaatactacattgtaattgtaaaaaaatccaatcaaaagataaaagcagagactaccttaatatagttaattccatattttgaagaagatgcatgcacttaaagccagtgtagtagatttaatagtatgagagcttggcaatctgcccttgtccttccttaagaaaaggccttggtatattgggaaattgatgagaaccaaaaacccacacaatagaacttgcaatgccattttctcaccagtcaaagcaactttgcaaaggactaactcttttatagtggctagtaagcaaaacaaatggagtaatgcaagtgttgctagtacagtgaaaaatggagaagaggttccaaactccatgacctcgttcttgtaacgttgggaaacatcatcatcttctacaatctta

SEQ ID NO: 5979 - DNA, 398 bp, Glycine max
  Clone ID: jC-gmle01810008b08d1
atgactctggtgttatttttgattttgcaaattaaattacacaatcacagccgtacatcacacatgagttgggcctcttccaacttaaaagcagaggataacattggcccatgacgcgacacatgcaccacctaataatcataattttacatctttacatacaaaatacaaagactttaaattttaaaaagaagaaaagagataaacagatcatcttaatgaaatgaaaccaaaacccacaaacattggcttgatttttgttgttgttgttgttcccaacttgattaagcatgaaccgtttgattgaatcacttggacttgaagggaatggccctgattacgacctggtggtagagtgctgcaagagctgcaccgatgaatggtcccacccagaagat

SEQ ID NO: 5980 - DNA, 488 bp, Glycine max
  Clone ID: jC-gmle01810008b09d1
aagtaaatgatttttcttgctatcaaaattcactttacaggtaagacaaggggcaccagaaaagctttccccaccaaccaacctaaaccttccaaaccctataaacccaaactaaaaaagaaagaatggacatttctcatcactcaacaatactcttaatagagttcaaggacctcaacaaaagatagggaaggaaaagcttggagctatgaaaaggtattaatggtaacacaaaatagcaggagtaaaaaagagaaggcctgcatatgtttctacctcgtctaactttaatggtcatatcggttacaggtatcctacccttcatatgtcctcaaaccaagcaatcagaagatcatattggcaaattgtccatcttcttacactcaaatgtagccaattgccatgttgtttgtcttcagaaatccaaccatattttggcatttctcaaaaaatttccccagataggactcaattatctaattttagct

SEQ ID NO: 5981 - DNA, 458 bp, Glycine max
  Clone ID: jC-gmle01810008b10d1
gtgaattctctacggggatatatcatcacatgcattccgccaccaaacttttccagtcattatcgtaactcgtctgatgatgcaaagaaaccgtgaaaaggcctttatagccatgaactccgaagaccgcctaaaagaagaagtctatgctcgaaagaagaaagacaaagaagaagactcaggggagcgatccgcttagtcaacctcctcaacggtggggccgtcgtcgccgccagcgccgggggcagcgcctccgggagcgccaccgggcataccgccgggcatgccaccctcaccaccagctccatagaacttcatcatgatggggttggcaacggcctcaagctccttctgctgagactcgtactcgtccttggtggcggtctggttgtcgtccaaccaggtaacggtcttgtcgatctcggccttgagcttctccttgtcaccagcatcaagct

SEQ ID NO: 5982 - DNA, 400 bp, Glycine max
  Clone ID: jC-gmle01810008b11d1
gggggtaatccggtgctaccggtgaacagacgcaaaatttacaccaacaaattcatacaaaaaaatatgaaagtaaagagacacaacatcaaacaattatagcggggggggctttactaaagatcatttttttcctttgaccgaacagattacaattttttttgtcaccatgggattagtggggaacatttatcaattttggtgataactaaactccatcgaaaaacttgattgatattttctccaaaacacattttttttttatccacaagacttaccgagactttgcttaaagagaccgaatccagtaccattcaaactttgttgatgactaaacttattacatggtttggtattttaaataaaaagtataagtgttgcaaagtagtatgatgtaagg

SEQ ID NO: 5983 - DNA, 484 bp, Glycine max
  Clone ID: jC-gmle01810008b12d1
aaccaaaagatgttaattagctatgcaagcaacaagacagtgaagcacctttgatagaaaaggaaggtgaagtgatgattaaagtacttgtgaagctccagtttcagtttgcatagcaaaggaaaatagtgaatacttaacatgcaaatatattttggcatcctgaacatgcaaccttgctccggatacaacccaatgtccgggagtatctaccggtcctcgcataatttccgttgtgtcaacaaaccttagaagcttaggcgtgcgcactggtgcaaggcgtgcagcagaatatatactggaaccaatggttacatcacccggctttggatgatccctttgttccgctttggaaataaatgttgttaagatgccccaagtcttgatgctgaactggccaagactgggggattgatcccactcaggtgccttccgtaaagtgacaccaatgactttagagaaacatagccttaaaaagagacac

SEQ ID NO: 5984 - DNA, 533 bp, Glycine max
  Clone ID: jC-gmle01810008c02d1
atcccaaattcaggtcatcatacattaattaagaaagaatataataaaccaagaagaagaaaatagaggctgcattcttggctaaattgttcctttcttactaagcagtttgctttgtctagaagataacaaagaaacagttactcatcttagatgatgggaatggggaaaggcataattactacccatgttcaaagtgacgtactagtaatagaactatagaatgatagattccaacccatgtagttaagaaaacatttgggtgtggatctcatcaataagcctaaaaattacacaaacaattacataaactgcaatgtaagttaccatgcacctttaaaaatataaggtaattagcttctgctgctgctcctcagcatctccaagtagaaactgagatgagttctttcctttgccagcatagaacaagtgatgaaggctttctctccacatgaaatcccctcacaggtgccctctgaactagacactcagcttgagcttctgtgaagttgctaaatgtgaatggagagaat

SEQ ID NO: 5985 - DNA, 389 bp, Glycine max
  Clone ID: jC-gmle01810008c04d1
attcaacatagctttatttatataaacggcatgcatatgatttttatatataacataatggccagtttttttaaccaggaatttatttagtacaagcacaggggggcttttggtatactaggtagcctgcctaataaaaagccccatgataacacgttataggggttcttccatttggccaatttcaataccttggaaagtagtaacgatcgttgtcataagcaactttcttttaatagacaacgcgcctttaaggaacttgttcatactccaccaccttgactttttcatgagtctcagggggggggtgatgcatgtggttgtggcgggatcctccaatcacatcctcctaataaacaatcttctcgttgaggacacggtgagcatta

SEQ ID NO: 5986 - DNA, 508 bp, Glycine max
  Clone ID: jC-gmle01810008c05d1
acgttgtgtaacttagagattaacttcatctcatggagataaataacccatatatacacttagtgcaatgtacccaagtaacattctgacataaaatggtttttcgacgcgagggggataatgtcccaatttaagcaataatctcttaatctactagattttcttttctgaatactttctgcaagcccgcattacgagtgaaccagcctgattgggttttctgtcaattttctccaaaccatcctcccacaatgaatcaaggtcaagattgcaaccaaataaagaagaggaatgccaacagcacaaccgccaggggccaaattcaccagagtcaccattccagcgacaacgtgaacaatgggaacaaaatattgatccactttgttcccctctgagtacccattaaatgcgatgaccattgagaaagtgtggattgtgacaaatgcaagagcaataatcgcagaaagaaggaaaaatggaacttttgaacacctgtcaacgaaatatg

SEQ ID NO: 5987 - DNA, 557 bp, Glycine max
  Clone ID: jC-gmle01810008c07d1
aaagcattgaataaggattgaagtattaaaaaaaataaaactttatgatttattggtttacatagttggataaggaaaaagataacagaacatatctgtgtaagcctactaagtaatctcaaaagcaaataaaaattatggaacatgaaaatgagaaacacatccaaatacagatgccaaaggtagaaaccccaattctcatcaagggaaggctatcccagggacaattaacttggtaaatgagatgaatcaacacggaagcacccctcaaagctatgtcagattgtagataccagcaaatcttctactgagtcaatctaaaagcacttcaccaaaccatcccataacagcacaattgtacacaaacaccccaacatgctccttcacaccaagtacttgccaatctatggttccattcctgactcctgtcctaggacaccatgaattcagtacaacagcttcaccttctggactcctttgtccactcacaaccagaagtttctctccacaagccttgaaagccaggccccatccattagaagaatcgcacgtactgg

SEQ ID NO: 5988 - DNA, 523 bp, Glycine max
  Clone ID: jC-gmle01810008c08d1
aaattaaagttttggacaatattcgattgctaggaatgtaattaacatccgacttgaaggtatggtctctaatgtaaaaacaataaatacaactataacaagctaccttttctccacaagcttgcaagtttaaaattatttaagatccttgagactagaactaaaaactctaaatatttcaccatgtcagatatttacctactttatgacagataaatctgcaggcacaataaatagccacaaatgatagaaatttataattcaggtattcaatgctcagaaaggctttgctgattgaacagttccaccatcttcaagtccagtttctaaattccttatatcatccaacttgtttccagatcctagctcagctgctatggaggatgcctgattctccgttttgttatgctgcaaaacctgcaaaagctcattcactctgccagtttcagtacagtctgcaggttatggagcagacgtcgagctttcctgaggatgagactgtacagcttgcaaaggcttaatc

SEQ ID NO: 5989 - DNA, 480 bp, Glycine max
  Clone ID: jC-gmle01810008c09d1
gactataaagtaaagcaagtgcctttctcataaagtttagtaaacatgtgtttgttgagctgaacttaatagaagtggaaataggtatgtgtagtaagaaaattaataagggacacgaacaccttggtacctgagaatttccccaatgagctcccctttgccagaaccgacgtacctgccttcaatgttgccatctctgatgaagagaaaggtagggacctggatgacttccatgtccttcaagaactgcatgcagctctcgttctagtccccgttcattcgagcgaacactaccgagtacatctgcctcgagagcttaaccactgtaggataaaccttaacgcagggcccacaatgtttgagacccacattgagcacgatgagcttgagatccagcttgaggtcctctatgagcttctgcacgtcctccacgttgtgcagttgcaccacaccagagtggatgtacccgagtatagcaca

SEQ ID NO: 5990 - DNA, 524 bp, Glycine max
  Clone ID: jC-gmle01810008d03d1
caactagatacagtattgagggaatatattgatttctgaagtgaaaatatgccaagccaaatcatggaagaccaaattccaggacattgaacatggtgtcctataaagatttgcatgataaaaattgaaataccactgtcaaaatttcctgaaacaagctaatgtgacaacaccaagcacagctgctcagcatcactaacaaatgattttgtaaaattgcatttaattgacgcacctacataattcatgttacaaagacacagctccactacaatatacaacggccaagagggcaaatcatgaggtgaaataattgcaagtgtgataaccggacagcaactaatcctccgacgctctgcaacgtcacagttccatagtttgcaggcgataatagcttcgattgattattatacatatttctcatctatacccacccgtattgaaaattatgaccacgacatgcttgtatgccactgcatcaatgggaataatgtctctgactatataaggaattttttctttta

SEQ ID NO: 5991 - DNA, 445 bp, Glycine max
  Clone ID: jC-gmle01810008d04d1
accatcaaaacaaaaaacagtacttattaaaaacaaacagcaacgaaaatgttaccggcgatcaagaacccagttttgaaggctacgggtacatgaaatcgggggacacttcaaaatttaactggtaaaacaaacacctaagactctgcaaagataaactactgtaaaggaacaagtttttttgaaaccacgttgatgatcacatgtgctagcaaaattgccaaaatgcaatcacttctttttgggggtagcctttgggaccttggctccggtggggtcttttttcttaacactcttgatgactccaacagtttcggactgacgcatgtccctcacagcaaaacgaccaaggggaggatacttatagaaagtttcaaccaccatgggcttgtgtggaaccatcttaaccataccaggatcaccatttttcaaaaatttgggctcc

SEQ ID NO: 5992 - DNA, 502 bp, Glycine max
  Clone ID: jC-gmle01810008d05d1
aaatcgtgctataataaatgccaaatttacgcaacatattgttaactataataattgtataaagagaacagaaaatatggttgcatccataactatacaggaccataaatggttatttaagaaacaaataacccaaacttgagatatttggcttagatgagagggaagctaacgagaaaaatagctctacttccagctgaagcctttgcttaccacctcacaagaatttttcaatgcttgaggtcaatgttgtcttgggcacagctcctataactgtatctttcttctcaccattcttgaaaataatgacagttgggatacttcgtatcccgtacttagtagcagttgaagggctctcatcagtattgagtttgtagcactttagcttaccagtatattcttttgccagctcgtcaattatcgggtggatcatacggcagggaccacaccatggagcccagaattcaaccagtacaggagactcggattcaatcacaagtga

SEQ ID NO: 5993 - DNA, 517 bp, Glycine max
  unsure at all n locations
  Clone ID: jC-gmle01810008d06d1
aaaccataaacagtttataaaacttcgttataaattaaatgcaacttaaaacatccctcagcagcaaaggaaatggactaaaaccctatagctgcttgtgaaattcgaaatatctcagactcttcttaccatcaaaacaaaaaacagtactcatcaaaaacaaacagcaatgaaaattgaccaccgccgatcaagaacctagttttgaaagttacggctacatgaaatcggcagaaacttaaaaatataacttaaacaaaacacctaagactctgcaaggataaaactactataaaggagtaaccacgatgatgatcacatgtgctagcaaaattgcccaaatgcaatcacttcttcttggcagcggccttggtgaccttggctccggtggggtctttcttctcaacactcttgatgactccgacagccacagtttgacgcatgtccctcacagcanaacgaccaaggggaggatactcagagaaagtttcaccaccatgggctggttggaatcatc

SEQ ID NO: 5994 - DNA, 531 bp, Glycine max
  Clone ID: jC-gmle01810008d07d1
caagaaatgagattgatcattgatagtatcattcttatttgtgatcaataggaaaaaatgatctacaattttttgattttgtttttagcaatgtctaagaagtatgtatgttcttcaatttaccgaattgcaattgtatatttattatgcttttatcaattcttacgtatctacatatctatcatatttttagaataatcataccactattaatttataggataggggataagagataagctgaaatcatccaatccttctgaagttcacttggtacaccttttcatccttcacattgtacctaacgataaacctcacaaataaaaattcagctattgagaaagtgtcaattcgacgtcaattaaatcaaaagttacatttagcactagttcaaatttgaacttagattcatgggtaggtacagtttctccgagccaatcaaccatatctgttacttcttggaaacatatatacaaggtcaatttccacgttgcctttgataatttggtgattctctggtggtcatccttg

SEQ ID NO: 5995 - DNA, 481 bp, Glycine max
  Clone ID: jC-gmle01810008d08d1
gcaaactgaaaaagggatttcttactaaagcaaactcaaacaagaacaacttccactcatttggcatctaccgtagtagaacaggatcaaaagcagctctctgatagaacacacgtatgtattatattgaacatcttgcacagtggttcatttctcacagctattgcaacttaaaatacttgcaaagcttctgcaaattccaaactttctttttctcccttctttatggatatgacaaagtgatcagatcatgaaacaataatcaatccattgaatttgaatctgatttttggtttggatcgatgccaccattcttcatcttaggaagggacaacaaataggccaaagcctactaattaagcgcttaaaactgcattagtggttggtttaagtgtgatgttagtaacatcagcttgattattaaagggtgttctttgtacgaagaagcatgccccaataacaatgtagcacagcaggagaa

SEQ ID NO: 5996 - DNA, 464 bp, Glycine max
  unsure at all n locations
  Clone ID: jC-gmle01810008d09d1
cctcaatgaattaaatatataaaattagggtttactcctttatgtatatggctatgaccacatgatcaatatggctgcatggcatatagaaactgtaactggagactcgttcaaagaccacaagcaatcctgtacaatggttttgcttctatgtgataagtgggagaatgcccacccaagagtgtaaagacatgtacttatagattgaacccacagaaaaggaaattattaatgctagacatttagatgcttgtcatgtcagtttctattttgacctcacagggaatgaatgtgttttatcttctgaatagcttgcttaacttttgtagatggctcttcgtacaaaatgttagggttatcaaactcagatgccaagcttcggtccccaagaagagcacggaatgtgtctgccacggaatatgaaagagactntcagatatatccttcctccaaaaaaacacaca

SEQ ID NO: 5997 - DNA, 455 bp, Glycine max
  Clone ID: jC-gmle01810008d10d1
gttatcccatttcagaaatttgttgtccaattgatgtggcccaactggggctgctgatatgcgccaacctgtgccccaggagcagctgcagccaccccaactccgacgttgttgccaatggctggtggtcctaaatggtgaggactagccatggctgctggctgtggaggagtgtggtacatgccggggaactgcatgtgagaagactgagctgcagctgcattaaaggaagcatgacctgtgtgtgatggcatgtaagctgcatgaggtgtttgccctggcatgttatagtatggagtagattgcatgccaggaaggtcccttggattctgtaaccagatttctgatgtctcagcctgaggatttgggacataaagattatctttgtacttgactcgagatgaatcctctaaagccgttgcacccccaaccacaccaggaagaatcattgcata

SEQ ID NO: 5998 - DNA, 457 bp, Glycine max
  Clone ID: jC-gmle01810008d11d1
actaaaagaaactaatgctgagtattttttacatgaatcaaatccattttttcacattactgtaacagataggcctaaaatacattcctaaaatccaatagcagcagcaattatacgaattactttttttttttttcctgtgattggatgaaacttaagagcaggggattatcatcattgtcacatatgatgaagcaatattcaacaagtgcaagaactgtatgaataggaataagagtttatgtacaacgggaaatgaaaatagttgtcatttgaacacattatgctgtggcagctgcttgttcttcaacagcctgtgatgctgggagaagggtgcaaatgaggttgcggtcaccgtacacattatcaacacgtcctgtggtaggccagaactttgcagtacggagccaaggagctgggaaggctgcatattccctggagtatggttttggccatg

SEQ ID NO: 5999 - DNA, 465 bp, Glycine max
  Clone ID: jC-gmle01810008e03d1
tcgggcttcccttttttttttttttattttaaagtttcacacacttgacacatgagttctacaattaaaagacgtgtggcatacacacaagtcctgaatgcctacctgtcagcaggctaatccgtctggtacaggccgaacgcaaagaggtggtcgttgagcaggctgaggttgtatggcgtgacgtacatgtttgtgtcggtcagtccgataaacatggtgccgttgacgatgccgtcgttggtgttgttgaaaacaacgccaccgggctggatggttgtgccggtgttgttgccagtcacgttgagcggggtgtaggtgacgttgagctggctgatccacgcgacgtacgccggggcggtggtgttgatggcgccgccaatggacgagttgtaggcaccgttggcggaaaggttgccgcgcggcgacttccaggacagctggacctggcggacgggctgggtg

SEQ ID NO: 6000 - DNA, 549 bp, Glycine max
  Clone ID: jC-gmle01810008e04d1
aataaaattatttgctctttattacccggatcaagacatcaaatgagatataagtggaaaataaaatctatagatcacctaactaaattgttttatttaaatagaactgctactgcagagttcgtcacaacatttccatattctattaagatattatcacccagccaaaacaaatggctacatgccaaccatcttcgatcctaccgacgctctaacactggaagagaccgagaattggtacatggcaggaatgcaatattcttcagtaagcaaagataactccttagcagaagtgattggtacttgagtctgtatcgcaaaaatcaggttgaaacaacacgtctatatacatattgaaccaccgaactttgatcttcattctcaggatcacttgccaagcaaagcaaatctgtcaaatccaatcgacactcaaggcctctaagatagcgtcccaaaagcatgcacattcaagtaatcggttgactgccagaagcatcattctcaggatcacttgtcaagggaagcaaatctgtcaaatccaatcgacac

SEQ ID NO: 6001 - DNA, 411 bp, Glycine max
  Clone ID: jC-gmle01810008e05d1
gtacataactatttatcgtaggctacaatgatcgcactctatagtgatcgatgatggccagagatccagtgacgagcttgttctcgagtcgggaaccgtcagggatggtgatcttgttaccgccggtagcaatgatgatgacggtaccggcgaaggtacagttcttgccgatatgcacgtctccgctgacggttcaagtggtcgggctcgacactgttgagacctcccttgacacgacgctcaaagccggagaccttcttgaactggtcgccgagcttgatgacgggggtacccgagaactgcctggccttgttcatggtcaactgtccgtgctacatagtgtggagaccagacttgatcaagagcacgtcggatcacgacttgacgggcaagaatcgggatcgggggacg

SEQ ID NO: 6002 - DNA, 419 bp, Glycine max
  Clone ID: jC-gmle01810008e09d1
gaaatgaatttttccctttgagatattggttttttttttaaagttgattgtgaacaaaccaaattcggtttggtttacattttacaagcaattttaattactacgtggtgtgattgcgagggagagagcgtaaaaacggtttgatatgcgtggttttggtgtctgagctcgaaaggcaagacttggagttcgccacaaaaatcttgagcagatcggagcacatttgtctggacgtgcggcgcacaatggctctgcttgagcaacagaatcttggacaagccattgttatgcggaccggctgctgagccttgcgatcgcggaacaggtaacacacgctccacagcgttgtcaccgcgtgcttcgtagccgcgctcgataccttaagaaccttgattagcaacggcgtgacacacgccgtc

SEQ ID NO: 6003 - DNA, 314 bp, Glycine max
  Clone ID: jC-gmle01810008f03d1
cttgaaactatattaattactgatatactcaaggtttagattttttctacacacgaactatttcaaaaactaacagagcaaacttgatggtacattcgcctgcactgatatgaactgtcgcgtaacactgatacaacgcatgtatggaacgggccgaatattgaaagttctaatgaaacttggttgaacgttttcaagctctaatgttagagtcactagcgctgaataatatctcatcacatgtcacgaccacgattgtgatccatgtaccacagaagacggaccaccttttgatgaaattacaagtgatagac

SEQ ID NO: 6004 - DNA, 568 bp, Glycine max
  Clone ID: jC-gmle01810008f04d1
atatgatgtaatttatcatataattctgctgctacatagggctatttcatataagttcaaaatgacccatggacacgaaatgtgtattttcactgcaacattaatggccttattccaatgattactgccatagactcaaaaattccccctaccattctggcagctgagtgacaccaaatcccaggtaactagatatattactctgaactgcctgccttgccctcctcattattattcatggccttctttgctaactcataacctgcaaagctcatagcacctagaggagcaatccaaaagaacctgggtactgctcctttgaacaagccaaggggtccctcatgttttagtatggagaaggctattaaggtcattgacacagatcggtcctgtgcagtcatcattctagttttcatgacatcaaaccgcgttgtaacaacagccgtcaagctcaccagttaaagctccctcagtcattgtttccagggaccgatatcccgctctagtatccgtcttgcaccttttaaattaacctaaagcccatgccgctacctaaatggaaccttac

SEQ ID NO: 6005 - DNA, 542 bp, Glycine max
  Clone ID: jC-gmle01810008f05d1
ggaatgaaaggatgtacactgcaactatctgtacagattaattcagtcattgtactaataaggaaagtgaaaaaaggatgagaaaaaatggtaatgctcaaggtagaggagaacaggaaagagccctcttgctactttattagataaattattaaatggcatcaagattgctttctgacaatcttgacactgctatagaagcgcttgagatctttcatagccttttcctcaatttgaatagaacgaattgaggacggtgtttccacctcaggcttgaaccagcgactcacaccggttgtttcggacggcgagccttgacaggtagggatggaaaatccagctgttgtagtctttggactgtgcgaaaggctttgttgtttctttccctgttgcatttggatgtgccttaacgatggccgagaaggttggggaggagttccggaagcagcccaaggaggggtgctgatttctccatcagatacctgggaacttcgagactatgtaacaggtatagtgctggaaggaagaaatgaactgaactt

SEQ ID NO: 6006 - DNA, 502 bp, Glycine max
  Clone ID: jC-gmle01810008f06d1
aagtggacactgtaactcaaaattatagaggaagacggtccaatatgaaaaatatagtaagatcatctcaaacttagcatcttctctttgcacctaagacattgagaatgctaagaatgttacacgcaagttccatcacaacttctagcacttggattagtacaacaaccttcacgaacagaaatatttacttgccaagtttgctttgcctccaattcaagactggaagaaagttcccctctgaatagcatcctcgttagcatttccaagagcagcctagttcaagtacttgtcagccaattggactctcttgacattctcttgttcttggacaagcatgttaccatacagcaagagcttctccagagtcattttgggctgatcaaaggttggaggtccatcttttgagttcacaagcttcttcccaacactgtcaacaccaacaccagaaatccacttcctcacttcatcagtatatactctggccctcagtgcaccaaag

SEQ ID NO: 6007 - DNA, 337 bp, Glycine max
  Clone ID: jC-gmle01810008f07d1
ataacttgaaaaaataacatcaggaaaatgtttaacagacaatactcacatcaaccaaatctagggcacttttctcaatcataacccccctgaaagtgacgaacactgaaaacaaggcagcgctaatattcacatttaaacccatcggccaccctcccgaacatgcacttagagccaacgacgatgcgttatccgcaacagatattggcaatcaacccttgtcttttctcaggcaaaggccatgttacacgggtccactgataacaaccgcctcatgagaaaaaaggggggggaaaaccactgagtcatagagggggacaccccgacatgtcacggg

SEQ ID NO: 6008 - DNA, 414 bp, Glycine max
  Clone ID: jC-gmle01810008f08d1
attgctggatgtatggaatgaggcattaattgtgtactatatgataattttgtacgtaattagctaagagggaagtacaaaagagactaattttaatgagctgttgattatactcaccatttttatgtcaattcctcaaatcaagagttaatatagataaactatactgccaagtcatgctgaagctgtgctcttatcaaattcctgtaaggcaagtgtagtccttaaccgcccaatagagagtactgatgaactgtgaggggaattttaatttggtcccttggatagttcagtgaactttgcgagggtggcggtaacgctggactcatcccatgttgctgcaaccttggcgttaaagacaccccgctctggttggtgtccccatagtgatcactacttccgtaagaaaccatg

SEQ ID NO: 6009 - DNA, 428 bp, Glycine max
  Clone ID: jC-gmle01810008f10a1
gaggcttcagtgataccattgtagttaggatgaaggtcttgaggttgaaaactttactggaagcggggctattgctggggcctattcaagggcatacaaagaaaccttatacactgaccaatgtaaatggtataactgttggaatcggcgcttagctgtcatggcttgggatgagacgcattccaaggcttgatcaaaccataatacatactggctgttcacaattaaacagactgcttggtacgggaggtatacagatatcacatgcaagttggaggacctaatatgatggcaactcacggagtcctacatcttacagtttacgatgagcttagaagtatttcttctatcttagagtggcttagctacatttcttcttatgtaggtggtgcacttcccattgtaaaatcgctagatcctccaaaaga

SEQ ID NO: 6010 - DNA, 378 bp, Glycine max
  Clone ID: jC-gmle01810008f10d1
ggtaaatcataaccccataagggcattacatcataggagtttctgagaactggccaaaaaaggaccaatacgtgactaaaaatccacaggcttatttcactttctgaatcttaactaagtaatccaaccctgacccaatggaaccagaagtatgttgcccaccaccttctttgcgacaataaaaaaagataaagctttattttcctcagtagccggggtgcttttcataagctggggagcattggctgactataacagctggaaacatttgtaaaccactggatttacctgttattataacgtgactacgccggacatgtgtatccacttcactaacggtctccgatacattgtccagacccctattgtgtaaaccag

SEQ ID NO: 6011 - DNA, 489 bp, Glycine max
  Clone ID: jC-gmle01810008f11d1
aatagaatccattatttatatataacaattaactactatatacacatacaatgtattctagtttaggcccctaaaacacgagcaagttattctgggtgtcgtagcccaacttttccaaattcggctggactgcaaattgaatcataggtggtggtccacaagtcaatgccaaggtatcaggagatgcatttggaatatgctccgtcaggatactttcagtgatgaatcccacactgtattcccacccttctcttatgctttcttggatcacgtaccacaccttcaacctatcatacttcttagcccactcatcaagctcttccttcagcaatatatcatcctcggttcggttcgcgtaaaccacatgcatctcggtgcagtcctctggatcctttagaatggcttgaaccacttggtaaatgggtgtgatttctgtgccaccagccaacatggctagcctcgtggcaaaccttggtttcccatgaacga

SEQ ID NO: 6012 - DNA, 361 bp, Glycine max
  Clone ID: jC-gmle01810008g03d1
ggctgaaaattgcttatatatcatacacttctggatagaggtgaaaccgaaaagcttcgtaacccaatggggcaaccaggactgaggaaaaatgttgaggaaccgttcgaccctaatagcctacgctataccttcacgcaatgctccctcatacttccacactccgctacttgatcaacgactttgaattgaggctatcatacgtggatatatgatatttgccatatcccaacgcctacattaatacaacccatctgatgcacttctcttgcaaaggctggtacacttgattcaagcacatgaactaaccgttcaatcgtctgcatttgaccttaaggagcaatcggtcttaacccatcag

SEQ ID NO: 6013 - DNA, 439 bp, Glycine max
  Clone ID: jC-gmle01810008g04d1
agaattgattttacttgctatcaaaatccacggtataggttatactaggggcacctcaaaagcttttcccaccaaccaacctaaaccttccaaaccctataaacccaaactaacaaagaaagaatggtcattaaggatcgctaggcaactgctttaatagagttcaaggaccccttcaaaagatagggaaggaaaagcttggagctatgaaaaggtattaatggttacacataatattccgagtaaaaaagagaaggcccgcataagagtctacctcatactactttaatggtcatataggttacaggtatcctacccttcatatgtcctcaaaccaagctattagatgatcatattggcaaattgttcattttcttacactcaatgtagcccattgacatgttgtttgtcttcaaaatatccaccatattttggcttt

SEQ ID NO: 6014 - DNA, 366 bp, Glycine max
  Clone ID: jC-gmle01810008g07d1
attaaagataaggcaagcgtcatgatacataatacctcaaaacatcaagaacagtcctcaagcgagcagcaattacatcgatctttcacgtgatcgcctcaaaaaggcagagaaatgcaaacacatacaacacaggaccttatgggtcaagcacagcacaatactatgtgacttaaacggtgacacaattgaccaatgagtcttaaagcactacggacatgctgcaggtgtccataaatcaagagccttgcgagagtataaacacacattcttgggaaccagcggccaccacagtagggagtgcgcttgagctggctgcatcaagttcttgggcactgacaacgttgacatcctccaattgaccac

SEQ ID NO: 6015 - DNA, 482 bp, Glycine max
  Clone ID: jC-gmle01810008g08d1
aatatattctgagtgcatctcattccttgaacatctgtctccttccaatactgctacagcgtctaaatcaaagtacattttaataaattcatatatttatttggtttcactaaaggcaagctatcaatactaaataaaacatcaaggtttaccataaaactattcaccctatccaatcctaaaaataacgaaagactaccttattagctctttctaaagaaacattatgaaccgtaagctacaaccatttttttaggtttaagattacagacattctgtatgaaagacgatcagtataataacataactatcttctacatctcttatagctcagtccttaatataaccacaggtttaaatgagaaccactagacattgttaacagatctttcggatggtagggatacttgatctatgtgaaggtcaccactgctgctagaaccagtccctttgcatttataccacttgtcacacaatataaa

SEQ ID NO: 6016 - DNA, 520 bp, Glycine max
  Clone ID: jC-gmle01810008g11d1
gtaaaaaataaaaataatttagttttagctattcaaacttttagtacaagaaatctaataatcaaatattacattttacggaagacgtagagatgagttgagatgcttatggggcattgcacagccttcttactacccaaagagctaaacaaaatctcaggacaggattcttatacacgcattggtcactccacaaaacttatgcagtttacaaacaaattacatatttcttggcttttttctcaacgccattgatggccattacgtccagttggtgagccaggttctataggaacaaaacccctgccaccaaaaacaggacgcatgaatgcatcattaaacttacgccacaagcgattaacagtgtgtgttggagtggaaagtaaagcacggatgctgcttggacgatgaatatcatggccatcaatatcgactgcagaatcttgggctctcccaaaaaggggacagtgactgatcttggacttggagtagatggatctgtggatatcgcgatgcttga

SEQ ID NO: 6017 - DNA, 368 bp, Glycine max
  Clone ID: jC-gmle01810008g12d1
agttctaatccattaattttcattgaagggggaaaacagaacccaaaaatgcgggatgatgaaatttaataaagcaaaaacaaatgggaatggtttttaaatacaaacaaactaaggggggtggcgggtacaaatgcttagcaaatttatcacacttagaagcctgggggcttgtaagcatttgaatctgaagtactgtacttggcaaactttgtcttattccattatccggcttaagccgttggggtgttcaataattagccttttgaagttcacttaacaccggctaacgtttagtgcaaccaaactttggcagttttcacataggttcagtagtgttcttcccctaatcctggcgacctggtgtg

SEQ ID NO: 6018 - DNA, 481 bp, Glycine max
  Clone ID: jC-gmle01810008h05d1
ggcagaaacttattccatttataatcctagcataacatcttcaatagacaattcacagaatttcctatacagacaaatgacagccaaacataatgcaaagttcctgcacaggatttaaaacagaaaagatgaatacactattatgatgtggcaataatggcatggtttataacacataattttcagaccatctatgagctatataacgaagcaacactgagactatgaactctgcagattatcaaccccttccattcgctgcaagagttccaatatgcttccagcttttctcttagctctatcagttccattttctgacaactcctgcagtgctgcttctgcaccatgttctttcgctagttttaattgcagtggatctccggtgcatagtgaccacaagacagcagcagcattctctcgattgcgtggagagccggttcgtataaccttaacaagaatatgaattggcttggcctgaccg

SEQ ID NO: 6019 - DNA, 556 bp, Glycine max
  Clone ID: jC-gmle01810008h06d1
gattcaaatgaccaacatgtgagaccatattcatttattaattagatgccaatggagagctggcataacaggctaccgaagctaaactaagaccctggagccatgacgataaatgacatgcaatatatacaatgatttcagcgaaaaatgaaactacataatgaaaacccttaaatttctgtgctgaggatagtgcacagattgcggcgacctttgaaaaaggtccataatgtaactttgaagatcatcgttagagtactggacatacttgtaagaaatgctagatgagtctctaccaatgtatgaaatgtgtgcaagatccagtttttgagacactgaagattgcagatcctcgcgaagtcgagggtctaggatgaaccaccctgtctggatcctgtaaacgttaccaaaggcagcgctgagctctgtgcatatttgctccaaagcatttgagagacacaatctgacacactaccctccgtgagcatggacagctcagagccccaagagatcctctcgtgacaccttgcggcgtgctgatgcatcggcatgtgct

SEQ ID NO: 6020 - DNA, 570 bp, Glycine max
  unsure at all n locations
  Clone ID: jC-gmle01810008h08d1
aaaataacacacacttcacacatcattacgacaattaaaagaggtgtggaaattttcaaataggcagagcatactcaacaagagggtcatgcctaatttcctttattgaattaaacaaacgaacaagtgaaagaaaacacaaattccagatcatgcagaggattccgcattttcagaagatctggcagtagcctgtggaacagaaaaagctggcataagagtattaccagcaatttcaaaatcttgagaaattcccaagagaatatcgaaaactgttgactgtttgggattgtcaattaggaaactcaaatgccatgaagtttgatttgcccactcagaactccacatttcaaaaccattattaggaccacatacctctattgggaagatcaattcccaggaatgtggttctgattttgtccacttacatgcatcaaaatgctctgtactgttgctgtttgttaaaaacacttgtaccaatgaggcccaatcactccttttgactgctgctttcccagacttacaatcttaaccattaaacaagctttcttncaagcagcaacttttaac

SEQ ID NO: 6021 - DNA, 349 bp, Glycine max
  Clone ID: jC-gmle01810008h10a1
gacattttgagctctggcttataatttgaagtaaaagggcttattcaatttcggccataaattggagtggagataatagaatctgcagacctaaatccctcggactatataaaatcctggatggcgcatgttcgggcttaaaaaccagagattcacattgttatatgtgaagacaggcttgatatactaaaatatcacgtgggatcaatatgcgatgcccattctatatgatacaaatgaagctccagcttaaatcaacgtctcaaccatggacttattggactacatgctgattctgatcactctcccgaattaacactaattgatgtacattactcgtttaagttct

SEQ ID NO: 6022 - DNA, 378 bp, Glycine max
  Clone ID: jC-gmle01810008h11d1
gtatgcgattttggaggcttgttgaatatatagcaaatacaaccgcttacgattgatagtaacccactttataggggataggctaaacaaaacggctcgctaataaatcaggtattagaagccttaattacaaaggcatctatacattcaaacgtaacggtcaggataggctggattcttacatttaaaggcttgggacatggctgtaaaaatctgccggaggtctgtaccatggctcaggaaatcagatcttgtccaataggtggccacctgaccatgggatgacctacaggactatttagttttttcaattctcgggctatatggacgctttatacaatcaatggttgccaattgtgtttcctacttctcaacatg

SEQ ID NO: 6023 - DNA, 404 bp, Glycine max
  Clone ID: jC-gmle01810008h12d1
atccaaaaagaattcaaagaatcaattgatgtgtggatctttttacagcaaaaaattttgtattaataaattgacctatccaaatattaaaaattaagaataaatgaatctagttgcccttcatcacaaaataaaatggcttcttaagatgcttgaaatccaatgatgatgagtcacgtgcactccgctttgttcctgtaaccattcaacagtttcaacaaccgggtaacattctccttggggctctcatgacacccaacctgtagaataaccaaaagctttttaaaaaccccaacttgaaatgcctcaaccagaaccccttcgtacctcttgtcacaaaaattccttattatagacacagcataacttgaagccaatggagacaccctcaaaagcttcttaac

SEQ ID NO: 6024 - DNA, 496 bp, Glycine max
  Clone ID: jC-gmle01810009a02d1
aactcaaaattatagaggaagacagtccaatatgaaaaatatagtaaaatcatctcaaacttggcatcttctctttgcacctaagacattgagaattctaagaatgttacacgcaagtcccatcacaacttctagcacttggatcagcacaaccttcaggaacagaaatatttacttgccaagtttgctttgcctccaattcaagattggaagaaagttcccctgttaatagcatcctcgttagcatttccaagtgcagcctcgttcaagtacttgtcagccaattggactctcttgacattctcttgttcttggacaagcatgttaccatacgtcaagagcttctccagagtcatcttgggctgctcaaaggttggaggtccatcttttgagttcacaagcttcttcccaatgccgtcaacaccaacaccagaaatccacttcctcacttcgtcatcatatactctggccctcagtgcaccaaagaaatcaatgg

SEQ ID NO: 6025 - DNA, 472 bp, Glycine max
  Clone ID: jC-gmle01810009a05d1
gagactaaaacaattttattactgagccaatataatgtaccatcgaaggtttgtccagtagctaataccataaaatattgtaatcaacttacattagcatgatttggaaaatatagtcagctgaatcacagcaattttttagcctaaacgataggtcaattagagtgatgctaatgagattctagcattcaccaaattgctcatcatatatactatacaccaaattttgcagttagaattcagcatccagcggcttctaatgctgcactccagtgagaatgagctattcacaaaatatcttgacaacgcaaaaaatgaccttgatttcttgtaactttaaaaaaggaggacaaaaaaaacaagcatttaggcgggcaaaataaaaaaccagcacaaaatagtgtatagccaagttgaatgcagcatcttgcagatcattccatatagatcaatgtccataatagtcacccat

SEQ ID NO: 6026 - DNA, 481 bp, Glycine max
  Clone ID: jC-gmle01810009a07d1
ctggggacccaaatttctaatatataaaaatataatggttctcatacagatttttctgctacacaggtgtagttacattagtgaaaatggagttaaacacaagggaactgcaaaagggagcagaagattgcattgcatgtaggcatcctcattgtccagggacaaagttagtggcataagcccaagcattgttggcaacaggatcagcaacgtggtcgtaaaggttctgaatagggcccttgccagtgacaatagcctgaacaaagaaaccaaacatggagaacatagccaagcgaccgttcttgagttccttgaccttcaactcagcgaatgcatcagggtcatcagccagaccaagagggtcaaaagcaccaccagggtagattgggtcaagtccttcaccaagtggtcctccaccaactctgtaacctttaacaaaccccatgagcacaacctgaacagcccagatagcaaggatgct

SEQ ID NO: 6027 - DNA, 371 bp, Glycine max
  Clone ID: jC-gmle01810009a11d1
aacaagaggatttccaactcttattaaaagaagattttccgacatgcataaacgcagttcatagtttcatatatatctttataaatatcatatggggatgaaggtggctaggcctcttaattgcagattcccacgacctttaagcatggcccctatagcttccaatggagaatggtggccacatctttaacttagggaaccaagatgaggtcattgataatgggtgatgttcataccgagaaagaggatgcaagggcaaactgaaggccccagagctcaaaagatcctttaacaaaggcataggatcccccttttagtgacaatgttttgttcaccaagccatttttaacaaatgggtaagtctgcaggtt

SEQ ID NO: 6028 - DNA, 558 bp, Glycine max
  Clone ID: jC-gmle01810009b02d1
gtaactatgaactatcaatatatgatcgttattatgtctgtgatacacacaattaaggccataatatacttatgtgatttacaacaacttctagcttattttatacatcatgccaacccaactaggagcaattttcatcatacaattacacttatctttaatcatcattcatcaatactggcatcagcaatacgctctaaactctgaagcatgacaaggtggtagtcaccagggaccatattgttatgcaatttatgccacaattggataagatgcacaagttgcaacaccacacatgttcttccccaattccatcttgaagtagccattttcaccccagctttctccccatgaattttttatgagccaatatgggacaccattttcaactccatatccaacagcaagaacggcatggttcacatcctgggaagtgctaccacaagtgtcactagtgaaaactccattctcgtagaaatggaacccattcaccacctgaaaggccacactaactggccgaacaaatgcaactgcatgtttagttcatcttcagcaccc

SEQ ID NO: 6029 - DNA, 472 bp, Glycine max
  Clone ID: jC-gmle01810009b05d1
gaccacccaaaattgttatgcattaaaaacaatgttacacattattacaattttattcaaatataccaaaagaatcaatcaaccagcaaataaatagatggaacatggtgatgccggttgtgatcctctaactgcataaattaattaccatccaaactcatgtcatttacactttgaagcaacggatcccttcggcaatgagggatgctacagcctcctttcacttgggtataacaacttaaccaagggaatcaacacaaataaatgtggtacaataataagacacgaaaaaggtcctctaaccaagtaccttgcgaagttcatcggtcaacttcacgcgacccgatggctccaacttgcttaaaagggcagcaagaccttgaggtagagcttgcaaatctagagctgagtcaccaatatttgtcaattgaagcaacactttctgcgcacgcaattcctttagtttattctc

SEQ ID NO: 6030 - DNA, 481 bp, Glycine max
  Clone ID: jC-gmle01810009b08d1
atggtgttaataaaatagcccaaaagataaagatagtattgtacatgaaactagattgccagagcagtttattgctgagaactgtataacagaatacaagttgacataagacggagttcttaaaccaaagacattcacaaacagttcttactctcctattcctaaggcttaataatgcttctccacaccctgataagccagttgggaagctagctccaagttcttccaactgatttgctccatttaagtcctcttggaactaacgtattcttctggcaagtaaatctttccgccagcttcaccatgttgctccccgctgatagttttcttggcagcttgaaattcagcactcatagcatccatcccacgctgcaaagcttcatcagttccatagccatgttcctcagcatactttctcacattctccgttatcttcatagagcaaaatttagggccacacattgagcagaaatgagccact

SEQ ID NO: 6031 - DNA, 369 bp, Glycine max
  Clone ID: jC-gmle01810009b10d1
aagctctcctcccccttttattattaccccatatggatacaatcaatcgaaataaattcgttagatttaattattgtttcatagaaatattggaatttgggtgatctaaatgttattttttgaattctcttttggtcaatcgttgaattgaatgtaactgaaacgggaatctcctttagttctatatagtatctttttatcacacgccgtaaacgtaaatatcatacagaattctaattatggcttttaatttttatatttattatttgtttctttgaatatccaatatatactaatatatgctaatatatgctaatcgaatatctatctatatctatctacctatatctatatagatattggtagata

SEQ ID NO: 6032 - DNA, 437 bp, Glycine max
  Clone ID: jC-gmle01810009b11d1
gtaaaccttcttcattataaataagagtatttcatgtggtctgataagacaatacaatattactgtaaaacactattacactatggaattaagggtgttacttatttgatcagactcaacttgttccaacaatgtaggtacgacaaatataattaatattgaccttctatatagtaagcagcagccgatgtttccttcattagctgaccaaggttgattttttctttatcttttggttctgaaatcaggacatgacagattcttggtcctattcactgcaagctacttcgagttcggactctataagcatttgccatcggactttgccttcctgataaatcttcttcataaccaacaaccttgccaatgtccaaaagatataaaacctgagattctgtttgtgtttccattcactgcaagctacttcgagttcggac

SEQ ID NO: 6033 - DNA, 523 bp, Glycine max
  Clone ID: jC-gmle01810009b12d1
gatctaatattctctattataatattattgttcagtgaagattcaactcaaccatgataatttgtacgatcatacaggtggaaatggcaagtctagtaaaagaaagaagccaacacaatcttcagaatccaagtctggttgaactgcaaggaaatgcaaacctccacaagctttcttagcagcttcccaagcttcagcttcactagttgtctcaggagttttcttataggtggaatatatataccgggtagaaattccactagaaagaatcaggcgagcacgagcagtatccgcttccaccgcgcaaacctccaatccatttatcaaagctgccaatgctgtagaattagaagacgcaacagacagtcctgggatcaatgtcttgtcatcaatgtcaagacccaataaatcaagatctagcccagaaccacaaactcctcttttaaaggtcgatatctcctctcgacagctgagtagggaattggacaatgcccatttttcccataagaatgtcaggaagttc

SEQ ID NO: 6034 - DNA, 440 bp, Glycine max
  Clone ID: jC-gmle01810009c03d1
agaaaatattaaatttcactagtctacaattcaatgaaggctatacatagtaacatactatgactataagcatcttaatgaagaatgctgattgcagggcagcctatatacatagtacatggggagccaaatgtctgagctaagggtgtcaaatgataattgtttaggtggacatggtgggaaaaaaacagatccactttgtttataacttagactttagattcattctattgtcttgatgatttcaggcaccaattacctgtccacaaaagcaaatgcatttttgcattggcagcaatacatcgtcatgttccaggcaaattgctgcctgtgctggaaagaattatgaaggcacagacaactgaaagtgagaagactgataaccaggtgttctctgtgtacatttccattgcatcagtgaaagaaaaccgggctcgatc

SEQ ID NO: 6035 - DNA, 501 bp, Glycine max
  unsure at all n locations
  Clone ID: jC-gmle01810009c05d1
cattaaaaggatataagaattttaccagtaaaaaatataacatggcaacaacccaatggttggagagtgtcggatgaatgagcaaagttataaaaagtaaatttttcatggcattaaagagttaaaaagagagggatggaaaaggtcaatctgagttaatctatcgcacggccaaagcctgagaaaccccaaaagatgtatgggttaacacaaggtcataaaattatatcccagaattagcgaacctggcagtaatatataatataagcctttagagatttttccatcagctgcagatatcctcgtttaaaacttttcaggacaaccacttagtttattcttttcaagcaaggatttgacttgccaacaagaatacgaatagccaagtcgtcaataatctcgtcccttgtattgcatttcaggcaagtaactcggcatgtataaagattgcctaggatgaccaagaagctgtccatactgnggtgcattcggatgaaaata

SEQ ID NO: 6036 - DNA, 311 bp, Glycine max
  Clone ID: jC-gmle01810009c06d1
ggacggaaagaaactacaaatttttaccctaaaaacaggttcttttttatacatactctttgggggcatttggcaaccctacaaaaaatgaaaaagtgggggggaatctttaattattcacaaatatggggcaggctgcagagggcattttgttttctaagataatacatatgaaagagggttcatatatagggtattcaaacaggggctggtactggagttgaaggagcaacacgggtttcagctgggatttcaacaaactcagacaatataggacgggattcattttcggtcagaggcttctttttcag

SEQ ID NO: 6037 - DNA, 481 bp, Glycine max
  Clone ID: jC-gmle01810009c09d1
gccttaaaatgtaagattattgaaacggtcactttctggttgaaacttgcaacacaaggaccagagagcaccaaaagttggtggaaaggatttaaacacgtcaatacattttttggtgaccaaccaccataccatctttatctattaaaaatatacaatactgctatatactaataagctacagttaaaaataaataatacttacagtaatgtacctatactatcatttctttggacttaaattatatgatttgtatatatcaagcggatattccattataccccccgtgtcaaaattctgctttcgcatgaatgtttcttaagattctaggctatgctcagaataatgaatgattggaacatgaatcagttttgctcagaaaaactttgatgcttactgctgtgaaacgccataccatatgatggtaccagtcacatagaagaagatcgatggtgcaaatagtgatttactccatgaatg

SEQ ID NO: 6038 - DNA, 405 bp, Glycine max
  Clone ID: jC-gmle01810009c11d1
gataaataacgattaaatcatgaagctcaagtatctcaggtaccaaaataaaaatgataataatcacctgttacttttacactgctgcctacagtccaaaataaaaatgataataatcacctagcagcagttgaaatctgaaataaggtaatgttcgattgaagactgacaaaattctgtgtatggactggatgccgtggcacctgcagagggttggcccggatgatgagatatacacaacctgatacggttctattacttagtagtctttttctttccaacctgaggctcttggtatgctataatctgactcatgatggtaaaatttgttgcgacaccaattgcatagcccaatagaacactttttggggccctttcttggatgggggggaatacctttaacca

SEQ ID NO: 6039 - DNA, 419 bp, Glycine max
  Clone ID: jC-gmle01810009c12d1
aagcaaattcaattgcaattctttctcatgtaaggatgtctcaagagtttctgttttgcagttcaattcttctaccttactcctttctatttgcaacattgcatccttgctttctgcaacttcccttagattctccaattctgacaataaagacgtaagcttcttatgaagtatttctttgcattcatgaaccttactgttgctcttcatatcaggatgtatatcatgcaccccatcatgagacacaattgtgtcaacccacatcaagaactcaaagatctcatcagaactctggttgctcatttgtgatgcaagaagagcatcattagtgcatctagtaacctcttgccttaagaaagaaatttcagtatctctttctagcaactgcgattggagctgttcaacctcagaaaggagac

SEQ ID NO: 6040 - DNA, 285 bp, Glycine max
  Clone ID: jC-gmle01810009d03d1
ccagctaatataatagtttcaatacctctttttgggaataaagggtacattattttccagtcaacacaaaaagactgcaaatcagccgcgagacattgttttttgaatgaagagagaaaaaggaaaaaaagaaattttttgccaaaaattgaaggaaaaataaaagccccctttcacaaggatggtacaacactgaaccagtcccttaatttttttgaaggaaatttggggtgatttacagggcaagacatcctccaggttgacaacttcttaagctgctttcgc

SEQ ID NO: 6041 - DNA, 459 bp, Glycine max
  Clone ID: jC-gmle01810009d05d1
gctgtgaaaaagtgcatcaattagatcatttccatcgattgaagttaacaccattagcattatagatttcgacggttttcctttgcaattagtagtgtttttagccactgctacatttataattattatgtacaaactcatcccctctccttcgtcggacctggtcgatggtcgtgttccttcaacgccaccagaaaataacaaacgttcgcatctatgatgcaaaccaagatttgtatcatcatcatcctcgagattggttcctccagcgtcactgcctcctcattgtcagaatctgaatcaataacgaggttctgaccaccgcccccctacctcactcatcctccccatcgtcgagtcactctccaatgcccttgtcgcttacaacctccaacagtggcaatggcggtgtagaaattgcagcaccttctttggtggaggatctgtggtttcagatct

SEQ ID NO: 6042 - DNA, 548 bp, Glycine max
  Clone ID: jC-gmle01810009d06d1
aaccaaattacttttactagccattgtaacactgcatacgccaaccaaacgtctttttttggtaagtggaggaaaaacaagaaaagaaaaaacagaattacagtcttaggaaactagttccatgagcatctgcttggagcatagatttgagaccttgcggaacacttgcaaccagctgaagctgcacccctgaattaggaccaagctcagagatgaaatcaacactcccttcccttctctgagagtatgacgaagatccaccacccacgtccacgccaaccaatatataattgctagtaaaatattttatggccattttaattgccattaaaagcaatatttatttccattgaaggtgcttttcgttgtagctgtggaagcaacaccaagcagcacggatagcataataaccaaaccatacactttaagaccaatacaccattcatttatatttcatgtttctggcttagttgactgaaacaattaagttctatggtctatttagtaaccatactttgcacaaataaattacaagttccaaaaacatg

SEQ ID NO: 6043 - DNA, 412 bp, Glycine max
  Clone ID: jC-gmle01810009d10d1
gtaaaatgcaagtaacattaagttggattcggatacacaagataattcacattatctgaagtacttcaccaaacacaaatctaaaaactctcaaaagtcatttcgttctttgacgctcactttccggggacgaagttggtggcataggcccaggcgttgttgttgacagggtcagcaaggtgatcggcgaggttctccaatggaccctttccggtgacaatggcctgaacaaagaagccaaacatagagaacatggccaatcgtccgttcttgagttccttcaccttaagctcagcaaaagcctctgggtcatcagcaaggcccaatgggtcgaagctgccacctgggtagattgggtcagtgacctaaccgagggggccaccagcaatacggtaacctctaacgggaccca

SEQ ID NO: 6044 - DNA, 491 bp, Glycine max
  Clone ID: jC-gmle01810009d11d1
aaaataatagaataaattccaccgaacctttataaaagttacagcaatctatatctacatctagttagttgttagcaaactgatgtgtctaattttcctttgtaaaaagaatgccgcctccaacgagtacattggtagagcatccctcgttattagctccggaactccctgttgataaaatataaatccgttcttttccttggctttctacataatacaccatagtctatatcattaaaatggttagatcctagtttcagacaagagtcagtctccctactactactactgttgctactaatcctactatctaactttctatgctgtaaagttgtgttagaagacaaacgagaaacatctatccctcgcgagccttttgcatcaggagaaactgaatcatacctgtccatatcagataggggtgaatgtcgcaaattcaagggagatgatgatgatgatgaagatgtgtagaatcaaattcctcccacact

SEQ ID NO: 6045 - DNA, 344 bp, Glycine max
  Clone ID: jC-gmle01810009d12d1
ggggggctaacctgggcatatttcaattgccagaatgtgataagggacaaaattccaaagtcaagacttccggaataactttttttgtaacaaaagttgaaaaaaaatgatttaaagaagacaaactagccttaagcttagccaggtcatacattcaatccttttctttcaaatgcttgaaagcggattgggctcggggcttttgcaaaacagtcacaggtaaacacttgatgccaaattctctgattctaggcgggatttttacacccgctggtttcaattagatatcttccccggaaaaacattttttttgaagcgacaatttgggagcagattttttcaaa

SEQ ID NO: 6046 - DNA, 526 bp, Glycine max
  Clone ID: jC-gmle01810009e02d1
aaaaaaaatactaataataatttgacattttagtagaacaataagggacaaaattagtccaaacccggtacctggtcccttggcaagtggacctcatgcctctaaataccctattttcttgttattggctttcacacttttctcttcttagttaatgcataaaacaacagtatcgatactttatctccctggttgactttttcaggtcatctgaagacatatcttggactgcatcactgtttaattgcttgttatcatatattgtttggtccagagttgtcccatttttcaaagaatatgaatcagcctggtttgcttccattggtcttgaaagattctgctctggtgaagctggtactactttcttatagtttacttccttgttagcatttgttcctgtgtgtctgaagctttgtatcgtcccaggttcttctaaattttcctccagcatattgctgcttgatactttgacactaacctcatttttcaaacatacttcaataacttttgcagaatctgaatcact

SEQ ID NO: 6047 - DNA, 390 bp, Glycine max
  Clone ID: jC-gmle01810009e03d1
ggaagagagatcaaagaggaaaggtcaattaatggtgctactatcatccttcagaaaagcatgcgaaagattacaaattatgaagagctttttggtgaagaaaaagggacattggatggaaaacttctatcttcataaaaacccatacattcaccatggactaaataagataaaggattatctttaacaaagaagaggatcataatacaagcatctctacaaacccacccatcatgcactgaaactcattttcgtagggattgacccaccagctgccacaatctgatgctcaagcctgaacattgcttcaagcttattcttgacaaggcagaacgtcttgtttcacttgttgcagacatctgacgcacgcatctgcgttctgctcctcac

SEQ ID NO: 6048 - DNA, 421 bp, Glycine max
  Clone ID: jC-gmle01810009e05d1
gtatccaagaccatatataacataattgataatccttaaggacatcaaacagaaaatcccctgaaaacgaggtctttgagttcacaaaaggataccctataataaaaacctatatatagtcctatactactgcattagctacaagataaaataaactccacataagctttaagcaggtttcttgctgtggactccatcaccaacatcacgatcacaattcataaaaggggagataaagggtgttcagaagactcctgccatggaaggcaggtcgtcgaagctccaaaggttcatagggtttccggcggcgtcatgagttgcgtctccgccgagcaaagacgccaatgtagcatcagcccaggcttcatcaagaaaagaaggggtctcaaagaacttgagctgggattcaatgtctgcaagc

SEQ ID NO: 6049 - DNA, 484 bp, Glycine max
  unsure at all n locations
  Clone ID: jC-gmle01810009e06d1
ccgtagagagcagaccgaccgtctttacttgtcgtgctgagtataagcactcctaacagacattcccgctacaaacaacaccgccgctagacattcccgccacaaacaacaccgccgccagacattcccgccacaaacaacaccgccgccactcgccccctaaactacaatctccggatatcgccttcacgatacactcatctaaggagttagcgaagtgcctttgatgaccaaaacctgcttgtcgaacagcgccttgcagttgggtcccagcttgccagtcattccagcgttgtccgacacatcgaggatatccaggttcaaggcacagagctcctcgggcacgttgccagtcagctggttgcccgagaagagaatctccttccattccttgttgnttccaaagctggcagggatctcgccagtgagctggttgttggtcaaaggaatgtaccgtgtcttgatgtttccgacctctggaatt

SEQ ID NO: 6050 - DNA, 439 bp, Glycine max
  Clone ID: jC-gmle01810009e07d1
tctgaccctttttttctcttttggtaatgacttagtgaacttggattcatctatattgcgttatgctttaaaaatagtacttgaaaaactgacattgaagacgttcatgaacagtataaatatcgttatagaaatattacagtggacctcattatttacacaacacatgagggttgatagactagttgcagtacaaattagtgagatgatattccgtgcaagtgaacataaattaatagacttatacattacattgctctgattatttcaattgtctcttgtactacaattcattcaagtgccattttttggcatgtcatatgacaccaatatatggcattcaattacccttttttcattccttttaatccacacattgtcacaaaagtgttaaccttcttcagtaatatccacagctcttctgcatattgagccattc

SEQ ID NO: 6051 - DNA, 527 bp, Glycine max
  Clone ID: jC-gmle01810009f05d1
aagaagatacaagcattaatagaatttttatttctcacacaataaatacaagagattctgcaaactgaaaaagggatttcttactaaagcaaactcaaacaagaacaacttccactcatttggcatctaccgtagtagaacaggatcaaaagcagctctctgatagaacacacgtatgtattatattgaacatcttgcacagtggttcatttctcacagctattgcaacttaaaatacttgcaaagcttctgcaaattccaaactttctttttctcccttctttatggatatgacaaagtgatcagatcatgaaacaataatcaatccattgaatttgaatctgatttttggtttggatcgatgccaccattcttcatcttaggaagggacaacaaataggccaaagcctactaattaagcgcttaaaactgcattagtggttggtttaagtgtgatgttagtaacatcagcttgattattaaagggtgttctttgtacgaagaagctgccccataacaatgtgcac

SEQ ID NO: 6052 - DNA, 501 bp, Glycine max
  Clone ID: jC-gmle01810009f11d1
ccttagttccttgaattgccatttcaaatgtagttacatagacacaaggcaattttcttaatgcaacaaagagtaatccaaggaaaagaaaaagaaagattagatctcagcaggcacacgtttgtacaaatgtgaggggagcctaggagaagccaaagcttgtattggagtcctcatgtatgtgactaaccctggattctctcccatgtcaatttcctcaggcttcattccttcaggtggggtccaacaaaaatggtgcaagaggtggcccaacatggatgttaccaagttgataccaagttgggcacccgggcatacccggcgacccgccccgaatggaagtagcctaaagtcatggcccttcatgtccacatcctccttcaaggaacctctcgggtcggaacttcaacggatccttccacactgccgggttacgggccacggtccacacattcacatgcacattggaccttttggaatatcatagcctcaactttgaca

SEQ ID NO: 6053 - DNA, 382 bp, Glycine max
  Clone ID: jC-gmle01810009g02d1
acaaaccacaaatactgacaagcgtttagaacatcaacttttcaggtcaggagcgtaatctcggctacataacgctcactatataaaaggtggttgttgatgggcatgactaaaatttgaaattgcaccggtcgcttttgattttcataatgggggttattgggcattcacacccaaattcgacctttttttttttcccccaaacataactttagccacctgttactatggatgactccacatccacggtattatgacgttatataatctaaccccagtaaagtctctgtttgtttctacacatcaccccccgccaaaaaacaaaggaaacccactagaagatgaaaaactggtattaaagcaaacattttcaaggagaact

SEQ ID NO: 6054 - DNA, 363 bp, Glycine max
  Clone ID: jC-gmle01810009g09d1
gtgcgattatacttctttaccgtataggtttttgagtttactattttacggggatttataaaagtattttttttggatattgaatatttggcaaaattcttttgggtaatcacaaattttaaggtgccttttggggccaggaaatatctatatatcttaagattattatctttttatctaacctatgtaaaaataatttccaaaaaatatttagggacctttattaggggaaaaatttaaaaattgtccatgaaatggtttttgtgtaaaaagataataaaatagggtctttttaattttcattgtttttaataggtggttttttaaggttgggggttacataatggttttgtgtatctttat

SEQ ID NO: 6055 - DNA, 398 bp, Glycine max
  Clone ID: jC-gmle01810009g10d1
gataaaggactcaaaattaataataggcaatgagtgaatgcagcagcagagtagccacagaagtatcatcatattaatgcttagaaattaagcatagagttacccaaatacaagtttaaatgagttgtccaaaaaggaaaagaaaggatgagaagaacaggttcatgaaacatatatagaagtgtttcccccattggaaaaagtttttcataatcttggcaaggcgcgggggatagtgcgtggttggtcccaatcagtgacaatgtgatcacgagtgatatccttgagtgaggtgcaaccactcaaagccatggttagctcaaactcctcacgtagcatccgcagcacatttcttacaccagcctctccttcagcagccaaggagaacaccactgggc

SEQ ID NO: 6056 - DNA, 170 bp, Glycine max
  Clone ID: jC-gmle01810009g11d1
cacatctactaccatcaaactacaatctcacaacaatccacaactaaacaacccatatacacaaataaccaacaacttaatacatacaaatctaaaatcacaaccaaaaattactcactaaaatatcacgcatttatttaatccatacacatcacaacataataccagca

SEQ ID NO: 6057 - DNA, 470 bp, Glycine max
  Clone ID: jC-gmle01810009h02a1
tgtggattcggctcgagcaatgccttgcaaactcatcattccttctagttttggatctacaactgaacaagcttcatggcactttgccaagtatcttttcaaaggactgtcggctcagaactctggatctcaatggcaaccaactattagaaggtgttttgccagaatctatatccaattgcattcatctggaggttttagatcttggaaacaatcaaataaaggatgtgtttccccattggcttcaaactctaccagaattgaaagtattggctatgcgagccaacaagttgtacggtcccattgccggtttaaagatcaagcatggattccccggtttagtcatctttgatgtctcttccaacaacttcagcggcccaataccaaaagcctacatacaaaaatttgaagcgatgaagacgttgttatagataccgatctgcagtacatggaaattttttttttcttat

SEQ ID NO: 6058 - DNA, 497 bp, Glycine max
  Clone ID: jC-gmle01810009h02d1
agcattggccaatacatagcatttttaaaaatatacaacatctattattatacaactcaatacatcgcactcttctacacatattaaataaatgccacagttatacgtattaaataaatcaaaactgcaactcaatacatcgcactcttctacacataaaaaacaaaaaagaacacacaaaaaagcaaaagtacaacacattcatattacagcaaaactttgaaccagatctcccatgcaatgcagtgtgatcaagttcttgcccttaagttttgttttcaaagatggcaggtatgtaacaagacattctccagtcatgccatatatcaactaattcattctgctaccattttcattagatctcatccttgtcttccttttcacctttttattgagttgacctccaaccattctcacaagccattgaggctttcctattaacagtacacaacatcccattcccactccaaagaccattccgcatccatatcctatag

SEQ ID NO: 6059 - DNA, 433 bp, Glycine max
  Clone ID: jC-gmle01810009h03d1
gtacatgtaaaatagcccatttcaaaatcatgtgaaagtgtttttggcattttcctttcatcacttttctacatgcattctttaccaagtcacttctatccattgtatttcgttaagtccattacaagcttgcatgacatatcacatatataaaactgaacaccccaaactagttggctggtgaaacagacgtttttatgcagactccatcagcctcagggagatttctaaccttattaagaagcctagtgagatcttttgtcagttctttccgaacatagttagatcgcttctctgtaattgatgattcttgaaataaagtttcagcgagggactgatatttttgaaaccattcctcaccaatacccagattattctgctcatcatcaacaagtaatgagccttcccgtctccatctacctaaaaagtattt

SEQ ID NO: 6060 - DNA, 298 bp, Glycine max
  Clone ID: jC-gmle01810009h08d1
tcgtgtcgtctttgattactttcgtagttctaatttttctataataatattattgtccagggaatatgcaactcataccatgataatatgttctatcatacaggtggaaatggcatgtctagtataagaaatatgccaacacaattttcataaatctatgtctggttgaactgctcggaaatgcaaacctccacaagtctttttatctgctttccaagcttcagtttcactagatgtctaacgatatttcttataggaggaatatatataccgggtagaaaatttcactactaagaat

SEQ ID NO: 6061 - DNA, 390 bp, Glycine max
  Clone ID: jC-gmle01810009h10d1
agctgactggcgggctgccgccctttttttttttttttttttttttttttttttttctctgctgaaatggaatcttctcctttacaacaaataatttcgtttgggtacaggttttaaagcacccacaagcactcatatcaaacatttttcctaaatctaactgttccaacttattaaagcatattagataactcctaagacaaaccaggaaagcctaaaaagtccacttcctaacactaataacacctaacacaaagcgagctatttcttaagggaaaaccaaccatggacatatccataccactttaagcgttatgtgaattgaaaaactccctctagcatgagccccaaaggggattagccctttataacacctaattctttgcacgg

SEQ ID NO: 6062 - DNA, 62 bp, Glycine max
  Clone ID: jC-gmle01810009h11a1
aaaaaaaaaaaaaaaaaaaaaattaaaaaaaaaaaaaaaaaaaaaaaaaaaaaaaaagaaaa

SEQ ID NO: 6063 - DNA, 62 bp, Glycine max
  Clone ID: jC-gmle01810009h11d1
tttttttttttttttttttttttttttttttttttttttttttttttttttgggtttttttt

SEQ ID NO: 6064 - DNA, 242 bp, Glycine max
  Clone ID: jC-gmle01810010a02d1
aaagcataaacatgggcttaacagtttcctcctccataacattatacatcatgtaaattatttacatacacactatactggggcccctaccatgtttaggcatccatccttatatttaatgggtagaaacatgtttagcagctacagttgagaccatcgagtccaccccacatacattgggacctctgcagatcttggaatatccttcttttccccagctctccccccatgaattctttatg

SEQ ID NO: 6065 - DNA, 445 bp, Glycine max
  Clone ID: jC-gmle01810010a03d1
gataaaggactcaaaattaataatatacaatgagtgaatgcagcagcagagtagccacagaagtatcatcatattaatgcttagaaattaagcatagagttatccaaatacaagtttaaatgagttgtccaaaaaggaaaagaaaggatgagaagaacaggttcatgaaacatatatagaagtgtttcccccattggaaaaagtttttcataatcttggcaaggcgcgggggatagtgcgtggttggtcccaatcagtgacaatgtgatcacgagtgatatccttgagtgaggtgcaaccactcaaagccatggttagctcaaactcctcacgtagcatccgcagcacatttcttacaccagcctctccttcagcagccaaggagaacaccactgggcgtccaataaatatgccagaggcacctattgccaatgccttgaagaca

SEQ ID NO: 6066 - DNA, 51 bp, Glycine max
  Clone ID: jC-gmle01810010a04d1
tggtcatcagcattcggctatccggtaccgggccacctcctggagggacgc

SEQ ID NO: 6067 - DNA, 525 bp, Glycine max
  Clone ID: jC-gmle01810010a06d1
caacatattccacatccatggtttgttatgccagcctggtcactaaacataattgagaacatctttgaggacgaagaccaaaagcaatgctactaggtacatgaggtatgcagggaaagatgtccaaagaggaaaagtgggtcgaaaactagcagtgaggcccgttacagcacaaactattgccacgactagcacatcagcggagaattcccaagtgatctcacgcatgtatataagtatagagatcaccacaaagccaagaatgttgttcatgaacactgctccataaatctcatacattgattgagaagtattactggtcttcttatggctagcttctttgattgctgaggttgcttctttaaatttgtagccagggggactaaaatgaatgagaatgaaaatgacgaaattcctgcttctttagagaatttttgtacacttgctattaaggggtttgcaagaagagccagtatagtaacttcaacaccacatatcctatagccgtaaccatgcaaagttcct

SEQ ID NO: 6068 - DNA, 532 bp, Glycine max
  Clone ID: jC-gmle01810010a08d1
ataacatccataattccatattatagaccaaaatgatcttacttacaaaatatagccactcgagatttatttcaagttcaaactacaaccactacaagagggaaaagcaacacaacacatccattcctcacaaaaccaggcaggctggcacagatcacctcattcttgtgtagaaagcacacagcgaaggcatcccccttcatgcaaaagatcaaaagccttgttgatctccgaaagtgtcaaagtatgggtaatgtactcatcaaccttgatttccttcttcaagtacttgtctacaagccaaggcacctgtgacctgctcttgaagccaccaaaagctgttcctttccagactcgtccactcaccaactggaaaggacgggttgatatttcctgccctgatgctgcaacacctacaataactgacgtcccccagcccttgtggcagcattccaacgcagctctcatcacggagacatttccaatacactcaaagctataatcaactccaccatctgtgcgatcaattatg

SEQ ID NO: 6069 - DNA, 452 bp, Glycine max
  Clone ID: jC-gmle01810010a09d1
ggagtaaaacacctgataatgattaattttaaatcctcaaatccacgtaaaaaaatgttaataatacaaccccaaagacacattgtagcatacacaaatcccattaactaagtaaaatgatccacagacccacaattcctacttgaattgatcattatcggactcaggaaggggctgactagcagctgcaagaagctcagcctcgtgctgttgttgggcagctaaatcaatttgaacttctgggggagccaatgcaggagattctacaaagtgcaagttaacatcgccggcaagtttcctggccaagtacaaaaatggcttttcaaaattggagttgctcttagccgatatctcatagtactggaaaatcttcttcctgtggaaagtaacctgctttgccttcacttgcctattcttggcatcaagcttgttaccgcaaagaacaattggga

SEQ ID NO: 6070 - DNA, 523 bp, Glycine max
  Clone ID: jC-gmle01810010a10d1
aaagatgagacattatatacattaaattgggatgtattcaataggagtgcaaggaggataacccttacgcgacttagccccctttcacagtaagtagccttaaaaaaggagccagcatatgatataactatgagtaaggactccatttcagcttttggtgcattggccttaggcagaagacatggatttctaattaaggatccaagtttcatcgacgctgttgattgcacatttgacatgtggtggcagacttaacattggcataggtacagtgctcacaagaccaatgattatcatcagtcattctgctggatatagttcgaatagtcgcttttcctcttcctcctctccccttgctgctccctgcagcattttttgagctcgttgctttgctggaagcagctccattactatccacatcaactaaaccattctctaatgccctcaccaaattctcaaagtagtttctagttacactggtcattccagctagtttggttcgaaagtcattgaaatctttaga

SEQ ID NO: 6071 - DNA, 287 bp, Glycine max
  Clone ID: jC-gmle01810010b03d1
agggggcctttaaaaaggccccctttattaatcaaaaatccgggaccacatttattgggaaacccaaaattttaaacccccttttggggcaaaggccccttttattcccccccccgcccaaaccaactaacccccccatacaaaataatttccaaaaaacattccgggacctttaagaggggaaaaacttaaaaaatggcccaggaaaggatttctggaaaaaggaaaaaaaaaaaagccccctttttttataccaccttttaaagggaggctttggagggcggggg

SEQ ID NO: 6072 - DNA, 582 bp, Glycine max
  Clone ID: jC-gmle01810010b08d1
aaaataacacacacttcacacatcattacgacaattaaaagaggtgtggaaattttcaaatagacagagcatactcaacaagagggtcatgtctaatttcctttattgaattaaacaaacgaacaaacgaaagaaaacacaaattccagatcatgcagaggattccgcattttcagaagatctggcagtagcctgtggaacagaaaaagctggcataagagtattaccagcaatttcaaaatcttgagaaattcccaagagaatatcaaaaactgtagactgtttgggattgtcaataaggaaactcaagtgccatgaagtttgatttgcccactcagaactccacatttcaaaaccattattaggaccacatacctctattgggaagatcaattcccaggaatgtggatccgattttgtccacttacatgcatcgaaatgctctgtactgatgctgtatgttaaaaacacttgtaccaatgaggcccaatcactcctattgactgctgcattcccagacatcacaattttaaccattaaacagcctttcttacaagcagcaactctcaacatggtactaat

SEQ ID NO: 6073 - DNA, 521 bp, Glycine max
  Clone ID: jC-gmle01810010b09d1
gaaaactacaaaacaacttgctttcaataaattaaaattgttcacaatgcaacatatcaagggtaggaccaacagaaataatgtcattttttcattccacccaaaccttgctgtgttcattatgttatgggcaaacgtggctgaggccatcagcattcaattaaaagcttgatgtctattggcaacttaaacaaactattgctatgttttcttttaacaaataaaagagagaaaaaaatacaactcaactaactaagacaaccacgttacacaggaagagcttcttctaatgaatctggggcaccactactaccgttgagcacaatcacattaccatcggagtcagcatcaactataactgagtcaccctctttaatctctctagcaagcatcttctcagccatgctgtcctccaaaagtcgcattatagctcttcttagaggcctagccccataactcggattatatccttcgtcaaccaccctctccctaaatctttctggtactgagagatcaatttc

SEQ ID NO: 6074 - DNA, 532 bp, Glycine max
  Clone ID: jC-gmle01810010b10d1
aattagctaccccaatattgaaatttaagtataaattgagtgccaatctggtgaggaagagtatagattaacaagaatctcactctgttcccaacaaaagcatactggttgtaccacttccgatcctgagaaaatagtcaaacacagaaaacattttatgatgttacttgaagttggttgatgcctttcgattctgctcataaaccatcacattaacaaccaaccaacaattcgcaacacagcattaacaaactgttctacacatgtatcttcaaaatcattgtataaaattcagaccctttacttatttataaacataagcctgatattgaccaccaaagtaaactagttagctttgtttatcttgtcaaaagagagcttccttctttgataagaacaaacacactgccaccatcgccccttgagatacgcaattcttcgtcgaggtatgtggtgagtaaccaggactgagcattgctgttgaaattgggatcttcaagggaggcctactggaaatgtttcactaccgatg

SEQ ID NO: 6075 - DNA, 416 bp, Glycine max
  Clone ID: jC-gmle01810010b11d1
aaaccccctcattgcacatagtaatgccctttatttaagggaataaaattttacctactagttcacaaatgccaaagggcacttattaacccgatatttgggacttttacagttttcaaaaagtcgcgttagcataggggtaggggcgttagaactcaaaatttcatttttaacgccaaaaagaacagcccgttaagctactggaaaagggtcaacttttgtaagaaaaacaatttttttacctttcccaagggctgggcgaatccttttgtggaaattctgaggggccattggtaactggtgaacttatccaagcaggggggggtaaacccccacgttcactaccacatgggacatttacaacgaccggttctgaagggaattgccttacagggttaagaccatttccaaaaatt

SEQ ID NO: 6076 - DNA, 584 bp, Glycine max
  Clone ID: jC-gmle01810010b12d1
aacttataacgatatattttgattgcacaatgatcattattttcatttacacgcttacttcaaataaccaaatataataacagcgtttccaatatgaacataaaacaaaacctccatgcacggggataatggaaaattggagtaacattggcaccaactggctgtgttgaccacagccattattagtcgcttcccagaccaaatcaggatgctattttcttccacaaaaacataaatagcacgcctgagaatttgcacaattgatatatactagcctctttgggatatgatcaccaggctcactaaaacaatggtatgtgccacctgaagcagatcaagaaagttcaaatccggcatttgaactgatggcatatagaagctttgctctcaaagtgcctggacgtttgtatgttggaagcttaagggtattgtagcaggttgaagctgatggaagccgatctacatcttggcctccaattgttgcccaaagaggaacatcacatgcaaccttgtggatggtaaaaggtgctgcagtatttgacccagtaatgggcacgagaacactggtgacaatttagaagcta

SEQ ID NO: 6077 - DNA, 474 bp, Glycine max
  unsure at all n locations
  Clone ID: jC-gmle01810010c06a1
ctcgagcatcctcatggaaatatggcaactggtccggctgattcttatactgaaaccaaatgtggtgtttgtcatgctggaacagatgagcatcttctactactttgtgatctatgtgatactgcttcgcacacatactgtgttggcctgggctatactgtttctgatggtgattggttttgtcacgattgtgctatttcccgggagaccaatatcaatgaagaatcagaccaacaaaaattttgcgccaacagctgagccaagtgtaaccatcaatatctttgatattgtgagggaaacaggcagccgggtggttaatagaccaagggcatctcctttacaacagaacctgtcatctcctgttattcctttacctgataggttaagttacttaagtagattaaaaggaaaaggtcctgtcacaggtgtctgtaatatgcagcggaatgtaaggttnttcgtgaaaatggaatg

SEQ ID NO: 6078 - DNA, 387 bp, Glycine max
  Clone ID: jC-gmle01810010c06d1
aaacaaaatactctaattttccatttatatcctcaactattcccttcaggtgaaaaataaatagattacattacactgctatcccctacctacgacataaattttacaatgcagttacctgggccacgaagtaacattttttacagagtaggtgcatgagaacaataatcacagcaagagaaatacatgatgcactctccaaagaaaaaaaaaattatgtagatcaagcgcaacccactttctccaatatggtagagttgacaacattggttacaaagtcataaaagcattgcctgcaacaattaggcattaaagtagatttctgaaactgacgagtattggcggcatggctgcatactgagctagaggaggatgtactagactttt

SEQ ID NO: 6079 - DNA, 517 bp, Glycine max
  Clone ID: jC-gmle01810010c07d1
gctgttaatttgcatgtatatattgtggcatttgaatttcgaaatgagaacttagatcatacaaggagtgacatgtgcataatgttggtccctcttatagtttatatacgaggtgacatccacctttacatgtatatatatatatataaaaaaaaccaatccacaaatcactctgcagatctctgttttctgtgcaccaaaatagtaaacactacacagtcagtataaactatgtacacattaccatacaatcgaaatattacctaaaccctgatttacatacagactacaatataacattcattaacaagagccaaaattaaaaaaaattaaataaataataacaggttgaggatgagaatgccaatgccacctccatgatttacacccaaaacccagcaccatcatgcaatctagtttttcctatccattccgacacattttatcatgaacaaatataacccttttcctaattttttaaaactgtcgtaaaattagaaacagagagacctaaaac

SEQ ID NO: 6080 - DNA, 552 bp, Glycine max
  Clone ID: jC-gmle01810010c12d1
gattatggaagtcataattgaaagacgtttcttgagtacaatttggttttggaagcatacaatagaaacggcataaagctaaaatgtacaagccagagcctttcatttcaaaaacctatacatgatatatattatgatagatctttttgtacacctcaagtgcctgaaaaagcaacaagcatcaaattactcaccggtttcgaatatttcagcttcagattttgccacaatttgtaaaattgaaagaacactatgtcacaaggaagctctctttcatccaccttgcctgaagttgcaacccagcatctttgaaagcattccaagcagattggtacagcctctgatctagacttgttccttctgttttcatgtcctgtaagagtttcaccaattcatcaacctgaccgactttagagaacacaccaaccattatgcctgccagggccctatcaataagccccccattcattctatactcattgaaaagctttacacaggtttcaaactctcctgatatactataagcaccaataatgctagtgtaactcacct

SEQ ID NO: 6081 - DNA, 414 bp, Glycine max
  Clone ID: jC-gmle01810010d02d1
catcaacaagctaaaaagatgtatacttgacagttattacactacaactttactaagattctggactttagcaactatagcatagtgaaacatgtcttgctaaaaatttcttgctatcatctcttgctccgccatctcttgtctgaatctagtgatgaactcctctgctcgttcatctattccttgcatttgaggtgaagctaaagccaaagattcccacatgccatctgattctgaagtgcaagatccaccaccctttgttggtccttctcccccagagagcctttcagttcgtggtttttgtgctgactgtggcttcaaatgccccaccaagtcacatgaaggctctctaaagagcttgtcatatacacaggtgcaggctttttgtggaacccgaagatgaagcttctcact

SEQ ID NO: 6082 - DNA, 431 bp, Glycine max
  Clone ID: jC-gmle01810010d03d1
aacaaaaatgaacgcaaagcatgctcgacattttagcagagaattcagagaagttggtaaaacataaaaatccgtaggtcacacccactaaaatcctatgtcgtagttcctaatctctccctccaaagtatgtgacattttgaattatatatactcaaaatctactccactaagaaggatgctgtaatccagttcttccatacttttaaaagagctccattaattgctgcgagacagcttgaagtatggatggtgttgtctggaactcttgccagatgttctgataagctgcgagatccatgttcagaaacttggcagcaagatatgcagctccagcagcaatatgatggggtttaaattgaagccacagagaactccgaagcctgcaaaacaattttctgcatcagtagaccatacaagacagacaccac

SEQ ID NO: 6083 - DNA, 361 bp, Glycine max
  Clone ID: jC-gmle01810010d07a1
agcattattgccgaaccaaatgcttatattgcatttgctggtaaaagagtaattgaacaaacattgaataaggcagtacctgaaggttcacaagcagctgaatatttattccataagggcttatttgattcaatcgtaccgcgtaatcttttaaagggcgttctgagtgagttatttcaattccataatttcttttctttgactaaaaatgataaggcatagccataaattctttgaataagaaaagggtatattatattatgatatatattggcttagctataatcactagaattattatatactaagtataaatatatagaaattctagtgattatagactatctttatataataatat

SEQ ID NO: 6084 - DNA, 202 bp, Glycine max
  Clone ID: jC-gmle01810010d07d1
aaagttcaaagagctaaattgcttgtcctaatcctggtcacaaaccactacttataattggggaaatgaaaacgacttaaacggggtccaagaaatataaaaagttccactcatcttagaacatttcccagtatctgggataaagaaaggtcaaaagcttttaggggacaaaatgaagcctgatgacatcttacaacaggaa

SEQ ID NO: 6085 - DNA, 500 bp, Glycine max
  Clone ID: jC-gmle01810010d09d1
attcaagcatcaccatgccgtggagacaatttcaaacttattgtaaatttagatagaaacatactgcagaggtagaaactcttgatttgcttgataagtctgctaaaaacattttatcgatgtaaaacttaagctaggaccatggtttcaactgttgggggttgaatcttttgctgttggttgccatcttcaatctcccaaatttcaggtaacgcttctttgatattatgaatgctgttcagggcatgatcagctccagggaccaaatctgaatggcccactaaaacagtgttaagtccagttatttttgcactttcaacatttctaacactgtcatcaaagaaaattgttttctttggatccacattagcaatccgaatagcagcttcaaaggcttccacagatggtttacagaggatttgtgggtgggaatagaaacatccattttctgttaaatctgtgagcacatgattatcatttggtacattcatgcaattgat

SEQ ID NO: 6086 - DNA, 476 bp, Glycine max
  Clone ID: jC-gmle01810010d10d1
ctgactagtcgccctgtcgccctttttctatttctcttttgagataatgtacgttgatctactgatataggacctaagcttaaacatgcaatcattatccatcttgaacgtgaccccaaggcctacaatcataatcaacattcagatctcaaggtaataatttatattgcacaaagagaaggcatagaaaattgagggaactgtcactcagtacaagttttccaatgaaaaatgaaccagcaggcgaacgtagtggaacaagtagccttagtgcccttacagaactacaacggcaatggacatacatataacctttgcattcccaattcggaaaacgagggatctcacttacacttggaggcaaccatgtcagccaaatacacaaccctgttagagatgccccactaattgacataccaagcaatgaccttaaccatgtcatttcccatgaccatggtcaacgatgagacaacggt

SEQ ID NO: 6087 - DNA, 453 bp, Glycine max
  Clone ID: jC-gmle01810010d11d1
gatcaaatactgaaaatcttcccacaaggatgaaggatccatacagctaccataagcttgaattggaaatgaagatagttgactaataaaatacgcaagctctacaataacaaaatcttatccactaggggaagtctattgcataataaaatatgcaagcactagccaaataaaatttaggcattaacaacgaacccccaaccaatcagttaacgagatcatgggtcacaaatactgaattggaagaattataccagctaaaggcgcggttggaccaggaatttttttccaagtttgagaatatacagtgtcaacgatcattaatggtttagaaaaatctatgccacagcttatatgcaatgctcgatactacaggcccacagtgaatggctcacgaccttctctctacccttcttttactagatcttttatacctagtctcccgcttttttt

SEQ ID NO: 6088 - DNA, 290 bp, Glycine max
  Clone ID: jC-gmle01810010e02d1
gattgtcttatctttttattgttttttactgggcaacagaaaacaggtggacataaaaaggggatcttaccccaaaaacagtctcaaacaaacgggacaataaattgctaaggctcaataaagaatctccacaccctgattagccaggtgggaagttagctccaagttcttacaagggatatgcaccatttaagacctagggaacgaacggatttttgtggcaagtaaatcgaaccgccagctttaccatgttgctccccggtgataggtaaaggggcagctggaaatac

SEQ ID NO: 6089 - DNA, 541 bp, Glycine max
  Clone ID: jC-gmle01810010e11d1
cgctgtcggcctgtcgtccttttttttttagtgcttttgaacttatagggttatatattaaactcaacaagaacaaataatatgagatgtttatgagaatttcatccacccaagaccgttgtgatccttaattaatggacaaaagctaaacttagctcaatttcttctatcccaagcatttgagtttcaagcacaggctaatttccatcttatgaagtttattttgcacacatgtattggtgaatatactacctgttagcaacataagaagaaaaagcgtgctatcagctatagctacagccatagcatcatattaatttttgggaccgatgtccttcagtgaacagatctgatcttttcccattgcagacatagcagaaaccacaagatcttttcctttagaaaatccattcttaatctgagcaagcaatgcctcatcagtaggaagccttagatcatcctttggattttccattatcagtcagcagactctcaaagccgtcttcgaagatattaataacctgatagtcagtgcaattca

SEQ ID NO: 6090 - DNA, 318 bp, Glycine max
  Clone ID: jC-gmle01810010e12a1
gcgaatcgtgaattagatcaggaattcatgatttagatcaagaaggatacatgtggataggcctgactattgacgaagtggagaacagtgaagacaggatggccagagaggagctgactgatacactgatcaacccaggattgacagtgacttcctgcttgaggggcatggcttgttcacattcatgatccatgctctgaacgaagagctcaacatggacctagttaggaagcgcatggagcccagcgagaatggttagtggaagagctcgatggacaagatcaccgtacatgatggctgcatgtctaggggatatac

SEQ ID NO: 6091 - DNA, 566 bp, Glycine max
  Clone ID: jC-gmle01810010f04d1
aagagaattaactgtgttgattgacacgataaaagatgatcatgtccaagttagcaaggcatcccctgagtgcaattgttgtcaacactgcagattgaaaattatcatgaattccacaaaacgccataaatccaactaccaaaaaagctactacaaccaacaactcaaaaatagacccgcgaaattatagctaattagctaaatatccattgaacactgtcatcaatccaaaataaaaaaaggagaaaaaaacatagccaaaaaaggcattagagacgctactaacaagaaacgcatcatatttaattttaatcaacctcctccatcttgctgccctcagcatcagcctcggcctcctacagtgggggcatttcagcatcagcttcacctgcatactcgtcaatgctcagtccaagcttcaacattctgtggatcctgtttcaaaagtgttgggctcgtaaggctgaaaccacaatgagaagagcagctaaacagaacagaacaaggtcttacgatttgcatcttgctgcatacaccttctgagtctcatgatggtcttaagtgac

SEQ ID NO: 6092 - DNA, 195 bp, Glycine max
  Clone ID: jC-gmle01810010f06a1
catctgcttgggccgatcactcggatagtgcgacttgaggaaggctcgctcacatctacacgatgatcggactagcgagaccggttattagagttctggtcttaacatggccctaggttcacagactagcgatgtgaagaaagctctccaagatcttaatgctctgctctatcaggatatctgtcctctggatca

SEQ ID NO: 6093 - DNA, 496 bp, Glycine max
  Clone ID: jC-gmle01810010f10d1
gctgttaatttgcatgtatatattgtggcatttgaatttcgaaatgagaacttagatcatacaaggagtgacatgtgcataatgttggtccctcttatagtttatatacgaggtgacatccacctttacatgtatatatatatatataaaaaaaaccaatccacaaatcactctgcagatctctgttttctgtgcaccaaaatagtaaacactacacagtcagtataaactatgtacacattaccatacaatcgaaaattcacctaaaccctgatttacatacagactacaatataacattcatcaacaagagccaaaattaaaaaaaataaaatatataaaaacaggttgaggatgagattgccaatgccacctccatgatttacacccaaaacccagcaccatcatgcaatctagtttttcctattcattccgacacatttcatcatgaacaaatttaacccttttactaatttttaaaactgtcaaaaatttg

SEQ ID NO: 6094 - DNA, 453 bp, Glycine max
  Clone ID: jC-gmle01810010f11d1
caacatattccacatccatggtttgttatgccagcctggtcactaaacataattgagaacatctttgaggacgaagaccaaaagcaatgctactaggtacatgaggtatgcagggaaagatgtccaaagaggaaaagtgggtcgaaaactagcagtgaggcccgttacagcacaaactattgccacgactagcacatcagcggagaattcccaagtgatcttacgcatgtatataagtatagagatcaccacaaagccaagaatgttgttcatgaacactgctccataaatctcatacattgtttgagaagtattactggtcttcttatggctagcttctttgaatgctgaagttgcttctctaaaatttgtagccagggggactaaaatgaatgagatgaaaaatgatgaaatttctgcttcttcagagaatttttggacacttgctattaa

SEQ ID NO: 6095 - DNA, 586 bp, Glycine max
  Clone ID: jC-gmle01810010f12d1
aaattaaatcaatacttatattgatcaactaaatctaccatatgaaaatttcattctttacttgtaaagagccgaaattatcttcaccttaataattgtagatgtagaagaataatcagaatcttcctaaatccacgtaatttcttcgaaaatgctttgcccaacacaatgatattgtcacaccagaagctatgcggcgtcttccatttgatattccatttatcgcctggagatttacaatgctaatgacctatttctgcattacaaacgttgttgcccgaaattggacttcttacaagtagataattgtgcacaaagccggcaatacaaatgatccatcttatttggagaaaagtagccgcgtttgccaaatcaaataaaaaaagaagggcacaatatagttgatacaatgataacagtacatcttcacaatttctatcaaaaaagacttagtgccaatattatgcacaaagatgtgacagaacacaggtaatatgaagacacttacaatttaatgcgttggctcgattaattttggatgtgtagcggtcaatatctgatggtagaatcatggatattatatcat

SEQ ID NO: 6096 - DNA, 498 bp, Glycine max
  unsure at all n locations
  Clone ID: jC-gmle01810010g02d1
gtagaaaaagtgtaaataaataatatacaaaaatcaataacttgttcggggtttaatatcggagatggagacaatgcctcttggctcctgaatagatcctggtctacaattattattctttgaatcctctttaagccgaggtgcaagttctcattataatcaagtgcgaaaaattgcttccttatagctctgtgctgtatacagtagaggttgaaataagtaaaacaaagacaaaaaatcaaagtatactttgttgctatcaataggcttcatctatatgcttgcagattgaattcagcaagcaggatttaattcttctaaatgacatgattcctgaatgccgtgatcattttgggtgacaagaacaagatgaatgccaagattgaaccaaagaacatcttgataaaatatctaactgggtcatgatcaacatcttcagaggttctggtcggtgcatatatngctgttgctgatgggagagcttctattactgcatct

SEQ ID NO: 6097 - DNA, 478 bp, Glycine max
  Clone ID: jC-gmle01810010g07d1
attaaagttacactgtattatagacgtaaagaaactagtaatttttacacttaattctcttttatatatactctctgttgtcatttgacaacactacaaaaatgaaaaagtaaggtagaaactttaatcattcacaaatatggagcaggctgtaaagggcattctgtattctaagataatacatattaaagatgttacatataggctattcaaacagaggctggtactggagttgaaggagggacacggatggcaactggaatttcagcaaactcagacaatatagcacggaattcatctccggtcagtgtcaccttctccagaaggactttgacaatctcgtcaatcgcctaacggttgaaacttatatggtctagcgcaattacatatgcttgatatgagatcctcttgatggcagcatcgatgtctgctgcaagactctctgacattgaggtccttgacatcattctcatgatga

SEQ ID NO: 6098 - DNA, 360 bp, Glycine max
  Clone ID: jC-gmle01810010g09d1
aaatatgccaaccattataacatagcattaaaattttaaaaccactgtaatgtatacaggtaccccactaaaaaagtacaaagatagagattatagtcatcatttctcaagcatcaaacactttcttcactacacgcagatcccgtgacttttcatactcacaacaagattattacacttgaatcaaagcattccagtccaggtcgatgcaaaaacttgtacagaagccaatgaaatatgcacgattacaagacataaagcaaagattagagaccctgatcaatgagataatcgccaagcctttcaactaccatgttgcattgacctggagtcattggatcatcataaatgccaatgatc

SEQ ID NO: 6099 - DNA, 576 bp, Glycine max
  Clone ID: jC-gmle01810010g12d1
aagaaaaaagaaagttctaattattaataaattatatctatatatatatatatacagatagatattctatatcttttatcttaattaatatttgacccctccttataatgtgttatagttctctttatttttaggaacttatccattcctttattaatgtgcccgacaatccgaaagaattctgggggaggggtcactacggttttgatctagaatagatagagcttcaagaaatgagagaattaagaatacccacgagaaacactaatccaatccataatgatgtaccggaaaatacaacatttttgatattcgaccaaccttcatgagaagcatatacaacaggtacactaatcaataaaataaatgaaatagcaattaatgcaaaaacagctcattggaaagcaatagtcatgtttctaatcctccaatttaccatcaaaagaactctaccatttgatccctcaaccccttgatccctttattgacaaataaatttttaataaaaaaacgcagaacggttttatcatgaattcattgattttcttacctattatcaacccttttgaggcatgg

SEQ ID NO: 6100 - DNA, 506 bp, Glycine max
  Clone ID: jC-gmle01810010h02d1
ggaggtataaaaacaatgcaaaatattgtccgtgtaacattatgaaatatgttaatggcattacatcaaagtaaaagcaaatagtatcacacatttatatacaaaaatactcattaaaaaaatagctagtttactaattgatacttgagacaacaaagaagatctctctaactatgcacgtatgcaccttttcccaagaaaaatgtagcaaggcttgctatatgaaaggaaatattgcatactcagcatagaacagattccatatgaatcgatagaatcctgatattgcatccttggtataatttgcttgttctaatatccatgcctggtaaatcaagcttattgcaaaaatcgtatgagccggtatgagtaaccaacgcctgaaagcctgaggcatataaattgctgccaaaacagaaacaatatagttcaccaacaaaatttcagaaccaaggaaagcaatgttccgaactcctaattttgtggcaaagggtgatatctgatac

SEQ ID NO: 6101 - DNA, 534 bp, Glycine max
  Clone ID: jC-gmle01810010h08d1
acgttctattatatatatatctatctatattctatatatagatatattgtttaggttatcaagtattaatctgaaataaataagaattgctgcttctaatacttattatcattactacaagttctaatcattactacagcacggatatctgatagatacactggcttcatggatttatttcacataataataatgtatccatagcacagtctcgtctcataatacctcgggcgctaatgaaactactgtagtgcaatttaaccggcgtactacgctgacgaatgcacaaaagattcgagttccctttggatttccttcttgatcaatgaccactgccgcattatcatcatactgaactattataccgttgctacgtatgagctctttacaagtacgtacagttacagttctgatcacttcagaactttctaagatcgtatacggaactgctagcatgactacagcaacaacaacgtcaccaatataagcatatcgtcaagcactagctcctacgattcgcatacacattagctt

SEQ ID NO: 6102 - DNA, 206 bp, Glycine max
  Clone ID: jC-gmle01810010h09d1
catattgttctggtgtattgtagttgtaaatcatggcccttaatataccttttgtatatttaaaaggcccagtaggggattcaacaactacctaatgcaccagtgacacaatttaccatttacattctaattcaaaccacaatgggattttaaactctatgtttgacctttgggggcagaatcctggcctagtcttcaatatacgg

SEQ ID NO: 6103 - DNA, 369 bp, Glycine max
  Clone ID: jC-gmle01810010h10d1
caaaccaaattcatccaacttggttggtcattgatattaaaaaacacagtaaattactccttagaacaaaactttgacaaactcatgctctagtgttaattaagaatatgttctgaacaaaaaagctgaatagactacaccaattaatcgaagagactgaaacccatatcatcatcagattcctgtttcttctccaccttttcctccttctttgcctcaacagcaggagcagcagtagcagcaccttccccaggagctgcggcgacggcaacggtaccaccaccaccagaaggaaccggggccaacttttccctaccggctgaataagctcaactatatccttacccttagacttagacgaagacgatt

SEQ ID NO: 6104 - DNA, 510 bp, Glycine max
  Clone ID: jC-gmle01810010h12d1
cttctctaaccaaacaaagggttagagtccaaagagaaggcagtgtacaaaaagaaatagataaactgtttcatcaattattttttaatagcgaacataaggcagaaatttgctacgttgtcatcaatgccaataattattacatctaaaatttcttcaatcaagggtcattaatctgtgttgtaagtcaaatcaatgacctgtacacagttatctaatttcttgagtgtcaaaaatgagaaacacgggcataacatggacatctgacactgtcattccatacagatacttgtggaaaatgagtatgaaacattaacaagcaaagtcaattcatggctcaggttgcattttctcgcattcttcccgtattgactggaaaagaatagttgacaaatatctttcaccaaagcttgggaagacaaccccaataagctttcctgcattctcaggcctctttccaaccttctaagcagctgcagctgcagctcctgaagaaattccaccagcaag

SEQ ID NO: 6105 - DNA, 542 bp, Glycine max
  Clone ID: jC-gmle01810011a02d1
ataaaaatcaataaatttattatatatatgctgatttataattaattgatgctgtagaattattctaacacataacatattttctcttaattttggagattgaatttattcataaccatagtttgtcaagagttgttctccagtgaaaaattggacttggttttgtcaatgttcttgcaagaactagttgaatcactccatgatgcttgatcagagtcgattgttgtttcatggggataaaaaacaggctttggaggcatatcaatattttcaacctttccttcaagcatctctacaaccttcttcattgaaggacgatcatttggttttaattgtatacaccaaagggaaactatgaacatctttttcactagaatcttatcctcttccgagaccttttccatgtgaatatccttttcttccataaaatgatcatagatcccaaaggggaagaaatgttggcttgagtgctctgagtgaggaattgagttcctgctcctacttcccatttccatcaaaagcattccaaagctatagacgtc

SEQ ID NO: 6106 - DNA, 340 bp, Glycine max
  Clone ID: jC-gmle01810011a03d1
cccacaacaatttcacccttttttattttttggccattaacattatggaactacatattatcattggctattcaaaccctggtacttaactttctataaaaaaggccatttaatcttaattaaacactactcctggacagagaaaaagtgaccatcactgaaaaaaaaattttcacctgaaaccttaaaactcccagagaaaaaaaaactcatgaacaaaaacctaaaatctacgccaaaatttttaaaccaattaaagggggaaaacaaaaggcttatattaaactgatacgctataaacgaacaaaaataagggccaaatttggagaaaatctaatac

SEQ ID NO: 6107 - DNA, 482 bp, Glycine max
  Clone ID: jC-gmle01810011a05d1
atgatggacaaataaaacaagtttctcattaattacaatttcaaacaagtatcttaactgttgtgtctatactatataccaaaatcaaaagtgaaacaagaatgttccctcttctctctgttacgaatcctctcggtagagttcagtcaatcccttttcctttccacaaattacaagtaaaaggggttgggtggagggtgaactacttgtgtcttggacatggacacattctgggtgagcaaattcggcgccacactgtccaccgcaataacaggctccaccggcataactttctccggcacaactttctccccatcaaccttagccagcacctcaaagtgcgtcgtcacagtctcgggcttagtcctccacgaaggatagaaaccctccaattcccctttcttcaccttcttctccgccttaaaacccatcttcacgtaagtctgagcagaaacatcagccttcaacaacctaaaggaacc

SEQ ID NO: 6108 - DNA, 450 bp, Glycine max
  Clone ID: jC-gmle01810011a08d1
aatgactagttttctactatgctattgcatatctgggttgtcaaatatgaatggattctccccttactgattggacaatttatcttacactatccaatacatcatcatgaattgacattcaactctaattaatccactctacaatggcacaatccataatttttgtcccattattatatacatcactcaagtgaatgcattacacaaccaaccacacttatgtcccataataggcttccttaaagccaaagcaatgaacaattcacagaaccatccaaagctcaaaagaagcatttgctttgcataaatcaccacgctatgtgtagtcttctggatctggagattggaaaataccttgagccaaccattgaaagggtctcaagagttgagcccttttcttgtgcccgaaccaaatggcagcattgaagacttcattgcgaatcttatgag

SEQ ID NO: 6109 - DNA, 331 bp, Glycine max
  Clone ID: jC-gmle01810011a11d1
cccctcaccttaaaaattttggttaaagggctgttcaattttttctttatttaaaaaccgtttccctggcttttttataagacaaactccttaaaaaattaagctccgggtatttacagaaaaaaaaaagacatttgccccttttggccattatgattaaattttttttttattaaaggggggggcccttctttgaggtggcatgggcccaaaaaaatggtccacctttatgaatgggagcctttattgggcgtgcgtcggaaattatttataaatacggccctcttgaagctctgcaagagaaggttattctcccaactgggagcaaaac

SEQ ID NO: 6110 - DNA, 515 bp, Glycine max; identical to SEQ ID NO: 5900
  Clone ID: jC-gmle01810011a12d1

SEQ ID NO: 6111 - DNA, 497 bp, Glycine max
  Clone ID: jC-gmle01810011b03d1
aaccaagagttatatattatagctagctttactcaattttagacattttaactaaggaatcctatatggaaccagacactatagatgaagcattttcttaattagatagtgcaccaatggctattccacatatattgatatatatagcacctaaacagcagtatcatataggcatatactaaccatgctagtcgctaagtttagttctattacatgcatttttaccgaaacctctcctccttttccgatcctttttttcgcgtgggtaatttggtgagagaattaagggtttcaactttcatatatatatactggcatgcttgcttaggttgttttaccatgaataagaggcaaatcaacttcatcacaccactccatgtacctagtttcaaaagaagaacctcttgcttggttgggcaaatagctaacccaaaactctccccctattctccacttcatcacactccctttcatctttttgcaaagcctccacccca

SEQ ID NO: 6112 - DNA, 447 bp, Glycine max
  Clone ID: jC-gmle01810011b06d1
ggaataagatgagcagtcatcatttcccatttggtccacgctctagcagctgcatactgagttttgatatcatcagagtttaatctcttgttataggcatcaacaaagcatcctctctcactctctggaataagatctctaaatggctcccaagcatcagggaatatagcagcagcgcctccctcgtaaaaccaatcaatttctttcttccttaaaaggaaaatccccctgaggatcatgccagtaaccttgtccgggtgagattggctgtatgcaagggcaagtgtgcttccccatgatccaccaaatacctgccattctggaatctccaagtgttctcttagcttttcaatgtcatcaatgagagcccatgtggtgttttgctctaagcaagcatgtggtgtgcttttccctgcccttcgctgatcaaatagaacaattcggaaa

SEQ ID NO: 6113 - DNA, 367 bp, Glycine max
  Clone ID: jC-gmle01810011b11d1
gtaacacagctcttattgtaagctgtgtcaaaaccttttcccaattaacacagatttgggtgacaatttttgctatggccgaactgtaagaagatgttaacaatttttgctgcaccaggaacgttataactgggttgattgatgtaatgtaactccataacaaagtttatgcctgggattaatacaccagccctggcgagcatgaatatagcttcttgacagaaggttttggctcagaacaaatgatgggtgtcggtcaccgaatcttggatgaacaggctcaataagtcagactttgctctcaggcagctgagccaatctgagggctgcaactgagttagcttcagatgatatccctaccatgagt

SEQ ID NO: 6114 - DNA, 543 bp, Glycine max
  Clone ID: jC-gmle01810011b12d1
aggacaaaaggaaaaggcaccaaattcaatttaagtggacactttaactcaaaattatagaggaagacagtccaatatgaaaaatatagtaaaatcatctcaaacttggcatcttctctttgcacctaagacattgagaattctaagaatgttacacgcaagtcccatcacaacttctagcacttggatcagcacaaccttcaggaacagaaatatttacttgccaagtttgctttgcctccaattcaagattggaagaaagttcccctgttaatagcatcctcgttagcatttccaagtgcagcctcgttcaagtacttgtcagccaattggactctcttgacattctcttgttcttggacaagcatgttaccatacgtcaagagcttctccagagtcatcttgggctgctcaaaggttggaggtccatcttttgagttcacaagcttcttcccaatgccgtcaacaccaacaccagaaatccacttcctcacttcgtcatcatatactctggccctcagtgcaccaaagaaatcaatggat

SEQ ID NO: 6115 - DNA, 434 bp, Glycine max
  Clone ID: jC-gmle01810011c04d1
ccgacgcattgcccatgcattcatttcacgtatgcgtaagggaaaaatcagattcatggctacactcgcttgacaaacgacagcgtcaagtcttcatcaattcttcctttcccatcctccctcccctcaacctgaagtcttctcaaacatcacgctccttgcagttcactttctgatccattgtccgtcacgaaaccatttttaagcttttcgattctgtccgttcatctccacgtcataagtgcctggtagttccggcggaggaggtccgtccttcttttccagtgcagcgagagccgtagcaggatctccgatacctgctcgcgtaccccatccagtcttgtggagcgtgaacaaggcgtacaacttcatgatggcgaagttattcccaaagagaatccacgccgggacataaatgatgtgtgccgggtgat

SEQ ID NO: 6116 - DNA, 445 bp, Glycine max
  Clone ID: jC-gmle01810011c05d1
ccaaagttacaatttccttgctcctttgtttttttaacctaaaatcccattacattacaatcaacatttgataaagcaaaagccacaagcccctcctccctctgatttggtcttcccgttcttaacgaagtcctgaaaacaaagggttttggttatgtttctcgccaacgttaattaattggcgtttgatgatggccgatgatctctcctcaaatcaaccaccaccactctcacattatccgaactatgcctagccaacgctaacttggtaaacaaaattgacgcatcagagcaagcccggtcggaaccgtccggcgccacgtaactctctggagatcccggcggagacggcggattatgcgccttgaggcacatcctcaccacaccacatgcggtttcattcgacaccacattccacaacccatcactcggcagtatcaaacac

SEQ ID NO: 6117 - DNA, 572 bp, Glycine max
  Clone ID: jC-gmle01810011c08d1
cctataaaatcaaaatgacttttcatctcattatctttgaagagataatgccataagagtattccattatacagcagcctaaagcagagggaggttggctaactaagaaatattgggaaagccagaaaggtaactgactactaggtgttttccactgaaactgctctaaaaggccgactcagcaagcatgcaagaaagattttccttagctcattaagaccataaagatagacatcatagagaagatgataaagaatggagggtcacattatacctctaattttattatccatcattttgtttcccaaaccctccatacgaccatctctattttttccggtatttgtgttatgaatgatcaccaaaggtggccacatgatcagatcatcctgatttgctgctgcttcatcagcaggtaaaaactgatatgcctttgagttatcaggaggctttgagtagttccaacgcattaaaacacacagagctttgtgtaatcccaaatgatcaatacgtgaatcggccttatctgggttgatgtgtgcataatgagagcatgcatatctggaaaatct

SEQ ID NO: 6118 - DNA, 359 bp, Glycine max
  Clone ID: jC-gmle01810011c09d1
atcttaaaaacggaaagaacatgggcgggcttcaatttaatgggcgactattactcgcaacacgctatcaaattttgaactagggccaacctccttaaactgtataattgctgcttgaccccttgtatatgtaacgccccataaaaaaaaccactgactggaaaagtgcctctctagtttgaaacaccataagccttcgaaggacggcgcgattctagtcttgattggcggtgccaaaaagctaactatcctgatcttggtcatttaacccgttggaagccacccacttctccccatttataacggggcatctcccatggagcgatggcggatcactctctcctttaccatagcctttc

SEQ ID NO: 6119 - DNA, 415 bp, Glycine max
  Clone ID: jC-gmle01810011c10d1
attgacgaaggttgccattaacaaaactaaaaatacaagccatctgcacaatttgcagctcatacatcaatccgatagtcatacttgaactggccgagctaaaaaatagtgctgtcatttataggctggctagagggtgctgctcatgacttatgggacttaacaatatcattaacagttttccattttttaaaaaataaaaatatgtcgcctatagaactgggtcaccaaacaaactacatactagttttgatgctagaaatattagtgctagactataagtgttcgatgacatgctgctatttaacatactgatggtgtcggccaggacctgcacctgcgtatcccccttatagaactataaaatgagcctccattaggccggctatatgcaccgccttagctggaatcatag

SEQ ID NO: 6120 - DNA, 479 bp, Glycine max
  Clone ID: jC-gmle01810011c11d1
cgctgaaacgagttcaatacatcattttaaaacataataaacagcagcacttaaaccagagatgcaaagcacaagttcaagggagacactgaacaaacagataagacatatgagaacacttcataaaagggattccccttagcaaccaccacgaaggcgaaggacaagatgcaaagtggattccttctgaatattgtaatctgccaaggtacgaccatcttccaattgcttcccagcaaaaatgagcctctgctgatctggagggataccttccttgtcctgaatcttagctttcacattgtcaatagtatcagagctttccacctccaaggtaatggtcttccctgtcagagtcttcacaaatatctgcataccttcacgaagccttaacaccaaatgcagagtggacttcttctggatattataatcagcaagagtacgaccatcttccagctgctttccagcaaagataagcctct

SEQ ID NO: 6121 - DNA, 454 bp, Glycine max
  Clone ID: jC-gmle01810011d02d1
atattcacagccacaaaggaatctaagccacattagagaaaagcaagttaatcaaacatcagttctattattcctttgcgtattgaaaataaaataattcacatacggtaatgtttttggcttctgccatgcacttaatacccataattacacagacaacagggcatctattatcatgataaaatcagacggagaatctctccagagagcttgaatgatttttctgtttcttccagacagtggtccttttcttcccgagtccaaggttcagcaaccttattcaacttgtccctcacattctgcaacaactggggaaggtcaccgtcccatttgtagaactccaatgccttgttgttaagtaacttttcagcaacctgtgagataaagtaaggataaagtaacaaactaacaatcattcagtattagttttaactcacagtaagacaccacagat

SEQ ID NO: 6122 - DNA, 501 bp, Glycine max
  unsure at all n locations
  Clone ID: jC-gmle01810011d03d1
gacccatgagccacaccaatcaatttgcaaacatattcacaatcacgccaacatagcaacaacatcacccacgagcacaacaacacgcagcacatgtacctgaatcatcatcgacaacaactcctcgatgtccatttcggttcattactgcattcgccttttcaacaattcccctttctgggtaaaagacgacacaccccagaggccaaaacataacaaagaagcaagcaaataactaaaatatctcagtcctgaaacaagaattaacaaaaacaactacaaaggaacgacaattagcatgggagtcttggttgttcttcaagcgagtgtaggattctctgcaggagaagtcctccacacgatatctttaagagctggacgaagctccttgctacagaactggttatactccaaggtgtcanccgtgtccttcttaacctccaccaccaaaaacgacggcgtcacggcgtacaagtccgcagcaatagcgagattaccttt

SEQ ID NO: 6123 - DNA, 491 bp, Glycine max
  Clone ID: jC-gmle01810011d04d1
gccttcgtcctttttttttttttttttttggggttacaaggtaattgaagaaattcaatttgtttaatcaaattccccaaccccctctttttttatttgttcactacgtatgatatgcaataaaatattatatggcagaaatatgtctatgttggaaaaaatagaaactaagatatacgatttttcaggaaggggttaaaaaagattattttattgatatttttagaatatttttatttcggccccaaccagaagggataggaatcggactctaggaaaagacaaaaaattccccctagagtaccttttccatattttaattgattttgtttcaaatcatctatctatatcgatatttatttaatgcatagtatcgcatgccattttattgtattttacaaccgaaatttctataagagaactttctattatagaaaaatgaaatctgaaaaaaagagtgtcataaccataatgttcgaatctattggggg

SEQ ID NO: 6124 - DNA, 520 bp, Glycine max
  Clone ID: jC-gmle01810011d05d1
aagctgtaaaggtacatgtaaccataaacaaaaatagtctccaagactataaaaacattacattttagacaaattagtcttcttccacttcatcctccgtcaacacctactacaactgctggtgttgctgctgcctaacatgtatcatattcactacaaacatcttagtaggagtagcctttgacgaacaactccttcttggcttcctcagattcaccctcaccggtgtacttcccaagctgggcgagcgagttggacttggcacggaaaagaagtgcatcttgtgccgccttcacattctctgggcggcctccccatgtcttcaaggcagtgttttggagggctctggcatacgagaacgacacgtgccacgggtttggagattggttcatggcattcaagttgagggtagcttcaacctcagactgtccaccagacaaaaacataattccagggacagcagggggaattctcctgtgaggagcttgagggtgtaatcagcaactgtctgaggactggc

SEQ ID NO: 6125 - DNA, 379 bp, Glycine max
  Clone ID: jC-gmle01810011d08d1
aaactaaaattacttttattttttaaataattatgctgttcaaatgttttctcatcgtacattataagctatttctcaagtcaccactatattcctaccatctgaaaggagatataacggggaaaggaaaattcaatccagtaaacacgtaatgagctgtttttttcttacatgcgagactttgcctgctgctccaaagaggcactcagaggaattcctttggcagcttttgcagccaagggggcacagggcttgaagaattccccatacaactctgaccatttctccaatcttgaatatatgaacttggatccaagagaatcagcccagaatatgatgcctcccctgtaaggggggaaacccatgcccctgatagcgg

SEQ ID NO: 6126 - DNA, 393 bp, Glycine max
  Clone ID: jC-gmle01810011d09d1
attgagataggtcaacgagttgcattcatggagatctgggtacacacaacataatattgcaagaaaaggattaattcttttaggtaatccaaaatcacatcctaatcctactctttgcacgtgtgcaactctaacaattattctggagttggcaacaacattaaatatttggcctctggctgaaatgagaagctatcttttggcctagagaacggacagcctgagaccagcttgatatccagacactgcggatctcatgggtgacccgtgggtcagataaagcatcaacccatcggcgagcaaatctatcttgcctgtcaggtgcccaagaccggtatatttctccgggctgcgttgaagacgctctccttatcaattgcacactttacacgc

SEQ ID NO: 6127 - DNA, 456 bp, Glycine max
  Clone ID: jC-gmle01810011d10d1
aaagaactggccacttaaatgccattcattttccattaaaataaagacaatctagagagcaggttccaaaagttacatgttacacttaaaatgaaggagctggaaacaatagcacagactatctccctaatgtggaaatgctattagaacaagggatattagcccccaacttagcataaattttcttcaatttgaagtgaaaacatctattaaatcctcctacaagttgctcccagaagcagatacctcagtactacaaactgggcaaaccttgtttattttcaaccaattgttaatgcactcaggatggtacagatgtttgcaggaaagaactgtcaaggactcatcatcctcatagtccacccggcaaatgacacacgaatcattgcttccatgttgatcactcccagtcttgtagttgactgaaggcaaacaggcaatagtatcagttgaaag

SEQ ID NO: 6128 - DNA, 436 bp, Glycine max
  Clone ID: jC-gmle01810011d11d1
aacgaatataaaataatattaattttatatgaatttgtgagtggtcaaattcatatgggaacaaacttagttccctaatatcttacaaaggatccatgatagttcattgcaagtatgtcatcatttaacctttactaaagaaactatttacaaaaacaacacttactatgaataaccaaagttgcataatgtcatttcaccagtagttccactagtgtacattattgtatagatgagtcctcactaaggcttattgtgtcaacctaaaaatccttttctgtctcaatccctgtataattgctacttggcacttcattggagtcatctttcttttcattttgcttgggcgaaggctattcttaacaactttctaaccatacttcttacatttgtaacaatcatcaagcgcatttacatgatttgttgcttggaaaca

SEQ ID NO: 6129 - DNA, 423 bp, Glycine max
  Clone ID: jC-gmle01810011d12d1
caaatgtaaaaaaatcagggtatttatatattatatagtaatataactggagtaactgcacacggaccaaatctaatcagagcctaaaaacgataaatgcttaaagtacagaaggacagataacatttatcaagtgctaccaaatctacactactttcacacaacgcgtatcacacactatagactgcataaactgtatggcgcattattccctctacctttatttgcacaagttcttgagatccatggggtgctacactagaatcactatctagacgtggtatgggggaggtggtgatgcatgtacatagcgcggtgtaggaggaaatggattcttgattgggctcttacgaggggtaggatgcacaactttgtaaccatacttactacatccgtaacattcatcaagcacatctacatcat

SEQ ID NO: 6130 - DNA, 553 bp, Glycine max
  Clone ID: jC-gmle01810011e02d1
gaagaatagttgctcaatatactagtgctggaacttacacttttgtcagtttgggaataaatagaagggtatattcaattttctagctgtgatttctttgcctgaatatgtatgcaaggacaaaacagaagaagcaagtaaaatcaaatatatttgactgctgaattgtctatatgacttatgaactaatcaacaaaatgattggataggtaaactattttctcctcttgaaatcctcatccgaatccacactcttgagtcttcttcgttccacaatccagaagaatgaagtgaaatttattgtattaaacttcaattgttttctgattgagagctgtgtatctccatctctccttctccacaaaatcagcatcaaggaacctggcaacaaaagtccatagtttatatacatcttcaaaattagccaggaagcttaatgcagcagtaaccacagttactcctagctcatctctatctttcttcttgatggtgggtactccttggactcttccttcttaggtctgtagaactttccccttgacttctgcatact

SEQ ID NO: 6131 - DNA, 536 bp, Glycine max
  unsure at all n locations
  Clone ID: jC-gmle01810011e04d1
atgctcataatcaaacataatggtgattataaatgaatggactacatatctgtttttaaaattctgtgtacatttctcttataacaaataaaatacaattcaaataatcctcatagacaacccatagaaaactgcattaactatatttatgccaaacagaccagagaaaacaagactggtttcctcagcctttacctagtgttgaaatgcaggcaaatgcaatctccatcatcttgcataatgttttaatcttctaagcacaacttgcttatagaacctccgggtccggaagaataatgccaaaccaaccaaaaacgcaagaaaagcaacagctgccaggataaaaaatgacggcatgaaacagttgatgccaaagcacgaatgatcttctttatcggcttgcttgtcgtaaatatatccaacaactctcacagaaagtatatacgatccaagtggacttgctgcagcaatagtattgaaaatggtacccatatgctntacaccaaatatctcagaagtgattgtgggcatcaagg

SEQ ID NO: 6132 - DNA, 393 bp, Glycine max
  Clone ID: jC-gmle01810011e10a1
cctcggggaattccaattccacattttcaagatataaggaggcaaaaatgttcatatatgaattggaattatttgttttcttattaggcctatcctgaagccaaaggaaatgagatcggaattcctcggggaattccaattccacattttcaagaaataaggaggcaaaaatgttcatatatgaattggaattatttgttttcttattaggcctatcctgaagccaaaggaaatgagatcggaattcctcggggaattccaattccacattttcaagaaataaggaggcaaaaatgttcatatatgaattggaattatttgatttcttattaggcctatcctgaagccaaaggaaatgagatcggaattcctcgggggtaccgagctcgaatt

SEQ ID NO: 6133 - DNA, 473 bp, Glycine max
  Clone ID: jC-gmle01810011f03d1
acgggtatcaaatccaagttggtgacatagagaaatttgatttgacattcatagatcagaatatcagacttacatacgggtgaacatgatacgggtgaacatgataggagcacaatactatacataaaaactgacacaacaccctattagatatgaaaaactagatagcatccaattacaaaacttaagcatacataagagaattatgcacacataagttcgcacgtttatttgtcaatgagaggtacgttggacggaaagaaaaccacacaccacacaccacacactctcattagatagagatgctgttgggaattcctctgaaagtaaggccttccccactggtaggaagaagcacagtgtagggcatctgcgccggtccattacgggtcctaaggcttgaattcttgttcctccctgagattttgtcctcaatttccttcagctgggttccaaacttcttaaaggcttga

SEQ ID NO: 6134 - DNA, 403 bp, Glycine max
  Clone ID: jC-gmle01810011f04d1
agaaccaaaacctttgaaaaacattacaaatcctgatttcgaatttacatattggcataaaaaaaaagctttttctagcaatgatatgatgtaatgacctctcaaaattcagccggcattctcaaccaaaaccctgcctaatatagtataaacatcaacaattcaattaccatagtaactcaactgtgattaattcataacatgaaaaatcaatgaatcttttaaggggtacacaagcttgctagggcagatgctgctcaccttgccaaacaccgacaatattttttagagctgggcttaagtcttccttcaatatcttctgggattctaatgcatcaccgcaggactttttcaactcgaccaaatggaaagatggggcaacctcaaatatttcagcatcaat

SEQ ID NO: 6135 - DNA, 452 bp, Glycine max
  Clone ID: jC-gmle01810011f05d1
aacaaaatatttgtacatatatcttttgtaaataataataaaaaataattagattcgctgaggaagacatcaaggttttgatcaaatattaggtattggtattggtatgtggaaacaaagccccatgttgactacagggcctcatcactatctgaatcattaagctcaagaccttctgctgccaagagccggctgaaagtcttcttttttttttcctcagcctttcttcgcataaaatctcttttcttcaatacaagggtgtgccttttaagggtattcgagtaatattcacccgaagcctttttttctcttggcagaatcctctttgctttatctggatcaatctttgaacgagaaagttgacgcacgccaagatttagctcgcgctgttgctgctcagcccaagcagcaattgccatatcaccccgctgatcgaaagcttttcgcttttt

SEQ ID NO: 6136 - DNA, 500 bp, Glycine max
  unsure at all n locations
  Clone ID: jC-gmle01810011f06d1
agttattccgatattcggacgcatcaacttgttatgaaatcacattgatagcctctactcgtgtcctagctcgtctaagagctagatttgcctcaattgtttgtctcttgccttccgccttattcaaattagcttctgctatttcaagagtttgctgtgcttcttgtggatcaatgtcactacccttttccgcatcatttactaaaacagngatctcattattgtttattctagcaaaaccgcccatcagagccatcgttaaccattggtctttaagaagacgtattctcaaaatacctatatctacggctgtggcaataggcgcatgatttggtaatactccaatttgtccgctattagtagataaaatgatttccttcacttccgaatcccaaacaattcgattgggggtcagtacacaaagatttaaagtcatttcttcaaattgctcttcatttctaagttcgtagctttcgcagnagcttcatcgatattaccta

SEQ ID NO: 6137 - DNA, 431 bp, Glycine max
  Clone ID: jC-gmle01810011f08d1
attgcggcacagtctcaaatacattattaaatttcgtggccattcatattctttcttataaaaatcagtgtgagtggtcaacaagatgacatttatgtccaaattccaatgttcaataaaataaatcattaagcaaaaatttgctaaaaagatataaatgaatgaattactacaaacacctctgaccaataaaatgaattggagcctaagttcaacaagaacctccacaatcctccgacccaattgcgcaagaagatggaaaaatgtcaaggcttcgtgcagtatatacaacctgtgcctgctgaataatctatttattcccagagcaaaacaacgtgttcatccgccaggggaggacataatagagccgatccaatcattttttcagaaatggtttctggcaaacaagaagccgctggtcactgccattc

SEQ ID NO: 6138 - DNA, 454 bp, Glycine max
  unsure at all n locations
  Clone ID: jC-gmle01810011f11d1
ctgtaatcacagacaatgcatcatcggggagggaaaaaaaatgagagccgagaaacaaccatcacaatcatcaaaattcaagcagtaagtgaaaccctataatctctccagttggggggcaatatttgttaccctataatggcttgtttactttctctacaaagttgtctctctttttacaacattagggtaacaaaggttatatatagcaaggattaagacccatctttgagactcaaccgaacggagaaggaactggtcctgctcctgctagggcatctgatctcttgatgcttcccattccacagacgatgcatccaggcgcagtcacggctgaaaatttggctccacagagatcacaaacatcatatccgatggtngacagcctgcttaaggtggcagaacagaattgcgagggatcttccaaaggatcaatggacttgttagtcaaacc

SEQ ID NO: 6139 - DNA, 504 bp, Glycine max
  Clone ID: jC-gmle01810011g04d1
gaaaagttccaagatccaatcatatattagcaattcaatgttaaggtttaggcacctatatacatttctgtttgttacatcaaaagaattctacaaacaatgttacttttctacaaacctaagatacacagcttacaattttacacactcctatgtgcaaatgtgtgtatttattattattattattattattattacgcatgtacgtagcaaatatatcacaggttatcagtcaaatgtttataccaaggttcatgaacactaactgaaatagtggctgccacaatcaaaacaccagcagtttccactaccttatcagtcagaataccagccccaactttcatgagagccattattgctaatttcctcccacggatcccagttacaccaagcacaacgccgcgcaaagctgaatagacagcattaaacaccctctcgaaaacaacatccccagcttgtaagctgtttcctagcatactagcagcaactaccttccttgactca

SEQ ID NO: 6140 - DNA, 516 bp, Glycine max
  Clone ID: jC-gmle01810011g05d1
aggacaaaaggaaaaggcaccaaattcaatttaagtggacactgtaactcaaaattatagaggaagacggtccaatatgaaaaatatagtaagatcatctcaaacttagcatcttctctttgcacctaagacattgagaatgctaagaatgttacacgcaagttccatcacaacttctagcacttggattagtacaacaaccttcacgaacagaaatatttacttgccaagtttgctttgcctccaattcaagactggaagaaagttcccctctgaatagcatcctcgttagcatttccaagagcagcctcgttcaagtacttgtcagccaattggactctcttgacattctcttgttcttggacaagcatgttaccatacagcaagagcttctccagagtcatcttgggctgctcaaaggttggaggtccatcttttgagttcacaagcttcttcccaacactgtcaacaccaacaccagaaatccacttcctcacttcatcatcatatactctg

SEQ ID NO: 6141 - DNA, 516 bp, Glycine max
  Clone ID: jC-gmle01810011g09d1
aagtacacaactcatagcaaaaggtttattaagctgtaaaggtgcatttaaccataaacaaaaatagtctccaagactataaaaacattacattttagacaaattagtcttccacttcatcgtccgtcaacacctactgtaactgctggtgttgctgcctaacaagtatcatattcactgcaaacatcttagtaggagtagcttttgacgaacaactccttcttggcttcctcggattcaccctcaccagtgtacttcccaagctgagcgagtgagttggacttggcacggaatgcgagtgcatcttgtgctgccttcacgttctctgggcggcctccccatgtcttcaaggcagcgttttggagggctctggcatacaagaatgacacgtgccacgggtttggagattggttcatggcattcaaattgagggtagcttcaacctcagactgtccaccagacaaaaacataattccagggacagcagggggaattttcctgtgaaggagcttgagg

SEQ ID NO: 6142 - DNA, 547 bp, Glycine max
  Clone ID: jC-gmle01810011g11d1
aaaataacacacacttcacacatcattacgacaattaaaagaggtgtggaaattttcaaatagacagagcatactcaacaagagggtcatgtctaatttcctttattgaattaaacaaacgaacaaacgaaagaaaacacaaattccagatcatgcagaggattccgcattttcagaagatctggcagtagcctgtggaacagaaaaagctggcataagagtattaccagcaatttcaaaatcttgagaaattcccaagagaatatcaaaaactgtagactgtttgggattgtcaataaggaaactcaagtgccatgaagtttgatttgcccactcagaactccacatttcaaaaccattattaggaccacatacctctattgggaagatcaattcccaggaatgtggttccgattttgtccacttacatgcatcgaaatgctctgtactgttgctgtttgttaaaaacacttgtaccaatgaggcccaatcactccttttgactgctgcattccagacatcacaatttaaccataaacagcctttt

SEQ ID NO: 6143 - DNA, 526 bp, Glycine max
  Clone ID: jC-gmle01810011h03d1
cacaggactcatttttttatgtaacttaaagacaaattgaacatggtctttcttcgtctttatatgtgattttttctcaaaaaagcacggttcttcttgaaacttgtccaagctccttaaactgtatagtgctgctgaatcgtgtcaatgtcaagccccttcagcttcaccactgactcgacatgtccctttagagtatgaagctccctaagccttgcaacttcagcacgtctcttggcttgttctgcaatctctgaaagctccctgtagctatttttgtcattgaaaaggttggaagtttccggaggctgaagaccgtgaagtgtcctctgtgcagccgcccattgagcttccctctcttctttaccatagtctttctttgtagtgaaggcagtcttgttctccaaaagattatcccaagccttcccacttagaatatagcggatagcaaatttgagtaaatcaagagggatataggttaccacactgtacagccagattacaccagcccaaccccatcccattc

SEQ ID NO: 6144 - DNA, 458 bp, Glycine max
  Clone ID: jC-gmle01810011h04d1
ggaagggtaatgactaatgggggtctcaatttaatggtcagctagtagtgcgttcatgctatcaaattttgtactagggttacataatttcagcatctaattgaatttagcccttgattattcatctgaccatataaaaataaactgtttggaagatgacgaccttgcttatgaaacaaaattgctacgatggatgtcggaattcgaatctcgattgcgggggccaatcatttaatcatcctgttcttgatctcttatccactttggagccacccacttctccccttttatcacggggcagctcccatggagtgatgtcggatcaattgtcccattagggagcaatgaataaaatagaagaccctccccttggcgtggctttacttttaaaccaatgcaggcctcatacccatagttaccatccatgttcaagccattctcaaatggaaacatagttt

SEQ ID NO: 6145 - DNA, 512 bp, Glycine max
  Clone ID: jC-gmle01810011h06d1
gaagccaatgtttttccccctcatttcattgatttgacattcaatttaattggaacacaatgatattccttaatgataaggcacaagataaaattcagtttcatatcatcctaaatacgagtacaacaagtagtcacatatgaagtagctatgcgacatatcaatcaaactcgttattcatctctgtgattcccagctgcaaaagacaatgcaatgctgaactcacacggttgtacgttcactatgatttatggaacatgctatataatgatgttcccccatgcatgtgtgtattacactactagcccatagtataggaagggctgggtaagttgatcacagtcgttttgaccttggtcatcatgtttatgctgttggtaatcccttgagatccaatgccactgtcctttataccctgaaagggaaaatgatctggcccacgagctggggcagaatttatctgaactgttcccgttttcattgcatcactgatcattattgctttgttgaca

SEQ ID NO: 6146 - DNA, 427 bp, Glycine max
  Clone ID: jC-gmle01810011h08d1
acaaaaaatgcccattatgaaaacgaattaattcactaagcagaatatgaacttaatactatacaaattctaccagcataggagggcattcatggtccaactactgatatttgggactggaaacatgaaccttacaaaattcagggaactttatttatacaacttttaacggggtgggcacaagcaagatccaaacactaacatttgaagcattagccttccaaaattcaggattttggctttattttaataacctcgcagaagagcttctcgactggggagggggacataacgaacagatgtttcaggggggacactgatagaaccatcaaaatttttatccaccacctttaaatcttggaatatgttttcgacaggaataaccattctccctccagggttaaactggtcaataagaggttgggga

SEQ ID NO: 6147 - DNA, 407 bp, Glycine max
  Clone ID: jC-gmle01810011h10d1
gcctaataactgatttgaataaaataagatgtctttagtcgaagaataagattatgagcaactgcacacaggatatagttcatagagaatagagatcaaaggggtcgataacagagagaatatacagattctttttttgtgacatgaaaaatccttaggctagtagtaactgcgatagcatgacaagtatcaaaattacaattaagttggattcattcgacttccacgatctcatccaaagcatagttgtttgttgatacattggcatagttgactttgttgaatcgaaccacaacagggtagcgagtgttggggtcctgatcaacagcaaccactgaaccggtgcctttgtaccaagaagattccttcctaagaatctttaccttagcacctctcttggggccaat

SEQ ID NO: 6148 - DNA, 301 bp, Glycine max
  Clone ID: jC-gmle01810011h12d1
aggacaaaacaccaaaaccaacaattggcagaacacccctatatactaccctaatgtcaaaaaaaaattcccggggggccacaaccctcttttccacaggggcccaaaaaaagggagaactcctttatttttcaaccaaaaaacccccaaaaaccccttttgtttagcaccggttacatcgacgccttctcaatggaaaaaacaggggcctcccaaaaaattgaaaggggctaacggggggggtctaaacaagctaagacagccccccctggaggcgccaaaaaatcgggggggttaaaac

SEQ ID NO: 6149 - DNA, 558 bp, Glycine max
  unsure at all n locations
  Clone ID: jC-gmle01810012a04d1
gaataaaaacacacatcatattactatgtgttgtcatacatgcattgtaatgagtggatattccaaagcaattggtccctttatccctccttaatccttatgccgtaaatggcaccatcccttgtaaattgtaattgcttcttcagaaatagaattatacaaaggtagttgcaatatctatttgccaaactataaatgtaaagacccttcttcccaatcctagtagtgtcccaattgtatttacaaaggtgggacaagatatgtatatacaagtacaaccatgtaacataatgtaacaataatcatactttggtctttactagtgcacattacagggagttattatgcactgaaacccctttgcagagaactccagggattggaaggaatactgacacaagcttgtgctgaagcctcagccatttgttcattctttatccctacattgcagatgtttgcaaaggacctcatgtgtttcatcccgtattgagacaaggatccacaatgtgtctcaaaagtcctcaccatggttntcaggcagtgccagtcatcaacaag

SEQ ID NO: 6150 - DNA, 517 bp, Glycine max
  Clone ID: jC-gmle01810012a05d1
gagcatataactaggatgcttgtttctatcggaaaatgactttattcaatgtacattctacttttctgctaatcctacataacttagaatttgtttgaagttggctattggcagatcacatgatggtagtattggaccataaccaaatcaacagacactattacacttgaatgacttagaccccgtgatcgttgcagcatgaaatcagataagatgctgaccaaagatcctgagtgaacagtgcaaaccgtcaaaaaatatccatatcaatagagctaactagcactccatcatcttcccactttatatcctttgccacgggatcgtttcctatcaatttaagaggaacatctaatgggggtcgagtcatgttgcggataagaggccaattgattccacggaagaaaggatgttgcttgatttcattggcaccagtggttgaacctatacgacttgttgggtctctttggagtagtgcattaatcaactgcctggctgcaagactagccgggatgct

SEQ ID NO: 6151 - DNA, 512 bp, Glycine max
  Clone ID: jC-gmle01810012a06d1
aacagtataagtcacccatatgtaaaagcactaattgcaaccaattgttccagtttcatagtagtaacccaaaaaacatgaaaagtgaagtacaaatgcatggtgagacacagctaatccaagctactaaaacaagggacagagcaaacaagtagaaaatactaatgagcaataccaataaataaaagcaaacacaaatccgaccaacaaaaactaatgaccccaaatgaagattgtcctaatgaaaatagaattttcatcaaaacttatctgccctgtcccttttctgttcatgtgctttcaaatgtttttgttatggttgattggtcctcacttggccatcatgactttgacaaactcctcgtagttgatctgcccaacaccatcaacgtcagcctcacgaatcatctcatcgacttcctcatcggtcagcttcttaccgagattggtcattacgtggcggagctctgcggcagagatgaaaccattctgatccttgtcaaacacacgga

SEQ ID NO: 6152 - DNA, 547 bp, Glycine max
  Clone ID: jC-gmle01810012a08d1
attaaacactgggtttttactcattgcattacctgcagatgctagaaatattatgttcgctggctaaatggaatttgccacgcttgatatcgtaaaagtatatactactacatcaaaatttctcctgtgaaagacagaatatataaatctaaacttacgctttcccgcaaaagaataaaaaataacaaaacaaaaatgaaacatagaatatgttgttaggggacacattgaatccatcttgaactcgaatcctccgtgggccttaaccaacatcaactgtttcttcattcacgactgaagtattcatccccacgtggtcgtcacgcagttatgatcccacaccgagcagagtgaaaacactcaactcccaaagtgccttctcagcttcaccatctctttccaccccagttgccgtcacgcccaccaccattggagaacctaccattcctgcctactccacctctttcaccaaacctgtagtttccaccacgaccaccattatcaccaaatctgccacctctagattgcggctctttctgttgcaact

SEQ ID NO: 6153 - DNA, 555 bp, Glycine max
  Clone ID: jC-gmle01810012a09d1
acgaaagcattcaaatgcagagtatgtattcatgatgtaaatacaacacaataacaagtcatccataagcatataggatttctgagaggtacatgtaaagccagaagaaaaatatacaagatactcttcatccacaatgtctagtaaaaggaccctaaaaaaataaaatatgacatgatagggttttaactgatgatgaatctaaatttaacaggacattcatgaaaccccactaaaacatatttgtcagaatctagtgccacttcaatctttctttttatctttcaaaggtcctctgggtatcttgctcaacaccttcgcatcaaacactgcatattgcttcttaatctcggcaattgccttcccaccaaaagagtctacatgatcttcatatttctcataaagcacaggcacagtgtgcagcaaaacaaaagctatgtagaacagggtcaagaagttggcccagctacccaaaatagagaaaacccataatccagcaatcactgataagaacttcttgagatcccttccagatgcaatatcccttaacaacgc

SEQ ID NO: 6154 - DNA, 522 bp, Glycine max
  Clone ID: jC-gmle01810012b02d1
gttaaaaatgttatataagaatttgttgtaaggaatattataacactggctaaaataggtcaaacaaagggagccagccagcacagaaatgctctacaatacctaatgttaaatatttgcaacactgccttgaattccaaacatgacttgtatcatgttaattatacatttggcattcagacccaagctaagtaaaaaatcaaagtctaataacatatacagttggtggtaagattttgcaatttacatattcaccttggtaattgagaagaaaaattttacccacggcgaaggttcccaatggtcagtgtcctagttttcccttgattacatttagaaatcatggaagttcctaaaaagtcaatttctcacatagcattttttatcttctttctttgaccataattttgactttggtatatgtatctgttgctccatttcaataaatcaatttatgaagcggctcgagcttctattgaatatgggctaacttaacccataaactagcttatgaggtgagga

SEQ ID NO: 6155 - DNA, 606 bp, Glycine max
  Clone ID: jC-gmle01810012b04d1
acaagttaattgaagaaattcaatttgtttaatcaaattccccaaccccctctctttttatttgttcactacgtattatatgcaataaaatattatatggcagaaatattctaagttggaaaaaatagaaactaagatataggatttttcaggaaggggttaaaaaagattattttattgatatttttagaatatttctatttcgacacaaacaagaaggaataggaatcggactctaggaaaagacaaaaaatcccccctagagtaccttttccatattttaattgattttgtttcaaattatctatctatatagatatctattttatgtttagtatcgaatccaattttattgtattttacaatcgaaatttctataatagaactctctattatagaaaaatgaaatctgaaaaaaacagtgtcataaccataatattcgaatttattggggggttgaaaaaacaaagtcaaatagtcttcctgacaatatccatactcgagtttatttgtattacgttacaagtaactctttaaatatagtataaaaagactatacagaaccaaagatcttttcataatatattattctatatactgatatat

SEQ ID NO: 6156 - DNA, 535 bp, Glycine max
  unsure at all n locations
  Clone ID: jC-gmle01810012b06d1
gtcccaacattgataattcagatatggattttaaaaaaaaaaatcaggccaattaaaacaaatagatcacgaattgtccaaaacacaagtgcccaacctataatcatccttcaacatctacttccagaagcactacgcatgatgcatactcctcgatatacctatgcgggtattattctatgtgtgtctcaatatactttccttacctcacgttatatatacacttatatttcagcaaattcactaaaatataacgatgtattttaaaaacccacatcgattcatgtgtgactatatacattgaaatgttaaggaaaacactatcttctacttctggtggttgcttgcttctttggattggaaatggtgtcgctttccactggacatgccactatcactgacacttccttcacccataatatcatgaacatcagaaaattctgacattcgtgatctcaagggaacaagatcacaatcatccttggtgtttcgtgtccgctgctcctcatggcgtttcacattntctgatatctga

SEQ ID NO: 6157 - DNA, 529 bp, Glycine max
  Clone ID: jC-gmle01810012b07d1
gaatatccaatatatactaatatatgctaatatatgctaatcgaatatctatctatatctatctacctatatctatatagatataggtagatagatatagatgtttactaagtagattatattgagccgcaatatatgtgcggcaagctaaacgaaaaggactattttgtagaaaactggtcaatgatggccttccatggattcacctatataagccgcagctaaagtagcaaaaatgagagcttgaataccgcttgtgaataatccaaggaacatgacaggtataggaactactaaaggtactaaagaaacaagaacaacaactactaattcatcagctaatatatttccgaaaagtcgaaaactaagagataagggttttgtgaaatcttctaagatgttaatcggtaaaaggattggggttggttggatgtatttattaaaataagctaatcctttttttgaaagacccgcatagaaatatgcaattgatgtaagtaaagctaaagcaacggtagtatttatatca

SEQ ID NO: 6158 - DNA, 446 bp, Glycine max
  Clone ID: jC-gmle01810012b12d1
atgcaattgcatgtacattagtggaaaaggtaatacgaaatatatttattagaatatacatatttttctttatttgcacagaactggattaacatctttgtttttccactctatcaaatgttgaaattcgactagaaaggatatcagaaattttctaagagctggctttggctctctttactggggcctgaagggaatttagataaatggcatcctttttgtccagtccatcaaacagataactatacggtggcattaggatgtatctcccagttccaggagtgacctttagttcattattttcccaaacaactcttcctcccacaatagtcacttcaatttttccctttcctcttcttccctcatagacatttgtgtccagtctggagtggtgggactttgcactcatctcaaagctcgaatttggattaaggatgataatatct

SEQ ID NO: 6159 - DNA, 175 bp, Glycine max
  Clone ID: jC-gmle01810012c03d1
aaccacttgaaaaaacagaaaatggacagacaggggaggccaaagaggggggaaagggggaccaaggtaaccgccgcatgaaccggaggacttagagcccaaagcccaaaaagcaacaagagccgaaagcggagattacggacgcgaggaaggcacgccagagaccttaaaaagg

SEQ ID NO: 6160 - DNA, 497 bp, Glycine max
  Clone ID: jC-gmle01810012c05d1
ctcaacaaaccatcatttactcatttttcaagaactgtatataacatcttattctcattcagatttatatataaggaacttgggcagttggcctaaacatggagaggagttttgggacggtgaaatatataccacctttaaagcaagaaaatccttgggaggaaagaccggctggtgagtttctcttgtgcatcaactaattttgaacaggtaacaagtgtgtacagtatagctttcctcataacggcagtcaaaaatccctgaagcggacagcatacattataacatcaaatttcctacattctgtccaaattttacaatcaacagtctataagactgttcgtcacctcctcaaaatttccttaaattctacgcattttgaatacttttgactctccactggttgcgcagagctcactgttttctgtttcttcaatagtgcctgcaaagttaagcgagtataatttcaattcccgctttttaccgtgaaccggatg

SEQ ID NO: 6161 - DNA, 535 bp, Glycine max
  Clone ID: jC-gmle01810012c09d1
ggggttaaaaatgcaagcagcaggtacttattttaatgttttataagtgcaatttgaagaagacaaagccctaaacaccatatctaattttttcttgtacattagaatctgtaaccggttaaggttactcataatatgatattagtaattttccagaaaaaaaccacaactagaaattatttccagattctccgagctccgtttttcaaggtatgaaaccataacccttagcagtgagtctctagtcttgatgacccagcccgtgaaaaactatatgataaaaaatgatcaccaaaatttactgactatcttcaactcgatcttcagtattttacctgatcttcatgcagatcttcaattttttacactcatcatagaactagtttcctggttcagtttccaagtttgagctcttttgatgattacgttccagtactattctatagatatagaatgccaccactgcaccactgcagatgtgaaacaaagtctgtacgtaacaaaatactagtattaattaatatgaaagatcaaa

SEQ ID NO: 6162 - DNA, 230 bp, Glycine max
  Clone ID: jC-gmle01810012c10d1
gcaaactgaaatagggattttttcttaagcaaactcaaacaagaacaacttccactcatttggcatttaccgcagtaacccctgaaccaaaagaagcttttctgatagaacacacgtacggatgattcaacatctttcacagctgggggccattccttacagctagcttttggaacctaaaataattgcaatgcttctgccaagagctaactttttttcccccccttttt

SEQ ID NO: 6163 - DNA, 113 bp, Glycine max
  Clone ID: jC-gmle01810012c11d1
gaataactaaaacattatagattcccagcttagtatatccaggcattcagacatttataatctatactttaacgagaatttaatccagaaacacatttggactttaggggccc

SEQ ID NO: 6164 - DNA, 465 bp, Glycine max
  Clone ID: jC-gmle01810012c12d1
aaataattgttgttgtttcttaaggattatccatacattgttccaactctatacaagagtacaccaggaagaaatacacaaaatcatttatgtataaagggtttgtttctttgataaaataccataccacttgtatgtctgaattttcaagagctttccctagtaagaatactaaatagtgtgtataaaagaaatgacaaaagtcaaccatttgctttgtcatctttatctttggaaattataactgcatttacttttttgacgtatacattttgtcctctccccaggatgactggcaggagctgttcatcattgatcaatggcgtgatcaatcaactttaggcctagcagcttgaagcatctcaacaatgagagtcttcacatcctttctatcttcagcacgtcgagggaaaggtacacgaagctagaaagtatcaccctggtaaccagccttaacattgaaac

SEQ ID NO: 6165 - DNA, 509 bp, Glycine max
  Clone ID: jC-gmle01810012d02d1
ctctcttaacatttttcttctcttccaattgctctcttccttttcagccatctcatctcacacaccttacgacacaaaacattattgatatcaaattatcaatatacctggtagctccaaggccaatattgtgaggaaaaatagtagcattgtgaatcgtgttgtgtccatgaacggcatcaatcccataaaacattggaattccgagccgggttgataaagcacccttctgaaattcattcaccatatcaatccaggtttcagcagaagcctgtggagccggaatactccctccctcactcaatacactccctactcagaagaaaaaataatttccattattagccaattgagtaaacataaccacaaacaaagaaaagggtctggtgattaccaataaaatacttcttaagcaaatcagcaggcacatacttgcgctcaacctgcaacatttggccaattttctcctcaagagtcatcctcttaacaagatcctcaacccgagtatc

SEQ ID NO: 6166 - DNA, 510 bp, Glycine max
  Clone ID: jC-gmle01810012d03d1
actattcaaacacacaataagtcatataatgcatcatagtttatacataagaagccacgcatagcatctaaataaacagcaaaaaattattaatatctagagaactacacagtgcaaatacatgcatatatatagagttctgtagtgctactgaagctaagttattcaagaacaggaaagaaggacttgaaattaaagcaaatctacttgggaacccaaacaacatgatcctcaggtaggaagtggcagacaggaacggttcctggcttaactttgagcacttgaaaggccaaatgtttagggttccattccgacgtgtgagtgtggcacactgctaccgctttaaccctaaccccattagcaccctccaaaggcacagagtaagctcttgtggtctcagttttgtgacagtaaaaaacagcataagggtagttctgcttgtggcacacaacagccttgtcccctgataacttgttcactcccggtgctacggtgtatttctgcaatccc

SEQ ID NO: 6167 - DNA, 560 bp, Glycine max
  unsure at all n locations
  Clone ID: jC-gmle01810012d04d1
aagtggacactttaactcaaaattatagaggaagacagtccaatatgaaaaatatagtaaaatcatctcaaacttggcatcttctctttgcacctaagacattgagaattctaagaatgttacacgcaagtcccatcacaacttctagcacttggatcagcacaaccttcaggaacagaaatatttacttgccaagtttgctttgcctccaattcaagattggaagaaagttcccctgttaatagcatcctcgttagcatttccaagtgcagcctcgttcaagtacttgtcagccaattggactctcttgacattctcttgttcttggacaagcatgttaccatacgtcaagagcttctccagagtcatcttgggctgctcaaaggttggaggtccatcttttgagttcacaagcttcttcccaatgccgtcaacaccaacaccagaaatccacttcctcacttcgtcatcatatactctggccctcagtgcaccaaagaaatcaatggattggccagggaggtgtcaacantcttgacaacgcctgttaggaattgatc

SEQ ID NO: 6168 - DNA, 496 bp, Glycine max
  Clone ID: jC-gmle01810012d05d1
acaggaataaaatgtgtatacagtcagagatacaagttttcaaacaattaaagtccaaatccaatggagaaggtgcatatttctctaccgtatgtgatcagtatgtgctcgtataatctctaaaactagaaaatattgatccgtgcatgcatttattcagtaacctattctatttttaagcattaaaacttattaacgaatttgctgaacagttataatagttcggatagcaaagatttgatatgcaaattatcaaccttggagttgatagatcgcatgcttttgctgagtacttatgactcgagctcgagctggctcaaacgacctgtgatcttaggaattcgcgttttaatattatcaaccttctgttctttctgagccaaactttccaactctgattctaactcttctctcagtgactccacttggccaccagagttatccttttgtgcttctacctgctggtacctattaatgagttcgatattctgagcta

SEQ ID NO: 6169 - DNA, 471 bp, Glycine max
  Clone ID: jC-gmle01810012d06d1
aatctcttcatctctgtctatggacaaacagtagattttacagaaaagagacaggatgtgttgggttcaacctaccaatgaaggttgaaactagcagcctgcataagcgggtgtgcaaagtaagcacctaacgttattgcagtaactgtcaagtatggcagtcgaataaactccttgtagaaatcttttggtaactcttgtcggccatcgaggattgctgcaaaagggacaacacttgttcgactcttaactaattcaaaatcctccccatatcttatggccagtcgcctgtctccattccagacaccaaatagatgatgtgcaatcaagccaattgaagctgcaacagccacggaatttccgatccaaatcgtatgagcaagacaccagataacctgcccaaccatctgtggatgcctggttattcttatgatcccagtttcccatagatgcaatttaggcttgtcaaca

SEQ ID NO: 6170 - DNA, 515 bp, Glycine max
  Clone ID: jC-gmle01810012d08d1
agtataatccgcttattgattcttttctaggtgacctgtgtgataatgtaatgtacaagttttcggcaaaatttaacttttttaccttgcagctttttgtgaaactgtaatctatacacaaagcaatgggtggtagctgttggcagaggttcatatggggttatgccactcccctttcaattcagagatgtacaagggcaatgccatgctgataactgaaaccacacttttacaagaaagcaagaatgccaacagcttttacaagggtaattggggattgtgagcacataaaaatggtccaggagaaaggttgtgcagtgtaacttatctaggctcaatctgactttcacttatggtgttccctgaagactgagtgttggatccaggctgaaaattatatccaggtaaaccagatttgctgaattctgaactactggaattgatgaaaggcggttgtgctggctgaagaatttcgtgattggtattaaccattttaactactactgacattgatg

SEQ ID NO: 6171 - DNA, 594 bp, Glycine max
  Clone ID: jC-gmle01810012d09d1
gaaaataagcttccctttattgatgaaatccagagccactattactatagtatatacataggaattagtgaaacaatatttggactttaaactcatcagtcagtaccaacacactatgaagtatgaactgtatcttgtgatgtatgggagcaaacagaaatcaaaaggacaactgaatgcacaaggctcccacctgtggtctctaaagaagatagacatacaaagctttactcagttaaacacaaaatggtaccttgagtccacgtagctctcaacatcccagagaaaagaaccaaaagtcacagcctctaaaacaagcttctttaaaccaccaaagctaattttgatgttttcatccttagagactgccccctcaggtgttacaacaatttcaggtcttccaaacaatgcctctgtgtgcttctcgatgatgctgacagcctctttggatctaattgctgcatatctttgtagtgtatcgccatcaaaggacatcacatagttacgcaacctggttgcctttataccatagccaaatccaccgggactgacatcaccaccaggccaggcagatacttcaggatgagacatcac

SEQ ID NO: 6172 - DNA, 358 bp, Glycine max
  Clone ID: jC-gmle01810012d10d1
gcaaaacaaaaatccttttcacatttgtctggaaattccttttaaaacctgaatttcacttcccacctttaccttttttggggggcgaccaatgccttgtcgcaccccatattcataaccgacccctaactggatcctttccaaaaaattctaggccttaaaaattcttaaagaggcccccttcaaaattctcggttaggtccacaccttattcgggtttgaattaagcaaattgttcggtatccttggagaattcccccaagcccgaacttgccctttgagattctctttagctttttccttagccctggtgccccttttcacccgaagccccaagcccaatttggggacccccccg

SEQ ID NO: 6173 - DNA, 594 bp, Glycine max
  unsure at all n locations
  Clone ID: jC-gmle01810012e02d1
gattcaaaatattcatctcaattcccgaacgaacggaccttgtagattcaaactatcagataggccgtgaagagcttatgccttatagtctttgatgcccagaggagaacaaataaataataatatataatttaagtaaatacagtaaaatgaagcttcctgaagtgcggagacattagtgtaatccttgcattctacatgcctgggaaaaaggacaaggtagatatctaatccatctcaaatataccattgtgaagacttgatgctctacatatattgttgttcttggctcattttaccaaactagaatgggtgagtagaagagtggatgagaaacaataggtacagatacaacagttgagggactccaaaaatgagccaggggcgatcagaaaattctcgagtcaacgtactgtcagtactctactccaaaacataaatatgaaggatggaatagaaactntagcaatgttgggacaagaccttaaagtggtatcagaaaactaaccaccttcaccacccaagtgataaacaattactatttcacaattatctctcagatgtttccaggagcatcacttcgagcattttttc

SEQ ID NO: 6174 - DNA, 553 bp, Glycine max
  Clone ID: jC-gmle01810012e03d1
gattattacaaaataataaacatttctttaagattatcaagactaggttttgtacatatattctttctcaacccatgatttaatgcatcaatcataaaggacgctttttagttcttacacgaccaaataaccctactggattcagtgtcaataatatagaacttatacagtgatttaattaaactggggctgaacttagactaaatcctgaagcctgtggctgaaagcatctacacaagatgtctcgaaattgttacttagcaagaggctcctcactttgttgtgatttgctctgacttctctgccaagctgatcaatctcatcatccataacagttttcacagctttacacacactttcctttgtgaacaaaccatcttcttcccctttctcaacttccacaccaaccctcaattttccccccatggttcttgcattgatgatgaaatcggaaccaagtcgtggcaacagcaccaactgacaccggttcacaagtgcctcagttagagaagctccaccacagtgagttatgaagcacccaacagaaaggtgt

SEQ ID NO: 6175 - DNA, 583 bp, Glycine max
  Clone ID: jC-gmle01810012e04d1
aaattggaaatcaatatatattattcctttcaaagaaacaatttacaaaaagaaaagggtgggtggaaaaaactgtatcttatatggcttgcaaaacaggataatcaatgttggattaactgattagaatgttgttgcaggcctaggccaccaacatggatggggtgggggaaataaaaaaataacttgcttaatttgttactaacccacataagcatgtactgtacttactctagagtctaaaatactcaatgcaaatgatttacaacctggaggttggatcaaatccattaccattagagacatgggctactttctcatccgcggcatcatcgataaacctcttccagaaccaatgctgcttccacactctctcggtcatctcttcgatggggacattcttagtctcgggcaacaggaaaagcacgaagacagacatgacgaggacccagccagagaagaacaagaagataccaaacttgaagtggcagagcatagagaggaaggcttgtgcaatgaccaatgtgaagagcaggttaacacaaactgtgacactctgaccagccggacgagtctccaatgg

SEQ ID NO: 6176 - DNA, 470 bp, Glycine max
  Clone ID: jC-gmle01810012e07d1
gaaagcccataaaaagttcaaattaattataatgccccagcaactttaaaacattaaacttcagttgggttgaaaatcatttagctagcttactattcagaattaaatccaacctgataaatgtagtaacgatcctagtagctccccgtgaatttcacttggagcttgccaagtttaaaaacaagttgaccatcagagactttacaacttggataccggaatgcttagtgaaaacatcacaagcaaagcagtaaagtctatgcccaactgtttatggatcaagggacagttgaatctttgagttaagtctgcaccaaataattcagtccagatttcatatccttgctcctgctacgagatttcagcatgacaccaattctgaatgtcaggaaagactaagaagccttggatgctataaccagaaaaattattgttcagatcactaaagatcagtaatgccccccaagatc

SEQ ID NO: 6177 - DNA, 520 bp, Glycine max
  Clone ID: jC-gmle01810012e08d1
accaaccacaggcttggcattttattattattgactcattgtatgttgaatacacatgtaagtataacgaatcaactaccaaactccctaaggaccaaaaagaaaaaggaaaaaaatcctgagccccatgtaagagagcagttgaaggccaactgctttgctgaatggctagaaactcagattgcagataaaatgccataaccattacgatgagatttttgccatttccatgcaacctgcaaactcttctcaaggtcagtgtattgtgcagtccaattcagttcccggttgatcttagaagggtcactatacacctcggcataatcaccgggtcgacgtggaaggtagtctactttgatgtccacccctgtggcctttttacaagcattcacaaactccttcactgatctaccctttccagtgccaacattgtagatccctactttaccaggttgtgccttttcaagagccttcacatgagcatcaaccaaatcagttacatcaatgtagtctcgtatgc

SEQ ID NO: 6178 - DNA, 530 bp, Glycine max
  Clone ID: jC-gmle01810012e09d1
aaaacatgaaattcccaactaaggggagacaaatattaccagtaaatataggacaatgtctgcatagagttgtactcaacagatttgctcagaaagcgtcatttatccatttccgctgccagcattaaagatagatgacatcaaacacttaccaatgaataaaaaaacataacatttgtaaagccaagttccttaacaagctaagatatttctcaataagtttttaaagcataaaacaacttaaaacttggatttgatgcatttagttattcacgcccctctttgctttgagggattcaagagccttgttccgcaattcaatctcaagcttcttttgctcatcttcactatcactttgatgataacccatttgtttagcttcctcatcatctgaaatatcggctgttttactcttcattttcagcttctctgcacgccgttcttcccttctgcgtcgcttctcttcacgtcttcgacgcttctcctccttccgcagcttcttctcctcttttctccttctcttagcctct

SEQ ID NO: 6179 - DNA, 426 bp, Glycine max
  unsure at all n locations
  Clone ID: jC-gmle01810012e10d1
agaagagattcgtcacagtttataggtacacttacaaatgtgaacatatttactttgacaaaacaacctgatgacacctgatgattatgagctgatagtcacactttataatgataactctaggagaacaaagacatacaagttcagttgataaaatggcaggctagctttacaaagttgtccttagaaattgtaccaccaaataaataactgccaggagtagtgcaatctggtatgcatcctgtagaaaactgtcgtccctctggaagaactaggttggatcacctgaaagatctggatacatctncaagttctctttttagggtgacattntactactcaaattcttagcactgtcacccaaatctttgacagattcaacagcagcatagagagcacgtgatgtccagaaaaatgcctgagcac

SEQ ID NO: 6180 - DNA, 426 bp, Glycine max
  Clone ID: jC-gmle01810012e12d1
aaaattatgtaataattatttaattttttttattatttcttttgtgttaaaacagtaaaaacttaacattacttgtacgaattggtatgtttgccaagagtcaacactacggtaatttgaagaagaaaaaaattatgctaattcaattcaacctcgacaaagaaaaatgaaatagtgattttataaaaatgaaatagcaaactctacaacagatggcataaaaaaaccaactgaatgttgaacttgacatatctagccaggagcaggctgcattcagatcaaactaatggacattgatccattcacaaaatctgtcttttaaccagacgcattcttccttgcagcatataccctataagctgccagcccaactacgaccaccgcagctccaactgaaacagccataagagatcgattaataagcct

SEQ ID NO: 6181 - DNA, 417 bp, Glycine max
  Clone ID: jC-gmle01810012f02d1
aaaaccggggcggttttaccccccattgggagccggctttttcattggcccgcttatcaggccggggaacaagaagattcccaaagaaggcccaatttaaaacaaatcgggggtggaaacatggccctttttaaaaaaaggggtttaaaaaagggggtttaaaatctcccggaataaaaatcattcctaaaaatcttggcggccttttaaaaaggggataaggcccccaacatccggaaacttgggggccaaaaaacctccccccggggaaaaaattgtcccgggttccgggaccataaaagcaaatccttttagcaagaaaaagcttgggggcaaaaaaaaggaacccccggaggggggttaattttaaaaaaatgcctgtcccggggggggaaaaaccatcggggggggactttt

SEQ ID NO: 6182 - DNA, 588 bp, Glycine max
  Clone ID: jC-gmle01810012f03d1
aataaaacacaccaacatttgttagtccatacagtaccaaactgccaatgcatgtctttcttcttcataaacatcgctgacaagcacaactaacaatcattgaaacaaacggtgtatacctaataaatagctctgccagggtaaatttttaattgtaatgtaacctcaacatacaaattactaaataatcagcaagttctaagaaaccgcaattgcaagagtggcagctacgtctggagttcaatcacaattgcttccccatcacttgcattgcaatctgagagcttgataataatcagtgctgtgcccattgaatgtccttgatgttgataccttccttgaccatttcataaagcggactcatttccctcaacttctccacctgttgaacagtgagttcaaccgccctatcaatctcagcctcggtagtgaacctaccaattccaaacctaatagaagtgtgagccatgtcctcttcaactcccaacgccctcaacacataagaaggctccaaactagcactagtgcaggcactgccactggacacagtcaccttcttaacccctaagcagactctccccttaacgt

SEQ ID NO: 6183 - DNA, 563 bp, Glycine max
  Clone ID: jC-gmle01810012f06d1
aatgtcaattgcctcatgttttcataagtttgtgtttctccaaatttgatttagctatatacaacaatctaacaggttaaacagtttcgaacagaactcggcactccaatagttctgataaaacacccctcattttgtcaacagaaacaggtttcaatataaggccatccataccaaccctcatacagttttcttttgttacctttttggtgtttccagtaagagcaactattagtggtctatcttgatgtttagtaaacttttcatgtatacggattgcaagttcataaccatctaaccctgcacaaacatccatgaagaccacttcatgttccagagaaacaacacgcagacattcttcacttgagcttgctgtggttacatcacatcctaaatgcataagaagtccctttgttactgtcctgctaaccccattgtcatccgtgacaagaactttgagcccagcaaagtttgtagatccatgatttcccggtactttaggtacaaaaggtagcttaaattcatttgatcggtctgggattcaagtttacaataaagtgact

SEQ ID NO: 6184 - DNA, 413 bp, Glycine max
  Clone ID: jC-gmle01810012f07d1
acaacaacaaaggtttttcccattgggggaaaacattttaagggatcaaacaagggcttttaaaatggttaaatcccaaagtttcaaaatttttatttacccaaaaatcccccttggggattccccccatttttttggggcccccttttttttttttaacgaaactaaaagtcttggaattttttattcccctaattaaacttggagtttccccttttttaccaagatttggcccagatttgcataacttataaaattttttgaaaacgggtttttgcccaatttttggggaacttgaaaaattttggggggatgccgtctccggtcaaaaaaatccccccccttgaaaaaaagggcctaaagaatttcgttccatgaatcaggaaccccaggtgggccccaaggaacacagg

SEQ ID NO: 6185 - DNA, 128 bp, Glycine max
  Clone ID: jC-gmle01810012f10d1
caattgactgcggtcctgagataggtgtggaccccattttgcctcatgatttgcatcactctggtgtctgtgggaccatctcatactggagccttgatctggcttacaagggaccctagtactaggtt

SEQ ID NO: 6186 - DNA, 534 bp, Glycine max
  Clone ID: jC-gmle01810012g03d1
acaaaacgaagaaactattattggaattcattcaaattgaagtgcacatgattaataagattcaaccaaactagagaaggccaccacggagcctaaggacaacatagacatagaaattttgttatatcatacacattcaaggaagagaaaatctcaatagcaagattcaactgaaactagaaatcgccaccacggagcctaagaacaaggtgaagcgtggattccttctgaatattgtaatcggcgagagtgcgtccgtcttcgagctgcttcccagcgaagataagacgctgctgatccggtggaatcccttccttatcctgaatcttcgccttcacgttatcgatcgtatcagaactctccacctccagagtaatagttttcccggtgagcgtcttcacgaagatctgcatccctccgcggagtcgaagcaccagatgaagcgtcgattctttctgaatattgtaatcggcgagggttctgccgtcttcgagctgttttcctgcgaagatcaagcgctgctggtctggtgga

SEQ ID NO: 6187 - DNA, 508 bp, Glycine max
  Clone ID: jC-gmle01810012g04d1
atgggaaaaccttcacaatacgaggtaagatctttattggctaatatcttttatatatatatatatataaataacaacaacaaagattgaacatatgtccttagataattggtaaataatgttcgagcatgatactattttttcaagcaacaagcaaggataatagaagaacaatttgagcaacactcgataagtgtgtttacttataaaattccataacccagaagccagagacactgcaaacgattttgatgccactgaatccagaacttaatgccaattccatgaattcatgttgggttctctcttttcctcctgagttttgagtcatcattaagaggtcagcttggaaaccactcttagcagtaactgtgctctcgggcaaaatgggaagaattaagtccacaacaatcacttttccatcactaggaatagctttatgacaattcttcaacaacttcaagcattgttcatcactccaatcgtgaagtatccacttcataaaaat

SEQ ID NO: 6188 - DNA, 538 bp, Glycine max
  Clone ID: jC-gmle01810012g05d1
aatcacaatcacatacatataaccgcatgcacaagactactataacaaaacggtcaaacagtatcaaatgtaactagactagatacagtcttaagcctcaaaaccagaggcatttcctggcttgggaacaaacctagttacaatcgaagcagctaaagtgaagacacattatacgtaatattataggatggcagagtggcctagtagccaagagcaagctcaatagaattattataacctttcagatagatactttgccagagaatcaactggcttagttgagtcaaaatttccacatctctgatgtcgttgccttatctttgtgcgagctaggtaatcaactgcaatccaaggaaaactcaacatcaccgtacttcccaaactatcagcctcttggttctctgaggatttatcttgcagatcaagggattttttcacccactcaggatgatatgtcacctgataccaggccgaagctttctgctcatagaacaaatttttttcttcctcgcttaattcttcaacatctgaattcaat

SEQ ID NO: 6189 - DNA, 379 bp, Glycine max
  Clone ID: jC-gmle01810012g09d1
catcaatcagggtttatttattttttaagaaaatcacttgttcctagtcatgtgtcttgaataggcggctatttgtgccaagtgagcgtgacaacaccaacacaaacaggaaagtatgagaaaacaaatcagactttgctacgcaaaactaatactaaaaacaaataacctatggaccacgggaactcaaaaataatgaaatatatgtatgactcaattactgcatggctggcaagaatgtctcttttccataaattcgagttattgaagcttctttattccaggaaatgatggcaatattgcaacaagtgcatcaccatatccaacagggtcgccatcctgtcgtagtatctagatgacctctcccgacacatcggac

SEQ ID NO: 6190 - DNA, 225 bp, Glycine max
  Clone ID: jC-gmle01810012g11d1
catgaaatattctttcaaagtcattgaattcagctcaatgaactcaattgctttttcttatccttgtagtcaaccactacatataattgaggaaatgagattgtcttaaaagaggatcaagatatataaaaagatacaattttttcagaacatattacattactagggataaatgatggtcagaagcttatggcgacaaaatgaagcatgatgacatcttcaata

SEQ ID NO: 6191 - DNA, 242 bp, Glycine max
  Clone ID: jC-gmle01810012g12d1
caccaacacaatcttaattttttctaaaagacgtaaccggggcaagcccaaaacattaaagaatgaagggaaagtcctacaccttttctaaaatccaaatcacctttgaagctggcaaaggcccttcccctttggggggcttttctaatcaacttcagcatttaatatgccaaagatgatgcctccaagctccaacaaggttcaactggtcgcagcaaaggaccccatcatacatgccatca

SEQ ID NO: 6192 - DNA, 579 bp, Glycine max
  Clone ID: jC-gmle01810012h03d1
gattaaaagattcgaagaattgcaaatcagttacaagaattcagaaattcaatatcaatcaatatatgggtgatattcattcagtcacgccaaaacttattattggctgcaaataaatataaactttgaaaatctctcctcagatagactgtctgaacaatttccttctttttcacatgatacgttagaaaaggagctctcctctattcataaactttgcattcctcatcagcagggtttgtctcgcagaaatcctccaatgggtctccactccccgctttaggtgcccctggccacttgcttgctactagatgtgccaaatcgaccactctttggctgtaaccccattcattgtcataccaagcaaccactttaaccatatcatctcccatgaccatagtcaaggaggagtcaatagtagaggaaacatcagagcagcggaagtcgatagacacaagtggaacatcacacacgtccaatacacctttgagcggcccctcagctgcctttctgaatgctgcattcacatcttcagcagtaagacccttctcctcacattcacaacaaggtcaacaactg

SEQ ID NO: 6193 - DNA, 580 bp, Glycine max
  Clone ID: jC-gmle01810012h04d1
aggattgcaatgatcatttattaaggttcaaaactggctatgtttcaggccacttttgcagggtgcagttgaagacagcatctatatacaaacatatacacatccttccgaatacactacctataaggactttgacaatttcaggaacaaatggcctgagcaaattccatataatgatatgcttaacaagctgtttaagtttaacctactgatccctcaagcttcaagctcatgagttggttcacctcagaaccaaattcatcaggaagctcattaaagacatcacggcaaaatccagagatcatagcagccattgctttttcatagtctattcccctttgctgaaaataaaacaattgatcttcaccaattttggacgtactagcttcatgttcgattcttgctgttggatttttcacctgaatgtaaggataggtatttgcagctgcattgtcaccaatgagcatagagtcacactgcgaggagtttcgggcattctcggccttggacagaacctgaaccagccctctataacagtttctggaatgccccaccgatatcccctttgatataatcctac

SEQ ID NO: 6194 - DNA, 498 bp, Glycine max
  Clone ID: jC-gmle01810012h05d1
aactgggaaacgatattgatatttaaaataaaaacataaacaacatactttcgctgaaacgagttcaatacatcattttaaaacataataaacagcagcacttaaaccagagatgcaaagcacaagttcaagggagacactgaacaaacagataagacatatgagaacacttcataaaagggattccccttagcaaccaccacgaaggcgaaggacaagatgcaaaggggattccttctgaatattggaatctgccaaggtacgaccatcttccaattgctttccagcaaaaatgagcctttgctgatctggagggataccttccttggcctgaatcttagctttcacattggcaatagtatcagagctttccacctccaaggtaatgggcttccctgtcagagtcttcacaaatatctgcataccttcacgaagcctcaacaccaaatgcagagtggactccttctggatttataatcagcaagagttcgaccattt

SEQ ID NO: 6195 - DNA, 448 bp, Glycine max
  Clone ID: jC-gmle01810012h06d1
gtaaaaagcaagtaacattaagttggattgggatacccaagataattcacattatctgaagtacattgcaataacatatactttaccaaacacaaatttaaaaacttttaaaagtccacaagtcatccttttctttcatgctcacttgccggggaccaaattgggggcgtaggcccaggcattgttgttgactgggtccccaaggggaccagcaagggtttccaatggacccttaccggggacaatggcctgaacaaaaaacccaaacattgaaaacatggccaatctcccgttcttgagttccttcaccttaagctcaacaaaagcctttggggcattaacaaggcccaatgggtcaaagcttccaccagggtaaattgggtcaatgaccttaccgaggggcccaccagcaattcgataacccttaaagcacccattaggataactt

SEQ ID NO: 6196 - DNA, 523 bp, Glycine max
  unsure at all n locations
  Clone ID: jC-gmle01810012h08d1
aagaaactaaaccatttatatatagtttttcttcataggcaactacattctcgttattcagtcatgtccttaaaaacacgaggagccactagaaacggttgctaaccactaaacattaaaactaaagaaacatctgccaacagaatttgagacacaggacgtaatacaataaggtcatggcattgtaaaacagaagataagagacagcattattcaaaacaaaatttcatattatgtaatgcacaaatataaggcatgagacattaaaaactaagataatgttgtacttatgactgtggtaattgttgttgctgcttctgttgctccaactgttgtgattgctcttgttggtcaccttgccaaacccaaacaacgtctttaagagcaggcctaatgtcctccttcagtattttctcatattccaatgtatctccatttgatttcttcaccttcaccaaatgcaaaagtggagtaacctcaaagatctctgtatcaatggataaaantccctttctaccttcat

SEQ ID NO: 6197 - DNA, 250 bp, Glycine max
  Clone ID: jC-gmle01810012h11d1
gaaaagaggaaagagttcttttctgagaaaccggcccgaagaaagcccccaagcatgaagctatgaagaaaaaggtgttgtggtaacgccgggaacacctcgccatgcaagaaagcaaaaaacaaaaatctcttttgttgaaagtgggtgggtcgaccaggccgagctgtctgttctcgtatgcgaatgctggctgggtaatgtcatgaagcgcagcaggcaatatgaataaagattagcatcgtccttt

SEQ ID NO: 6198 - DNA, 436 bp, Glycine max
  Clone ID: jC-gmle01810012h12d1
aactatcaaatcaaggctatctatattaacaagaaagtgaggatgtcaacatgttagtttattaaatacacgttctttcaaatatttgcagcatctaacaaaaaaaatgttgcatactcatctgtctgtatcacggggcagcattctattgagagagaacaatatttagggtttaaattaaatgccccatctaccctctcttattaaaaaaattacaaatctgcaaaatttattttcagcgattaaatacttccatcaaaaattgttcaaggatacaatcaacaaaacccaaatgggccaaacagaaatacccaggtgaacaaaatctcatcccctgcctagaatgacttgaaaggaatttagtacgtcattgggagccttctattaattcttacaacaacatggcctctggatttccaatttagcctttgaatgc

SEQ ID NO: 6199 - DNA, 266 bp, Glycine max
  Clone ID: jC-gmle01810013a04d1
caagttgaatcagtttttttcaggatttttttgcagggagctttgaacaaaatcttaaatttgggtaacccattttttaaaactttgaaagataaatccatgggaaaccttttagataacataaatattaccgttgaacaagggtgcaagacatttagggggttacaaatacataactactgggcattttcaaatagcatcctgtaccaaaggattagtcaaaatgtccttggaataattagaagaactattgaagtctgttgact

SEQ ID NO: 6200 - DNA, 522 bp, Glycine max
  Clone ID: jC-gmle01810013a08d1
gttcggaagtactcgtctaatcgaaacttcgaataccatatgcaatccactcaatcataaatagaaaattttgttggcaggctccccaatccaatagaggacttcgtaagtattaaaaagataataaatttaagaactcggtacatagagaactcccaaaaagtcgccagcaataaatcaggccacaaaatgttcaacgggcattcctggaagatgaccaagtagaagatgaccttgaacctccaccagaaccaaatgcggttctccgatcatcacttcgccacctgtcaccatctggcctgctgctactgttccagcgatctgtttctggaggaggcgcagctcctgcgctttcggttctctctcgcctgaacttaggtacgtatttcccaggtgttggagcagcggcggcagcggcagctgccgcaggagcagcagatcccgattccaatggacgggcaggaggagctggttcagcagcagctctacccaacaatgcttctctgctttgattctctttct

SEQ ID NO: 6201 - DNA, 548 bp, Glycine max
  Clone ID: jC-gmle01810013a09d1
ctcattggaaatttaaccaaggtgttgcattgctattctccaatcaataaccatatgatgaagaattaatatcttgttccttactgctaatatatagactttacaaattgaacaaaattcagtgtaacttcatccctttaatcaactgtgatgaccaatatctataatgaatacggctttcagccagctcctatactgtctgcatctttggaagaatatatgtgacattacatcaatggtaatgatttacttcttcgtcactttagcagcaacacattaatgagttatgcgcttcagcacaccagcggtaactggttaactcaaaaagcatttgcaagttacagcttcacggtgaaagtctaccttgttttcttgtttgtaatttttggattcttggacattcggatacttgcggaggtgacctctactagttcatcttcttggatgtattcaatgcagtcatccagactatagtccaatggcgtatcaagaatcactggttgttccttgttggaacgtatgttggttgcagctttctttttcaaaca

SEQ ID NO: 6202 - DNA, 528 bp, Glycine max
  Clone ID: jC-gmle01810013a10d1
gatattaaaaaaatacataagcattatttaaaattaaaccctaatacacaactgtaaagaacagtgctaactaataactcagtaagattgagtttttaaaataacatgatattaggtacaatttctactactatactttcattgccataagccctaaataaagcataccttagccatgaaataaggcactcccctcccctcccctaaacttttactaataaaaaatgtatattgcagttgtcaatttggatggacagtaagagcagtcaaactgttcaactgcgccaccacctaagtaaatgaccttagagatcctgggagggacagtagacactaagatatgaagcaaggaaatacccacagaatttaactctcggccagaagaagtatgcacaagtatcaattggaagtggtctaaaactactgtgtttccaccttttccccctcccccagcccaaccatatagtactgtacgatgcttcatctgatcatctcagttctttttttccctctcttttggaaacattg

SEQ ID NO: 6203 - DNA, 516 bp, Glycine max
  Clone ID: jC-gmle01810013a11d1
ataacttccatgacataattttattgatgtcaacttcgtttcactttcgtagaactttattaccgtctttaaattgaaagcaattcataactttctccaggatcaacagtgcagttataagttattttagagtgcattacgaagttgttgcgggaccgggctcccttggaaaccacaattaactggcaatgagcaacagctgcctcaactagatcgacagagaattcttggaaaccttcttcgggattggtaaacttgctaagattttgagcacaaccaatcaccttcttagcagccctagcttcaaatgctcccagcactgcattaggcttcaacccatcctccgctttctgaaaatcagaatgatattgcatcagctgttccactcgtccaatataagatgttgtaccaacaggctttttcctggagcccaactgagaaatagtcttgatgagatgcctagccacctggtaaagcagcacagtgttggctccttcgtatgtgcaggaaggaatg

SEQ ID NO: 6204 - DNA, 453 bp, Glycine max
  Clone ID: jC-gmle01810013b08d1
agatgacaatagcaaccactacaatatatgtaaagaataaccaatgacagaatcacattgaaaacatttaataatataattgaaccaactcaatttttttttttgagagggaaccaactcaatttattatatgcaaaatttagaatgtagcaacaagttaataacagcatattttaagggacatattttttagtttaatagacctactacagagttaattaatcagaaatcactttaacataatttttaaggtaattatttatcaagttaatactagtaataactattatacatggagatttatagttgaattaatgatagtaattgacggtttgtaattcgaaaatttcaaattaaaagagtcatgcaagactaacgcattgatcaataatgcctttataatggtggatactataagaatgggaaacttaccaaatggtgaaatgtccatgg

SEQ ID NO: 6205 - DNA, 496 bp, Glycine max
  Clone ID: jC-gmle01810013b10d1
aacagaaaattaaaattataaacactagttacaaggcaaatccaagattacagatcattttattaggaaaaacaaggttttccaaacatatgcaacggataaacgacatacaaccacaagaaacataagttaacagagattttgtccaagcatcatttcagttgggggcaaaatatggagcaaaaccagaaccaaaaccccttctttttcttctttgatggcacaagttttgcatccctcttggtgacaaaatcagccatatactgcacaacttcctgagaacccaacttgaccaattctcttggtggcaaatcaaggggggtctcatcagccctaaaaactctcaactttgacaagaacctgaaagactctggtagagcttttatttgatcatcacttatgtccaactcctcaagcatttcaagatttccaattgatgctggcaaggctcttaggtccgcgaagttctttcccaagttcaatttcttcaaaatag

SEQ ID NO: 6206 - DNA, 458 bp, Glycine max
  Clone ID: jC-gmle01810013b11d1
gcataaacgcagttcatagtttcatatatatatatttttataaatatcatatggggatgaagggggctaggcctcttcattgcagatacacacgacctctaagcatggcccctatagcttccaatgcaaaatgggggccacatctttaacttagggaaccaagatgaggtcattgataatgggtgatgttcatacggggaaagaggatgcaaggccaaactgaaggccccagagctcaaaagatcccttaacaaagtcatagtatcctccttttagtgacaatgtcttggtcaccaagccatctctaacaaatgggtatgttagaagggttccaagggaaacattcacaggttccttctcacagggtgagcacaactcagcaaaaggtgcatccccatgttgtgtcttcacctttgcctttgcaggcaagccaattttgacccactcctcaataaaat

SEQ ID NO: 6207 - DNA, 322 bp, Glycine max
  Clone ID: jC-gmle01810013c02d1
agggccaaaggaaaagggcccaaatttaatttaagggggccccggaacctaaaatttttggggaaaacgggcccatttgaaaaaattaggaagaacattttaaacttaagattttttttttgcccccaaaacattggaaaagcctaaaaaggtcccccccaggcccatcacaacttttaacccctgggttagaccaacaacccttaaaaacagaaaaatttacctgccaaagttggtttgcccccaattcaaaaccgggaaaaaagacccccctgaaaagaatccccggtaggatttccaaaaacagccccggtcaaaaact

SEQ ID NO: 6208 - DNA, 258 bp, Glycine max
  Clone ID: jC-gmle01810013c03d1
ggtcgtcatcttattgtttttcccattgaatggcacgtcttgtttttacgatatcccactgggtgccttgcctactggcctaacccatatacaagctggctttagggcagttgcttgattcaagccggaggactgaggcagccttgcttaggctgttactggagaaacctgaagttattggggttccttgtgaccccccggttgctgaaaatttactttatccgtgctctacttagagattaaccttatcatgccgga

SEQ ID NO: 6209 - DNA, 422 bp, Glycine max
  Clone ID: jC-gmle01810013c04d1
caaattcaattgatttttttattcatcaaagttgctcttcgaatctgggtttgagaacagcccgaggatcaaattggcaacaaaagttttcctatagccaaaaaaaaaaaaaaacaattgcagttcaagcccgagatcaaaagatgaactatgttttaagacagcactttctccacttcaactgtcacctcttagggaggtttctcagcatgaagattagcaacaaggcccttctttgaatagtaatcaataaccggttcggtttgctagtgaaatgcctccagtcttaacttaagaacagctgcagtgtcatccttgcgctggataagaggttcaccagtaacatcatcaacaccaagaaccttaggaggagcaaattttgtatggaagagtctgccactggatgggtgtatccagcgacc

SEQ ID NO: 6210 - DNA, 222 bp, Glycine max
  Clone ID: jC-gmle01810013c07d1
gggtataactaccctttatttacttttaaatgggaatttgggatttccaataaatcccttggtctgggggtttaaaaccccccttaagggggggaccccaaaaacatatttggggcaaaaaaatacccaaaaattagatttaacatgggggcggactgtgaaaaaacaaagccaaatggggagggtggcccatttaaaggggcccctattttctttccgggg

SEQ ID NO: 6211 - DNA, 561 bp, Glycine max
  Clone ID: jC-gmle01810013c09d1
cttcccctatcacattgtgtttcggcaaatacaagctttcatatgactgcaaattacaagttgcccccttaaatataaaagggtaataaatcatctactacagtagtagccatctaacctcaaaattttagaactcaaccagcaaatgttgcctcaactctattctcctgctcgccgagaaccgacactgcctccttttcacctattaattctaccattaccagtctacatctctgactataaaaacgttgcaggtagatgattcaaaccggcctaacatgtatgccaggttaatcatagctcatcatgaccttcagtttgctcagttaccgtctcttcgcttgtgccttctgaactgttaacggatgaatcacttgaagaggaactatcagctgagttagaatcagaattctctgtattctgctcactgctttcggtttcattttttacgggcttctgaaccttaggtttgggctagggaattctattaatactggcaaccttagtttgcagatcaagcaccttcagatatactctctcagatgtaaatgctggcttact

SEQ ID NO: 6212 - DNA, 487 bp, Glycine max
  Clone ID: jC-gmle01810013c12d1
aatggaactattataaaaaatctattgcaagaataggaaatgattaatcatcaatggttttacaattgccttcataactgtttttcaaccagaatagacagacaacaaaaactaggaaaaaaaaagagacaaatacaaggatgaaaaagctaagcacggtatcatacaagcagctagcagcttctcaatgcatttcagaatagatgactgtgccttgaagtgctcgatactctacctggcatcatcaattttcaactgggagaaaacagaatccacagcactatcggactcatcacccatcacaatggagtcatctgcttcacttagtgtggagagtgaaggaaggcgcctaacattgggcaattgaagtgatgcagaaacactactagaactatcctcgtaaggctctctttgtattgcatttgcacctctctgaagctgcagcgcatactccaagtcccacaacacatcacccatgcttggccta

SEQ ID NO: 6213 - DNA, 287 bp, Glycine max
  Clone ID: jC-gmle01810013d02d1
atcaaacttacatgctatattatattatagttcaataatcatattcttttggcttcaatgaacctacgttattgatttgaattcaataaatctgaaccttggtttcagaaagattgcatagcgcaacttcaacacaactcaaccaagaccggtttccctcgaaacatttggtagaaatgaaagccagatgttaatatccattccatattataaacaaatggcacaaaacttcgtctgcctttctacacgtatacagcattccatcagtgccttgatcgatttcttat

SEQ ID NO: 6214 - DNA, 198 bp, Glycine max
  Clone ID: jC-gmle01810013d03d1
gttcagtccttttattattttttttatttatttattatattcaacaaaaaagcacacgaatgatgatcctataaaatttgaaaggtgcagttgggcgccggacgcacaggcgcttagaagcactagcagaggacaactgagggtccagactcgacggactcctgcttagagatccacatatgttggaaggtagagagg

SEQ ID NO: 6215 - DNA, 322 bp, Glycine max
  Clone ID: jC-gmle01810013d05d1
gcacataactgggaatatttcatatcaatagaggattgcggcaaagccgcaaagatacaacattcattagggaaaacaggagttgggaaaaatatggggtgaggggttgaggaagaatcaagtgctcccagagcatgctagaacatctaaattttccacacacggttattgaaacaacccaatatagaaaactttacttaggaggattatcaaagctgttccgacgaactggcagaatctacatccttataccattcacttggcacgggccttacgggtgaattttgatgcaggaaccctgttggggagggcaggcttcact

SEQ ID NO: 6216 - DNA, 324 bp, Glycine max
  Clone ID: jC-gmle01810013d06d1
aaaatgaactacatcaaaatgctttattagggtccttaaaagaaaacccttggtttaaatttattattgtttcaggaattcttatactcaaattcaaaaccttcatttaaattagttttgatatattctttggaatacaatttttcagcacttgaataaataacatcaggattttggtgaattgagatgactaacattcacgttttctaaattacttcacttaaacagaaaaactttgcaaatgaagaaccctttaaactaaaagggagaattttaaacattctaacttatggcattaaagaggacccatgcccttagagccaa

SEQ ID NO: 6217 - DNA, 348 bp, Glycine max
  Clone ID: jC-gmle01810013d07d1
ctaggtgatagcgaatgaattttgagtatctatctttgccaattaccacaccggtagcgattgtattacagaatagagtgaataccaacagcgacctcgcctagtagctaggtgcgttgaggaacaagcccatagtgataccaccgatgagaccagcaatggggatggtcatgacccaggagaagaacaggagacccacacgttgccaattgacagctttgaaggtaccattgcacaaacccactccgacggtagcgccagagatgcacatcgaggtggacactgggagcttgtactgggagaagatgaggatggtgatggcggcacccatctccatggatgagccac

SEQ ID NO: 6218 - DNA, 491 bp, Glycine max
  Clone ID: jC-gmle01810013d12d1
atagaaactagtatgtctcattcataacaaagaaaaagtaaaaccaccattaaagtatatccaatttacatgagcagagatacgctaatgtggagactacattagcatgaggataataaagagcaaacacttgttctctatttaatgtactgagagagccactgaaagccttcaccataccccatcttgcggacaatactgcacatgaaaacctccaaaggacgaacattggagtcaaccaaattaaccttgcctttgcctgtggtgaagttagtgaggcccatatgataacgtagttcatcctctgaagcagcataaggtatatcaatcttgtttcccaagatgaggaaaggcacatttgctagtgactcgtcagagagaagagcatccaactccttctttgattctgaaaacctttccttgtcaaatgcatcaaccaggtacactacagcatccacctgagcgtaataatcctttcagaccctacgagc

SEQ ID NO: 6219 - DNA, 422 bp, Glycine max
  unsure at all n locations
  Clone ID: jC-gmle01810013e06d1
acaaaaaataaactttattaactaaaacgaacaggtagcataacattaatatcgtgtcaaggaaaaaattaaatgtagaaaagcaacaaatgcgcaagcggaaagagaaagacatcaagactttaacattgcacacattgtaaaatgtagacaatgtaactcaaaattatacaggataacaatccaatatgaacaagataacttattttattatctcaactcttagcttctctccaagtggagaatgcttaggttctcagggcgtgtataagcagggtccatcatcacttcttgcagcagggtcgaagttagaggcattaggatcagtacaaccttcaggaacgggaatgtttacttgctgagctgctttgccatagaaagttcctcagntgatggaatcttgattagcatcaccaagagca

SEQ ID NO: 6220 - DNA, 532 bp, Glycine max
  Clone ID: jC-gmle01810013e08d1
aaccatccattgctttatttattttaaagaagagaaaggttagtaatcaacaaccttgcatcccattattcattcttcaacttcaacttctctctcatgttctaaacataccaataagaagaaacacataccagtaaaatagaattcccatatgtgctaatactaaaagggaaaacaggaaggtctatgtaattaagattcatgatatagcaccatccactattatttaagacggatgaaaggaccagttactactattcagaaatagatgattggaggcatcacctttgaaaagctgattggtgcaataacagaaataccaacataagtctagtacaagattatgaaaagaaagcgcatatataaagcctctgaaggtgagctagattaagcactagctgaagccacatgtttctgtatttactgctgcagctcatacttctttgctcccaccactttgtccagaagcgttccctctttcacaaacacaaaagtgggcatagcctcaatagcccaatcttgagaaacactc

SEQ ID NO: 6221 - DNA, 536 bp, Glycine max
  Clone ID: jC-gmle01810013e10d1
aatgttaaatagtgcaaagtagcaaagacatgctatcttaattcttataactgataattaaagcggggcgcatcaatacaatacaatacaatatgtaactatgaactatcaatatatgatcgttatttatgtctgtgatacacacaattcaggccatgatattcttacgtgatttacagcaacttctaacttatttaatacatcataccaacccaactaggagcaattttcattatacaatgacacttatctttaaactctgaagcatgacaaggtggtagtcaccagggaccatattcttatgcaatttatgccacaactggataagacgcacaagttgcaacaccacacatgttcttccccaattccattttgaagtagccattctcaccccaactttctccccatgaattttttatgagccaatatgggacgccattttcaactccataccccacagcaaggacggcatggttcacatcctgggaagtgctaccgcaaatgtcactagtgtaaactccattctcgtagaaatg

SEQ ID NO: 6222 - DNA, 517 bp, Glycine max
  Clone ID: jC-gmle01810013e11d1
gaacacatatataaagttgacatttaaaaagcaaaccaacaacgcaacggcaaagccctaaaactcgctgcgcttaacaaaaatgtaatcaggggttctcacaaacacaacacattaaaacagaatgataaaaggagtcttgccaccgtcgatcaagaacccaattctgggaacaaaagttgcgagatgatggtggagacttcaaactatgtccgaaaaacaagctacctagaaacgaagacacaagggcaagaaaccaacatttattgtaaccataagaaacgacatcccctgatgaaccaaaccgcacgattcacttcttcttctgggcagccttggtgaccttggctccagtaggatccttcttctccacgttcttgatgactcccacagcaacagtttgacgcatatccctgacagcaaagcgaccaagtggggggtactcagagaaagtttcaaccaccatgggtttggtcggaatcatcttaacaaaaccagcatcaccattctttaaaaa

SEQ ID NO: 6223 - DNA, 479 bp, Glycine max
  unsure at all n locations
  Clone ID: jC-gmle01810013f02d1
aggacatatggaaaaggcaccaaattcaatttaagtggacactgtaactcaaaattatagaggaagacggtccaatatgaaaaatatagtaagatcatctcaaacttagcatcttctctttgcacctaagacattgagaatgctaagaatgttacacgcaagttccatcacaacttctagcacttggattagtacaacaaccttcacgaacagaaatattnacttgccaagttagctttgcctccaattcaagactggaagaaagttcccctctgaatagcatcctcgttagcatttccaagagcagcctcgttcaagtacttgtcagccaattggactctcttgacattctctagatcttggacaagcatgttaccatacagcaagagcttctccagagtcatcttgggctgctcaaaggtaggaggtccatctttagagttcacaagcttcttcccacactgtaacaccaacaccag

SEQ ID NO: 6224 - DNA, 243 bp, Glycine max
  Clone ID: jC-gmle01810013f04d1
aaacacactcattgcacatagtaatgcgctttatttaagtgaataaaatattacatactagttcacaaatgcaaaaggacactcatcaaccagatatttgagactcttacagttctcaagaagtcgcagtagcatatggttagaggcgttagaactcagaatttcattcttaacgccaaaaagaacagccagtaaagctactggaaaaggatcaactctagtaagaaaaacaattttcttacc

SEQ ID NO: 6225 - DNA, 304 bp, Glycine max
  Clone ID: jC-gmle01810013f05d1
gttataagctagtttcattaagttggattcggatacacaagattattcacattatctgaagtacttcaccaaacacaaatctaaaaactctgaaaagtcatttcgttctttgacgctcactttccggggacgaagttggcggcataagcccaggcgttgctgttgacagggtcagcaaggagatcggcgaggttctccaaaggaccctttccggcgacaaaggcctgaacaaagaagccaaacattgcgaacatggccaatcgtccggtcttgagttccttcaccgtaagctcagcataagcct

SEQ ID NO: 6226 - DNA, 518 bp, Glycine max
  Clone ID: jC-gmle01810013f07d1
cctgtggcagagccataatagaaacacattattctgaacaattgtatgcgtcaagttcatcacaaatattcctttttcataaattgacaaaaccgtatttcaattagtgtttatataagggtaatgtttctcaatttcatccattgaaatcagaaattccacatttgcattctatttctttgtatgtcactgtgtttgtgtctacattctcaagcatccactcattcttcatgtcttggcataaccacgagaaaacttttaatgcacagttggagtgcgcatgaacaggaactcgaatgatttccctgatcgttcaaattctagcatgcttagagcaacttgacaactttgtgagacatgaggctctggatctgcccaaaactccctaagaagggctacacattggtcatctgcaattgaaccaagaagcttaacagccctatgccaaaccattggatgctcattcacatctttaagcatattggatagagcagcttgaacaggtttgtcttgcaatt

SEQ ID NO: 6227 - DNA, 511 bp, Glycine max
  unsure at all n locations
  Clone ID: jC-gmle01810013f08d1
aatctagaacagtctcaacacatttcagtagataacatcgtttggtttgccatcagtgaacctctacatagattggttgtttgagcattacatacaattgaaagggcatttagccgaataggtgcataacctactcatcattttcaacagtaccatctttgaggtgaaaatgtttttctctcttctggaactctgtcaaacctttcccacttcccgtcacaccaacctttccctgaggatcatcaggagatttaaaaatactctcccgttttcttccagagaagaaaccaatcttctttgcctttcctttggttgactgaaattgctgccaagcattttgccgcttattttgtgtgacttcaagttgctccatccgcatctttgacttaaaggcatgtattttcttgcgtttcgaagctttcacatcctcaagatcatcagcctctatacgaagctntgcaagtagactccgagactgtaaatcgttagatgcagcttggacaatttttcg

SEQ ID NO: 6228 - DNA, 392 bp, Glycine max
  Clone ID: jC-gmle01810013g02d1
cgaaggcttcaaagaatttgaatttattttgggagacacaccaatgtatagccagaaatcagtcacaccacacaaaacaagcatctaaatcacacaacataaaagcttaaaaatccttctctaagatgtccctttgacacacatgcataattgcatatgctttcccaaccaagtcaactcttatataaggacaaaaggtaaagggccacactcaagcaccctagctactcttccaagggttgagaacacccacaactatgatagctactattatcaacagtataatgatggcaatgcacatccattttcgagagttcttcaggagttccttagcattttgaagagcagatgtccctctctggacatgatcgactagattggtgacctgactt

SEQ ID NO: 6229 - DNA, 400 bp, Glycine max
  Clone ID: jC-gmle01810013g03d1
ggaattagccaacacaacactgatcattatcatgtctatggtttgttagcattggtatgattcaaaattgctcctggttattacaacatgcgttcttcccatcataacatagtttgcatgatttacattaacatttacgaccaaagggggaagagatgttagactgctttatttttacaagggttcatgaacttttcaaagctgataaagcttcctttgttgccgatgagataacagcgtctgaagcatttggcagataataatacttgccttgggcaactctagcaatctccttggcgaaacccgttgagacaaacttattttcagagtcgatgacaaggagagacattcctgctttatatatcttcccagccacctcaagaatttcatccttcaattc

SEQ ID NO: 6230 - DNA, 415 bp, Glycine max
  Clone ID: jC-gmle01810013g05d1
catcaaaggcagttctagccaaataaatttaaccttaaagcaggtcaccaatccctccatctgggtcaacggggagtgtccaatatcaacatttacatatttacaagacaaataatgacgcgatgaacatttacaatgagggggacttagcagctgtacaaactatgtcttcaatgccaatgtccaaaaggagaaaggtatgaaaggcgacgttgaaccattcaattaatcatcaaacttcgaattcaaatcagcaggggcccgatagagaatggcagcggcaggtaggcctaggcaacgagccaaaaggtttatctgtggcagttatagactggctgccttagaaacgggaattttcttgcgtgcgagtaggcaccatacttccttcaagggaacatccaacaaatgcaccttt

SEQ ID NO: 6231 - DNA, 387 bp, Glycine max
  Clone ID: jC-gmle01810013g06d1
agctcgcgatctagaacctttttccttcttttctttcttatgttttggtctttcaagctttcctcttgttttagttcataaaagaaatgaaaaaaaaaggagtctaaaactgagatatataatatgtaaattattttgaggtagtagtacaatcaatgtattcaaatttctggcagtgagaaattggttttattaaaaaaaataaaaataaaaaaatatataaaaaaaataaattaaataaaaattataaacaatatataaaaaaataatataacaaaaaatataacttaatatatattgaaatttacataaaaaaagaggggggcccctatctatcttaaaatttttcgtccccgaaaaaataagggccctccggggtcccccccc

SEQ ID NO: 6232 - DNA, 476 bp, Glycine max
  Clone ID: jC-gmle01810013g07d1
ctccttgaatttgataaaataattattgattcttacagtgtacaagtcagagcgtattttatagtacaaacataattctgtgacttgcgtgtatgattatgcaacatataattcggcttttccatcaatgaatagactcatgaactcttcaccatccacagtttctttttctatgagaagttgagcaagcttgtgaaggatatcaatgtgagttgagataatatgtgttgccctagaatatgctctctctaccagttccctcacttccgcatccactacatccgcagttgccatggagtaatccttttgcgatgacatctgttgacccaagaatggatttccaccaggtccaccaatggcaacttgtccaatttttttgctgaatccaaatctctcaaccatctgccttgccactcgtgaaactcgcatgaagtccgttgatgctccggtggtgacattttcctggccaaaaataa

SEQ ID NO: 6233 - DNA, 576 bp, Glycine max
  Clone ID: jC-gmle01810013g10d1
cagaactaattttacacaaaatggtaggaaaataacagcaatttggtactacattgggagtaaacagaaaaaatcttcaaactacaaaaccaaccaaacaaaataattaaataattggggaactattgagtaatcccttaagaaaatgtacatggctaagtggccagtaaatatgtttgtacataaccccccaccccctcaaagaaaaaactatgcattataagtagctatttaaacaagtattacccgcagacctgcctgtcccaccttgttacttctaatcaatattcagggaccctactttccacctttgctatagctgccctttaaggtgacagtcctattaaaaacaagtttttctgatgtcgagtcccggtcaaccacaaaatagcctaatctttcaaattggaaattgtccccaacttttgcattctgtatggaagacacaccatatgcatcgggaattatcactttggaatttgggttcaaatcgccaagccagttgtcaagttcagcgggattctctgataggaatagcctctcaaacaatctgactttcaccttcaatggatcaac

SEQ ID NO: 6234 - DNA, 349 bp, Glycine max
  Clone ID: jC-gmle01810013g11d1
cccccccaaaaaaaaaacaacccccaaaaaaaaccctttgaaaaaaagagcaaagggggggggaaaaataaaccggggggccacttttgggaaaacgggggaaaaaaaaaaaaacggaaaaccccccccatttttaggaccccaaaaaaacccccgggacttaaaggtccttttcaggggccctttaaaccaagggggggcccccttgaaaaaacaaaaaagcgtccgccccccgggaagaaaccccccaggggggggcaagcgagtatttttaacccccgggggggtgaaaaaaagggggggacccccttttggggggggggtgaaacctcatgaaaaaacgcttttg

SEQ ID NO: 6235 - DNA, 342 bp, Glycine max
  Clone ID: jC-gmle01810013h02d1
actagaatgcaatcatatactaaggttccgttgtttacagaaaaagagaagaaataaataataaaataaagtgtgactcacttttacactctattttaattcaaaactttcatctcatttcatttttttccactctagcaaactgtacctgattgagcaaaattgtttttcaacagggtagtttgaatcccatgtatctccctgatgtatagtctttccaagttcgaaaggctccgaagctagtcattagaacaatacttaaagtcatcactatgctaaccgaaaatactattaaagatggtcttccatagctttgaattgctttctgcaccactaataacc

SEQ ID NO: 6236 - DNA, 262 bp, Glycine max
  Clone ID: jC-gmle01810013h03d1
gaaagtactaaattcattaaaacatgattgcaaattgtacacattcatagcttttcaaggtccgctaatggacccgggatgcacacatacacaaagttcaggaacatataaaatgaaaagaccagattatagactttcacatacttcagttcacaccaaacaagggacctgcagaccattctcaaactcaaaacccaccacgaagacgcaagacaaggagaagagtagactctttctgaatgttgtagtcagcaagagtcct

SEQ ID NO: 6237 - DNA, 349 bp, Glycine max
  Clone ID: jC-gmle01810013h04d1
gggggggaagaaagggtattttactggcatttctcatccagatataacctaagcaaaacaaaaatatctgtaagcaaagcaacccacgctatttcgggtggggcagagaacccaaagagagagtggcagagaattggtgcttagcagcacatagtatctacattattcctctaaattacaagtatgacaggcccaatgagtaggaccttcacctcatagctgctgatcaagatatgcatctctgggagatttgggtgacctgggagatccaacgggaggtccaatatacccgattacatttccagaaacattcttcaaccagaaggagcttccgaggaaccaaccaccc

SEQ ID NO: 6238 - DNA, 184 bp, Glycine max
  Clone ID: jC-gmle01810013h05d1
ggaaagaggaatgtacattttaacctgttgagagttatcctttccatcattaacatgcatgtctatcgcacaaataagaccattcatggagaatgaataagaaaaagtatggaaagctagtaagcccatgcctcattagatgaagatgggaggtccaagacgtagaggaggaagcaggccccaa

SEQ ID NO: 6239 - DNA, 446 bp, Glycine max
  Clone ID: jC-gmle01810013h07d1
aatgaaaatggtcccttcaaatgcaagcacacaatacatcaaggtgcatagtttcacaagtacattcacaggatctataatgtaaacctgtgccatagtagttacagaaagcttatttacaatacaataacgagcttattaaaacatgccctatataatctccaacatgtcttgttaggcagctttggcaaaaccaactgggagattgccatagtcaaagacggtgtgatataccctcatgaaaacattcccaagaatccagagaggaccccgtggaggaggaatgtcaaaagcaataaacccactaaggcaaacttctgcaatgccttctccagttttcagaatatactgctcaggagtgagggtgaaaggtttgtctccaacagtaaacgtgatgttaggcaatccataaatgctattacagtctactactgactctccatttg

SEQ ID NO: 6240 - DNA, 375 bp, Glycine max
  Clone ID: jC-gmle01810013h08d1
aaaaaggaaattttttttaccataccaaacaagggttaggattttaatttaatgaatcccttttcctcaagaactaaaaataatcccttttcccttggcaaaatgggaaattttggtacattggtaatggaaatattcttggaacttttaaaactaaattcttcattatttgggttcattggtccaacaaaaaatgccggatgggtgggttttggaagggaaattggggcacttcctagcattaaaacaacgggggaaatagtcggtctaacttttgcattttggtgaacccccaacaaaccaatgggtaaggacttcacaactttattggccctgaaggatttttccaggggatccatcaactcaaaacatttt

SEQ ID NO: 6241 - DNA, 540 bp, Glycine max
  Clone ID: jC-gmle01810013h09d1
gaaagtgaaacagacaatacagtatatattgattcagatatgcaaggtcgaaaagtagtgttcaaacagaagtactaaacatgtggatatgtaatagtcttcttaaccgtaggacctgagagaaaaatacatgttaaaattctctcagtattaagggagccaattgatggtagtcctgaaacaatttcatgagaatctgcaccagtgctattcagcctctgtcctggacttggaccaagggattccagggcttgttctcccattttatggatatcttcaggtgaaagtattttgatataccatacattattgacaaatgattcccacggatcgtctccaaggagaagaacatcgttctccctgtcgacgaatacaagctgccagcctgatctaagagggtcttctaatttcccctcaataccaaacatctgtgccaactcctgccgcagctcatgataactgctgaaccgggagatgtcaagtgagcgcccaactgaccctgatttgaaaccttgacgaatgttcgtgtctggtttgagg

SEQ ID NO: 6242 - DNA, 365 bp, Glycine max
  Clone ID: jC-gmle01810013h11d1
aaaaaaacacaaatgcatccaattgatctaggttcataataataataataataaccaaaagaagatgaaaacggagagtaacaaagcatggtgagacacagctaccgaagctactaaaaacaagggacagagcaatcaagtaggataactagggagcagagaagcagtaggaatttaagcaaactagaaatatagacactcaactaacaaaacctaataaccccaaatcaagatggacctaatgggaatagaattctcatcaaaacttatctgccctgtacctcttctctttatatgctattcaaatttaggttatggctggaatggtcctcacttggccatcatgactttgacaaactcctcat

SEQ ID NO: 6243 - DNA, 253 bp, Glycine max
  Clone ID: jC-gmle01810013h12d1
caacccaaggctaaaagggggcattttaaaaaaaaaaactactttaaacccccgggggggtggggcgccccccccaaggggaaacataatgggggggaccaccaaactggggaagcgcccgagtcccacgaaaatttcgcatggggggcccccccacccagcggcggagaccccccgcgaaaatttagggcggggcccacacgagttttgacccccccggggagggtttcgccccgagcctaaattccccccc

SEQ ID NO: 6244 - DNA, 483 bp, Glycine max
  Clone ID: jC-gmle01810014a04d1
gattgtaaccccattataggggataggttcaacaatcatctgattaagaaatttggtatttgaagcctttattacatatgcatctatacatttcaacataacgatcaagattttctggattcttacatataaaggcttttgacattgcttttaaaatatgttgtcgtcctctaccatggatcaggaaaactgatcttgttgaattgcttgccagtaagaccatgggatgacctaatggaaaattttcttttctcaattcttgtgcttcatggttgctttatcaaaaccaatggttggaaatcggtttgcatactcctcaacatcaaggcggagctttgctatttccgattgaaaggtagaagatgactcaattgcggccaagaagtccttcagctttgatcctttgctctctcccttaatcttcacagctatcttcactgctgcatcaaaaaactctgctaccttgacaaaatcctctctaac

SEQ ID NO: 6245 - DNA, 486 bp, Glycine max
  Clone ID: jC-gmle01810014a05d1
aaataccgcgactaatcacataaaatttgtgtttgttctttttatatttatattatttatatttttattttttgtacaatttattactagtatagtaatcgattccctaaatctatgaacccctccaactaaatccaataatttttttattttattattaatcaagaatttcgtatatagctagaacggccctcacaaattgcaaatactaatttgttaagaattaatcgaattgaggctatagcatcatcattagctggaattgaaatatcggcgaggtccgggtcacaatttgtatcgattaaacaaattgttggaatttccaaagttatacattctcgaagagccgtatattcttcttgttgatcgacgattattacaatatcaggtaaccccgtcatatatttaatgccgccaagatatgtttccaaatgagctaaatgtctcttcaatatagcggcatctctttttggaaaactattgagt

SEQ ID NO: 6246 - DNA, 410 bp, Glycine max
  Clone ID: jC-gmle01810014a10d1
ctaccaaaataaattcaataataatcaattcagtaaaatcaattttcccaccgtcaatccaaacaccctaaataaaaggccacttgatcctgggacagtcacatgacaatcaacttcttgtcaaagatttcataaaaatcaaatgtttacacaagtgaattcacattggaatgtgcaaaagcaataggaggaaggtagggatgtccatgtaaacgaaattacaagattttaaaaaaataaaaatgcccatctttggattttcctgttttgggggaaaaagcccttcaaatgttattaagccaccactacatggggctgaattttctaatctgatatgcctacgaaacttgtcctttgccaacctcctgtttcatgcacgatctttaactatctccaatccttgcacgtgc

SEQ ID NO: 6247 - DNA, 260 bp, Glycine max
  Clone ID: jC-gmle01810014a11d1
acatgtatctttattttttttgttttttctttttatttttatgttacttgtttttaaaaaaaactactaatccaactatgtacaaaatgaataatggcgatcgaggggctattaagacgaacaagcctaataggatatactacccttgccaacgtgctagaatgacctcactctcggatacgctattgaactgcggaggttaatcagggggcacatttggatccttttcaaagcgctagattatgctagtgctccaactg

SEQ ID NO: 6248 - DNA, 515 bp, Glycine max
  unsure at all n locations
  Clone ID: jC-gmle01810014a12d1
agttcgtgtgaatcatataatatatcagcctcgtacttttctttgcaggaggcaaaaggaattacaagctttgacatggacatgaaattcaaaaaacgaaactggcccatgaatgatccaataatagccacgccgtgaagagcaagggaaggactaagaaggggcatgggacccaaaaatgacgacaaccaaccactgatcatgtcattctacaatttgaggtggggaagggctttgtttatcttcaatggatatttcagtttctaagtcatccatagcctttggtgttaatgccctttcaatcttcatgcccgtgccattgacaaccatctctttttctaagtgaaagcagtagctctcaaaaacccgtgagcttaccataactctaaaatccaacagaaagagtaactctaactcaagcttgttcaattcagcattgcttactcctnctactcgagcatatatgggcgttgtgtaatgttcgtcatccagcatcttggaaagcaccatgacac

SEQ ID NO: 6249 - DNA, 385 bp, Glycine max
  Clone ID: jC-gmle01810014b02d1
aacatcctctcatttatagaacagaaggaacatatccacaaagtactttacgaatagttcttcatttttagatagttacatggactatgttataacttaaacatcgatttgcaaagtttattgaaccaaagcacttgtgtggtaaacaagaagtgccccaccagctaaaagaccaagtagagtcacagcccaaattgccaagccagtcgtaccgccagcgtaaacatcaccggttggagaccagtccttggtgtcgtagataggactgtaaccatcgacattagcaccgtatttgtctacaaactggtaaacaccctttccctttcctttcctgccagatgcatcagtcccatccctcaaagccatgccacctttaattccataa

SEQ ID NO: 6250 - DNA, 473 bp, Glycine max
  Clone ID: jC-gmle01810014b03d1
aaccaaaaatatggtatatgtatatatagcagagccaaaaccatgcatacctacatttattacatgaaaagtgaggagtatcacaagctaaaagtaataatcaattgcaactaagtttgctgtgcttgactaagaatgccccatctgttctggagggttatttacattcctaatgttccaccaaaatttggcattacttctgccatcagaatcctttctttcagactgtgcttcctgcatttcagatgaaccaggattctctgtcaagaatcgttcccagaatatgtcattaacaccagtagtcacaggggcttttcccactggttgttcttttgatgcatcaagatcaggaacagcaactacagatggctcagaattcatgttgattccaggtgacttaggctgatcttcaacttctagttgcacacaagatatagctggactatctgcacaacttggagatgcatcaaaat

SEQ ID NO: 6251 - DNA, 499 bp, Glycine max
  Clone ID: jC-gmle01810014b04d1
catctccaagctatgtacaatttatctaaatccaactagagctatgaatgacaatatgatccccctcatactgatataacttagaatggtgtcacacatgacaactgatacatttgctgcaaagagattagattattcactattcagcacacttcatttttgctgagggttcagcatagcaatccctcttaagttaactgcaacaattaagggataataataataataataaacaactaaactcatacaccacaaagctaatgcaattcgaatctaccttaacctagttatcccttcctcggtcattcactgccactattattgttatgattgctgttgctattgttggtggtgccatggtggttgttgctagggttaccaccttttcttccaagtttgagctgcgaaatctctacctgcgtcttcatgaaaaactgcattctgtgcaactccaaatcctttgcgaatttcatcctctgcttctccatctccaccacct

SEQ ID NO: 6252 - DNA, 489 bp, Glycine max
  Clone ID: jC-gmle01810014b05d1
gctgtcaaaattctgctacaagtgtaaataaaaaggtttgagtagtaatgttttccatcatcttcatcatcctttttctatatttgccaacaacattttaattgcccattgaaaaattaagcaaatggagaataataaattaataatactaccacttttcagctaccttcattttctttattaattggatctgagctcacagttggaagattccttctgaactgctgagacgtcaatctcctttccaatggtgttttcctattgcttacaacaaatttgttcacccctttgcgcataggcattattgaaggaaaatcttcgtctggaatctgactgagctcagaaatatccttaatctgtgcgacgcgacggaaccatttctcagcctttgcctcctctgacatgttcaaaggatctgggtccttcactgccgaccccttcaaactctttcctgtccactctgctctaccactctggttctcaaatgct

SEQ ID NO: 6253 - DNA, 452 bp, Glycine max
  Clone ID: jC-gmle01810014b06d1
aaaggcccccaaaaaaaataaaggggatcaaaattaaaaacattaacaaaaccctaaggctttgaaacctaaggcctaaaaaaaaaaagccaaagagcccaaatttccaaaaaaaccccccccggggaaaaataaaaccaaataatcccgtttaagggtcaagggccctggggaattggggggggtaattttggggaaaccccaaggggggggaacccttaacaaaagctgtttggattctccccggtttaagggggctttggaaaacaattttttccccccttaaaaattatcagctcagggaatttccccttaagtttttcccccagggggggtccccacccctccttattgttttccctttttccacccaaaatttcttggaaccaaatcaaaaaccagggttttttggggcgggcttgacttgcccaaaaaaaaatttttaattttta

SEQ ID NO: 6254 - DNA, 557 bp, Glycine max
  Clone ID: jC-gmle01810014b07d1
attattcaacatagctttatttatataaacggcatgcatatgatttttatatataacataatggccagtatatataagcaggaatttatttagtacaagcacagtggtgcttttggtatactaggtagcctgcctaataaaaagccacatgataacacgttataggtgttcttccatttgtccaatttcaataccttggagagtagtaacgatcgttgtcataagcaactttctcttcatagacaacgcgcctctcaggaacttgttcatactccaccaccttgactctctcatgagtctcagggtggtggtgatgcatgtggttgtggcgggatcctccaatcacatcctcctcataaacaatcttctcgttgaagacacggtgagcattagggtggtggtagttgcccatcattggtcgaggtgtggaatactccatgataggttccctctcaacttctgaaacgcgggtgtagtaatccatgttgatcttagttcgtgttgggtcaaaattattaggagcagctttaattttcttaaactgaaatacctgtttc

SEQ ID NO: 6255 - DNA, 581 bp, Glycine max
  unsure at all n locations
  Clone ID: jC-gmle01810014b08d1
gtaggacgatagttttgaaaagacagattgcctatcttctctttaatctcaggcgaaatacgatcggggggtgccaattcaaaaccttccggtaaaataagaacagcccccacattcaaagctccctttttaccattagcaagaacttgtttcacttgcatatcataaggaattcgaacaactgcttcaaatacagtatcaggaagtaccgcttgtggaacctcaatatccacgggcttattagctaaatggcaattggcacagacaatacgaccggttgcttctcggggattttcataaccctgctgtgcaaaaattggatatgcgtttgaaatgggtgctcgaattattatatatatcatgatcgatatggaaatggatcgagtaatcccttcctttatacaagaaaaagcatttctaggttgcatggtctaatcattgatcctgaaaatttctacaataagattaggtaggtcactcgcatagttccctatccaagtcggngaaacccttttttcattaaaggcgttaaaacgaagggaaaaacaaagtattctttttagctaaaaaactttaaataa

SEQ ID NO: 6256 - DNA, 562 bp, Glycine max
  Clone ID: jC-gmle01810014b09d1
aaaaaaataaaataataataataataataataatacaagctttgcaattgcttgttcaatctaacatggaagcttagtttcactcagccaggggcccaggatgaacaattaacagggttctgactataaaaatggggggaagaaggaaaaaacagttccttatcacagcatcgttactttagcggcctactaaaccactgaaaagagactaccagtgtacatgcatactcaaatagggacaaaaaattacaacatacaaatctactctcgcgaagcatatgagaatgagcaattacaacctttaaaatgctactaaaccaactatttcactccaaaaatcatgctaagggcttcccattccaccccggggaagaagagtatgtaaccagcaagaactagttccaacccaaaaaataaatatttacatatctacgtccaatatgcactttgtagctcataaagcccagaaaggcttttgaaccccagttgctcgggtgtcatgaggaagtgattcctcactagaatcgtctatatcatcatcatcctcctctccatattccat

SEQ ID NO: 6257 - DNA, 432 bp, Glycine max
  Clone ID: jC-gmle01810014b10d1
gatgagaagtgctttattggtcattttatacaagttgaatctgatcacctttgcggtggcggctgggtaggcggctgctgtggctggaacggcggaggctgcatccctggcggcagcatacctggagggaacatgccgggcggcatcccgaaaggcggcattcccattcccggcggcattgccatccctggcgggaaaggtccaggcctcatcccatggggcattccaccaggcgggaaaggaggacgacctccaggaggcatcatcatcggcattcccatattcggcggcattcccatcatcgtcatccccggcggcattcccatatttggtggcattcccggcggcattcccatatttggcggcattcccatgttcgggggcatgttgccctgcatctccggattcatcatgcctggagcaccggcggga

SEQ ID NO: 6258 - DNA, 367 bp, Glycine max
  Clone ID: jC-gmle01810014b11d1
gggataaaaaactggaactaatatcatcactttcccctgcaaaagataaaccccctttcagttgggagcaggggcataccaagaatgatgttcaacaaaaacatttgcatccattaaccattagttgggtatacactggctcatactattggcccaaaataaacttctttgctatgttttcgtagcaaaaggggtaaccacatgatacacctacgatacaatggtcacacttgagggcttaggagcttgagcttcaacctgaacctgggaaacttccggaggggagctttcaagttgaacagatgaccataggtctgcctcacttgggacggacacttcagtaatttccaggggcttgaactggttg

SEQ ID NO: 6259 - DNA, 518 bp, Glycine max
  Clone ID: jC-gmle01810014c03d1
aacatcaagcagaagcatttctgcttagcctctccaatttcacgttacaagtttttcacaagtactactaatccagctatgtagaaaatgtttaattacaacccaaagccgaagaagaagaaaaagacttttacaatataactagaatgaccaggcacaagaaagactattcttcttcttttgcttcttcttaagaggaggatgagaaggtgtcaatgatggttgtgtggagtgggtcactcaagtgggtggcccagttgttgagcgggcccttgccagtggcggcagcttggactgcaaagcccaagaagcccaccatggcgagacgggcgtgcttgatctccgccaattgaagggtggctttcttctctggatctgaggccaggcccagtgggtcgaagtaactgccacctgagtacagcctcttttcttagtccagctctgcgttcctctggaactctatgtagccaattacgagaacctcgatccagatcagtgtggtgattgagaatggaagt

SEQ ID NO: 6260 - DNA, 492 bp, Glycine max
  Clone ID: jC-gmle01810014c04d1
caatcattaaacatgccatgactagaatccaatattataatctcttttctctcatcaagcccaacaaatctaaaactgtttacaaatacatttttttttccgattgaacagaattcgaacacatacgcactttcaattttctgcacaaaactgttcttcgccgtagccctacagcctaaaaatcaaacggtaaggccttgtggggcaccagctacaggtgccttgggcttaggtttctccaccacaatggcctgcgtggtcaacaccattccagcaactgaagcagcattctgcaaagcacacctagttaccttggcagggtcgataactccagcctccactaaattctcatacctgtctgccatggcattgtaaccgacctcccattcaccactctttattttctccacaacaacttcaccttctattccagcattttgagcaatcaatgctgcaggagctatcagtgccttttgcacaatgtcagctcct

SEQ ID NO: 6261 - DNA, 378 bp, Glycine max
  Clone ID: jC-gmle01810014c06d1
ggggggcccaaaaaacccggaaatggggaaaagacccaaacccaaattggggtctttccccaaaaaggccccggatcccccccgggaaacaaaggaaaacactaaaccctttaccccccccgttacaaagaaccatttttcccgggaaaagggccccagggaccaaaaaaaccccgtttctggccaaaatggttgggaacaaccctaacccccgaaatttcccccaaaaaccccccccccggccccctttaaaagggcccccctaaaaaaccaaattttaaaaagctcccccccccaacgggggccaaaaaaaaaccccgaaagcccccccttaaaacccaaaaacgtaatttttaaaccccaaatggggtccaaaag

SEQ ID NO: 6262 - DNA, 505 bp, Glycine max
  unsure at all n locations
  Clone ID: jC-gmle01810014c08d1
aagaaataccatatcaatcaatatatgggcgatattcatgaatttcagtcacgccaaaatttattattggctgcagataatgttaaactttgaaaatctctcctcagacaccgtctgaacgaacaatttccttctttttcacatgatacgttaacacaaggcaaagagtaaaaatggtttgctgctggtaatggtaatcatcaaatcagaaaaaggcgctctcctctattcatatactttgcattcctcatcagcagggtttgtctcgcagaattcctccaatgggtctccactccctgctttagctgcccctggccacttgcttgctactaggtgtgccaaatccaccaccctttggctgtaaccccattcattgtcataccaagcaaccaccttaaccatgtcatctcccatgaccatagtcaaggaggagtcaatagtagaggaaacatcagagcagcggaagtcgatagacacaagtggaacattacacacgtncaacaca

SEQ ID NO: 6263 - DNA, 491 bp, Glycine max
  Clone ID: jC-gmle01810014c10d1
aattagaattatcttcactgacattttcctgcgttgagatagtagaacaacgtagttcatcacgaaacataggtaattatcctcctacaattgacataatttaagtctataaaacatcacaccatcccaccaatataaatttgttatatacaatgtcccttagtcaacttgacaaggcaaaggcgaagttccgtggtgcactttccacaatagcaaactattaggtaccttgagatcatggataacaggcaaatcagaaaatggaaatgccggagaagagactaacatttcaagggcctgtcataagtgggaggaagggaaggacagtgctcgttcatattggcataaggatccaaggtgttatagccaggcaattccatcctatattcaccaagaatctggcagaatggatgccgatcgttctcattgttgcaccatcttggtagacgtgtttggttatccttcaaaatcctaaacatgtatgcatcacg

SEQ ID NO: 6264 - DNA, 561 bp, Glycine max
  Clone ID: jC-gmle01810014c11d1
aatatgaatgctttttcttatattaactcattttacatcaatatgaacaaaggaaaaaaagaagggcagaaccaaaaatatagttgcctaggcctgatgccaagttgccaacagaaacgtcagaaaagcttctgtagatgttaagatccaagtgtaataaattccaaactaacgaaattcactaaaagtggtggacctgctgcctatggacttttccttcactgttatctggaaaccagtgactaactttaggatttcaaatcagtaacacattctatttgtagatccactcgttggaacgagcacccgactcatccatatctataaaaatgcttactgcctgcagcaaataacaacaaattagaatgtacatggaccattgtttttttcttgtcagccacagcttatgtctgggattactgtcggtataaaacatcaaaatctccgttcaaaattacacttcttgcagaatttttcattctagtccgggtcttaattacatatatgctgcattgattaagcagtcattggtttgtggtttcttattgggtcttctgcttc

SEQ ID NO: 6265 - DNA, 381 bp, Glycine max
  Clone ID: jC-gmle01810014d02d1
aaataggagcggaccattaaattgaggtgtttggcttaaattgtgaaacatgcattgatcgaggtgaaatctggataatctctgcaaaaccacaccaaatgaattaccaaacaccatacctggagttacgaacctacattatgggccgacattctagaccaaagcaaagatgggaaggcccaccggaatacatccgacacaagcccatcccatgtaaataatgtaacagatccattcaacttactcgaacttggggccagcaccaacggatccagatggaggaacatattgatgcatgcgtacagtcctgtcgggagcacctgctccctggaacattttggctatgatcgaggcgctaatgccctaacgctggttgatctt

SEQ ID NO: 6266 - DNA, 277 bp, Glycine max
  Clone ID: jC-gmle01810014d04d1
atatcagtgctttttaataacttattaaaaatgagaaaataaaataacaagaaaataagcgcaaataaaacaaccatacgtgcatagacataagccctaaaaaaagcaacacctaggcagcacaaaggaccggcaatgagcacccctaaacaaaaactgatagagggggataacgcaaaaaccaataaggaaaggcagaaaaagcaaacaaactgggcaccagcgataacacataagtcaacgaccgaagaaaacccgggaaggacaggagacacca

SEQ ID NO: 6267 - DNA, 565 bp, Glycine max
  Clone ID: jC-gmle01810014d07d1
ctattcatacacatagtaaaccatttatatcatttattgaaaaagtaattaatgtttgagtaaccacatatattctatttcatccatttgaggaagtttgtataaaactacagatagtgtaggcagttcctacccctggctgaaaagagatacttataaggcaaaatttaaaaataaataaataataaccatagatagcaatgaatacaaaattaagccacaagccacatgaagtaagttgtccaaaaagtgactgcaactgaggccaaagcatatgtccatagcatgataacagaacattcaccttcaccagctccaaacaattgcgcgattgtgcctatagccattgctggtggaagtgcatattgaaggagaagcacaaactgatataagggatctggttgcaccaaacccaactgtgttgctcctttaataactagaatacccaaaattggcaggaaaatatatcgaactactataattccaagaattgtccaaaacgaagtatttgctcccttcaaacctttaaggaggtttgctcccattataagggttataactggga

SEQ ID NO: 6268 - DNA, 518 bp, Glycine max
  Clone ID: jC-gmle01810014d10d1
acactaaatcattaccttatgatgatttgattagcacaaatttacattagtttcatggcatccgatgcaaaaatgattcacaaattaacaaaggcatccgagtaagcccgaaataattatatatcatcatatacgacgatgaccgaaaaagtataaattgtacgacgaaatgcgccaacgctggtttcactttcatgaggtgttaccctgtaaaacctttttttccactccagtagaatcttcctgacagacctgtttctcagtctttactggtggattgatcactgatccattatgcatcgtggcactggatttgaaaggtaaagtttcgttaggaagcaacaccgatggatctgagggcctgtgaaacagtaagtgtgctacagaccgatcaatggggtttgtgtcagtttccatatccattaatccggcacacctgtttgcatcctgcgccatcattgctttgcatgtttcatcatctccaatggcaaccatttgcatttgaatattatgtcttt

SEQ ID NO: 6269 - DNA, 492 bp, Glycine max
  Clone ID: jC-gmle01810014d12d1
gacacagtgaagttggattcatctatattgcatcatccctcaaaaatagtactagtaaaactggcaatgaagttgttcatgaacagtataaaaatcgtcaaagaaaaattacagggtcgtcatatatctacacaacgcaggagggttgatagacttgctgcagcataaagcaggagatgatatttgtgcaagtgaacagaaattaatagacttcgacattccattgctctgctctcttcaattgcctcttgtactcagtccaatcaatgccatctttggcagccaatgacaccataatgtcatcaattcccttttccattccttttagtccacacatgtacacaaaagtgttatccttcttcagtaattcccaaagctcttctgcgaattgagccattcgggtttggatgtacatcttctaccctttctcgtttgcacgctctcgactcacagcgaagtcaagcctgaagttctcaagacttttctcttgca

SEQ ID NO: 6270 - DNA, 505 bp, Glycine max
  Clone ID: jC-gmle01810014e03d1
gttagaaaaaagttttgccacatggctctttgaattttataactgatagcaaaagcaaagggctcacatacaatcatctttaacaacatacaaatcagtgtatgttccaaaaatgagaaagcaactagtaaaacaaaccactggcatagtgaatcttaatcctagcttgtcgaccagctgcatctcctttcatttccatgcatctacagaaatagtagagcttgttggtccagcatcttgggaaaagttctccatcgcctaaaatcattttttgttcagcacactccataatctatacacataatcaccttcatctgaacctaactccaaacagtgtatattttcctatcttagtggccaaatataacacagaaggctatgcatgcatcacatctattatttttcaatgtttaagagacactcatttctcaaaaaaatcatctcttaatttttcctaccttgccactccttggagagttctcatttggagcaacacatacatgct

SEQ ID NO: 6271 - DNA, 334 bp, Glycine max
  Clone ID: jC-gmle01810014e04d1
aaaaggaaccaacttccaaggtccaataccacccctcaagggggggcaataaaattcaacctggggtttccctgatttaaaaaaagccggaaaggggccacctacaaaatggccagtttgagcaccatcaaaaaacgccgagatggttaaagaaaccatggggcccgcacaaaaccttaaaccccaacaaaacatttaccgtaaaaaaccatgttttctgggcgccccgaaaaatgcccacggggggcccctaaaaggcttataaccgcttaccttggccaaaggtgcctgaaattttccaatggaagccttccccaaaaacaagcgcttgggc

SEQ ID NO: 6272 - DNA, 508 bp, Glycine max
  Clone ID: jC-gmle01810014e05d1
gagagcatggaaaaagaatttttgcgtctaatagttaaatcaatttttttgaaaggataaaaataaaaataaaaataaaaataaataatattagggatgggcttttcgaaagccaaagaatatggaacaatatcaatgccacgtacatcctcagctgaaatttaaggatgactaatcaaaattctgatgcatatatatgtacatttctgtacacaacgatgaaacagctactctgctgctatacaatttttcacttctctggcttcttttaccttccactttgcatatatggggcaatcttcatgtcgccagtttacctttagagacttgagtatcatctgatgaatctagggattgagatctggctttgctcgtaattctattatatccatatccaaaagaagttccatttgtttccgatagttcagtgagctcagccagatgacgggatctgaattcatttatagtcgctgcaatctccgatgtaagaagattagcctgagcaagc

SEQ ID NO: 6273 - DNA, 521 bp, Glycine max
  Clone ID: jC-gmle01810014e07d1
gtgacgtaacaaaagtttcactaaccagaagaagtgttacataaccataacggtacgtagcgagttattcataattagctcacagctactgttccaagctcaaactcaaatcagaaaaaaccatctaagagaacaaaagacaagctacatgcatatatgaatttacagtgaaacaagctagcttagcgtcagtagttatatatatatatatatagatatatagatatatatattcacgattctaagctcttaaaagagaagaaatagtgttatagttctacgaccatggagcgacgccgttttgtatttcgagttcgtgatacctttgtgaactaataacccaatctcaagctaagcgcagttttaacgtctaatctccatgcaaacccaccacagtccattctccacacatcgcagggcaccgtgagcgagtttctctccttcccacacgagtattgcaccaccctcaccaagcacgtgaacgacgcgtgcggaaccaccgtattcaccttattcaccag

SEQ ID NO: 6274 - DNA, 387 bp, Glycine max
  Clone ID: jC-gmle01810014e11d1
aaaatcaagggtattcataaaatgcttgtggagtgatgggagaatcaaagaccacactggagcttaactggagaaaattggtaaatagaattttctttgctaatactactatcatgaaacaatttcattggattaataatgacatatatcataattattttagtttccctcaatatcaccgaagcctaaaacaaatatgcggattcctttggcatttaggttaccaagcgaggatcccttgattagttcaattcttggtttggatcaagccacttcgttaaatgcaaattcgctctttcagcctctttgtcccagacgcattgaatctgaatgaggctcaatattaatggccgaattgatgtgccaccaaaaatcatccctgcccaa

SEQ ID NO: 6275 - DNA, 356 bp, Glycine max
  Clone ID: jC-gmle01810014e12d1
gagaaagcttgaataacaaggcgacattttaaaacctcccggttttataagaacagaggaaacattatccgcaaagttcttaccgaatgctgatccatttttagattgcatatcatgcggaattttgacctctagactaagttcagcatagggaattgccccaaagcggcacgctattatcaccagacttgttcccccagcgggaatacccacagacgttacgacccggatggttctaggcggatttcataaccctgctgagctaaacggggggatgccattgataggggtgctcgaattattatatatctcatgatcgatatggcaatggatccagtcatccctttctttataca

SEQ ID NO: 6276 - DNA, 500 bp, Glycine max
  Clone ID: jC-gmle01810014f04d1
gaaaatatgtaaaatatgtaattaagaattttctgcaacatgaaaatatgtaaaataatggtcatatatacaatttttgaacaactgtcaaaatatacacaattgtgtgcagtaaggtagacagaattctcttacaaaaatgtatcacgaattaatcgtgctaaaacccgagaagataatctgctaacaacctccggaagcactttaacagagatgcctggtaacactgggagaagctcttggataatctgaggaatattcagtgcctgaccagatgttcttgatagggaacttccagcagtcaagaactccaccaccatctggacattgttcaatataacttcatcctcttcagttatggtgggtataagagccgcaggcttaaagggtcccactgtaggtaccatgctgaaaacaggggttacattctgaactcctagcaaggacattactctcaccagttgttcccttgttactgcatcgatgcccttgacgatctc

SEQ ID NO: 6277 - DNA, 545 bp, Glycine max
  Clone ID: jC-gmle01810014f05d1
gcgtgaaagcacatgaggaaaaccctcagatgtggcaagaggaattctttccatatagtccaaaccctcaacaccattaagtgctgcacttaaagaaacttcctcaaaggaatcctcctcatcaacacaatcaaaccattcctcaaccatatcttgtgcaactttagaaagaatttcttcatctaggggcatcatgggagtggcatatttttgaattccaccaagaaaaggatcatatccctcatgttctgtgcctaccaatctctcatcagttgtagtcaagacactaggaattttgtcacaaggtagatccagttgccattccttgggagtttccaccaaattagtttttgtaggcagtggaacatagacaccagatttcaattcaccaatgtgagcaactccctcttgactatcaacctccacagggaagaagtcaaagtaaacttcagcactttgagcttgcacaactggctcaacgtatggtatcaatgaagcatatcccagtcttcctttgcttccagcaacatggaaaccaacaattt

SEQ ID NO: 6278 - DNA, 394 bp, Glycine max
  Clone ID: jC-gmle01810014f06d1
cactgaaatggaagcataataatttgcgtttaaaaaattatccatagacaaactcttctcaaatttttttctccagctaaaagcaagctcgtttaatactcgtattagcgttgtaatacaagcatacaagccaaatagtatatagaaccatttccaacgtgctgcatttcactcactctcggagacactattgaactgcatatattaatcagggggcacatttttatccttttcaaaacgctaaatatgctagtgcttcaactacaaattacatgtgggcaacttcatcaataactctcaatagaaaatgcttcagttttcttctgagattgcttccccaatactggttatgcaatacgagagagtcagctgggactttctttcccgcatcatt

SEQ ID NO: 6279 - DNA, 471 bp, Glycine max
  Clone ID: jC-gmle01810014f08d1
acgacttcaggcacgctttgcattcaatcctataatgtagtctttgtcgatagagacttactagcgaatgcgcaccaggtccaacgtgcatacgcaacgaaagcaacccccgcagcttatcacggaatcgtcgacggactcacacaagtggtcaggtacgtgtcggctagtcgttcaaattgcttgatcgacttccgtgatcgtagctgtatgaagacaaagattgactgatctgtgtaatgctttgttccggtaagcagaacggagggcgtgttggcactatacaaaggagctggagcgcgcgttgcattccatgccccatccaccgctatcacgatgtctcttttcgaaagctgccagcaggtctttgcttctctcatcgatgcgtaatgtagaaaacttacttcgtttctggctttgcccacgccatcttgactccttttattggttgggcgtcgttcgacaatgatc

SEQ ID NO: 6280 - DNA, 520 bp, Glycine max
  Clone ID: jC-gmle01810014f09d1
aaattctctgtatttaatcgatcaaaattaagaatatacaatgagtgaattaatgcagcagcagcagtagtcacacaagtatcatcatataatgcttaaaagaaattaagcatagagttttccaaatacaaccttaaatgagttctccaaaaaggaaaagaaaggaggttcatgaaacacatatagaactgtttcctccattggtctgcaccacattatacaaacttggctcaaatgaggagcaaatttttcataatcttggcaatgcgcggggaagaatgcgaggttggtcccaatcagtgacaatgtgatcacgagtgatatccttgagtgaggtgcaaccactcaaggccatggttagctcaaactcctcacgtagcatccgcagcacgtttcttacaccagcctgtccttcagcagccaaggagaacaccacagggcgttcaataaatatgccagaggcacctagtgctaatgccttgaagacatcaggtccacggcgaacaccaccattcaaaaa

SEQ ID NO: 6281 - DNA, 507 bp, Glycine max
  Clone ID: jC-gmle01810014f11d1
aaaaacaattggggaatttttattaccaggacaataactaaccaagtatccgcccgcacaagtcatattgtataaaccgtttctacactcaacacatgcttacactctcgtcctcccccttcctttttttgctggttcagtgtatacatattacaatttccacaacaaagagaattctaacgttaaatcataacccaagaatgctataacatacaaactaataaaaattcattccgatattgtataacccacaattcattctgataagaaatctcttctatttagaggatgcgcagctgcagcaattttctcccgcaggttgaatttctttgcaattagtggccggacatcatcaacaccaaccaagctctccaagaacggaagtaataaaagcaattcttgatctgaacgatcatcaaaccaactctcgattggtattccgttatccacttggaatccaaatgcctgtggggaattgtcaattatcataacatgtgccaaatcacg

SEQ ID NO: 6282 - DNA, 504 bp, Glycine max
  Clone ID: jC-gmle01810014g02d1
acgaaattagataatctatactgagtaacataatttcaatcccatactacatgaaataagatcaggtggtttttagacaagtcctgaacggaaccaaacgaaaactccatctagaactgcatacatataccacactaatatattatccactataagcctaagatgttaagccatataggaccaacaaatttcaagttgaaggagaggtagaccttggagtatttgacctcgatactgatcttgaacttgcattcacactcgagcttcttgagtagcgtttctcacatttgccactcctcttagagcttcttgaatggctcctccttgacctgggggacacatttcgtgagttgcttctctttgaaacaggtgtagcactccgtgagtagctcctccttgaccttctccttggcctgggtgaggcactccgagaaacagacctgtaacggtgccttccataataaggatcatcaggcgaggcactttcgtgaacagatcggtaac

SEQ ID NO: 6283 - DNA, 386 bp, Glycine max
  Clone ID: jC-gmle01810014g03d1
agacaataacagtctcaactcaagaggacagatattctgtaatatttcacaacgatataagattttctgtgcatttatcatgctttatctttaacttccagcgatctggctaaatatcattgttaaatcacacacattcttcactaacattcatcaaatatctattggttgtttgagcattgagaaataaaaaatatatggaaacatgaccacttaaaaaattcaagatacataatattacagtcaacacgaaccatcttcagctcatagaaccgcaaacttacctctaactggcatactgcaagagcagcaacaaatttcaaagaagccctcttcttcttttgtaatcactgactgtcagcgtcaacgcatgcctcctgccatcg

SEQ ID NO: 6284 - DNA, 432 bp, Glycine max
  Clone ID: jC-gmle01810014g04d1
cgcgacatgaacaggggcaacaatattaaaggctgtaagctaaggctcaacgaaaagtccaaagttttttactggggacgcataattcaatttaagggcaggggaccaccggggaaatgggccactgggccctgggttatttaaattaggccctaaaaagggctttttttgggtgggatcctaaagctacttaagccaggggttattaaaaaaacctttcacaggggtggcccattcttaacttgtccaaaccgcaattatgcaggagggtaatggcccctttttaaagtaaaaggcctttctcctttctcggggcccttggaagatcaatcaaaacttaaagggcttagcctaagttgggttttcggttattgcctgaatggctgaaaaagacccatgcatggaactttcttatgggcccctgggaacggg

SEQ ID NO: 6285 - DNA, 527 bp, Glycine max
  Clone ID: jC-gmle01810014g08d1
gaacaacatatattttcttcaatcaaattctgaaaagtgataacaaaaccccatgattcttactagtattttttttatttaatagtaaatagtaatgcgcacggacgaggatgcttaatgtgagcgtgtgttcaaccgtagctaggaatcaaatcttaagtgaatgcactagcaaaaatgacatctttctaaggtcgaataattaaatgctgtgagtgatttttttttccaaaaaaaatatacggtattaaaatatttcgtcaagaaaaaaaatactatatttgacgttttgaacgagtgaagcataatttaataatcgaaaataagcagtaaaaatattatttagagatattaacctgctattctattataatttgtaaataacttatatttttaaaagtgaatatggctaatactatgataataaagacatctcagagtgtaaaaactccattaatggtactagggctgctttaggccatcattgatggctctaaactctaaagacaagacagatgaacccgtga

SEQ ID NO: 6286 - DNA, 508 bp, Glycine max
  Clone ID: jC-gmle01810014g09d1
aacattcaaatacgtaagctttgtaaactataaagaatttgtatacaattaacaacaaataaatactaaaatttctattacaaatatatcttgcattctaattataaagcagacacaaagatgtaaacattgaacataacaaattttttaatgctacactataatgacttatttttatatacaaaaaaataaatctgcaagcttaagctctgctattggtgaagattctctcaatatctaaaatctttctattccatttctttttaattttctttcaattcacaattctttgcagccaaatctctaacgtagtattcatttttcccttggtaggtgtaaacatgtggaactgacaaggtttacatggaccaaacttcacgtaggagttggtatctagcatttgtggtggggttgccaccttgctctttatgattattaccttttccattttcagtgacagttggagatgaaggaagcttatcaatgatgaatgtaagaggggaatcta

SEQ ID NO: 6287 - DNA, 362 bp, Glycine max
  Clone ID: jC-gmle01810014g12d1
actcgctgtattgggagttcatctccgcattcgcgcaaatttcatatcgatgttcaaaggtacagtatttacacagctgatcaatgcagggcttcaacagcccgacttgccacgcggatgctcatgcctaacatttaagctcatccttggcgctcaacgtgccgtcgtttcccttagacaattggattgggctggcacacgttgtaatcaagggtttcatgatgaaattgcaagactttggagggtgtttcatataccatatagttatactaaagggtgtgttgtaggtcatcattaacaactggtggagtaccggttttactctactcttaatttcctgttgggtcttttttaattaaatt

SEQ ID NO: 6288 - DNA, 473 bp, Glycine max
  Clone ID: jC-gmle01810014h03d1
caagagagaaacaaaaatgtaatttatttatagttttatgagaaaatttttcctttggtatggacaagaaagaaaaaggaaggggaggggcaattgggtaaatttaggagggttgttaagagagaaaaacttcaacggttgaattctttggggtgagacaaactgggcacgctcggaaatgcgcatcgcattctgtacagacgcacaagtgccgacacggcaaaacgaccaccgaggccacgcgctttgcgcaccctcggcatttgggacgcgccgccgtggcagccaccacgcggtcggggtcgatgtaggcggactccgcgtcctccgcctgtccctctacagcagcagatgaaacgcccacgacagcaggatcttcaccgccgtgggacagtatcgaatgctgcatgatggtctggagggagactgtcgtagcctcttgggcccgggcctttacctgtcacacatgggcc

SEQ ID NO: 6289 - DNA, 377 bp, Glycine max
  Clone ID: jC-gmle01810014h04d1
aatggaaactggggggttaataaaataaaacgcatcccataaattttttttaaaaataaaaatgtccccaatacaaagcctttacctttaccaacaggcaaaatgttcaaccttgaaaaatgtttgagccaaaattagtttttaaatgccaaaagccccactaagaactaatatcgggatacttaaagcgcccccggcatggaatgaacaattaggcggggtttgtaccaggggggctaaccccaagctttaccaacctctaatggatggcatttggggagcaaaatttttacttgattttcccacagggttaaaggaaaacctctgaaagtccaagcttttttgaggttaaacttgggctggccaaggttttaatt

SEQ ID NO: 6290 - DNA, 540 bp, Glycine max
  unsure at all n locations
  Clone ID: jC-gmle01810014h07d1
acaagttaattgaagaaattcaatttgtttaatcaaattccccaaccccctctctttttatttgttcactacgtattatatgcaataaaatattatatggcagaaatattctaagttggaaaaaatagaaactaagatataggatttttcaggaaggggttaaaaaagattattttattgatatttttagaatatttctatttcgacacaaacaagaaggaataggaatcggactctaggaaaagacaaaaaatcccccctagagtaccttttccatattttaattgattttgtttcaaattatctatctatatagatatctattttatgtttagtatcgaatccaattttattgtattttacaatcgaaatttctataatagaactctctattatagaaaaatgaaatctgaaaaaaacagtgtcataaccataatattcgaatttattggggggttgaaaaaacaaagtcaaatagtcttcctgacaatatccatactcgagtntatttgtattacgttacaagtaactctttaaata

SEQ ID NO: 6291 - DNA, 460 bp, Glycine max
  Clone ID: jC-gmle01810014h09d1
agtaacatctacaattattattttttaataaaacgtttgaaacacaggctttgaggttgaggtgtaaatgctgctgaataaccatcctcacttgtcacacaagcctaaatttaaatatttatttacattggcacataggctccttacagccatatttgccctcgagtgatctttcacctaaaagcagaccaatcgtttacaaacacataaaatcatctcctaagatgatctctcataaagaaggaatgcctcaaagcatccctagctgtaagtctttcaaaggggtcatatctaagtagcccctgcaaaagatgtataagatctccagctgaatgatcaacatgctgcattataaggttctgtagtcggtgaagcttcataacagctttaatactctctcgtgagattgcaccctctggccagtccaacctaccccttcgaacatacttttttgcatgtc

SEQ ID NO: 6292 - DNA, 514 bp, Glycine max
  Clone ID: jC-gmle01810014h10d1
acagaataaatctttaaatacaattcctgaatgagcgacaccccaatttacacatacacaggcgaggttgatattctgaatctgattttcaagatacatatattagtaatgagtttgacaaaacaagtcacaaaaacacaaacaataagtagctgagcatcaaagtgttcttaaagcattcagcaaatccacgatcatccaaaaactttattaaacaatccaagccaaccatcatgtggtgaaactaggattagcactgtgcatttggcgacgaagttctccaaggaagtcctgttgagggggtctgaacggagtccatcctgatgtcccactcgaatacataactggcttttcagatgaatctttgggattattgtaggattgtagtgcagctgtccaacgatcattaagcagctgggcagctgcactacaactacacccttctaaagctattaatcttgaatagtgattctcattaagaagattactgctaccagcattttcgtgatctgga

SEQ ID NO: 6293 - DNA, 500 bp, Glycine max
  Clone ID: jC-gmle01810014h12d1
aatcactctggtcaatccttaaatttcttttttctactttctccgctgttagccataggccacagcatctccaaaagacaaaaaagaaaaaaacagaagactgttttagaattgccccagccagactagtactgtcacaatcacactgttacagcaccaacatatactcgctacaagcacaactacaaacttgtatcggcatttgatcaaacaaattacgctatattaacagcaaccggcttccccctacccattgaaaatcctcttgtaccatccggcattcggggcccagggggttgcttggcaatgacttgatcagtgaaaattgtattatttgaagggggtgttcccacacgattattctgatgacaatgaactcggccacgtcccttaccccggccccggctacgacctttcctttgcccactctctttgtcataaccatgctcttctcccgcatgttcaagcagcaaagtatcaggaaaggaagcatcttctaa

SEQ ID NO: 6294 - DNA, 422 bp, Glycine max
  Clone ID: jC-gmle01810015a02d1
aaagaaagagaaatgccaagccctttaatgcatagtatatatagaggggaatttttcttctgatttgtgttgcttcctaaaacaataatttataccgtagcttccttaaatcatgacaaagttgcattcagaatcaatcatttaatttctttgattcattttcaggcagagactaacatcaacataagatttatatagttgtataatgtatactcaaattgaatttgacttcattgtcatgaatgttgtttcaagcttcctggtatagcaacagtcagcaccagaattcttgttctttgacaacataactgcttccttcttcaacattgcattgtttaaaatcaagggtccatttctcaaaagagcaattagagaaattataatatcctccatgtagagaaagcaactcttttctcactcta

SEQ ID NO: 6295 - DNA, 432 bp, Glycine max
  Clone ID: jC-gmle01810015a07d1
gggtaacagaataatcaaagttttattgaaatgaatacctcataaaactcatgaaagccgttacaaaaaagctggtaaccgatgtagcaaaaagttttattaaaattctaattttgccatttaagatgactccttagaaagcttctaatcaatgtattatgcggttaatggtgggtttaaactaaaaatgggaagggtggggtccaattgcaaggccttctactggttctagcatgggggcatacttaaacttctcatcaggaatcaccaaatcccacttgaaccgtttcacgatattatgcatgaacacaagtatttttagtttagcaaacttttgacccaaacacattcgggggcccccaccaaatgggacatatgaaaatggtgttggccctgctccttcaaaccttgaagcatcaaaagtttcgggat

SEQ ID NO: 6296 - DNA, 520 bp, Glycine max
  Clone ID: jC-gmle01810015a08d1
gaagaaagtgttatggggggaagagagagggagaagtgttatatttgccatggctgaaagttccagcaaagtacattaagaggcatacatggcagtcagtcttttcaacttgaaagatatctaacttagggaagataatatgactgctatatataaagtaaatgcaccgatgagtagtgagttcttggtaaacctcacttccgttagtaatccacagcctaccactaacaattcacacttcctaggggtagccaacacaataccaaaatgttactaccagcactagctccatctaatgaaaaaaaaaaaaaacattgggctattcagtcacccatggcctttcatttcaagccataataatgcattggtagtgcacctggatcaagttcccagaagcccttaagattgccatgctcttctgtcagtttgaaagctgggatttggtgggagaacctaagcaactcttttctggggtgcttacattgacagatgatccttcattgatttgccccgaaaactg

SEQ ID NO: 6297 - DNA, 452 bp, Glycine max
  Clone ID: jC-gmle01810015a09d1
agaattcaaaaatcgaaaccggtttaaaaattaatagactattgccgttacaataagtggggtattgataattcataaacccataaagcaattacataagaggagtagctgaaaaatgtagaaaaaaggaagaataagtaactaaaatactatttgttgtatttcctttttaattgctacttaatttatacaaccatgcacagcttgaaattccatagtcttgaccaacaactactatggtccaagaaaaaaaaatagtaatgtactacctccagcaacccggggttttgtaatttcccttggcttattgccgaattataacttatttggtccacaatagagcctctaaattttcaggttataataacacgactacaatggttatgtggatcgtccaaaagaatggcattcaagacaatgcttgtttcacccctatttttaactatttttta

SEQ ID NO: 6298 - DNA, 490 bp, Glycine max
  Clone ID: jC-gmle01810015a10d1
cggtcctgatactttattgaagagtgctgcgaggcttcaatacgacgctctcttttacttacatgaccgcacaaccaaaccgcgaatcttccaagccttttgcagtcgtgtcttccaaaccattgtctaaatgcttcatggcagatgcaacattggtttcaaaataaggataccacacgtggtcgtacaggaatcgtgccgtaaatgatacgtcatgcttgtacaccttagcaactttggtgccaccccagacacgggtcctctccacgatccatgggaccataacacgttttggtctagtcgcgcggaagatccgcggcatgacgtatcgatggaaagcttcctctgaaaatgcgagctcaatagcaggcaggaatgctacttcctctagtgctagcacattgaaaagcaggtggttgaggcgtcgaatgtcatcctgcagaatggtcaggcgactctgccacgaatcggctgtcggctcagctgataa

SEQ ID NO: 6299 - DNA, 389 bp, Glycine max
  Clone ID: jC-gmle01810015a11d1
ggcccaaaatttctttgaaaaaaaaaaaaaaggttccgtttctgggaccaagccttgggggcctggactggctttttttgaaaccggggggaggggaaaacaaaagaaaaaaacccttttttccccctggccaaaaggttttataaaaaaaattacaacccttttccccccccttttttgggggggggtttttttttgggaaagggttcccaaagatgggggtaccttttagggtcaccctaagttgttaacaacgccttcatgggggggggggcggattttttaaccaatgctgggggggggcaaagccaaaatttgggcttcttttatggggggggctggtggttgaacccaaaagccaaggtttccccaccccacccccccacggg

SEQ ID NO: 6300 - DNA, 435 bp, Glycine max
  Clone ID: jC-gmle01810015a12d1
aatgcgtcatcattgatgcatattattacattattcagaaggtaaagaactaccttttgaatgtaatgtgtcatccggtttcatcgcagggaaaagcaagacttctttgatgttacttgaatctgttaagaacatggccaatcgatcaacacccataccccaaccacccgttggtggtaaaccgtaatctaaagcgtgacaaaagccttcatcgaccatttgtgcttcatcatcacccatttctttatcttttgcttgatgttcaaatcgtttccgttgatcaattggatcgtttaattccgtgtatgcattacacacttcttttgtcgccacaaaacattcaaagcgttcacaaagtccttttgtatctcgatgctttttggctaatggggacatcatttctggatgaccacagataaaagttggattaataca

SEQ ID NO: 6301 - DNA, 551 bp, Glycine max
  Clone ID: jC-gmle01810015b01a1
ttgcaattccttcctcgttatggagtcgcgagtgctgtcacgcgccggaaccttgtcctccctccctcacctccgcaagccgccgcgggaggccgtctccagcgcctccctcgtcgccgtgaaggccgtgggctccgtcgcggacggcggaaacctgatttgggggaggcagctgcgcccggagctctgctcgccggtgctgaagaaggaggctgtcctcctccggccatgcctcgccgccgcctcctcgccggccgagggtagtgattccgccggagaagcaaaggttgctccggcggggttcttcgacaagtacccggctctggtcaccggatttttcttcttcacgtggtacttcttgaacgtgattttcaacatcctcaacaagaagatctacaattacttcccctatccatacttcgtatcggtaatccatttattcgtgggagtggcgtactgtttggtgagctgggccgtgggccttccaaagcgtgctctatagactccaacctactgaagttgctcattccagtggctgtgtgtcatgcatt

SEQ ID NO: 6302 - DNA, 437 bp, Glycine max
  Clone ID: jC-gmle01810015b03d1
acttcctgaatttacattaaatgcatctaaacttaaataggtatttgtacattgaataatcaatctgtgcatgacaatagaagtaccattttacaagctttcaccaacataaaaactcccccctaaagacatttaagccttacaacttagttaaacaagtttcccaatgtttctccaaggcttgcaatcatagagttgttccaacccttctcacttgggagtgaaagcagcaaaaatagtagcatgaccaggatctgcaaggtgagcaaagaggttgtcaataggaccagtgccagtgtaaatgtgctggaaccatgcccccatcacagccaacatggccaacctcccattcttgagctcctttgatctcaactccttgatcttctcaggagaaccacttccccagccaagtggatcaaaccaaagcccacctgggt

SEQ ID NO: 6303 - DNA, 492 bp, Glycine max
  Clone ID: jC-gmle01810015b04d1
ccttgctcctgcttcctactatatcggtttttcactttttctttaggttgattctttgaactgttgttggccatggatggcctaagtcgcttttggggttgcttgcttgaaagcaacagtgggagctattctgcagctcctcctctgatgctcctgaacaagttctccagcaaaccagtcaagtttctcgaagttactctgctccccaattctctttcctccaaacagtactgactctacattctcctgcttcaacatctcttctgctattcctactagcatcttcacattgccgggacttgaatctgtatccacattgggtccacatcgccccatacttgacccatttgcctgaatgcggacataattggtgctgcggcactgaccaaaggccatggcgatggcctggtcgacgaggtcagaggagccgtcggcggaaatgcgggccatgggcctggcccaatccttggccttccagcgtttgactcggtc

SEQ ID NO: 6304 - DNA, 492 bp, Glycine max
  Clone ID: jC-gmle01810015b06d1
aatcccaaaaggctagaacatgtataattttatgaaaaactgcaaccaaattaatcggaaacactctttacaaaatgttttcctatcaaggggatacaacctcactccaatctaaagagacccaacaatttcctcaaatacattattacattggttgatgaccactaatttgtgggcaacctttgtcatcttttccctctacggaccattcgaaggcctgaatacagtataaccattgacaccacatgccatatttgagtaatcttgatagtaagagtaactattctcagtgtttctcatgcctagataagatagatcagaaccagcaacctgccattggtttggaatcatcccatctaccttgccatttccatacgatagtgtactcgcctgaggaacataatcctgtagtgaatcataatgccgaccagatgtgctatacccttgttgaaacccagcatcatggtaacttcgcgatctctcaaacctaca

SEQ ID NO: 6305 - DNA, 462 bp, Glycine max
  Clone ID: jC-gmle01810015b09d1
gcggcacccaccatgaaagccgatttttttgccaccaccaaacaaagcatcccaaggaccacttaatgtagacaccaccatctgtggcaccacaattgcaagattgaggactcccaaagataaaccttggcctgctcctgaagcgctgcagtatattgatgctagagcaaatggaacactgaaagtaatcgcaagaggaactccgagaaccccaaagaaaaccatggacccaaccaccaccccttcggaggggtgacccacggcggcgggattcatcttgcgctggtgctccgccaccttggtgatcaccaccgtcattccgaacccaattgccagaataaagttcacaatcgcccacagcctctttactcccccaaccatcttacccaacggatccaccgtcagcgacatgaagcccaaaacgacggcgtttaccatcagacctagcgacccaacgcgcac

SEQ ID NO: 6306 - DNA, 503 bp, Glycine max
  Clone ID: jC-gmle01810015b11d1
gcacaaaactggtaaaattccagatcaataaggattgcggcgaagccgcaaagatacaacattcattagggaaaacaggagtggggaaaaataaggggggaggggttgaggaagaatcaattgctcacagagcatgctaagacacctaaatattccacacacagttattgaaacaacccaatatagagaaaatttttctttggtgtattataatataaagcagaaccaaatgacttggaagattctactttcttataccattcacttggcaagttcgttgcggatgagttttgctgcggcaaccatgtttgtgagggctggcttcacctcagtgtacttacgggtcttgagcccacagtcagggttcacccacaagatgttcttctcgagcactgccagcatcttgttgattctgtcagcaatttcttcagttggtggtattcttggggagtggatgtcatagacaccagggccaattccagcaccatactgtacaccttcgc

SEQ ID NO: 6307 - DNA, 470 bp, Glycine max
  Clone ID: jC-gmle01810015c02d1
aacatggggaacactttattacgtattataaagccaaagatccaattgtagataatcaaccacatggcttgtgatgtccacgttaacagggtttggaagtaatgttctcctttgggacccacattaaatcctatattggatttctcacgaaagcgctacgagaaaatattatattagtatattcacagaatgtttcattgaactcacgcacactatacattgcgaacctggactctaggaaaagacaaccaatcctccctctaggacctttgccatatgctaaacgacttggctcatcacaatatttctttatccatgtctgtgataagcctaatgtctaagccaagcctatagcctttgtacgggcgaactgtctatacttgaactccctattatcggacaatgacatctgtgcaaacctgaggcataaccataatattgccatttattggggggttgtaaaaacacag

SEQ ID NO: 6308 - DNA, 439 bp, Glycine max
  Clone ID: jC-gmle01810015c05d1
aggtaaataatttttggttctcaatattattttgtaaatccaagtttccgcgccttccccctaaaacaaaaatgcattattatctccaacttgggaagaaaaatcgtttcctatttttcttctgaaaattcttttgttggctaaccttgtatcggtaaagggaaaattacaataaaaaaaataccaaaaacaaacccaactatatgacaatggacataatacaactatgcaataagaagttccttgttaggagaccaagcaaatacattaagcggcaacttcttgctcttttgtggcaagttggttctgaatgtgctgaggcaccacatcaaacatggctaattgcattgtgtaggatgcacggccctttgtcatccctctgagtgtgctgacatactggaacatctcagcaagaggtaccagggcatcaaccacctta

SEQ ID NO: 6309 - DNA, 541 bp, Glycine max
  Clone ID: jC-gmle01810015c07d1
caatgaacgacgatgccgtggttttcgattatcgcccctacaaatagttctgaatcaaccagccattttacgctcttcacaaactattttctaaattctaacataggtttccaatattgtaattatacaagcctgccgtataaatccaatgaacccacaaaccgaactggactaaccagttttttttttcagttcagtttttttttacaaaattaaaaataatttggtaacccaaaaaataattaaactaaaagtttggttcagttttagtgaaccatgtttctacagcaacatggttgaaccaaccccatccatgccgagtcctaatgactgtggattttgctgtctctgctgagagaaatgggggtgattctgttgtgtgttttgaagtgccaccaacccagattgtagattctgagcatttgccatgctaccaaatgcttgagaaccatgttagtgctgctgctgctgctgctgctgctgatgtatgggcatcataccaccaggattgccacctcccatgttaaacacctgatcactc

SEQ ID NO: 6310 - DNA, 420 bp, Glycine max
  unsure at all n locations
  Clone ID: jC-gmle01810015c09d1
aaataattgtctaaactaataaaatatggcgttgggccacagagtctccacaaattgcaaacttcttttactaaatgaaattgactacatatgcctcttttttatcctttatttgagcagatcttcccatttgcagtactgccctcctgctaatgctcgataatacctatccctacaatagacaggtcttccatcagcagcctcagcagcagctgctgctagatcatcatcagttatcacctccactggcaatttaagcaactcctcttttcttaggagctttgtgttaaccttgggagcttgaacagntgatttaatttcttctttggtaaaggtagttcgaaaaaaattctccactggtgtagcaaagataaatagcattactcctgtaacaagcaatgctcctgtcccaactagagt

SEQ ID NO: 6311 - DNA, 438 bp, Glycine max
  Clone ID: jC-gmle01810015c10d1
gaacaacttaaaatcactaaaagaaaattgataatttacattgagatttgagattctaaacctaactcttttgatctggacaaccatagtaaatggattcaagccggaatttgagccgtactaactgcaccatacagctcagcagcacagcaatacttaccgcagggactaactaactacataatataagcaacttttggatgatggccaaaatacatagccaaaaccaatacaatttcattcaaatcccaaagacaagtatcggggtatacacgaaatcttgttttcacttgatgtcacccactaccaccaatgtaaagattgaaggcataaaagtccctgatctgatctaaaccaccaccaaatcaccttcgccttgcgacattagcatgctgattcgctttgctatcaattctgatcctgtcagcatacatggga

SEQ ID NO: 6312 - DNA, 480 bp, Glycine max
  unsure at all n locations
  Clone ID: jC-gmle01810015c11d1
aagataacttgccccaattttattaatctgatgaagtatatgtgtaaagaagcttctgcattgttcacgattgtttatacccacacaacacaaagagatattcaaagccagggagaattgtaaatgggagttacaacagatttaacttgaagatacttgtgtagggcttccattccaaaatctcttccaaatccactcatcttgtaccctccataaggaatgtcattcccaaaggcaaagtaacagttgatccaaacaatgccagcacgaatggaccttgacacagtgttggctgtgtccaaactctttgtcacaatgcctgatgctaggccatatcttgtattgttggcaatcttaattgcatcctcaatagtcttaaacttcatcaaagccatcacagggccaaatatttcatcttgtactatgagcatgtcctccttaacattagagaaaatngtaggctcaatgtagtaacccttg

SEQ ID NO: 6313 - DNA, 472 bp, Glycine max
  Clone ID: jC-gmle01810015c12d1
gaaacagaatataaagtaaacatttttcccatccgaattctcaaatggacataaaacccacattccgaagttcatataacactacaaaatcaagtcgtatacaaatataaataaccagcacaaaaatgaaacctacaatatccagagtaaccttaaaaggtaaagaaccacaaaatttaaccaaatcattgagaatgtccctaatcaaacaagccgaatcccatatcatcatcactctcttcttccggtacttccttctttttctcctcagcagctggagctgcggcagcagcaccaccagcagcagcagcaactggggcagctgcaacagcaactggtgcaccaccgtctgacgcatttgctatcaaatcgccaagatttttcttctcagcaagtttatcaaacaaggttggccaataagagtctactggaacctttgcagttttcaacaaggtgctgatcttgtcagcag

SEQ ID NO: 6314 - DNA, 525 bp, Glycine max
  unsure at all n locations
  Clone ID: jC-gmle01810015d02d1
cattcgaattcattttatttatatattaatattatattcaaatgaaataaaaagatattaaaagatactaattataagaatttgaaagtgaaattataaagttattaaatgattaatcaatttttttctacctgttcctgtagtaaaaagagttccatctgttcttgaatagcttccttcaaaaggacttctgcttccccagtgaatgtcttggtagaagatatgatttctttgaattgaggtttattcgtgtttaagtaagcacgtaactcaacaagaaatttccttacctgtccaatttctaatgaatcaagataaccattcgttccagtataaataggtattatctgttcttccacggtaagaggagctgattgggattgtttaagcaactcgcgcaatcgttgacctcttgctaattgattntgagtagctttatcgagatcagaagcgaattgggcaaaagcttctaattctgcgaattgtgctaattccaattgtaatttaccagctacttgtttcatg

SEQ ID NO: 6315 - DNA, 483 bp, Glycine max
  Clone ID: jC-gmle01810015d06d1
ggtcaatactttcttttttaagacaaatgttttaagagcaaagttatcacagaaacctacgccagacagacctgcaacagcataaaaaacaaactacatttacatctcctagacatgaagctaaaaaaaattagaaattgccactaatcctataaatgcttatcatctccctctatctgtggctctcacggaaatttttaaatgcaacaaggagtagagggttgtacagagaacttgtcagtgtttgcactttagcactatagcctttgcttcacccgccttccatttacgtcgctggcatcaagtatcaattcattcctatgcttgcacaagaagtccgaatgctcagtaaatctagccacatactccaaaagctcagtcaaaacagatgggcaactttccttcaagtactcaaaaccatcagtttgcatcacagctctgagattttcaggccttgcaacaaatttcagacagactgctttc

SEQ ID NO: 6316 - DNA, 341 bp, Glycine max
  Clone ID: jC-gmle01810015d08d1
ggaaacccctccatatagcattttttcaatttttgatatacctttccaagaaaattttaagggggctcccaaaaacatatgaaaggcccccttttgatgttttgggaatttcacaaacgaaaatattttttccccgtgtatgtttttatgggtgctagggaccttgtcaacaaaaagaaaaaccaccctttgtaaggaagaaaaactccaaattgcggaacttaaaaattgggaaaacattggttccacatggggggcggggcttggcctaggggggcattaaaaaggcccggccccttgtaggggaaacccaaaccccatactatgttcaacttttgggg

SEQ ID NO: 6317 - DNA, 473 bp, Glycine max
  Clone ID: jC-gmle01810015d10d1
gacacgattagctagcttcaactagattagatggcaacagaaagttgtccaatacaattcccaaagtggctgctcaaccagaaataaaacgagaaataaaggatccaaaaaaatcaaatacatgccaaatttctaacaaccagaccttcacagtgtcttaggcagtatttgccaatgacaattaatatgactaccaagtaaacacctatttttccctaataacctataggcttcaacaaaaagaaaacttagtaacaaaacaccatccgcagccaccaacaatccatgttcacaaacacagaacgcaccaacttaagcacgctcaccacgaatccttcttgccagctgaatatccttgggcataatagtcacacgcttggcgtgaatggcacacaagttagtgtcctcaaagagcccaacaaggtatgcctcagcagcctcttgcaatgcaagcacagcatggctctggaaac

SEQ ID NO: 6318 - DNA, 371 bp, Glycine max
  Clone ID: jC-gmle01810015d11d1
aaaaaaaaaacttatatttgccttttcatggggaaaaataagggacggggggaacaaacaaagcttcccgggggcaaactattttgggaggggcccccccccatctgggggttcccacaataaaccctcccatttaccccaaggccctttaaatgaacaatagggggggggggaaaaaacaaaacaaaccccgcctccggggtatttggggataaaatccaaccaccaaacccccggggggatcgggttaaagacaaaaagggggggcgccaatggggccccccccctccacccttttggggaagttaatggaaacaaaaacctccagccggcccgccgggataaaaattcaccacacgctgctacattcc

SEQ ID NO: 6319 - DNA, 570 bp, Glycine max
  Clone ID: jC-gmle01810015d12d1
acaagaattaataaataccatatcaatcaatatatgggcgatattcatgaatttcagtcacgccaaaatttattattggctgcagataatgttaaactttgaaaatctctcctcagacaccgtctgaacgaacaatttccttctttttcacatgatacgttaacacaaggcaaagagtaaaaatggtttgctgctggtaatggtaatcatcaaatcagaaaaaggcgctctcctctattcatatactttgcattcctcatcagcagggtttgtctcgcagaattcctccaatgggtctccactccctgctttagctgcccctggccacttgcttgctactaggtgtgccaaatccaccaccctttggctgtaaccccattcattgtcataccaagcaaccaccttaaccatgtcatctcccatgaccatagtcaaggaggagtcaatagtagaggaaacatcagagcagcggaagtcgatagacacaagtggaacatcacacacgtgcaacacacctttcagtggaccctcagctgcctttctgaatgctgcattcacatcttcagcagt

SEQ ID NO: 6320 - DNA, 416 bp, Glycine max
  Clone ID: jC-gmle01810015e02d1
aacataaaaaaatatatttatttttcatttaaatttcaaatgttggaacatcagactcaaagccatgactggcctggtataataggcgaggccctaaacctttgtaggggtcgctttctcttttctcctttaaataagctatacatttgtcaacctcagattgcacttgtaaatataactcttgagatttctggttgactctcagttcttgttcccttcctttcgtttccaatggttttccaaaataaaagtagaaccggtcaggaactttaggcaaaatcaaaggcaaatgcacttggagattcgccacctaagcaccagcatcattccttaagtgcgcagactcctttgtgaggctttctatttcagacctaaagtaacgaattttcaccaagtctgcatagtcgaaaactact

SEQ ID NO: 6321 - DNA, 527 bp, Glycine max
  Clone ID: jC-gmle01810015e07d1
ctaagaacagttagttaaagaaaaagtattagtatcaaatacaatgattcaatcctaattatacacacatcccatcctatattggtcataagatttctcctaattgattttgccatatatacatgataaactactaaaaatatctaagatattctaacagaaatatatgtccacaagcataaaagataagataaatatgaactcacatttgttctttacaagaaaacagaaatttcttgtaaatgcacatgactattttggttgaaatgaaattctcattttgtagctccttgtaacaccttggctcaagggcttgcacaatctgatcaattatataactttagtgagcatggcaacatccttcaggcatttagaattggaacttttcttaaaataatcactatagtttatattctagctactcaaaatgatatgaaaatcattatctaaagaaatcaaagaggatatagatgaaaaagaaagatacaaaaataactttccttattacccgaagggcttttttttta

SEQ ID NO: 6322 - DNA, 467 bp, Glycine max
  Clone ID: jC-gmle01810015e09d1
gaacagaatttgcacgcgaaccaagtgagaacttaatccattccatgttcagaaaggcattggcaacaaaagccgtctttatgcccaaaaggcctctaacagaagcgaaaaaacacttccatccgctacagtgacaactgtgcaaacccatacctgtgtgaacaaggactgaatgaatacacactcaaggaaacgactcttcctaatatggctaccccagaactgttgagtagccctaggggagccccatgaacctctcgtttcccctttgaggtggacatcacaacaccccattcgaagcccgcggtggctcctctcttcacgaccgtgatccttgacattcatacaataggaatggtcacactacttgattgtaccatccacatgaactgcgacagagaactatattgggaggaaacatgcctatacgctcccaaccattgcgttcagaatcacctcttggaagt

SEQ ID NO: 6323 - DNA, 496 bp, Glycine max
  Clone ID: jC-gmle01810015e10d1
aacaaagtaaaactccttttgaaatgaacattgttcaagaacaattagatcaaagctcaatgcaacaccaaggatgccacaaaaccctcttatttcgaaacctaacctatattaagcctctacaggagcaacaagagctctctcattgtacctcaatccactgttggctgaaatccaaccataataataatataaagcacaaattacagaggaactagtgatgtttactcaagcatcatcaagggcaaggacaccagggagttgcttcccctcaagaagctctaagctggcaccaccaccagtggagatgtggctcatcttgtctgcaagaccaaccttctccacagcggcaacagagtcacctcctccaatgatggtcgttactcccttcccactcaactctgccagtttcttggctatggcctctgttcctgtggcaaacttatcaaactcaaaaacacccattggtccattccaaatgacggcctgggtctta

SEQ ID NO: 6324 - DNA, 428 bp, Glycine max
  Clone ID: jC-gmle01810015e11d1
gatcacaaacaatcatatagcataaagatggtatcaacagtataaatcactcacatgtaaaagcacaaattgcaaccaattgttccaggttcatagtagtaacccaaaaaagatgaaaagtgaagtacaaatgcttggggagacacatttaatccaagcttctaaaacaaggacagagcaaacaagttgaaaatactaatgagcaataccaataaataaaagcaaacaaagccgaccaacaaaaactaatgaccccaaatgaagattgtcctaatgaaaatataattctcatcaaaacttatctgccctgtcttttttctgttcaggtgtttttcaatttttttttgttatggttgattggtcctcacttggccatcatgactttgacaaactcctcatagttgatctgaccatcaccatcaacgtga

SEQ ID NO: 6325 - DNA, 374 bp, Glycine max
  Clone ID: jC-gmle01810015e12d1
cacccaaaaaaaggggggattggggcaaaaaaataaaaaggtttggccaaaaaaaaaaaaaaaagggggggatccgggggaaaagggcccccaaagggggggaaccccccaggggaaaaaaatttgggggggaaaaaaaaacccccccgaaaaaaaaagggggggccaattttaacctaaaaaagcctaaaaaagggaagaaaaaacccccccccttggggaaccaaaaaacccgggggggccccaaagagaacccaaaaaagcgcattaaaaagggggaacctgaaacccccccgccaaggggggactgtttaaaaaaaaacgccaaaacccagggggggctttcaggaaaattctcccccccaaaataaagg

SEQ ID NO: 6326 - DNA, 501 bp, Glycine max
  Clone ID: jC-gmle01810015f04d1
cgtcccaaaagaagtgacataaacatttatatctctatttatgtatatatttaattcctctgctgcagggaaagcaagagaggcgtctatgagtaatagaaaaaacttacaggcgttctccacgtgtttgcttttttttttagctgactactaaactcattagccacaaacattttaagagagccatggaaataaaagaaaaacagggtattattattattccttttactggccacaggtcgaaataattaggatgacaccctaactaaggctcgattaacgagattgcaatacttgggattggtattctcccaacgcccaaatggggaatatgtttctgtatgcggcgtatgtgatcatgcaattcttgttgaagactgccattatttcctgctgcggaaagccaccgtcctccaattgggaatttatcaagtatgcagctgcccggcgcagaggatgcgaatctctcttatcctgtccagcttcaatgagagccaacat

SEQ ID NO: 6327 - DNA, 486 bp, Glycine max
  Clone ID: jC-gmle01810015f05d1
gcatgaccacaaggaatatccaaattaaacacaagcaaacaactgaaaatgaaagaaagcagaaattcaacacattccattaagttgaacactacccactttcttcctttcattggaatctgctaaaagtacatttattcttgactaacatattcaaagatgatacactaatagcagtttccctgaaactcatttagcaactagattggagctctgtagagctggagaaccttgttccatgatggtctactgctaatgtcatcccaccaggcacccacatgcttcctctcctctaacaaatactttttccccatattgttcacaacataatcaagaaatggaaggtggctaatatcagcaatgctgaagaaatccccagccaaatacttagtctttgagagcctctcctcatagatgttcaacacttgtaccagctttgcttcactctcctcaatcaccttgggatctggagtcacaccaaatagt

SEQ ID NO: 6328 - DNA, 535 bp, Glycine max
  Clone ID: jC-gmle01810015f07d1
gtagaattattatgttagattcagatcaccattatattctaaatagataatgaatacaatgaacacaatctaattttaatcatactaataaatataatttagaagattacttaaagataaaataaaagcatttatccttaatttttatgcagctaatcttctaattttgtaattaaggacatcgaagacacctttttgagatacaaaccaagctttccattcatcataagttaaggattctggatcatgtgcataattatccattatatccccaattagatcatcaaaagcgttatcaacttcgtcttcatcgatttgactgattttatcatttagattattcatagcaggatgttcaaatctggtggctctaaaaacttggaaaagacttcctagaactgtattgagatcctctctgtcaacttgcccatcatcgctttgatcgaataaactatagatgaactctaatctttcattattatctcctcttgctaatatagccatagcctgcatatatccttcgtaatcaatcata

SEQ ID NO: 6329 - DNA, 330 bp, Glycine max
  Clone ID: jC-gmle01810015f08d1
aaagagtactttgtatctgtcattatgtctaagccagaaagtaaacccaccaaccaaaaaacgagatgtatagggatatacaccaaagcccaaatttccaggcagggggcggacaaaacgcgagagcacgttagaaaaaagagaaaaaaaaaagggggactcaaacaaaaaccagaacaggtggggaacgcaaagaacacccgggggggggccggggctacaaaacttgaacaaaaagaccgtcgcttggcccaacctaggaacagggaaaggaagacttggcccacgggccgccatcagcaaaaagtttgggacaaaaaaaacaaaggg

SEQ ID NO: 6330 - DNA, 390 bp, Glycine max
  Clone ID: jC-gmle01810015f09d1
cattcgaattcattttatttatatattaatattatattcaaatgaaataaaaagatattaaaagatactaattataagaatttgaaagtgaaattataaagttattaaatgattaatcaatttttttctacctgttcctgtagtaaaaagagttccatctgttcttgaatagcttccttcaaaaggacttctgctttcccagtgaatgtcttggtcgaagatatgatttctttgaattgaggttgattcgagtttaagtcagcacgtggctcatcaagaaatttccttacctgtccaatttttaatgagataaggaaaccattcgttccggtataaatagttattatctgttcttccaccgttagaggagctgattgggattgtttaaac

SEQ ID NO: 6331 - DNA, 435 bp, Glycine max
  Clone ID: jC-gmle01810015f10d1
gttgttaactaaaataaccaactttctcaaacgatttgaattagttaaaaaaatattccagggacgaaagtaataataaattctcgtatctagctccagccagttaacctattcaaacaaatgtttccttgactctttgttaaaggggttaacgggatttctttcaacacaggaccttaaggctcaagcccagcacaatactttgtgacttaaacggggacacaattcagcaattattcttaaagcactacggatttgctgaatttgttcataattttagagccttgttagtgtaaaatcacacattcttgtgaaccagctaccaccacagtagggtgttcgcttgtgctgactgcatcaacttctttgacactttcaacgttgacatcctccaattcaccacagccaatggcttcaaaaataagatcattgact

SEQ ID NO: 6332 - DNA, 500 bp, Glycine max
  Clone ID: jC-gmle01810015g02d1
ggataacttgatattattttattacatacatgcatagatagcctgctctcaaataagtcggcaggaacaaagatagagagattcaacgatcttcaaatttcacatttgccagaaatatataacagaaaagaggggtatgggatatgagttaagttttgatcacattcaactacactatcccaaaccgttactcttaagactttgaacttcacttgtactctaggatcatgttgttctcaggagctaatccaacacaagccctcaggatgttttccagcatagctcgctgctttgacaacgcattcaccactggtgtacccggtggaaccagaagggccttggtcaggtaactaaggatggtcgcaactgggtggaacgagtgggattttccctcattttcaggtttaaactcgattcgagtgctgagctcagcaagaaggaccaagtccaagataataggagcagctaacagtgaatcctcacatgtgttgtgcaacaca

SEQ ID NO: 6333 - DNA, 447 bp, Glycine max
  Clone ID: jC-gmle01810015g07d1
aacccgaatctttgattttacattgaaaattattacgattacccaatagacccatccaaaagtagaaactgatcaatcctttgggggggggattgaaatgaaaattacctaaacttattaagcggggggaagaaccttattaacaatctcctggctaaaagctgcaatctgggaatcaagggacctgatgggttcttccttttgattctccaagctaaacagagcctcctgcagatcaacctcgacttttttcctcccctcagcaattttctgctccacctcagcctgcgtcttctttttcatggggttcagcgccgttgcaatttccgctcgagcagccgccatgacagcattggccttcttctccagctggttcacctactccgacgggtcctttacgctgctcagcttcttcctgatcgccgcgtccctctcgtccatgaattt

SEQ ID NO: 6334 - DNA, 403 bp, Glycine max
  Clone ID: jC-gmle01810015g09d1
gaatattagcaagctgttagtatttaagttttgtgttgcacttaaactctatataaagagcttatgaataaaaacaataagttcctccgcatgatacatctcttctttcactattattttttctaagaaaagcatcttattacttcctcctatacaacaaatggtgctactaaatctcaggttcttactatcaatctacactttaatgtcctgaaaacgcgagatggatggaagtacccacaatttcagccaattactgcaagcaaactttgtctgactactggaattgagcacagtatagatccaaatatcccagtcagaccataagcaatggcacaaaatggaagagcctcacgttccttggcagataaagctgctgttccgagcccgtggcaactagatg

SEQ ID NO: 6335 - DNA, 458 bp, Glycine max
  Clone ID: jC-gmle01810015g10d1
gaaaacacaaattatgatcactctaaccaaaattcaaaaatccaaacatcccctttgagatggaatagaaacatttatgtagagtttgatattcaaaaactaaatcaggctgcctccttccattgcaccaggagggggaaaggttagaaaatgagacttcatgaaccatttatacaattaaaagaatagtttattttgcctcactacactcctacgttgttactgccagaatccattagaatagtcaaccttttggctgttcttgtgaagtcactgaatgattcatcactaatgcgtttgacagccccagttgaatcacgatagagcacgtgacttaacatttcagatttttctatgccaaacatgtctgccaactttctatgtaattcatcataagaccgaagcaacgagaggtccatagtccgacccacatcttcagactccataaaaactttaca

SEQ ID NO: 6336 - DNA, 497 bp, Glycine max
  Clone ID: jC-gmle01810015g12d1
aaaatcataatcctatttatcattaatatatatgcacaaagcagaacaacctttacatgaacggcgtataaaatataattcaaaacattcattctataggaccttatcactcaaatatttaagaccgggtttggcgttgataatgatgtccaagtttcgaacttcttaccctataaccttttgcccttccctctaagtaatatcacaaaagtaatattaaaatattaatgaatcatttattctcattagatctagggacaagctaaacatttccccatttttggtcattcataccaatatggggaatccttgtataataaaattaccttaaggcctaagtaatagctcataaacgtcggatgaattgttcccagttacacgctatgacatttcaaaacttgtacgactacccaagaattcgacccttgtaaacagtgcatagccatgttctgctgtttccttactagagtacactgatcgaagcctatcagcgtggc

SEQ ID NO: 6337 - DNA, 448 bp, Glycine max
  Clone ID: jC-gmle01810015h03d1
aaacatcaattatctttttttattcttactgtttccaaaatcccaaaaaggaacaatggggggaaagaatgtcctgcaaacttgttttgatccaataatggaatatattatgttattggactttgccggaagctgcaaattttttaaatgatgaaaatgcccccttgctttgccctttaatgactatataaatacccccaccgctacacaatcgtgggtttgctccttcttcttgaaatgacgaaaattttaaggctttctcatccctatattaagaccaaaaaaaggctcgggttttttttttttaacaaaggggcctgggcatgcacaagcttatgcaatccgttgaaggttatatgccaccatttcctcttgggctaaacaaaacacactttgcggttggcattggatactttaaattgcaagatcagctttcttttttggtaac

SEQ ID NO: 6338 - DNA, 511 bp, Glycine max
  Clone ID: jC-gmle01810015h04d1
aagaaagttgaaccatccggaaaggaatatatttagaaaattgaccacgcggaagagatggtaaacatcatcgtcatcatacaaggaaaattttcgcagcagactcagcctaatcaagttgtcttaaaactacatgagacaaaatatactttgtttcacggtgggggaggaaaaggtttcaaaaacaatggaattgacatgacagatgagttaaagactaacacaaaaacgagaaggcattggtaaagggacggcttttccttgctctgtcggtgtagaaaaacgatggacgacactctttttctatcaaatcctttatatcccgaagagtgggccaccatgtgtagcaaagaagggagcaaacacaagagactcagccgccatgagcttaataaggatgttaagtgaaggtccagatgtatcctttagagggtctccaatggtgtcaccaataacagctgccttgtgacaatctgacccttttggaccaaggcttcttgcatgctcagaa

SEQ ID NO: 6339 - DNA, 419 bp, Glycine max
  Clone ID: jC-gmle01810015h07d1
gagaaagataaaacaaatgacttaaaatacttgtaactgagtataacaatttcttcaaaattttgaacatgtcttcaacaacaaacattgcatacaagaaaaactaggcactaagctaatatgaattactcctccagcgtataacttttcaagcaacagggacctcaatatcattagcagccaaaactggagcaggctggatgtattcttcttcctcctttggagaatggattgtgacaagatcagggaggggagttttaggaccctgtttccccttaggatcccaatcaagcatgatcttcaccttaatgccaagaacaccctgtctcaggagcacatgtctcactgcagagtcaatgtaatctttgacaggctgcccagaagaaatcatgtacccatccttaaactttatagatttg

SEQ ID NO: 6340 - DNA, 503 bp, Glycine max
  unsure at all n locations
  Clone ID: jC-gmle01810015h09d1
aatggaagcactttttcaactattttagtaattaatattagtatttattatttatatacaacacgtgagactcccaatctctaagcatggacactaaaagggtaagaaactctaaatctaaaccacttaatccctacaacaccacacttaaaccgtggtagagagctcaatttggttcccttctgaattgctatcccctttgtcatggacctgaattggcttgtaggtgtacaatttggcacaaaccaagtagtaaataagattgagaaactgcaatatggtgataagccagtaaaagtactccaacttccctttgttgaggttgttgtcagggagccaatttgacccattagacccagcactgaacttgtggaccaaagtaaccataatggtactcacatagttcccagcagcgatagcagtccaaaataatgccatggcagcgctcctcatactctcaggggcctggtcatagaanaactccaagtgtccaattgacataa

SEQ ID NO: 6341 - DNA, 429 bp, Glycine max
  Clone ID: jC-gmle01810015h10d1
acgagtgaccctgccattgcattgtgtttgtattgatttaatacttaacagtcaacattgtgaatattctgtcggtgaaattctcaaaccatataccctgcttttaattgtaataaataatcagggaaaaaaggacagggcttgcactatccactgtacatgccgaccactaagtgatacattgtcacaacccgaatcctgtcattgatgcctaacaactacccaaacagggtggataaaacgggaaaaaactaattattatttgaacagatgataattacaagcccaaatgatttggggatataccactcataagggtcccccgcctagacgccgttaccagaggcaacgctctgatagaacaaattgttcccctgggctgcattgctgacatatccttgggatgacccaaagaatgtccgtacggga

SEQ ID NO: 6342 - DNA, 472 bp, Glycine max
  Clone ID: jC-gmle01810015h11d1
gcaacggtggaaatccactcttcattacggatcatcatttctgactaaggactgatcgaggtcaatcaattcaattgtatccccacccatatacacccatgttttcttggctgagccagaggggaaacataaaagatggaaattaacgaaaataaatagaaagggtcttggctgagcaaattttctatcatttttcatctttagcagcaaaaaaggggaagaggaaatagagctgcgaatggaaaaagaaacagaggctttactttttcctttattcttttttaactcagcagaattcccaaagacccatctgcaatgcctgtttttagctcataccaaattgcatttagctttctttaactctggatagagctaaagcagtagccttttgccagtaaaatgattcctcagttgatcatttttaatgtagtaagatcaggaacaacacacccagatccatgaataatggatc

SEQ ID NO: 6343 - DNA, 301 bp, Glycine max
  Clone ID: jC-gmle01810015h12d1
ggttaatccttaaattttttttttttactttttttcgtgttagccataggccacagtttttttcaattgacatatttgaaaaaaaacaaatatacagaatccaacatgccccacccgactagtactgtcacaatcaccaaggactgaaggacatacactccctcatgcgggacagcacactagtagcggaattggaacaaccccctcacgctgtaacaacagcgaccggctcccccctacccattgaaaaaccccttgtaccaggcggcaaacaacgcccagggggccgcttggcaatgac

SEQ ID NO: 6344 - DNA, 520 bp, Glycine max
  Clone ID: jC-gmle01810016a03d1
aggcatataatctccaaatccaatatataatacattacctatccaaacaaaccattcaattccttgtattgtacctagctacttttcaataccatatacaatataccttccccaactcaacttgaatccttaaattaaactaattcagaacatgtaaatctgaattccctgcaagttcataatcttgaaccagtttccatctttatacatggagcaagttaccataaacttctccatttcttttatttctttttttttcccctcctgttgctattcttctgctaagttagtgtgtcgtaacactctgaactgcattgtgttttgtggatatataatatattgcaacatcagaaaaagaagaaaataattcaattctttcgtggggtgttcttcattgattaattatcctagctagctagttaattatcaattcttttaagccacgaaatcccgcaacaactgcgcagcaaacctctttctgttttgaatgtcaatgctctcataactgatacctgagtga

SEQ ID NO: 6345 - DNA, 231 bp, Glycine max
  Clone ID: jC-gmle01810016a04d1
acgcatatagaacgattctatgcatacattcttttaatctccttgatgccatttatgggccacagcacaaatgaactctgaaacctcgaatacaatgtgcacctataacctaatatgacattactatagccacatcattgcccgaaatctcggaggaatatcatacaattttcttaagcacatggcgaaacttttttctgaccaactgggttttctccaaagggttccccc

SEQ ID NO: 6346 - DNA, 468 bp, Glycine max
  Clone ID: jC-gmle01810016a05d1
aataatgcattcctctttatgttcagatgtactgatagtctagaatcgctacatttcctatgtatagctactcagaagatcttaatgctagtgatcatagctaagccaatatctctcataggataatataccctttcacttattcaaagacatgatggatatgccttatacatgtttagtcacggaacacaaactgtgggagtgaaagaactcgctcacaacgccctttgaaagattacccggtacgatcgaatcaaacgagcgcttctggaataaatattcagctgcttgtgaaccttgaggtactgccttattcaacgcgtgatcaattactctgtcaccagcatgtgcaatataggcattaggttcggcattaatgatatcccccaacgtgccaaaactcgcaggtacccccccagttgtgggagacgtaagttcggatacatagaataactacatagacctttg

SEQ ID NO: 6347 - DNA, 493 bp, Glycine max
  Clone ID: jC-gmle01810016a07d1
aaggctcaagcacagcacaatactatgtgacttaaacggtgacacaattcagcaattattcttaaagcactacggatttgctgaatttgttcataattttagagccttgttagtgtagaatcacacattcttgtgaaccagctaccaccacagtagggtgttcgcttgtgctgactgcatcaacttctttgacactttcaacgttgacatcctccaattcaccacagccaatggcttcaaaaataagatcattgacttcttgaaacctctcttgagagagggacacctctgcaagaagcctccaagcattgccttcagatgcctcatcataatccttcttcctctttagaaccatgtgcccactaatttcccacacagcaggattcacttgggtgtcaagaagctcagcatccacttctccaagagcttgtttctctgcataacactgtggtaacagatagacttgctttccacagtcagagataagaacatt

SEQ ID NO: 6348 - DNA, 465 bp, Glycine max
  Clone ID: jC-gmle01810016a08d1
catgtgcctactatcaggcatcaagaactgattaggctgctccctttcataggtaatgtagtcttgatccatatacataaaaccccaacatgcacgctttaacgccgcgtatgcaactccaggctgaacatgcgatgcatcttcgcagacaaacaacagatggatgcgttgttaaaaaatgctgaccgcgtgatcatcgcatgacggtattggaccactcgagtttgctgcgattggccgaaatgattgcccctcaacaccacgcccactatcgcgactcgcgcctctacatcactgcacaattctgcttctggcactgcgccagatagccctcgtcctcttcggtgcctaatgcgcttaccggcttgcgcactgcacctttgaccgtaatgggttgagctccttcagcatgccaccatcggagtgtttgctgtaacgcgccgtaggtctctacggatgtcatgg

SEQ ID NO: 6349 - DNA, 338 bp, Glycine max
  Clone ID: jC-gmle01810016a09a1
ttgactcgatgccgcgtcgtagctcgaatccggctcgaggtttagtagaagatctgccaattgcgaccctggatgctaggaagcttatcagcaccctcttgcattggtacaagcccataggaaatcgtctgggtctctccaaagtagttcaacagttgggtatgatcaagttaatgattctgatctctgacatggactggcctatgtatatgctagtctctgtcattgggaggactctgaaatctggttgcttaaggccagggcgctgaaggactgctctggaacaatgatgcacactgaaggtgttatgttagactgacgtgggcaatatgaagaag

SEQ ID NO: 6350 - DNA, 479 bp, Glycine max
  Clone ID: jC-gmle01810016a09d1
aagctgcaaacacagacagtagctttgcattaagagggtaataaacaaagtcatctctgcccatcataaaaatgggtataaatgtccattttgaagagggaaaatatttaaggcttaatacaaatacatatgtaacaacttgggcttgtttggatacaagccgaaagttcttttgaaagcttctttactaaaaatatagtattttttttcaatacagaagctttcaaaagcatttctagctctgtatcctacaagctcaaaaacatcaaagttaacattttttttacagaaatgctcattacaagtggctgcagtagaattcaagtgactcctaacattttcctttttatgccctgcagatgtagccaacaaactaaagcacgtacaagtagaaaactgaatctctactgtctttacaatgatactgctccaaagacattaacaaggccgagcagcagttgaacaaggttaataatctc

SEQ ID NO: 6351 - DNA, 445 bp, Glycine max
  Clone ID: jC-gmle01810016b02d1
ggatgaaacttaagagcagtggattatcatcattatcacatatgatgaagcaatattcaagaggtgcaagaactgtatgaataggaataagagtttatgtacaacgggaaatgaaaatagttgtcatttgaacacactatgctgtggcagcagcttgttcttcaacagcctgtgatgctggcagaagggtgcaaatcaggttgcggtcaccgtacacattatcaacacgtcctgtggtaggccagaactttgaagcacggagccaaggagctgggaaggctgcatattccctggagtatggttttgtccatgcatcagccatgagcagtgatggtggatgaggggcgctcttaagtacattgttgttaatgtcagcatttcctttctcaatctcagcaatttcttgtctaatggaaataagagcatcacagaacctgtctagttc

SEQ ID NO: 6352 - DNA, 487 bp, Glycine max
  Clone ID: jC-gmle01810016b03d1
aaccttcatgcatatcgaatcatccgttgttgattctctttttatatcctcaatcacaattctgggcgacagagagaaagatcttatcaacaactcaaagttcctgaacaaaaacgagaatcagacatcattcaagcactagcaggtgcggaattctgggaggaattccagaagatatccttaagcgcagggcgaagctgtttgctgcagaactggttatactccaaggtatccccattggccttcttgacctccaccaccataaacgacggcgtcacggcgtaaatatccgcggcaatcgccagcttccccttccttccacgctcctgaccctgaagcctcaccttggtctcgctactcctgacgtcgaacttcccggccttggccaccttcttcagccgcgaaatgacggtgctgggcgtccccgcggtggcgaacctcatctcctccctcctcttgtcctcgaacaagggcgacaaattgaacc

SEQ ID NO: 6353 - DNA, 531 bp, Glycine max
  unsure at all n locations
  Clone ID: jC-gmle01810016b04d1
agttggtaatgtctttctaatataccaagagagaacgtatatatacatccatacataaatacaccatggagccatatatgcaaccaaccacaaataaaagctgatttctgaaatacaatgaacagctataacctaaaatacagatactatttctacatttttccccttcaacaacttctatctatcatacacctatataatcaaattattgagactattttaaaaccacaaaagcttaaagaaaagtgttgcaccacagcagcagttggcagagtagaaaaatcgtagcatctaatgtttatagcaccacaactaggcttctagaggaattcattgtcaaaagacaccagcttccattgaactcattcagagcacaagattcaacgatcagtctttaagggggtcaggtatgaaagaagtccactaatggagctgtgaaatgcttcactcccttggcctagcaagccacanagaactcagagctcgcagccgtgagaaataatcactgatggcgagaagagctcgagctga

SEQ ID NO: 6354 - DNA, 441 bp, Glycine max
  Clone ID: jC-gmle01810016b05d1
attattgcattcttatttatattattatatacagatagtctataatcactagaattcctatgtatagatactcagtatatcataattctagtgattatagctaagccaatatatatcataagataatataccctttccttattcaaagaatttatggctatgccttatcatttttagtcacagaacagaaactatggaattgaaagaactcactcacaacgccctttaaaagattacgcggtacgattgaatcaaataagcccttatggaataaatattcagctgcttgtgaaccttcaggtactgccttattcaatgtgtgatcaattactctgttaccagcacatgcaatataagcattaggttcggcattaatgatatcctccaacatgccaaaactagcagttaccccttcagtagtgggagacgtaagtatggata

SEQ ID NO: 6355 - DNA, 511 bp, Glycine max
  Clone ID: jC-gmle01810016b06d1
agaatgcaatgcacaatttgcacagttgcacttggtgtattgtattgttccataactaaggaagagcattactaatgtactagtagttgttcagcaaatttaatttaatcccaccaaaaggattttcatttcaatcatcatccaatgtcaagtaagaaaattacaagacggattcagtacggcacactaactgcgggagttgctgcgcttgggcgcgttgccctttgatccatttacgcgtcctcgcttcccagccgtctgatcctggttcaagtcaaagccgatcccatggccatgatcttcccccaccatctccacgaacatcctctgtaggtcctccaaactgtccccctcgtctttcacattgttcatcattgagatcatctcttgcatgaagtcacaaaagtcggacttggtcttcttcctccaaaggatcgtagagccccgcatcgtacattgaccttttagactgatcggagagaactgagtaggcttcttggatttgctgaaa

SEQ ID NO: 6356 - DNA, 485 bp, Glycine max
  Clone ID: jC-gmle01810016b07d1
catgtgcctactatcaggcatcaagaactgataaggctgctccctttcataggtaatgtagtcttgatccatatacataaaaccccaacatgcacgctttaacgccgcgtatgcaactccaggctgaacatgcgatgcatcttcgcagacaaacaacagatggatgcgttgttaaaaaatgctgaccgcgtgatcatcgcatgacggtatgggaccactcgagtctgctgcgattggccgaaatgattgcccctcaacaccacgcccactatcgcgactcgcgcctctacatcactgcacaattctgcttctggcactgcgccagatagccctcgtactcttcggtgcctaatgcgcttcccggcttgcgcactgtacctttgaccgtaatggtttgatctccttcagcatgccaccatcggagtgttcgctgtaacgcgccgttggtctcttaggatgtcatggtccacttgacgtcgctgacc

SEQ ID NO: 6357 - DNA, 427 bp, Glycine max
  Clone ID: jC-gmle01810016b08d1
catgtgcctactatcaggcatcaagaactgattaggctgctccctttcataggtaatgtagtcttgatccatatacataaaaccccaacatgcacgctttaacgccgcgtatgcaactccaggctgaacatgcgatgcatcttcgcagacaaacaacagatggatgcgttgttaaaaaatgctgaccgcgtgatcatcgcatgacggtattggaccactcgagtttgctgcgattggccgaaatgattgcccctcaacaccacgcccactatcgcgactcgcgcctctacatcactgcacaattctgcttctggcactgcgccagatagccctcgtcctcttcggtgcctaatgcgcttcccggcttgcgcactgcacctttgaccgtaatgggtttgaactccttcaagatgccaccatcggagtg

SEQ ID NO: 6358 - DNA, 444 bp, Glycine max
  Clone ID: jC-gmle01810016b09d1
gggacaaatccaaatattgctgctgcattgtcacataatctacagaaccttgaaaactaacagcaatcaaatatgttcgccatttggaatttgaatacaaatacagtgcatcgataatataaccctatgtacagagccaatgtctgactgaaatttgatacagaacattatctattttgcatcataataaaatggtaaagatctttatgttacgtgcagcattatgtgaagaagggggaagtgcatccagctggtgctttagtccttcgtcttcccttttacttcatcattggctccttctgcacgttcacatttccttaaactggttaagcactgctgaccttgttcttacgtgcgaaggtccaatggggtttcgctggagtacgccttaatgccttcactccaaaggggttgaccttgcttctgagacaagttccagcgtaa

SEQ ID NO: 6359 - DNA, 575 bp, Glycine max
  unsure at all n locations
  Clone ID: jC-gmle01810016b10a1
ctcgctacggtagctcggaattcggctcgaggcatagttgaagatctcccaatcacgacccatggatgctattgaaacttatcagtaccttcttgcattggttcaagcccagaagaaatcctttgggtctctccaaattagttcaaaggttgagtatgataaagtaaatgaatttgatatttggcatggtctggcaaatttatatgctagtctttctcattggaaggatgctgaaatctgtttgcaaaaggccagggagttgaaggaatactctgcagcattgatgcacactgaaggtgttttgtttgaaggacgtgggcaaaatgaagaagctctttgtgctactattaatgctatactactcgaaccaaactatgttccatgcaagatcttgatgggtgctttgtttcaaaaattgggtacaaagcatttggctattgcaagaagcttactgtctgatgcactccgaatagaacccacaaaccgcaaggcttggtataacttgggattgcttcacaaacatganggcccgaataagtgatgctgccgactgcttccagcagcttccatgctcg

SEQ ID NO: 6360 - DNA, 410 bp, Glycine max
  Clone ID: jC-gmle01810016c02d1
aatagcattggtatcggataactgctagaaaaaaaacatcgccacatcgcacatggatatctgaccaaccaataacccctccctgagctcccaacattgtcgaaaatgaaattaagaacttcgtttcagtgcattcatgcgcaatctctccacaccctcacttgaacggaggcttatcagccgcactctcctccagactcgctgcgctcaatggctgcgagcgcgcgccgctaagatcgcccgagtgcgtcttgcgcagtgcttgtcgcatcgtttcaatctggactggcagctcttcgcccgatgctgggttagggctcccgagcactataggggacgtaggactcgcgggtgaccgcgtgcgcgccagatccgcatgcttgggcgaggctgctccactggtggttggc

SEQ ID NO: 6361 - DNA, 366 bp, Glycine max
  Clone ID: jC-gmle01810016c03d1
atgatgaacccaatgcattttatgatcgatgagcacccccgtttttgtttaaacccaaaccaacaaaagggttcttggctaaacatccttcccctcatctgtaaccaattttccattccccggattccaagcaggaatgaacaaaaaaagaacctttgacaacactagggggtcacatttcaggattggttccccaagctcaaaggttaggcgggcatagggcccccttttcgggtataagttctccaatcaatgcgaaaaccaaacccacttgggccaatttttccacaaatagctcttgtgctttctggaatcccaattttggccctgtccccagacccatagtttacctgaagcctttgcctg

SEQ ID NO: 6362 - DNA, 539 bp, Glycine max
  Clone ID: jC-gmle01810016c04d1
ataaaaactacttccatatatttacattagacataatgaaaaagtttaacataaaagtctcaaattaaggaaaagaaaaaaaaactatatgcctcacggccaaacagtagtatttctactatataccaatcttcttccttcttttttggtgaaaactacaaaaataaatcccacaaatttccattttccacagccatctgtcatttccaggaccaacatgccttagtcaacaaccaccccccacagaaacgtacgcatcttccaccagaatctttaacttccagcatccaccaatgcacgaccaatgacaattacaaatcaaaatccctaattgcccatcatcataaaaagaaaaatctacgaaaaaagaagacccaagacaaataaaaaaaaaaagaagtaaaaagtcatgagtatcaaccggagttggatctaacagaagtaacaagtaaccaaggtttgaatccttaccaggaatatgtatcccaaattaatgtttgactaatgagacatgcatatgggaaaaaaagatcattcat

SEQ ID NO: 6363 - DNA, 551 bp, Glycine max
  Clone ID: jC-gmle01810016c05d1
aattataacttatgaaagaaatttaattccttttacataccttacatttttttttttcttattagtacttacagataagtttattaaaaaaaaatgtcatcacatgatattctatgctcatctttctaagtttataaatagctgaaagtgaaacttaacattctcaaaattctattgctagttaatagcattaattaaaatgcattttatagaggtcaagagtggaatcaaccaagaaagagttgtagtggagaacttgaaccattagctgggtcaacatatccagcaggtctacctccagcagcaaacatagtgaacaaagtgttgaagaacatgaagaatcaagtttatctacttgacataacacttctgtcacaactaagaaaagatgcacatccttctgtctatggagtggatcacaccggtaatgattgcagccattggtgcctaccaggactacctgatacttggaatgaactcctatatgcagctctgtactagctgttgggcagcctgtatttgtgaagcagtaccacttatctcaacagtca

SEQ ID NO: 6364 - DNA, 475 bp, Glycine max
  Clone ID: jC-gmle01810016c06d1
agaattaaattctagaatgatcatagatagcttataaatagaagaatgtaattcaacagataagcagaaaataatacaaactatttcccttctcccttttgatgctctggaggccctagacctcgaattctaggaactttgtgcttgatcataacagaatgctgttaaaataatatatcaaaccaccattactgtgaaatggggttgtaaatatgggtgtgcttatatcgcagggtaaatgaatccaataaatggatcgagtctgaatgaaaatttgttgcgacaatattaaacttcatttctcatagtcttggactcttggattcctttgaagtgttgcattggtgaagagctcaatgagagcgtgttcaagctccagttttccagaaacctgaagaactgacaaaggatttgatcgttgcatttccagtaccatgtgggagaaatgcccaacgggaaaacctgtcaaaacagc

SEQ ID NO: 6365 - DNA, 464 bp, Glycine max
  Clone ID: jC-gmle01810016c08d1
gtgaaaacgataattcgtgcttaaacattgaacaatacttgtcaagggtaaataaattaaaaatgtatttggggattaaaaaagcatattcaaattcagttaaaactcgccaccaacgcacatatacaaataaaagctaaaacaaacatatttgaatgttgtcatggttaccttgtcttgtccatttggtacaaagcaaagcaaaagaagcacaacattttgatgatcctgccatggttcattgaacaattggctgccaacacacattctatatttctctgccaaagcaacaatgacaaatacaaaacattgtgaagctagtaatggcacaaaacttagctaatggttttgaagcatttcatccttaagtaactctttcctactatgttggcaagatggaaagattcaagattgaattattatccttcacaaacagtcgtttacagatgtgtggagggaaaact

SEQ ID NO: 6366 - DNA, 509 bp, Glycine max
  Clone ID: jC-gmle01810016c10a1
cctatctttagctttttcaagagaccacctttatagaacaattggtggaagatgaaagtcaaatggaaggttcacctcctggttgttcaaaaatattgaattggcatctccatttggctgctaataatatagtttacccaaaaggttgggtgcttcagaaaaacctagatgctgtcatacctgtcaagtaatcctccaccaattttattgtgtgtgatagtttgcccatatttggtattggttcatcactgaatagatggatgcatgagttagccaccattggcactaatgcattgtgttggcggacaagacaggaacaggttattgattttgttcccaaagcttttgcacaaatatatttgcaagggaaaatttttgctgttgatagcatgctgccttattttctttgagaaatatagatccttctagaagaacagcaaaccggtttaaataacttggcctgattttcaacattatatacaattatgtttaggcggatggttcatctg

SEQ ID NO: 6367 - DNA, 595 bp, Glycine max
  Clone ID: jC-gmle01810016d02d1
aatagaaagatattttccttaacaaaaaatgtcatattcgcatacaaactactcatgatatgaactatgaagcatcggaattttacagtgcagacactggcaagttacagatatgaagaatgtaagcaaaatcatgaccggaaaaggatgtggagggcaaacaaaattcaactatcaagtatgagtactagaagttttcttgagtcaggttgacaatattagatccttcttttgatccacgccacatctgaaataggttcttgtaatctaagagtatggatcctcccatcaatcaccacctcgtgaaagcccatgaagcttcccataggtttatctggagggattgaaatttgcccaatgattacatttcaaatgctctaagccgagaaaacactaggtggaataatattcctcctttgcttctcttgtgacagcacataagaataacttaacctcagacaaaaatggatcttgacaataacttggattggatcctatctacgtcataatattaagcccagtcaagaagtatcaaatgcatattcttttcactcaagttttctagtgaatctgattacatcaactaacaatcaag

SEQ ID NO: 6368 - DNA, 478 bp, Glycine max
  Clone ID: jC-gmle01810016d05d1
agaattaaattctagaatgatcatagatagcttataaatagaagaatgtaattcaacagataagcagaaaataatacaaactatttcccttctcccttttgttgctctggaggccctagacctcgaattctaggaactttgtgcttgatcataacagaatgctgttaaaataatatatcaaaccaccattactgtgaaatggggttgtaaatatgggtgtgcttatatcgcagggtaaatgaatccaataaatggatcgagtctgaatgaaaatttgttgtgacaatattaaacttcatttctcatagtcttggactcttggattcctttgaagtgttgcattggtgaagagctcaatgagagcgtgttcaagctccagttttccagaaacctgaagaactgacaaaggatttgatcgttgcatttccagtaccatgtgggagaaatgcccaacgggaaaacctgtcaaaacagcaca

SEQ ID NO: 6369 - DNA, 490 bp, Glycine max
  Clone ID: jC-gmle01810016d07d1
gtcatcacaatgtgctggaacctttaatcagaaacatttaccaatgagagcaaatgcccctctactacatatgccattttcattaaaccgtttccatttaaatacaatatttttattataataaatattttattcaaggtacattcatccactttcataagcataatcacaccagaacagagatataggggctcccacttttgagggtctaagtgtaatggtactactgaggtatagaggcaagcacctctaacaaggaagctgcgaattgcatttgagtctcttcatttattgtcacgaagagtggcacgtgcacgaaaagggatttgatcccgttttgctcggcaaagcgaagggaatgatagtaaacataattgcacacaaacctgcctgcatcatctgataccataacttcatatcccttctctgtcaggctttggtgatctccacaacaggaagtgtagtcttccttgttcgtgaaattccacca

SEQ ID NO: 6370 - DNA, 263 bp, Glycine max
  Clone ID: jC-gmle01810016d08d1
gtcatcacaatgtgctggaacctttaatcagaaacatttaccaatgagagcaaatgcccctctactacatatgccattttcattaaaccgtttccatttaaatacaatatttttattataataaatattttattcaaggtacattcatccactttcataagcataatcacaccagaacagagatataggggctcccacttttgagggtctaagtgtaatggtactactgaggtatagaggcaagcacctctaacaaggaagct

SEQ ID NO: 6371 - DNA, 575 bp, Glycine max
  Clone ID: jC-gmle01810016e04d1
caataaaatagattcttcatagattagaatcattagacattatttccttttatgatttggtacaatattcttccttcaacattatgaaaattgctaacatatccaaattctaagtgatatatagcataaatatgataagtgattttaattatgatgctcgtcatcatccttcaagaactgattttatttatgatgctcgtcatcacccttcacaagtaatagcataaattttatttataaaattccaccactgatagaaccgacggtgagtctctacatgcaacatgaaatccagaaaatccagaattcctgcacaagctctcaaattctttctcagttctttcctttccacttgttactaaaaacatgagactatcagcaacacaagtttgcatagaaattttgcttgaatccggaacttctggaattatatagtctataacaatcaccttcccatgttgtggcaaagctttgtggcaattccttaaaaactttacacagtcttcgtctaaccaattgtgacatacaagcttaagtaaaatggcatcacccttgggaacactttcaaacatatc

SEQ ID NO: 6372 - DNA, 471 bp, Glycine max
  Clone ID: jC-gmle01810016e07d1
ccacattgtaagcaaattaaaatagcatgtgaatatgggacaaatccaaatattgctgctgcattgtcacataatctacagaaccttgaaaactaacagcaatcaaatatgttcgccatttggaatttgaatacaaatacagtgcatcgataatataaccctatgtacagagccaatgtctgactgaaatttgatacagaacattatctattttgtatcataataaaatggtaaagatctttatgttacgtgcagcattatgtgaagaagggggaagtgcatccagctggtgctttagtccttcgtcttcccttttacttcatcattggctccttctgcacgttcacatttccttaaactgcttaagcactgctgaccttgttcttacgtccgaaggtccaatggggtttcgctggagtacgccttaatgccttcactccaaaggggttgttcttgctcctgagacaagtt

SEQ ID NO: 6373 - DNA, 346 bp, Glycine max
  Clone ID: jC-gmle01810016e08d1
aaaatgcaaacaaaagggcaaacctaatctttgttaaattatttaaacaaacaagtttaatcctgatttcccctaccagtcttaacaaatgatttaatggattcctacaggggtacctccggtttttaaaatttacctacacttcccttttgggaggggttattctgatttctacacaccaagcctttcccaaatgaatttcctcgttgaagcaccatgttgatcccgtaatcaacttacttgctggtggggtcccccctaaatagggtaagccccattttctcccacatttatgcccgggtcgccagaacgtggccaagcttcttcataacccttataaaccggc

SEQ ID NO: 6374 - DNA, 395 bp, Glycine max
  Clone ID: jC-gmle01810016f02d1
aaaagggggaaattttcttttaaaaaaaaaaaaaagggcccccttttgtagaaaaaggcaacccagggaacctacccccctcctaaaaagaagaacccttgggcagacagtttcaaccccggcgaccccctcaaaaaagaccccccccaggggaccatatcccatgttttggggaaaaaaaagagggggggaatggggggggggcccagaggggggcggctttgaaaaaggaacccccgctggggggccccaggcttggggaattccccgcggaaagggcccacaaaggggcccccaaagggggggggaaccccaaagggggggggggggaaaaatctccacagtgggggaaaaaagggcccgggggcctgcctgcccgggggggacctgggggg

SEQ ID NO: 6375 - DNA, 533 bp, Glycine max
  Clone ID: jC-gmle01810016f03d1
aatgtaaatgctaaaacattatatagattagataaattaaggtaaatttgtcacatttattcattatcatatatgcatcacctagtatcagctggtttattcttaattaagagaaaactaaaatacaatatcttacatgctatttttgttgttcttgaattagaataatttcacctcgataactttcaaaatcctttaatgcaaattaccgaaataaaactctagttctagtacaaacaacacctagctataataattaggggttgataccatagagctttcgaatcccgtctatatcatcttgcgctagattcaccttcctagttcgaggtggtatagaaggatacatgatggctcttaggtccgacgagtggcctaatccgagcaagtgcccgatctcgtgcactgccacagattcaaggtcaaacgcacttgtcaccggcgatttggtgacatcgccagacgccacccaatattcgtcggcgtcaaagtggcacctcccatcagtgggagcgaatgcatggcccaatatc

SEQ ID NO: 6376 - DNA, 543 bp, Glycine max
  unsure at all n locations
  Clone ID: jC-gmle01810016f04d1
gatagtgcaaaagctttactctgagcgttaatcaaaattaagctcgaaatttatcccagaatttacatgaatctatctataaaatgacgcccggcacctgaaaaattaagatataaagaaaggaaaaagaacctttcttcgtgacaaaaaaaacaccgaattatgctttgacccttttgaccacataatagccagtgatcttcatggaactcatcaggagaacaatgactgcatcaaaaccaaaactactgaggctcttgatgttttcttccacacaggtattgcccccacgcaatgtcaagttctctcacttgagcttctgtcagtgaaaaatatcatgatttttgtgtcaacttgtttcatcattatttttcaaacttaaaccacttccagtttgcataaagtgcttcattttcaaaaggcaagcaactggttggtaggggttctaatctttgagtggtgacagaaggtggtagcttttgcttatatttctttgccatcatatcagcctncatatatagtctctctttatttgatagaaaa

SEQ ID NO: 6377 - DNA, 491 bp, Glycine max
  Clone ID: jC-gmle01810016f05d1
aagataacatctctggactcaacaatttagatttgctttgtgcaatgcaccatacataaaactcacagtattccaactgcatagaatagatctaaaccgcacagtccacgcatttttacgtaggcagggttcaatccaagacttactgtagaacttgagcacaaggaatagttatataacaataactaaattccaagagtccaagcaaatagagactttatgtgtaaagcacttccaaccatatataacagtaccgtaaacataaatatatttagtttctttcatccccaactttacattccaccaaggaaccaaacaagtgtgtcaacacaaaatgtactcgaacaagggtaaccaaccataaagcctgattaagttaaaatcaaatgtgacagtacacaccaaagcagatcttcaatcacaccactccagagggaagacgtagaacaagttgtcccccgaagacacttttgacatattagtaacagaaa

SEQ ID NO: 6378 - DNA, 283 bp, Glycine max
  Clone ID: jC-gmle01810016f06d1
aaaaaaaaaaaaagaaacaaaatttaaatttaaaaagggcaaagctcaaaaaacccccagcccacaggggggaggaaaaaaaggccctaagcccccccccccttgagggggttgaccaccccccatgggaaaaaagggcccctttttccaaaggggcccattgccgcagtttttaaaaacccggtatttcccccccctttgaaaacaagggggaggggaaacatacccggcccgaaaaaaaaggtctccctcacaaggttaaggaaccccttgggggggatct

SEQ ID NO: 6379 - DNA, 479 bp, Glycine max
  Clone ID: jC-gmle01810016f07d1
agaacaaacagataactgaatttattatttgtcagagtcaagtcaagcattatgatacatcataccccaaaacaccaacaacagtactcaggtgagcagttattacatcgtactttcacatgaacgcgtcataaaggcagataaaagcaaatacatacaacacaggaccttaaggctcaagcacagcacaatactatgtgacttaaacggtgacacaattcagcaattattcttaaagcactacggatttgctgaatttgttcataattttagagccttggtagtgtagaatcacacattcttgtgaaccagctaccaccacagtagggtgttcgcttgtgctgactgcatcaacttctttgacactttcaacgttgacatcctccaattcaccacagccaatggcttcaaaaataagatcattgacttcttgaaacctctcttgagagagggacacctatgcaagaagcctccaagca

SEQ ID NO: 6380 - DNA, 462 bp, Glycine max
  Clone ID: jC-gmle01810016f08d1
aacaaccaagaatagcttcaattgaataaggagattagggagtaagtcatactacaacaagaggacggatacaactactcatggatatggcatactaaacatttatggcataaaaatcaatgccagttggtgctcaactctgtacagaactcaatcacacgagaggcttacaaaaatattctcacggacacaaaataaagacaataatttggagacaattagcttattaatttgtatgtgcaatcctttgaccagaatggttcacttcttacttttatatgtactaatttttcacctgtgaagattgtagtaggcattcatctataatcgccttgatccttcttttcattagcttttctttcacactagcatgcatgtttcggtagagcatttccaaattaatcagctttgtaccatctgctgcctctaacatgttctcccattcctttgcaatgtcaaatg

SEQ ID NO: 6381 - DNA, 316 bp, Glycine max
  Clone ID: jC-gmle01810016g02d1
atggttataacatgttttatttaatttgaggcatatgtcaataaatgtctaaacactgacaagggaccaggaaacaaaagaacggaaaaacacccaacacacaaaaaagacggacataagaccgaggcgtagggaaaaaaagccgaacgcgggagcagggaaagaaagaaaaggaccactcgagaaacaggcaaaacacaaacaagaaagggccaaaccccccaccaaccaaagggaagggggccgggacacgacacggacaagaaagccccaggcacggggccagaaagccacaagacgccccggagcaaaaagc

SEQ ID NO: 6382 - DNA, 512 bp, Glycine max
  unsure at all n locations
  Clone ID: jC-gmle01810016g04d1
acaacaatgaaataagtatatttctatgccttatcttttgtgttcaatttcaaatacgctcatcacataacaattgcagtgatggggtaccactattattactactacggaacctacctttactttcttcacacacagaagaagcaagatgaatgtcttgcccatttgccctggatcttgatgaagcgagggtgaagaggtgctggtcagagattgaagtgattttggatccaaatgtttctaaggatgcaggggaatggggaaggattacttggggaacagaagagtcatgtctaccattttgccaattaggatattgggccctcacaatactgcaattcacagaagaagacccaccttgagctgctagctgcaccgcccaaaaactttggtgctgntgcttataggaaactgtcgaactataatgacttccacgtaacggngtaccataataatgaggcagatgctgctgctgcaaccgaacctgtggtcctgcaactggaagctgatct

SEQ ID NO: 6383 - DNA, 412 bp, Glycine max
  Clone ID: jC-gmle01810016g05d1
aggatggttatcaagaccattgaatagcccgtgctatgcacaatcagaaattggagcagccctatgctccatgcaaaaactgggataacttcctgaatttacgttgaatgcatctaaactgaaataggacctttgacattgaataatcaaattgtgcatgacaatagaatgcaccattttagaagctttcaccaatataaaaactcccccctaaagacattaaagccttacaacttatggaaacaagtttcccaacgaaactccaaggcttgcacttatagagaagatccaacccttgtaacttgggagggaaagcagcaaaaaccgtagactgacccggatctgcaaggcgaccaacgaggatgtcaatgggaccaaggcctgggtaaaagtgctagaaccatgcccgcat

SEQ ID NO: 6384 - DNA, 531 bp, Glycine max
  Clone ID: jC-gmle01810016g08d1
aacattgcacacattgtaaaatgtagacaatgtaactcaaaattatacaggataacaatccaatatgaacaagataacttattttattatctcaactcttagcttctctccaagtggagaatgcttaggttctcagggtgtgtataagcaggttccatcatcacttcttgcagttgggtcgaagtttgaggcatttggatcagtacaaccttcaggaacgggaatgtttacttgctgagctgctttgccatagaaagttcctctgttgatggaatcttgattagcatcaccaagagcagcctctttcaagtacttgtctgccagttgtactctcttcacattctcttgttcttggacaagcatgttaccatactccaagagcttgctcaaagtcatcttcggttggtcaaaggttggaggtccttccttggagttcacaagcttcttcccaatgaagtcaacaccaacaacagaaatccacttcctcacctcatcatcatatactctagccctgagtgcaccaaagaaatc

SEQ ID NO: 6385 - DNA, 568 bp, Glycine max
  Clone ID: jC-gmle01810016h02d1
cattcgaattcattttatttatatattaatattatattcaaatgaaataaaaagatattaaaagatactaattataagaatttgaaagtgaaattataaagttattaaatgattaatcaatttttttctacctgttcctgtagtaaaaagagttccatctgttcttgaatagcttccttcaaaaggacttctgcttccccagtgaatgtcttggtagaagatatgatttctttgaattgaggtttattcgtgtttaagtaagcacgtaactcaacaagaaatttccttacctgtccaatttctaatgaatcaagataaccattcgttccagtataaatagttattatctgttcttccacggtaagaggagctgattgggattgtttaagcaactcgcgcaatcgttgacctcttgctaattgattttgagtagctttatcgagatcagaagcgaattgggcaaaagcttctaattctgcgaattgtgctaattccaatttaaattaccagctacttgttcatggctttaatttgagccgcgatccaactctggaaacggaaatactac

SEQ ID NO: 6386 - DNA, 512 bp, Glycine max
  unsure at all n locations
  Clone ID: jC-gmle01810016h03d1
acaacaatgaaataagtatatttctatgccttatcttttgtgttcaatttcaaatacgctcatcacataacaattgcagtgatggggtaccactattattactactacggaacctacctttactttcttcacacacagaagaagcaagatgaatgtcttgcccatttgccctggatcttgatgaagcgagggtgaagaggtgctggtcagagattgaagtgattttggatccaaatgtttctaaggatgcaggggaatggggaaggattacttggggaacagaagagtcatgtctaccattttgccaattaggatattgggccctcacaatactgcaattcacagaagaagacccaccttgagctgctagctgcaccgcccaaaaactttggtgctgttgcttataggaaactgtcgaactataatgacttccacgtaacggngtaccataataatgaggcagatgctgctgctgcaaccgaacctgtggtcctgcaactggaagctgatct

SEQ ID NO: 6387 - DNA, 345 bp, Glycine max
  Clone ID: jC-gmle01810016h04d1
ggaaaaaaaagggggggcaaaatatctcccaaaccagaaaaaacaagggccttttcccgggcttccaccccaggcccccagcgggggaaaaaaaccccaaaaacccgcccccccccccaaagaaaaaccccaaaagccccaacaaaaatgacccgcccccccaaaagggcacccccagggttaaaaaaccccctttatccaaccccccactttttggcccggccaaaaaccctagacgccgctaaaccataacccccggggatatgggggaacccccctctttgagaaccaccccttaaagggactctgggggaaccaaccccaaaagaccacctcccccggggg

SEQ ID NO: 6388 - DNA, 558 bp, Glycine max
  Clone ID: jC-gmle01810016h06d1
aagcaaattaacaaattttatagaatccattataaaaataaagtcaggtgtattggaactctaatgctaaaatttgaaaaagaaaaacaaagagcacaaaataataattggcaaaaagtaatagccctctgatgacttaacaaagaatgaaaattaacccatcagagcagatcagcaacatttgatggcaactcctctacagtcacattgtagaacttttgaatatcagacagcattcttgcatcatccaaagtcacaaagtttatggcaacaccttttcttccaaaacgcccacttcgtcctatgcgatgaagataattttcaggttgggttggcagatcatagtttataaccaaagacacctgctgtacatctataccacgagccaagaggtcagtggtaattagaactcgagaagagccagagcgaaattcccgcatgatgatgtcacgagtgttttggtccatgtctccatgggtggctgagactgtatggtcattgcttcgcatcttgtcagtgagccagtccaccttacgccttgtgttcacaaagatgaca

SEQ ID NO: 6389 - DNA, 499 bp, Glycine max
  Clone ID: jC-gmle01810016h08d1
catcaaaatactagtatacatgtatttttgtcttcaactctatttacaactaactagtagaagttcctttggagggaagtgtttaatcaatttcggcatgcacgtaatccacgaattcaaaattcttttggagttgatttagggcaaaagttatggctgcactgacaattgcgagtccagccaaaagtacacgcaactggacatctgatgggatccctgatgttgcacaaaacacaactgttgtaccaattaggactttctgccatgtttggaatccctcatatgctgctttacatgatgaacacttgagagtgtgctgttcaaatctatccaacatctgacgttttgataaaacagttgatggcaatggttggtcgctgctgttgccaaaccattctggttggccattgccatgccgccttagccagtttcgaaatgccaagacaaagcgatctgcctgtgttggtgtgaaggtgatgtttgtatactgtttggtaat

SEQ ID NO: 6390 - DNA, 394 bp, Glycine max
  Clone ID: jC-gmle01810017a02d2
aggacaaaaggaaaaggcaccaaattcaatttaagtggacactgtaactcaaaattatagaggaagacggtccaatatgaaaaatatagtaagatcatctcaaacttagcatcttttttttgcacctaaaacattgagaatgctaagaatgttacacgcaagttccatcacaacttttagcacttggattagtacaacaaccttcacgaacagaaatatttacttgccaagtttgctttgcctccaattcaagactggaagaaagttcccctctgaatagcatccttgttagcattttcaagagcagccttgttcaagttcttgtcagccaattggaactcttttgacatttttttgttcttggacaagcatgtttccatactgtaagagcttt

SEQ ID NO: 6391 - DNA, 261 bp, Glycine max
  Clone ID: jC-gmle01810017a06d2
actaactataaaacatccaaatccatgagtaattagtttcacaaggaaagcctacttcattacacttttgaaagacatgctttatatataaaatggttatcaacttatcatgcattaagggaaaattttaacttccaaagcatactgatcacgcttcctagcaatacttatgaaatttgcgagtgttgagctatagaaagctcccttaattgtttaatactcattctaacaactactgtatctgtctttcgccatgaaaat

SEQ ID NO: 6392 - DNA, 51 bp, Glycine max
  unsure at all n locations
  Clone ID: jC-gmle01810017a08d2
aaatgacgacgtctatgctccatancgnnaggacannaataaccgattcga

SEQ ID NO: 6393 - DNA, 55 bp, Glycine max
  Clone ID: jC-gmle01810017a09d2
caggaggaaaggtaaaaactattgactattctcctctaaacaacttaaataaccc

SEQ ID NO: 6394 - DNA, 291 bp, Glycine max
  Clone ID: jC-gmle01810017b01d2
aattcacagctgaaacttgaaagtcaaaaaaatacaaaaggcatgttcacggatttgaacagctggagaatgcgcagtgtaatgcaacagaaatgtcaaaacctccacgcttacctatttttatgccacctcacattccagcatgataaaactaccttttcagtttcattatctcaaagggaacccttatgaagaataatactttggggtaagctacaaggaaagtttgaatcactgttcttctatattatctgttgttacaacatatatgcatctattattatggctcaa

SEQ ID NO: 6395 - DNA, 452 bp, Glycine max
  Clone ID: jC-gmle01810017b02d2
aattcacagttgaaacttgaaagtcaaaaaaatacaaaaggcatgttcacggatttgaacagctggagaatgtgcagtgtaatgcaacagaaatgtcaaaatttttcagctccctattttatgccaactaacatccagcagctaaaacaaccattacagcttattatcttaaagggaacccttttgaagaaatatccagtggggtaagctacaaggaaagatggatgcattgctcttctctattatcagctgtcacaacagatatgctttttttatatggcacaaaccctttaccacatgctttagtgcccactcttacctttagcttggatattgctgatgttttacttgctgttttagccgaatctgctttagctctagcccaatttcttgtcttcttactcctctttgttactactatatatttttttttttttatctctaatttaatt

SEQ ID NO: 6396 - DNA, 59 bp, Glycine max
  Clone ID: jC-gmle01810017b05d2
ttctttctttttttttttttataaactctcaaatctgacagccatgattaacagctctt

SEQ ID NO: 6397 - DNA, 325 bp, Glycine max
  Clone ID: jC-gmle01810017b08d2
gaacaagatatttggtaaacatttgcaagttgaaactgccaactagcagtgacaaaaaatgattgctctcactgctaattacagctaaatgaagctgttacacttaacattgctatacatgtaattgattctttgatatcgtaactcaaatacaacctttagcgagtagcattggtttctgttgacttatactacatttcaactgtggaaaatgtaagtttaccaaaaaagggtgggacaaagaaggaaaagaagggtgttgaatgagccttatataaatgaattgtatcgacgctttttctgtggtgttgaatgtgcctgtgtt

SEQ ID NO: 6398 - DNA, 419 bp, Glycine max
  Clone ID: jC-gmle01810017b10d2
cattgattgccgagattcaaccatgtttgttatatattgagacataatcaatcaagtacaccactcacagcagaaggtttataagctgtaaaggtacatgtaaccataaacaaaaatagtctccaagactataaaaacattacattttagacaaattagtcttcttccacttcatcctccgtcaacacctactataactgctggtgttgctgctgcctaacatgtatcatattcactacatacatcttagtaggagtagcctttgacgaacaactccttcttggcttcctcggattcaccctcaccggtgtacttcccaagctgggcgagcgagttggacttggcacggaaaaggagtgcattttgtgccgccttaacgttttctgggcggcctccccatgtcttcaaggcagtgtttt

SEQ ID NO: 6399 - DNA, 334 bp, Glycine max
  Clone ID: jC-gmle01810017c01d2
aaaagcaggaatgtaattaaaattaaaatttaacattttccataaatatgtttagagtacagagatgacagctgaagagaataacttaaaagaaaaaaaagacacactaaggggaagaacaccacagaggaaagtgccaagggctgcccctgtcacgaaagagactttattatacacttgtctacaataccgacgacataatcgagagggtaacagaaactttacacaaaacagggcagaagcattgccaaaagaaataaaacatgccatatcaacctccatatatgagttgtgtgctttccactaagaccatgttcagggggataaagacaac

SEQ ID NO: 6400 - DNA, 372 bp, Glycine max
  Clone ID: jC-gmle01810017c02d2
aaaagcaggaatgtaattaaaattaaaatttaacattttccataaatatattttgagtacagagatgacagctgaagagaatgacttaaaagaaaaaaatgactcactgaagggaagaacaccacagaggaaagtgcttacggctccccatgacatgaaagagactttaatctacacttattcacaatcttgaagacataatcacgagggtgaaagaatacgttcagaacacaatccaaaagctttcccaattattattaaacttgccatactgacctacatctttccaattatttttctttccactagagccatcatacggaagagatagacacctctattattggggtttattttgtatgatataagatc

SEQ ID NO: 6401 - DNA, 482 bp, Glycine max
  unsure at all n locations
  Clone ID: jC-gmle01810017c05d2
cacacgggcaaaacaattagtatcccatccaacaaaaatcataaaagttaaaattcaataaaaaagcatcaaataagttttaaacagataaatggatgaaagcaactacacatttagtccacttcctcaatcttggggccagcaccacttccaccagagggagcagcataatcatcctcggctgccccagcaccagcaccacccatgtcaggaccagcaccaccttggtacatcttggcaatgataggattgcagatgctttccaattccttcattttgtcctcaaattcatctgcttctgcgagctggttgctgtctagccactggatagcttgctcaattgcgtcctcaatcttcttcttgtcagtaggatcaagtttctcaccaattttgtcatccttcacagtgttcctcatgttgtatgcatagttttccaaagcattcttggcctcaaccttcnttttgtgctcttcatcctcaga

SEQ ID NO: 6402 - DNA, 310 bp, Glycine max
  Clone ID: jC-gmle01810017c06d2
cacacgggcaaaacaattagtatcccatccaacaaaaatcataaaggttaaaattcaataaaaaagcatcaaataagttttaaacagattaatggatgaaagccacttccccattatgaccacttcctcaaattcttggggcccgccccacttccaccagaaggagcagcatattcattcttggttgccccagcaccagctccacccttgtcaggaccagcaccaccttggtacattttggtaatgaatggattgcagattctctccaattccttcatttgtgtctcaaatatatttgcttctgcgagct

SEQ ID NO: 6403 - DNA, 426 bp, Glycine max
  Clone ID: jC-gmle01810017c07d2
acaagaaaagtccaatcaataacgtgcactgacaatgagattcactatcaatattagcacgttttcatgtataataaaacgagtggacattaagattttccgtcacagcctaatgcttactgacatccataataccatgaatacaaactcctatatagaaaaggtgggcattgacgaccctgactgttcagagaacgtacctaagcgtatcctccactacatacagacccggggcagtgtggaccagatgaactgttccttgctcaataaggatatcaagtgtgccgttgccatccccgggaggggggaagacctcattggtccacttcttcgaagcccagatccttgaaaccattggcattgactacgtcgacgagagcgaggttcttactctcgtcggcgacgccaaccacattaacaaacaca

SEQ ID NO: 6404 - DNA, 214 bp, Glycine max
  Clone ID: jC-gmle01810017c08d2
caagacaggcctattacattatattcatatacaatgataatcactatcaatattggtgccgatacatgaatggtaaacctagtggacgttaacatttaacgtatcagcctaatgtattctgccattcataattccatgaatacaaattctatatttgaaaagggggggattgactagcctgatagttcaaaaaaattttcttattatatcttcc

SEQ ID NO: 6405 - DNA, 244 bp, Glycine max
  Clone ID: jC-gmle01810017c09d2
ataaacatgtcattttattggggacggaaaacacattggagcaaatgataagttagaaagtatagatatgacgtttcttacaagcctaacatattagtgatttgatttattgctctctttacatgcttcgttttggaacaccctatggacaatttagatgatatatctcggacttaaaaatagttttcatttatgtcacctcacttgatgttgaagtggtaaaaatgaatctaaacttcccgtt

SEQ ID NO: 6406 - DNA, 353 bp, Glycine max
  Clone ID: jC-gmle01810017c11d2
gcagaagaagttgaacaatgatcataaagtattcttgctgcgattgttctctattctgagtatcctttacccaattctttgtacacaacgtatactgataactactattaactatttgaaactcaaaacttaatcaagaacttgttttcaattggctttacaaaatcatacgcgttcaaactgtttggagagtcacttcaggagtgagggtggtcaaccaatccaataaagccttgttaacaagctctggagtcttatcatgtggacaatgcccagcctgcaagttcacaagagttgtttttggatagaactttgtgatttgatttattttttgctggatcaacccatgggtc

SEQ ID NO: 6407 - DNA, 342 bp, Glycine max
  Clone ID: jC-gmle01810017d01d2
aaaagcaggactgtaattaaaattaaaatttaacattttccatagatatgttttgagttcagatatgacagctgacgagaataacttaaaagaaaaaaatgactccctgaagggaagaacaccgcagaggaaagtgcaaacggctccccctgtcatgaaagagactttaatctacacttatccacaatcttgaagacataatctagagggtcaaagaaacgttgcaaaacacaagccaaaagcatttccaattattattaaacttgccatatcaacctccatctctccaattatcttttttccactagagccatcatatggaagagaaagacaactcaatta

SEQ ID NO: 6408 - DNA, 62 bp, Glycine max
  Clone ID: jC-gmle01810017d03d2
ttctttttttttttttttttttttcttttttttttctctccataaaataataaaccggcaac

SEQ ID NO: 6409 - DNA, 498 bp, Glycine max
  Clone ID: jC-gmle01810017d09d2
ggtaataacttataagatccatttatctttctctttcaccataaccctgtcatgtttatcaataacatgaaagaatccaaatcgaaatcggattggatatgcatggctactaactgtagctacaaaccaatttgcactgccatcccaacgtgtcgaacatgatttcaataattacacatacatatgtacatgttatgctgcaaaattagatatattaaagaaagttaaggttgcgatacgcacagttgccttatgggtgtaagcattcttgcaaaacgcaggggcacatgtgccttgatatatgttccttgctctgtatattcagttttctcaaccattccaacctggtgtatggtgctgagaaggttctcattttcaaatgggaccagagctctcaccctaaccaaggaggcctttatcttggtcttgactgcattacaaaattcttgctagtcattacccattaaagcagatctgcctataacattatcttttttt

SEQ ID NO: 6410 - DNA, 426 bp, Glycine max
  Clone ID: jC-gmle01810017d11d2
gattaatcgtgcagtacacagcacacaacttacataaaagtttcttatggcatagaaaacatgtagtcctcctattcgtacacagtcaagtttaactcaacaaacaaagaaactcaaagatgagagtataggaaatacaaatacaatactagagtcattctgtacaaaaggtttgggttcatcatgtaataagacaatacacatactaagacacgtaattccttcccgcccatctctcctcgtactttacaaatgagtaggtagttgaaggcatcccagtcaagtgaaaggggtcaggttcaatgccataatcagtgagtggcctattctccagaatatcatcatgactttttacaaaagtcggtatctcaatctctcctttctttatgtcatcccaaaggtacctgaacccgcttacatacttga

SEQ ID NO: 6411 - DNA, 411 bp, Glycine max
  Clone ID: jC-gmle01810017d12d2
atagctaggaaaccaatattaagcataaaattagttactagcacattattgtcttacaatatctaattacaaaggaaatgaaatttcggagacccacatgctacaaagagcgaaaatacggtattctatgctaaaatcaacagtttctatcaatcatgctaatctgtgttaaaatcagctgttctagaaaagctcatgtacattcccaacaattgctaaatctatttcatccaggaacacatcagcttctacctttaatttacatgtaatcacagtgtatctagtatgatacagtctactcagctcagtttggctgtctttcctctctaatcaatgataagagcttttgccgcaaccattgtatatatataaatcatagccaagatttctctgactgcttggagagctctt

SEQ ID NO: 6412 - DNA, 158 bp, Glycine max
  Clone ID: jC-gmle01810017e06d2
gaaaaatcgttaattttaatttcacatgactcgtcgagaatttaaacaaactacaaatatatgcaaataaaccttactgcgcattattaaccttgatctctctaactttaatcaacttggtcgatctactggcgtgtgctagcaaatgcttacttttt

SEQ ID NO: 6413 - DNA, 235 bp, Glycine max
  Clone ID: jC-gmle01810017e07d2
gactaaccaatcaatataattttattttctttctttccaaggaaaaacaaaattgataccatcaaacccaaaaaataaactttacaactatacaaaagcatatctgcaccagaaagaatctgtcagcaacttccagctactatatttatgcagtatttttttgtatattttattcaagaattccctttatttaccaacaatattaatctttacctatatataatttttgtcccaa

SEQ ID NO: 6414 - DNA, 134 bp, Glycine max
  Clone ID: jC-gmle01810017e09d2
aacgagcaaaattataaagatgtcgaatgtttctagttgtttggcatgttattacttacagcggctcaccaaggaacaaaatgttcagatgatggtagagtcccaaagagccaagagaggatatagaaaggttg

SEQ ID NO: 6415 - DNA, 434 bp, Glycine max
  Clone ID: jC-gmle01810017e12d2
aagggcacaaataaaataaaatgctacttcaaagtttaaaattaaaacaccgaagcaaaatcccagttcaactgaaataacaatccccccggaaaggaccaagaagacagtcacttttttagcgattaccaatgttttgaagagaacgaaaggaagaagatacaggcttgctacaaaaattacaatctaaaagtgcaattttagttatttacgccctccattttggggtactaggcttttgcagctttcaccatagatttaaagctcatctactttggaagtatctgaaaaacgaaacatccacaaatgactccatagattgatcataaatggctacagcccaagtttagataggagctgacgccatcttggagtttcttctttaaaaatatagggcacgggtgatataagaactccactgcctccaatcggtc

SEQ ID NO: 6416 - DNA, 198 bp, Glycine max
  Clone ID: jC-gmle01810017f01d2
aagaaaaaagaaagttctaattattaattaattatatctatatatatatatatacagatagatattctatatcttttatcttaattaatatttgacccctccttataatgtgttatagcttttctttattttaggaacttatccattccttttttaatgtgcccgacaatccgaaagaattctgggggaggggtcatt

SEQ ID NO: 6417 - DNA, 275 bp, Glycine max
  Clone ID: jC-gmle01810017f03d2
gatggtatactttcatttttattgaatttattccaaatacgacggaggtatatcttacattatttctcgagtctaactccaaaaaaacgaacttgtataatataacaaaataacacatattttatcggttatagtttctgcttcaggacatggatttcctccacttgtggggagtcctttcgaccagactggatttaacgttcataggcgtttgtttacataaactaattcatctttaatatctcttcttttttactttaatatagatataactt

SEQ ID NO: 6418 - DNA, 420 bp, Glycine max
  Clone ID: jC-gmle01810017f04d2
ataatggtcatcatcatcattggtcaatactagcaagtgatcatacacaatccaagtttcaaagttctatgtagtctcactctcacatcatcttagtaaattataataactttggcctcctcacctaccactctatatacaaaggagtcaactcatttgatcggttacatacccttacaagggcttgtgtcctaattaaaatgctctcaaagggtcaattaaacaactacaaagtactacaaatcctcattcctcatcacactcaaaagccaacaaaaaggggtgcaattaatggtccaagcaagggcacaacaacaaaatatatatccaaaaaaaaaggattttttaggggtcaattttgcaaagtagtgtgcactaatatgttctagccatgccgagcgcccatgaagttattgaagt

SEQ ID NO: 6419 - DNA, 268 bp, Glycine max
  Clone ID: jC-gmle01810017f05d2
agcagcgaaatatgccgaaaaggtatataaatataaatactggcacatacaaacggcatttattgagatagctcaacgagttgcatgcatggagttatgggaacacaactaaaattgcaagaaatggattagttttttcaaattgatcgaaaatcacatccttatcgctctctttgcacgtttgcaactctaacaattcattcttgggttggttacaacattaaatttttggtctcatgctcattcaagattcttttttttttgctta

SEQ ID NO: 6420 - DNA, 275 bp, Glycine max
  Clone ID: jC-gmle01810017g01d2
agcaaaaacataacctgcattaaggcatttagtacatataatatatcactatatatcaactaatcagtatacaattcccagcaagtttttctgcaccaggaaacaaactaacgtgacaacagtcgaccaaactagtcttggaatttaaagatgaaaataacaaaccaagcccacaaacattttaaaatgtacagtctctctagaaaacattttctaaatgttgacccccacacaatacttgttatactaaatatatgcattccttttatatggtt

SEQ ID NO: 6421 - DNA, 378 bp, Glycine max
  Clone ID: jC-gmle01810017g02d2
agcaaaatcataacctggggtaatgcatttagtacatataatatatcactatatatcaactaatcaggatacaattacaagcaagttattctgcagcaggatacaaactaacgggacaacagtcgaccaaactagttttggaattcaaagatgaaaataataaaccaagccaacaaacattttaaaatgtacagtaactctagaagacatttcctaaatgttgacccccacgcattaatttttatacttcatatatgcatcccttgtatatggttttgactaggctagctttgcccagagctatgtgcaggtacgaaactaaaaaacgcttgaaaatcataaaccacattttgattaaacttggggtgcaacgggggg

SEQ ID NO: 6422 - DNA, 456 bp, Glycine max
  Clone ID: jC-gmle01810017g05d2
cattcgaattcattttatttatatattaatattatattcaaatgaaataaaaagatattaaaagatactaattataagaatttgaaagtgaaattataaagttattaaatgattaatcaatttttttctacctgttcctgtagtaaaaagagttccatctgttcttgaatagcttccttcaaaaggacttctgcttccccagtgaatgtcttggtagaagatatgatttctttgaattgaggtttattcgtgtttaagtaagcacgtaactcaacaagaaatttccttacctgtccaatttctaatgaatcaagataaccattcgttccagtataaatagttattatctgttcttccacgggaagaggagctgattgggattgtttaagcaactcgcgcaatcgttgacctcttgcttattgaatttgagtagctttatcgagatcagaagcgaat

SEQ ID NO: 6423 - DNA, 136 bp, Glycine max
  Clone ID: jC-gmle01810017g07d2
aacacagccacaataaagttgtatagggcaagagtcaaaattcggcgattaaaaacttagacaaaagaaattagaaaacaaaaacattgaacaaaactaccaagcactcaagtctattcattcaaaaggggggctt

SEQ ID NO: 6424 - DNA, 268 bp, Glycine max
  Clone ID: jC-gmle01810017g12d2
aactgatataacccaatgactaatttcacattgtagggttaatatattgaaattgatgattaaatacaagctttagatccaagaatacaaacaacaaattatttccttcctccaactcccaatacaaacttttatagcagacatgagattattccataaaataaaaatatgatgcaaacttacaagtgtctatatggcttcatagtcatctgctgcaggggctgggggagcatcagctagagcatattacacaataatggtcccaaat

SEQ ID NO: 6425 - DNA, 332 bp, Glycine max
  Clone ID: jC-gmle01810017h01d2
atacgaattactttttttttttttcctgtgattggatgaaacttaagagcagtggattatcatcattgtcacatatgatgaagcaatattcaacaagtgcaagaactgtatgaataggaataagagtttatgtacaacgggaaatgaaaatagttgtcatttgaacacattatgctgtagcagctgcttgttcttcaacagcctgtgatgctgggagaagggtgcaaatgaggttgcggtcaccgtacacattatcaacacgtcctgtggtaggccagaactttgcagaacggagccaaggagctgggaaggcttgatattccctggagtat

SEQ ID NO: 6426 - DNA, 550 bp, Glycine max
  Clone ID: jC-gmle01810017h02d2
agctaaatagacacacttcaaattttattgccatatatggtttttgtcagagttcctgatagaaggacatgacaatacttaatttactcttttagatggataattagtcttggccatcattaaacaaacaaacacttggctattcaattccatcaaaattctgacaatctttttgtaacggttaaacctccaactttcggagtggtgggggcttcctgatcaaagttgcttgctcaaaggaataagcaatttggatgagctttggttccgagcctttcaaacctccaaagataattccaaatggtgcacccttttcatatcccgctggaacagttactccaggataacctccccttgcaagtatactagcaaagaatgaaaaaggtaccaccattgcgtcaaggttatttgttatcattaatttctcaaatccaatatgtgacaatcttgccattgtttagcactgctttcttcagttccctaacttcatttgccttttgagctaccagcatgagatcttggccatacttcttaagtttttccaatttgg

SEQ ID NO: 6427 - DNA, 422 bp, Glycine max
  Clone ID: jC-gmle01810017h04d2
gatcggaagatgcaataatatattcaagtaacaagaatacaatttggtttacatattttgcctaaaaataagtgcacgagatagatcaaacatatgcaactttacctcagcggagagaacatttctgcaattaaaatttcagcctaccatatcacaaggcaacatcgttgtgccaagacctctaatatgatgaagggccagtaatatgatgttgtacaacatttataacttagatgttccaaaaacggtttccgagctaatcaaaccgctcccattcttgagttacttttgtggaagacgggttatcggatggagcatccaagctttccattccagagtcaaaggtttcccattgggttgtgtacttgacagcattgctactgttgctaaaaggggttggccgttcttgcctttagagaatc

SEQ ID NO: 6428 - DNA, 209 bp, Glycine max
  Clone ID: jC-gmle01810017h07d2
aactgcaatgcgactgtatttaaaactttggatcttcatacaatttagcattgcttatataattaactaagattaatttgccatctctctcggtgttgcgggctatataaagatcatggttgaataatgaaaattttgctcctcgaggatttccatactctcttcaaaagaagactttaccatatcgctaatctctcttccctgttctc

SEQ ID NO: 6429 - DNA, 410 bp, Glycine max
  Clone ID: jC-gmle01810017h09d2
cctagagttacttgagcacttagattatgattgggtaaataatgtcacagaagcaatattgctgtttcttagaaactggatctcatctagtaaaaatgtaggtaaatgtgaaacttctctccatgaaattattacatacagcagaagaagtttccatctccccagatgatgcataagctgatggatctcaatatttttatggactagtaagtagggtggcaagctgctctcaccgtgttgtaggtgaattgtctttctgaaccaaacttgaaatcaaattcaattttgttgcatagaaaatgtgtatttgtattgttggcacttgacagtaatcacatgaaattctactctggctcaacaggagtttgtgaaatggccactgttgaatatgatggccgccggagaaggta

SEQ ID NO: 6430 - DNA, 284 bp, Glycine max
  Clone ID: jC-gmle01810017h10d2
cttattaaaattctattattatgaatttttcgctggagaagttactgatacaattcaaaagttatagcacaaatagctaagaaagatacttgactacaatctccaatgaaaagctacacgtacacaccatgaaattgacattcatatatacttataaattcccacgaactacttataccgggctaaaattacacagactaattaattaaccttaattacatttcactatgagtgtctttctactgtagaatttgtttttttaggtgcgtgcttgctttttaaat

SEQ ID NO: 6431 - DNA, 371 bp, Glycine max
  Clone ID: jC-gmle01810017h11d2
atgatctagaagttcctttccgttaatcttataccacttcagccttttaagcacctcagatttaccttggtgaatcacctttcatccctgcatcttctaccattaaacccacatcaaacataaacatgctttattcacagtcaaggtagaagagagcaaatcagtagtgaatcgtaaaagagtgacactcaaatgatttaattgttccatgaagagtgtcactctcaaggaaaacaaactttccaagcaaaggtggaatgctccatcttgtgtctctaattaggatgaaagacccctttcatactatattgatcagctatttcatttagagggaacggcatgactttctgaccttatatatgactttagga

SEQ ID NO: 6432 - DNA, 394 bp, Glycine max
  Clone ID: jC-gmle01810018h12a2
cctcggggaattccaattccacaccctcaagacgtggtggtggagaaatgtctcatatatgaatgggaattgtttgttttcttattaggcctatcctgaagccaaaggaaatgagatcggaattcctcggggaattccaattccacattttcaagaaataaggaggcaaaaatgttcatatatgaattggaattatttgttttcttattaggcctatcctgaagccaaaggaaatgagatcggaattcctcggggaattccaattccacattttcaagaaataaggaggcaaaaatgttcatatatgaattggaattatttgttttcttattaggcctatcctgaagccaaaggaaatgagatcggaattcctcgggggtaccgagctcgaatt

SEQ ID NO: 6433 - DNA, 272 bp, Glycine max
  Clone ID: jC-gmle01810019b02d2
gactcgggggttatttttgattttgcaaattacacaatcacagccgtacatgacacgtgagctgtgcctcttccaacttaaaagcagaggataacattggtccatgacgcaacaaatgtaccacctaataagtataaatttacatctttacatacaaaatacaaagactttaaacttaaactaaaaaaaaaaagattaacagatcatcttgatgaaatgaaccgaaacccagaaacattgttttgattttttttgttgcttcaaacttgtta

SEQ ID NO: 6434 - DNA, 146 bp, Glycine max
  Clone ID: jC-gmle01810019b03d2
aaaacatgaacatattacatatattacaatcaccatttctaaatgaagtattgttactatagatttgtgaaattgaattcacaagtgctctttatatactttagactacatattttgtagattggacttacatgtattgatgtttt

SEQ ID NO: 6435 - DNA, 153 bp, Glycine max
  Clone ID: jC-gmle01810019c01d2
agaaaagcaaaaccgtcaagcagagtcaataattcttttctccaagggtggtagctatgatatccaaataataccaatttcatataataatatcagccaacgaatgtgtgctgaggataaagaaaaggaattcttttatgaaagagattggtg

SEQ ID NO: 6436 - DNA, 132 bp, Glycine max
  Clone ID: jC-gmle01810019c02d2
aaaaggttaacacccaagctaaccttaaatggtaaatgggtataccaattaaaatcataaaccttaaataacactcattttatacgtttctattaaatattctcaaatcatatactataattcacctacttt

SEQ ID NO: 6437 - DNA, 357 bp, Glycine max
  Clone ID: jC-gmle01810019f03d2
aattccttgcaagccaaaagcttaactggattaaggcaactttgacatgtaatccaccccttttatccaacttatcaaccttcaagtacatacaccaattttcttccaccaacaatcccattttacgtgaagtcgaggaatcatattttccgatgggatctatggtgagtacccataaccttttgcacttatcacttttgagatacctgaaatattgcatcattatcgccaatcatcaattaattgcaattcaagcaggttttgatggaatctaaattttatggggcacatgggtatcttaatgatcaaattcttaaaggatggaatcaaatgattccaacaaattaattttgtgga

SEQ ID NO: 6438 - DNA, 88 bp, Glycine max
  Clone ID: jC-gmle01810019g03d2
attaatcaaaagatacaaatgctgaatgtgtctcttttattctgtggtatacaacttacttcacaagaaacaaatttctttttataca

SEQ ID NO: 6439 - DNA, 564 bp, Glycine max
  Clone ID: jC-gmle01810019g10a2
attcaagggtcaattgttccgactgatgcaacaactagagagtactactccacattttattcgctgcattaaaccgaataatctccaatcacctgaatcatatgagcaagggcttgtattgcagcagctgagatgctgtggggtcctggaagtagttcgaatatcgagatctggctttccaacaagaatgtttcaccaaaagtttgctagaaggatccgcttagtgtttcagttgcaattcttcatcagtttaatattttgcctgagatgtatcaagttggctacacaaaattatttttccgaacagggcagattggtgtgcttgaagatactagaaatcgtaccctccatggcattttacgtgtccaaagttgtttcaggggttaccaagcacgtcattctctcaaggatcttcggggaggaatcactactttgcagtcatttattaggggagacaaaaccagaaaggcatattcagcattacttaagaggcatagagctgctgttattatacagaagcgcatcaaagcagtatttgcaagaaacagaatgaggactattagt

SEQ ID NO: 6440 - DNA, 439 bp, Glycine max
  Clone ID: jC-gmle01810019g11a2
ctcgagccgctcgagccgttctgggcttgactcaagccggcccgaggaggctctagatggcgatggtttaccgatatcgcctgccaggactccaccaagatcgctcgcctgggatgaacgctggcaggtcactgcgagatacttgccgtattatcaatcagtacccttccaccatggagagagactggaggcctactgcggaaaccggagcattcctttttttatagagcctatcccagaccggcacacaatattatcgatacaatctgagtctggtttaccgagctgtggaaatacgattcatcgtgacttgcgaccattgcacttgtatcaacaagaccttttgcctagcaggggttcatatctgcggcgtcattgccagagatctcactcgcaggaaaacccttcttcgggaatacgtgtcgaactgatcaagctg

SEQ ID NO: 6441 - DNA, 557 bp, Glycine max
  Clone ID: jC-gmle01810019g12a2
ctcgagccgctcgagccgttctgggcttgacttaagccggcccgaggaggctctagatggcgatggtttaccgatatcgcctgccaggactccaccaagatcgcttgcctgggatgaacgctggcaggtcactgtgagatactttccgtattatcaatcagtacccttcgaccatggagagagactggaagtctactgcggaaaccggagcattcctctttttctagagtctatcccagaccgggacacaaaattatcgctacaatctgagtctggtttacggagctgtggaaatccgattcaacgtgacttgcgaccatttcacttgtatcaacaagaccttttccctagaaggggttcaaatctccggcgtcattgccaaagatctcactcgcaggaaaacccttcttcgggaatcgttgtcgaactaatcaagctgtggatagccaggtgtgagagccatccgcagtgcaatcgaaaggctccggccaaacttcctttccgcatcatagatgttggtcctgcagatggcagtcaaactccacggctcacgattg

SEQ ID NO: 6442 - DNA, 390 bp, Glycine max
  Clone ID: jC-gmle01810019h01a2
cccacccgtagtttctaccaccttcagtcacggcgtaatacactaaccaacccaccatgtcgctgcctgcttgtcccgccgaacaactggcccaacttctcggcccaaacaccacagacgcctccgccgccgcctcccttatctgcggccagttcgccgccgtggacagcaagttcgtcgacacggccttcgccgtcgacaacacctacctcctcttttccgcctacctcgttttttctatgcagctcggcttcgccatgctctgcgccggctccgtccgcgccaagaacaccatgaacattatgctcaccaacgtcctggacgctgccgccggcgggctcttctactacctcttcggcttcgccttcgctttcggctccccctccaacg

SEQ ID NO: 6443 - DNA, 470 bp, Glycine max
  Clone ID: jC-gmle01810019h01d2
ataaaaactacttccatatatttacattagacataatgaaaaagtttaacataaaagtctcaaattaaggaaaagaaaaaaaaactatatgcctcacggccaaacagtagtatttctactatataccaatcttcttccttcttttttggtgaaaactacaaaaataaatcccacaaatttccattttccacagccatctgtcatttccaggaccaacatgccttagtcaacaaccaccccccacagaaacgtacgcttctctcaccagaattcttaactttcagcatccaccaatgcacgaccaatgacaattacaaatcaaaatccctaattgcccatcatcataaaaagaaaaatcttcgtaaaaagaagacccaagacattttataaaataaaagaagttaatagttatgagtatcaaccggagttggttctcacagatttcacaagtatcccaaggttttaatcct

SEQ ID NO: 6444 - DNA, 458 bp, Glycine max
  Clone ID: jC-gmle01810019h02a2
gcagagtcagagacagagacgcagccatggggcggagacctgcgaggtgttataggcaaattaagaacaagccataccccaagtcacgtttctgccgtggtgttcctgatcccaagatcaggatttatgatgttggtatgaagaagaagggtgttgatgagtttcctttctgtgtccatctggttagttgggagaaggaaaatgtttcaagtgaggccctggaagctgctcgcattgcttgcaacaagtacatggccaaatttgctggaaaggatgctttccacttgagagtcagggtgcacccattccatgttcttaagatcaacaagatgctttcgtgtgctggtgttatccaatccattattgagtgaaaattctgtcactttatttttaattaattaattttttccgttttatacagcttctgtactttgctttccttttttttatactttaat

SEQ ID NO: 6445 - DNA, 390 bp, Glycine max
  Clone ID: jC-gmle01810019h03a2
gacctgttatatttattgacactgacaagttgcctgctttagaggcaagagatcagaagattgtaaataaccctattgaagctcagataattgctgaggttgcaaaggaattggtaaagaatggaatcggaagtgaacacattggcattattactccctataattcacaggcaaacctcatccggaatgctgcttccatgacttccttggagatacataccatagacaaataccagggtagagataaagactgtatattagtatcttttggaaggtctaccgaaaacccgacaagctgtgctgcttctctgcttggagactggcacaggataaatgtggctcttactcgcgctaagaaaaagttgatcatggttggatctcggagaactc

SEQ ID NO: 6446 - DNA, 299 bp, Glycine max
  Clone ID: jC-gmle01810019h04a2
ctcgagccgaggacccaaagcgtctcttcgaaggaaacgcgctcattcgccgtctggtgcgtgtcggtgtgctcgatgagtcccgcatgaagcttgattacgtcttggccctcaaggtcgaggatttcttggagcgtcgcctgcagacctgtgtctacaagctcggtcttgccaagtccatccaccacgcccgtgtcctgatccgccagcgtcacatccgtgtcggcaagcagatcgtcaacgtcccatccttcatcgtccgtcttgactcgcagaagcacattgacttttccctcacc

SEQ ID NO: 6447 - DNA, 398 bp, Glycine max
  unsure at all n locations
  Clone ID: jC-gmle01810019h05a2
ggtccttcaaccctttgatgaaaacaaattcaactttaccaaagttgggcaagaagaggtcctcttccaatttgaagctagcgaggatggacaagtccagttctttccaaatgctccagttgatgttgacaattctcccagctttgttgccatcaatgtcagtcctattgagtatgggcatgttttgctgattccgcgcattttcgagtgtttgcctcaaaggattgaccgtgagagcttcctccttgcacttcacatggcagtggaagctgataatccatattttcgattgggttacaacagtttgggtgcttttgcaaccattaaccatcttcacttncaggctttatatttggctctgcccttcccaattgagaaggccccactaagaaaaatgc

SEQ ID NO: 6448 - DNA, 373 bp, Glycine max
  Clone ID: jC-gmle01810019h06a2
gaagacctttgcagaagaagtgaatgcagcattcagagagagtgcagacaatgagctcaagggaatcctctctgtgtgtgatgagccacttgtgtccgttgacttcaggtgcactgatgtgtcctcaaccgttgactcctcgttgaccatggtcatgggagatgacatggcgaaggtcattgcttggtatgacaatgaatggggctactcccaaagggttgtggatttggctgacattgttgccaacaaatggaagtgagagccaaacaaattctcattggtaattaaattattatgtatgtaccatgccgattgaattttgtatgcttactactactactaccactacagcaggttgtgcttcattattctt

SEQ ID NO: 6449 - DNA, 424 bp, Glycine max
  Clone ID: jC-gmle01810019h07a2
aaggactggtgaagatattggctgaaaaggagacagacaagatattgggagtgcacattatggcacccaatgcaggagagcttattcatgaagcagcaatagcactacagtatgatgcatctagtgaggacattgcacgtgtgtgccatgcacatccaacaatgagcgaggctgtgaaagaagccgcaatggccacttatgacaagcccattcacatttaaaaggagccggttgctacttcttgttttcatttttgtccaagaattttacaatgacttggagatgatacatcctgtgttaaatttagattcaggtttttaaatgcaaattagccccttgtttacttgtttgcataataagaggaatgattgtgttgttcttatccttgttgaataatatatatatctccccttctctctgggac

SEQ ID NO: 6450 - DNA, 569 bp, Glycine max
  Clone ID: jC-gmle01810019h08a2
caaccaaccaacttcttaattaataactgtcgtcgtttcaatctcgttacacatctcaaaacgcagcagcagcacactcgacttaaaatgcaagccgtttcactctcacctttgtcgtctagggattcttccgacgagttcgctggaaagttcgaacacgatttcgtggctaagctcaaaatcaacgaaaacgaaaacgaagagaagcataacgaagatgaggtagaagaagaggaagagtttagcttcgttctcacgaattccgatggatcgccgatctccgccgaagacgcgttcgacaacggccatattcgtccgatttttccgattttcaaccaggatcttctgttctccgacgattacaacggcggcgacggtctccggctgccgataaaggtcttcgtcgaacacgcggatgtttctccgtcgccgtcggaggcgacgacgccggcggaaggaacatactgcgagtggaatccgaaagcggcggtgaagagcaactcgacgggattctcgaagctgtggaggttccgagacgtgaagctgcggagcaacagcgacggaaaaga

SEQ ID NO: 6451 - DNA, 494 bp, Glycine max
  unsure at all n locations
  Clone ID: jC-gmle01810019h09a2
ttctggtgctcctgtttggaacaacaactcctctttaaccgttggagctagaggtccaattctgcttgaggattatcatcttgtggagaagcttgcaaactttgacagggaacgtatcccagaacgtgttgtccatgccaggggagctagtgcaaagggtttctttgaggtcacacatgacatttctcacctgacatgtgcagatttccttcgagcccctggagttcagacgcctgtaattgttcgtttctcaactgtcattcatgagcgtggtagccctgaaaccttgagggaccctcgaggttttgccgtgaagttttacaccagagagggtaactttgaccttgttggaaacaaccttcccgtcttctttgtacgtgacggcatgaaatttccagatatggttcatgctcttaaacccaatcccaagaaccacatncaagagaattggaggatccttgacttcttctctactttcagaaagccttcacatg

SEQ ID NO: 6452 - DNA, 607 bp, Glycine max
  unsure at all n locations
  Clone ID: jC-gmle01810019h10a2
caagtggtggctatggcgccgctggtggtggtggtgtgtaccctgacactaccactgatggtgggtacagcaaaacaagtggtggtgggtatgatgatgaggttgactataagaaggaagagaagcaccacaagcatcttgagcaccttggtgagttaggtgctgcatctgctgctgcttacgccttggtaatcttctttaccattattattaatttgctttttatatatataatatattttcactaagttaacatgaaaatgattgtaaattaatgtatgtatgcactaaagcatttatttgttcttaattaaccttttcatttcgacggaaaattaaataaaatttatttaagaattgttttcataaaaaattaaattctcataatattcaaacatttaattttaatttcagcatattaattatttntttcaattcatttggttatggatatatacgtttagttttatggtcttgtggttctgaaatttcaaaaaactaaaggttgattacaaggacanaaatttagatgcagttttatagatgtttgatgtttgatagtagtattatttttcattttgatatgtttttgaaatataatattttt

SEQ ID NO: 6453 - DNA, 583 bp, Glycine max
  unsure at all n locations
  Clone ID: jC-gmle01810019h11a2
agaaaagttagggttcacaacttttccttttccttttgcttgcgaatctgaatcaaataatcaatcatccattcattattcatcatgtcgtcggcgaagaaaatcacgctgaagagttcggacggcgaggctttcgaggtggaggaggcggtggcgctggagtcgcagacgataaagcacatgatcgaggacgactgcgccgacagcggcatccctctgccgaacgtgacgagcaagatcctggcgaaggttatcgagtactgcaagaagcacgtcgaggccgcgaatcccgaagacaaaccctccgaggacgatctcaaggcctgggacgctgaattcgtcaaggtcgaccaggccacgctcttcgatctcatcctggctgctaactacttgaacatcaagagcctgctggaccttacatgtcaaactgtagccgacatgatcaaggggaagactccagaggaaattcgcaagacctttaacattaagaatgacttcacccctgaggagggaagaggagttcgtcgggaaaaaccatgggcatnntgatgattttgttaatctcaaaaaatctgaatcaaag

SEQ ID NO: 6454 - DNA, 561 bp, Glycine max
  Clone ID: jC-gmle01810019h12a2
gtgaagttggagaatggaaggccgagcgcgagcgagttcgtagtcagcggaagcggaaacgcaattccgagttacgtcgtggcgccaaacgcgcgtgttcaggatttggttaaccgaaacgacactcgcctccggatattctccggcactgccaatccggctcttgctcaggaaattgcatgctacctgggcctggagctaggaaaaattaagataaagcgttttgctgatggtgagatatatgtccagctgcaagagagtgtcagggggtgtgatgtgtttcttgtgcagcccacatgtcctcctgcaaatgagaatcttatggagcttctcataatgattgatgcctgcaggagggcttcagccaaaaatattactgctgtcattccatattttggatatgccagagctgatagaaagacccaaggacgtgaatccattgctgccaagcttgtagcatatttaattacagaagcaggtgcaaatcgtgtacttgcttgtgacctccatactgggcagaccatgggctattttgatattgcagttgatcatgtgtatggc

SEQ ID NO: 6455 - DNA, 558 bp, Glycine max
  Clone ID: jC-gmle01810020a01a1
cgggacagatattctagttacagaaggttttcccctaggcgtttcaggagcccaccaccgcgtggaagaactcctccaaggtatcgaagcaggaggagcaggacaccatctgtttcacgcagtacacgatatcgagctcgacgatatagccgaagtaggagcccagttcgtagtaagagtccagttcgcagtcgttccccagttgatcgatcccgccccactcgtgtggagaggcgtgcatcttcttctcggagcaggagttcatccaaatcccggtctaggtctaggtccaggtcatccgtggaatctctaccaagagcaagttgagacagcaggtcccggttattcgtccagaagccccagatggaaagaaaggcttggtcttatatggcgatggttctccatactaatgtgaaaggtgaaatatgtggttgctaaggctttgggcacactgtaacctttaagagttgcagcttcatttttgaacttagcacctgcttggtgatggattcgggatgaacctggttttccctttaagactgtatgaccttgtgaatt

SEQ ID NO: 6456 - DNA, 561 bp, Glycine max
  Clone ID: jC-gmle01810020a02a1
cgggacagatattctagttacagaaggttttcccctaggcgtttcaggagcccaccaccgcgtggaagaactcctccaaggtatcgaagcaggaggagcaggacaccatctgtttcacgcagtccacgatatcgagctcgacgatatagccgaagtaggagcccagttcgtagtaggagtccagttcgcagtcgttccccagatgatcgatcccgccccactcgtgtggagaggcgtgcatcttcttctcggagcaggagtccatccaaatcccggtctaggtctaggtccaggtcatccgtggaatctctaccaagagcaagtagagacagcaggtccaggtcatcgtccagaagcccagatggaaagaaaggcttggtctcatatggcgatggttctccatactaatgtgaaaggtgaaatatgtggtgctgagggctttgggtcacactgtaacctttaatgagttgcaggcctcaaattttgaacttcagcacctgcattgcttgatggaattcgtgaatgacacttgtttttcccctttagagacagcaatgacat

SEQ ID NO: 6457 - DNA, 390 bp, Glycine max
  Clone ID: jC-gmle01810020a02d1
caccacaataagccattgaaatataaatggactgcacctgatattcgtaaattatatgaattcactaaatcaatacactggtaccaccatctgagaattttccactatagttaccagtcgcatacatatgaagcttgacaggttaaggcgtgacacaattatccccgtgcgaaatatgttcttctaggataatgcgaaattggcctgccaaacttcatatgtgcactttccattgataaaattaataacatgttcgacagccacaccaggttcaacaggtagagctgccaaatcctgcaagaatccttgtacaaaagctttgccatcatcatcgctagtagtcacaggatttataaaaaattgcaggaactgtcatgacgtcggcaacat

SEQ ID NO: 6458 - DNA, 566 bp, Glycine max
  Clone ID: jC-gmle01810020a03a1
ggggcaatgcctgaagggttaaaggatgcagagaagtgcattgaacttgatccaacctttgtaaagggttatacccggaaaggtgcagtccagtatttcatgaaggaatacgacaaggctttggagacatatagggaggggttgaaatatgactctaacaaccaggagttgcttgaaggcatcagaacatgcatacaacaaattaacaaggctagccgtggagacttaagtcctgacgaattgaaggagcgacaggccaaggcaatgcaggatccagaaattcagaacattcttcaagaccctgttatgagacaggtattgattgatttccaggaaaatcccaaggctgcacaggaacacacgaagaatccaatggtgatgaataagatccaaaagctggtcagtgctggaattgttcagatgaagtatgtttgtggcatgttgcagttcgtgtgaaaaagcaatcaagcaatcgataatgatgtcttagtgtgactattttgacattttaatagatgtgactgggaaaaaagtgggaaattttgagtgttttactttgtttgttt

SEQ ID NO: 6459 - DNA, 367 bp, Glycine max
  Clone ID: jC-gmle01810020a03d1
atcattactgaacaatttatttcatgttaaaccgatgcaaattcattacagcttattctcacaaggttacttgggagaacgtcctgttactttacattagcacgtgttttggtaatattgaactacctcacttacaaaaacaaaaagaactacaaaatttaaggattgaaaacttagcaggcacctaacacatgcaactgtacaacaaactacaaattcaaccactaaatctattcaccagccatccgtaaatttttgtacctacatgcatttaaatgatggcttttacagtactgctcgtcataatctggtgtgacaagttttccttcatacttccgatctagtcaaccaattcaccagccataga

SEQ ID NO: 6460 - DNA, 526 bp, Glycine max
  Clone ID: jC-gmle01810020a04a1
ggggcaatgcctgaagggttaaaggatgcagagaagtgcattgaacttgatccaacctttgtaaagggttatacccggaaaggtgcagtccagtatttcatgaaggaatacgacaaggctttggagacatatagggaggggttgaaatatgactctaacaaccaggagttgcttgaaggcatcagaacatgcatacaacaaattaacaaggctagccgtggagacttaagtcctgacgaattgaaggagcgacaggccaaggcaatgcaggatccagaaattcagaacatccttcaagaccctgttatgagacaggtattgattgatttccaggaaaatcccaaggctgcacaggaacacacgaagaatccaatggtgatgaataagatccaaaagctggtcagtgctggaattgtccagatgaagtaagtttgtggcatgtggcagttcgtgtgaaaaagccatcaagcaatcgataatgatgtctcagtgtgactattttgacatttaaatagatgtgactggg

SEQ ID NO: 6461 - DNA, 513 bp, Glycine max
  Clone ID: jC-gmle01810020a04d1
ttcgcccttttttttttttttttttttttttttttttttttgttagaaaaaagttttgccacatggctctttgaattttataactgatagcaaaagcaaagggctcacatacaatcatctttaacaacatacaaatcagtgtatgttccaaaaatgagaaagcaactagtaaaacaaaccactggcatagtgaatcttaatcctagcttgtcgaccagctgcatctcctttcatttccatgcatctacagaaatagtagagcttgttggtccagcatcttgggaaaagttctccatcgcctaaaatcattttttgttcagcacactccataatctatacacataatcacctttatctgaacctaacttcaaacagtgtatattttcctatcttaatggccaaattttacacagaaggctatgcatgcatcacatctattatttttcaatggttaagatacactctattcttaaaaaaatcatttcttaatttttctcccttgcccttcttgga

SEQ ID NO: 6462 - DNA, 576 bp, Glycine max
  unsure at all n locations
  Clone ID: jC-gmle01810020a05a1
cgtagaggaaccacaccaatccatcccgaacttggtggttaaactctactgcggtgacgatactgtaggggaggccgcgatgcggcgcctcgaggaggcgctgcgagtggcggaggaggacaagatggcgaaggaggccagagacgtaaagctcatcatggcgcagatcatgtttcttcagaaaaacgtggatgaagcgttagtaatttataatcagctcacgaaagaggatcctagggatttcaggccttatttttgtagaggcatgatttatagcttgcttgataggaatgaagaagctaaggagcagtttgcaaaatacagggaattgagtccaaagaagtttgaggttgatgggtatttgagaacccctttgtcaaggatgaagctgtttagcactgatgagagttgagaaatagtaataataaatttgcggcaattggaataaggatgcaaaaaccgagttaaattcttttgcattagctatctatgctatattgctatgccactcttganaagatgggtgggtgtaaaagttgtttgtattaatagagagaatgatagagaaataatgat

SEQ ID NO: 6463 - DNA, 535 bp, Glycine max
  Clone ID: jC-gmle01810020a05d1
gcatcaggaaatcaatggtactttatttacagcgacagggaaactagaaaggaaggggaatttccccccttatccataataagctcacatgtggtgaggtgaattaacagaactagaagaagaacatcatgtacagataaaatgcaaagttaagaacaggacatgcatgcaaagctaggggtctgctttaccaacaacctgttcatcactagaatcatattcatcttcactcatctcctcatcactggatttctcttctgtggcttcccctatgtcttcgggtttagcatacttctcacagtactctgacatcgaagccaatgacacatcagtcaattgtgaattaaataaaaaataaaccttaattgtttctgaaataaaaaccagaaattggttctcagaagaatttaagcctagatttttaaaaaatattaaagtgagatactgtctaaaaagttagataaagaaggctatcttgggatatctaatgatgtgcagaatagaatgaaaccaaatagagtaaagttagcatttc

SEQ ID NO: 6464 - DNA, 532 bp, Glycine max
  Clone ID: jC-gmle01810020a06a1
aattacacaatttacgtagttcgacagggtcgaaggctactagacgctgatggccatgttatgttgactgattttggcttagctaaacaatttgaagagagtactagatcaaattcgatgtgtggtacattagagtacatggcacctgaaattattcttggcaaaggccatgataaggctgctgattggtggagcgtaggtattctactgtttgagatgcttactggaaagccgcctttctgtggcggaaaccgtgacaaaattcagcagaagatagttaaagacaagattaagctgccagcatttttgtcaagtgaagcacattcactgttgaaagggctgctacagaaggaaccaggtaggcgcttaggttgtggaccccggtgtgttgaggaaattaaaagccacaagtggtttaaaccaatcaattggagaaagttggaagcacgagaaatccaaccaagctttaggccagaagtagctggtgtgcagtgtgttgccaactttgagaagcgctggactgatatgcctg

SEQ ID NO: 6465 - DNA, 520 bp, Glycine max
  Clone ID: jC-gmle01810020a06d1
gctcagcctaaatcttttggaattagccaacattgatcattatcatgtctatggtttgttagcatcggtatgattcaaaattgctcttggctattacaatatgcgttcttcccatcatagatagttgaatgatttacattaacatttacgacaaaaagggggaagaaatcaagtttggctgatttacttttacaaggtttcatgaacttttcaaagctgataaagcttcctttgttgccgatgagataacagcgtctgaagcatttggcagataataatacttcccttgggcaactctagcaatctccttggcaaaacccgttgagacaaacttattttcagtgtcgatgacaaggagagacattcctgctttatatatctttccggccacctcaagaatttcatccttcaattcttgtgctgaaggttttggggcatcagtagctgcggcagctttagggtcagttgaccttttaatgatatattggctctgccatcagtgattgcaacaatcattata

SEQ ID NO: 6466 - DNA, 498 bp, Glycine max
  Clone ID: jC-gmle01810020a07a1
caagattctataaaaactgctcttttacttggtgcaattgaccccggggttggaggaattgccatatcaggaaagcgaggaactgccaaaactgtaatggcacgtggattgcatgcaatactgcctcctattgaagtggtagaaggttccattgccaatgcggatccaacctgcccagaagagtgggaagatggtcttacagaatgcctggaatatgattctactggaaatattaaaactcgtattatcaagtctccctttgttcagattcctcttggagtcacagaggacagactcattggatcggttgatgttgaggagtctgtgaaaacaggcacaactgttttccagcctggtttacttgcagaagctcatagaggtgttttatatgttgatgaaattaatcttttggatgaaggtatcagtaatttgctcctcaatgtattgactgaaggagttaacactgtttgaagagaggggatcagtttaagcaccctt

SEQ ID NO: 6467 - DNA, 425 bp, Glycine max
  Clone ID: jC-gmle01810020a07d1
gacataatctagtgacaaaaatatatatatcaaatttctagtataattgttttcattgctagtaaacataaggcaagttatatcattcaaaatatagctacaatgacgaactttattcttctcttccacgcacaattatatgacgtcccaggcccttcatgaaacgatgaagtgatggtaaaaagacaaagacaacttaggagaacaaacaagacagaatctaaaggacccaattattatgcataataaagaaccacttccttagttcaaacttcaaagctttgatgtttccctcgggtgatgcacgacaatgtaattataagcatccatagtgagaaaatcatcaagcattggtgacgtgcattggcgagtgaagatcttgcaagcctacttgtacattccctttttgaacttcttttgcccca

SEQ ID NO: 6468 - DNA, 321 bp, Glycine max
  Clone ID: jC-gmle01810020a08a1
ggcatccttagactgcacggtgtagcaccctgcggacccaatcgtggcaatggaagccgagggctgtcacaacgccgttcatgctgattcggaaggacagcacatctatcgacgctatcgcgggctctaagctcaatacatctacgcaccctaagccaagtaggtccatccatactgcactgatcaaagcctatgcgcaacggcgtacgcttgtgctcgcagtagaggcattgaggtaggtggctgcttaggctacgataccgaagatgctagctcacaatgcagtgttcaatgcacattgaaagaacaggaggcatgctt

SEQ ID NO: 6469 - DNA, 526 bp, Glycine max
  Clone ID: jC-gmle01810020a09d1
cttaattaattggattacaaggaacacatagtccacaacaatagcagcgaaacatgccgaaaaggtatataaatataaatactaacacatacaaacggcatttattgagatagctcaacgagttgcatgcatggagttatgggtacacaactaaaattgcaagaaatggataagttctttcaaattgatcgaaaatcacatccttatcgtactctttgcacgtctgcaactctaacaatcattctggggttggcaacaacattaaatatttggcctcatgctcagacgagatgctatcttttggcctagagaacggtcagcctgagaccagtaagatatccagacactgcggatttcatgggtgacccgtgggtcagataaagcatcaacccatcggcgattaaatctatcttgcctgtcaggtgcccaagatcggtatctctcttcgggctgcttaaagttgttctccttttcaattccacacttttcacgccttccactggagatagcatgaggtatggtgaac

SEQ ID NO: 6470 - DNA, 531 bp, Glycine max
  unsure at all n locations
  Clone ID: jC-gmle01810020a10a1
cagagaaagaaaaccctagctcaccgtttcaagatgcaaatcttcgttaagaccctcactggtaagaccatcactctcgaagtcgagagttcagataccatagacaatgtaaaggccaaaattcaagacaaggaagggatcccaccagatcagcaacggctcatttttgctggcaagcagcttgaggatggacgtacccttgctgattataacatccaaaaggagtccactctccacttggttcttcgtctccgtggtgggatgcaaatctttgttaagaccttgacgggaaagacaatcacccttgaggtcgagagctccgacaccattgacaacgttaaggctaagattcaggacaaagagggtatccctccagatcaacagaggctgatctttgctggaaagcagcttgaggatggccgtacccttgctgattacaacatccagaaggagtccactcttcatttggtactccgtctacgtggtggaatgcaaatctttgntaagactctgaccggaaagacaatcacc

SEQ ID NO: 6471 - DNA, 526 bp, Glycine max
  Clone ID: jC-gmle01810020a10d1
cacgaaccaaacagaatttataaaaagaccagaacaaacaacagtttttcaaaggccactattgaccatggaaacaatttaacaagagtaaacctttcaggaacattaaaaaaaaaaacccaaagatcttcggaacttccacatgcttagacttcaagacacctacagaacattctcagacttttaaaacccaccacgaagacgcaacacaaggtgaagagtagactctttctgaatgttgtagtcagcaagagtccttccatcctccaattgcttcccagcaaatatcaacctctgctggtctggtgggataccctccttgtcctggatttttgctttgacattatcgattgtgtctgagctttcaacttccaaggtaatagtcttgcctgtcaaagtcttcacaaagatctgcatacctcccctgagacgaaggacaaggtgaagggtggactccttttggatgttgtagtctgccagtgtacgtccatcttcaagctgctttccagcaaaaatcaacctttgc

SEQ ID NO: 6472 - DNA, 540 bp, Glycine max
  unsure at all n locations
  Clone ID: jC-gmle01810020a11a1
gatggcgtcttcaatcgaaaagctcctagaaagtggtcgtcccttccttcgcggtgatctggagtccatcgacaagaacttacctcggctggttggcgtcctgcagagtgtgggtgccggggagtgctggcacaaacacggcagcttccttcaccacctcgtcgacatatttcgcattctcaagctctggaaagcccctcactctgtctgcctctgtggcctcttccactcagcctactccaattcttacgttaacctcgccatcttcgacccttcaaccggtcgagaagtggttcgtgcactcgttggcgaggaagctgagagtctgattcacttgttctgcatagttcccaggcagcctctcatccacgacgatctgctcttccactactctgatgaggagcttgtccaacaccttgctcagtccgagatatctctcaggaacgcaaagaagatggagaagggccctctntgatgacgatggggaattagaaggatggagaaagaaactgcagggtctttgttcctgccgagggggta

SEQ ID NO: 6473 - DNA, 543 bp, Glycine max
  Clone ID: jC-gmle01810020a11d1
aaaaagagaaaaaatatagtactagctagaaagatataacaccgttgaaagcctttttctgatgcactaaccttgtacttatggcttatttagtagaatattatatgatcgggggatggatggcattaagtagatgataaggcattattagtttacaagacccaaattgaggatgccccatgaagtctgaggccaagatttgtcctttgccctcatgagcaagaccctagtccaggccacccagccttcccaagaagtcctcttgtcccacggacatccccattccagcagaagcttcagtcctctctctgcgtgcttctcagcctcctcaaatctcccctctgtcaaataaacctgactcagcaccacatatggctctccaacaaacgggtttttctctatagactccagcaacaactcttccgccttgctaccaccctcacaaacagcttcccagtacaaatccctcgcaactatttgatctcccgcctccaaaacctttctacagtaatcgaacaccggggcaataccaactcaatatct

SEQ ID NO: 6474 - DNA, 534 bp, Glycine max
  Clone ID: jC-gmle01810020a12a1
cacactatggatgtttggtcatggatatgtgagctccccaactcggtggaggggaccgagtcccactcgccacccatgaagttcgaaatcgcgagtgagaagaacgacgacaagctggacaactcaactcgttccattcacctgaaagctgagcgaacctccggctcagactcggaagctgcggtgatcttcaccgtatgcttgcaaggctttcacccacacaacgctcacaagcctctatgggtctccgaaaagtgccacctctcatcagaaaagccgttcctccctctcctcctccaactcctccaggaaatcatatcccactcccccacggcgcacgatagcacctgcccccgttcccagctccagaaactaaaacccgaccccatcgcatggatcatggactcgcacacacccgagtccctctccaccttcttcaacctcgtcttcaccatgcgcctcttctggctctgcgccttccacgctccccccgaagcccgctccctctacttccactccctcctcgcccccgtt

SEQ ID NO: 6475 - DNA, 406 bp, Glycine max
  Clone ID: jC-gmle01810020a12d1
aaacaagagttatatattattgctttattcatttatttgacattttataacttgggaattgtatatgaaaccagacactacagataaagcatttgcttagtaatggctattgtacatatattgatatatagcacttaaactgcagtgccatatatatgtatatatactaaccagctagtggctaagtttagtactagatgcatttttacacaaacttgtgcgtcctcttttggtggttataattaggtgagaagggtttaaagtttgatatgattgcgtggttgcttaaggtggttttccatgaataagaagcaagtcaacttcatcacaccactcgatgtacctagtttcaaaattagaaccctttgcttgggttgggcaaatagttaacccaaaattttcccct

SEQ ID NO: 6476 - DNA, 322 bp, Glycine max
  Clone ID: jC-gmle01810020b01a1
cgggacagatattctagttacagaaggttttcccctaggcgtttcaggagcccaccaccgcgtggaagaactcctccaaggtatcgaagcaggaggagcaggacaccatctgtttcacgcagaccacgatatcgagcttcgacgatatagccgaagttggagcccagttcgtagtaggagtccagttcgcagtcgttccccagttgattcgatcccgtccaactcgtgtggagaggcgtgcattttctttttggagcaggagtccatccaaatcccggtctaggtctaggtccaggtcatccgtggaatctctaccaagagc

SEQ ID NO: 6477 - DNA, 525 bp, Glycine max
  Clone ID: jC-gmle01810020b01d1
ataaaaatggtctagcgaagctaaacctgattttataaattaaactcaataaactcaaacgcatgtcctaaccaacgaagacataactggagcaacaacatgagtctcgattccaacaaataccgcaacaacttcacagctaaggctgcatcctaatgtcacaagtaccgcctattgtctaacttattctaggactagaatatttcaacatgtcattgctgtctctaaaggggaaaaacaagtgtcattcacgaattccatcaagcaatgcaggtgctgaagttcaaaaattgaagcctgcaactcattaaaggttacagtgtgacccaaagccctcagcaccacatatttcacctttcacattagtatggagaaccatcgccatatgagaccaagcctttctttccatctgggcttctggacgatgacctggacctgctgtctctacttgctcttggtagagattccacggatgacctggacctagacctagaccgggatttggatggactcctgctccgagaa

SEQ ID NO: 6478 - DNA, 545 bp, Glycine max
  unsure at all n locations
  Clone ID: jC-gmle01810020b02a1
aaaaaaataaaagagaaaagaaatgaagttgtcaggtgacagaagcagctttatcttctttttctgacccctttcatagtaatgattccgcagcttgttactctcttctctctcaaaacaaaacttgaatccatccatactctacataccccttgcccttgctttgcttctttctttctcacaagcaccagcagcactcaaatcaatcaatcgtttttaatgcccttgcttctccctctttccgtgtgtatgtaaaatctttgtttttatcagaggtggtgcagaaagttgtatctcagatccctatatacaccgaaaacgatacaactgtgtgctgtgtacactgtgcactgtgcttctccctctctctctctctctctctcacaaaatcataatcattttacatattacacctattaccgaatagagtggtcctcaacctcaacctaaaagcctcactttttttgttttccccgataaccctattcaacccaatcctnctttccttttcctttgccaaagggaaggaagaaatgcaagaacca

SEQ ID NO: 6479 - DNA, 520 bp, Glycine max
  Clone ID: jC-gmle01810020b03a1
gtttctcagacctccgcgccgccgctacctcctcctccatgccgtcgtcagcgcgtcccgtcaggatcattcctctccagcacccgaccgccacgacgtcgtcgtcatcgccgccgaacgctgcgttctcgcgctggacggcgaagctccggcgaatgacgtggatggagtggatcgagttcttcctcccttgcctccgctggattcgcatctacaaatggcgcgagtatttccaggtcgatctcatggccggaatcaccgtcggtgtcatgctcgttcctcagtcgatgtcctatgcaaaattggctggacttcaaccgatatatggactctactctggttttgtgcccctatttgtatatgccatatttgggtcttctcgccagcttgcagtaggtccggtggcattggtttctctcttggtctctaatgtgctaggtaacatagctgattcatccactgagttatacacagagctggcaatattactggtccttatggttgggataatggagtgcat

SEQ ID NO: 6480 - DNA, 506 bp, Glycine max
  Clone ID: jC-gmle01810020b03d1
ataaaaatggtctaccgaaactaaaccggactatgtcaatcaaactgatcaatctacaacgcaggtcttgggcgtctacttaatttaacttgcaggattgaggaagccataattagaatgaacatgtgaaaactaaaagttattgggctaactattgtaccaatggttgatgaaaagttcttttctccttacgaatcaatgatattcactttatcatgaaggaacagtttcttgcagcttcattaccctccaatcatgtttctgtacaactcgtactcgtatatcttatgcttatgagaaaaatatgaatggaaaacgagatcaagaatatatatatatatatatatatatatatcatgcatatgcttgaagcccgaaggagttgaatttggtgggaacgaattatatcatgctctcaaacttgaaagtttctttacccgttgcatagaccttaaaaatagagcccctaaaatgcctgcaccaatgaatgatccatttgcaaaagc

SEQ ID NO: 6481 - DNA, 535 bp, Glycine max
  Clone ID: jC-gmle01810020b04a1
ggaagagtttgtggaatctagtgagagagagcagaggaaaaggggaagaaaaatgttgagtgcgacggcgatcggcgcgttattgggtttgggaacccagatgtactccaatgctctccgcaaactcccctacatgcgccatccgtgggagcacgtggtcggaatggggttgggcgcggtgtttgtgaaccagcttctgaaatgggaggcccaagtggagcaagacctcgacaagatgctcgaaaaggccaaggccgccaacgaaagacgttatatagatggagatgatgattaatgcatgtcttcatggattgtggcagttggtgaaaataatcatgaaatatgttgaacttgttgcctttgttttctgatttgatgatgttatgtttgtaaggctgttaaaactttttcgtgctaatcagccctatttttgcacaagtttttgcaagcagtgaaattggtgtagatgataatgttctggcctggtggcttcattgtaataagatatcacgatttctgggacttcattcgtctt

SEQ ID NO: 6482 - DNA, 508 bp, Glycine max
  Clone ID: jC-gmle01810020b04d1
tcgtccttttttttttttttttttttttttttttttttttttttttttttttttttttttttttttttttttttttttttttttttttttttgggccaaaaaaccttaacaaggttaaaggcccccgggggttaaagggaaaaaaaaaaccaaggggaaaaaaaaaaccccgaaaaaaaaaagagcccttttaaaaaaaaattcccccattaaaaaagaggaaccaaattgggacaaaaccggggaaataaaaggaggggggggggggtcaaaagggaacctggggcccccaaggggaaaaattgggccccccaaaagggggggggttttttcttgggccccaaaaaaagggggggccaacaacaaatggctccaaggggtttgccacggtaccccccccggggggtttaaaaaacccggaggggggggggaaaccgcccggggaaaaccctactatcccaaatttcgcacctttcccataccgggaaaaaaagcctttctttttttt

SEQ ID NO: 6483 - DNA, 533 bp, Glycine max
  unsure at all n locations
  Clone ID: jC-gmle01810020b05a1
caaaaacgtatgaattggtcggtttttctccggagtcgtcttcacttttctccgagtttttattatcatcatctctctcgtgtccctgtctccatctccatctcttagtttcttcttcaaatggcagaagttgaagacatagacaaccctcatcacgaccaccatcattacctttcttcttctacaacacaacctccaatgatcaatttcccgcgagatctgttaagaaccttcgtgggagtgaacaacaacagcaataaaaacaataacaacagtcagcaccacaatttgcctatgccagtggtgaagttagaggatgagaaagaagagctggaactaagtctcggcctttcgatgaatggtagatttggggtggaccctacagcgaagaagataaagagaacaacctcgataccggagtttgtgcgcgacgaggagatgggatatgctgctgcgatggggtgcacggngtctctggtgaggacgtgttcgctttcgacggagacggaggangagtggcggaagatgaggag

SEQ ID NO: 6484 - DNA, 451 bp, Glycine max
  Clone ID: jC-gmle01810020b05d1
ttcgtccttttttttttttttttttagcaaagacaatgctatcttataactgatatttgaagcgggagcatcaatacaatacaatatgtaactatgaactatcaatatatgatcgttattatgtctgtgatacacacaattaaggccataatatacttatgtgatttacaacaacttctagcttattttatacatcatgccaacccaactaggagcaattttcatcatacaattacacttatctttaatcatcattcatcaatactggcatcagcaatacgctctaaattctgaagcatgacaaggtggtagtcaccagggaccatattgttatgcaatttatgccacaattggataagatgcacaagttgcaacaccacacatgttctttcccaattccatcttgaagtagccattttcaccccagctttcttcccatgaattttttatg

SEQ ID NO: 6485 - DNA, 569 bp, Glycine max
  Clone ID: jC-gmle01810020b06a1
aactcacattcccataaagttgagaaatatgagaattccaagcaattgcgagttcacacgaatcacgccctctgctttcagctaccaccgtctcaaatcctacgtttccgactgcagagccgtgcttctcccctcattcggcggcccgcacgtgctccagcttcgctcgcacgtgccagtccctccgctcaagcctcacgatgtcctcgttcgtgcgcgcgccgtctccgtcaaccccttggacacccgaatgcgtgctggctacgggcgttccatcttcgagccgctgttgcctctcattttggggcgcgacgtcagcggcgaggtttcggcggtcggagataaggtgaggtcggtgagtgtgggagaacaggttttcggggcactgcatcccactgccgtgagaggcacttactcggattacgcgattctctccgaagaggaggttactccgaaaccggattcacttactcatgtggaagccagtgccattccttttgctgcattgacagcttggcgtgctctaaaagtacagctagataagcgaggacaacggatttagtagtcgg

SEQ ID NO: 6486 - DNA, 134 bp, Glycine max
  Clone ID: jC-gmle01810020b06d1
atatataatggaagccaggatggatttattgacttcaaaatagataactgacacgttggtcttatccaacaactactttagaaccacatataaaaggggcggctatattattatagataagtatctagagccgg

SEQ ID NO: 6487 - DNA, 131 bp, Glycine max
  Clone ID: jC-gmle01810020b07a1
cggctcgagatacttatctataataatatagccgaaccttttatatgtggttcaaaagtagttgttggataagaccaacgtgtcacttatctattttgaagtcaataaatccatcctggcttccattatat

SEQ ID NO: 6488 - DNA, 501 bp, Glycine max
  Clone ID: jC-gmle01810020b07d1
atgtcccaaatagaatataccacttataaataaagtaatttattttctgcatacatgacagctcaatacatttgtaaattgtagagagtcgcaaggcacataaataagtgactgaacccacaacctgcaaagttgacacaattcctaagggcacaagaaaatgtttaatgttggcatcttgagccaacgccatatcaagctgtctagttagtaagcagggctattcctttgaagaaaagaggctgcaggcctcacataagagaaatccttaaaggggtttccgccatttgggctggcagcaggtgagtcaacaacaggcatatcagtccagcgcttctcaaagttggcaacacactgcacaccagctacttctggcctaaagcttggttggatttcttgtgcttccaactttttccaattgaatggcttaaaccacttgtggcatttaatttcctaaacaccccggggaccacatcctaagcgcctacctggatccttctg

SEQ ID NO: 6489 - DNA, 507 bp, Glycine max
  Clone ID: jC-gmle01810020b08a1
tgatattggaatagtctttctctgaaccccatttttgcaaaaaggaagaaagagaaagagagagagagagagagagaagagatatacactgccaagaagaagaacatgaaaattcagtgcgatgtgtgtgagaaagccccggcaaccgtgatttgctgcgcagatgaggcagctttgtgtgccaaatgtgacgttgaagttcatgctgcaaacaagcttgcaagcaagcaccagaggcttctccttcaatctttatctaacaagcttcccagatgtgacatatgtcaagataagccagctttcatattttgtgttgaggacagagcactcttctgtaaagactgtgatgaacctattcatttagccagtagcctttctgcaaaccaccagcgcttccttgctactggtatccgggtggctttgggttctaattgcaccaaaggcaatgaaaaaggtcacgtggaaccatctaaaccaaaagcacaagaagttcctgcgaaaattcct

SEQ ID NO: 6490 - DNA, 560 bp, Glycine max
  Clone ID: jC-gmle01810020b08d1
aacaaatacaaacggcatttattgagataggtcaacgagttgcattcatggagttatgggtacacacaacataatattgcacgaaaaggtttagttctttcacgtaatccattatcacattcttaccgtactctttgctcgtctgcaactctaacaatcattctggagatggcaactacattaaatatttggcctcacgctgagatgagaagctatctttcggcctagagaacggtcagcctgagaccagtatgatatccagacactgcggatctcatgggtgacccgtgggtcagataaagcatcaacccatcggcgagcaaatctatcttgcctgtcaggtgcccaagaccggtatctctccgggctgcttgaagttgttctccttctcaattccacactattcacgccttccactgcagatagcaggaggtatggggaacctttctgcatgacgaacaggatcataccttgaagggaagtaattgacctccttatccctgtgaatgaaattcatgaaaccttcatgatgattattgtggtgagcacacttgggagca

SEQ ID NO: 6491 - DNA, 528 bp, Glycine max
  unsure at all n locations
  Clone ID: jC-gmle01810020b09a1
cagagaaagaaaaccctagctcaccgtttcaagatgcaaatcttcgttaagaccctcactggtaagaccatcactctcgaagtcgagagttcagataccatagacaatgtaaaggccaaaattcaagacaaggaagggatcccaccagatcagcaacggctcatttttgctggcaagcagcttgaggatggacgtacccttgctgattataacatccaaaaggagtccactctccacttggttcttcgtctccgtggtgggatgcaaatctttgttaagaccttgacgggaaagacaatcacccttgaggtcgagagctccgacaccattgacaacgttaaggctaagattcaggacaaagagggtatccctccagatcaacagaggctgatctttgctggaaagcagcttgaggatggccgtacccttgctgattacaacatccagaaggagtccactcttcatttggtactccgtctacgtggtggaatgcannatcttgttaagactctgaccggaaagacaatc

SEQ ID NO: 6492 - DNA, 530 bp, Glycine max
  Clone ID: jC-gmle01810020b09d1
gataacaaacagtagtaacattaatgggacaatagagttcaacacaaaccaaacttattttcaaaggtcattacagacccattacacatcacatttcttcttaacacgtatgggaaaatccaacatcgaacatgacacagaaatccgctccagcttaaatcccctcacgaagacgcagcaccaagtgcaaagttgactccttatggatgttgtagacagcgagggtccttccatcctctagctgtttgccagcaaaaataagcctctgctggtccggtgggattccttccttgacctggatcttcgccttcacattgtcaatggtgtctgagctctccacctcgagggtaatagtcttacccgtaagggtcttgacgaagatctgcataccaccacgaagacgcaacaccaagtggagagttgactccttctggatgttgtagtcagcaagggtacgtccgtactcgagctgcttgccggcgaagatcagcctatgctggtctggggggataccctccttgacctggatc

SEQ ID NO: 6493 - DNA, 511 bp, Glycine max
  Clone ID: jC-gmle01810020b10a1
gttttgctgcatctaaaaaaacagtacgattcgcaattgttgttgatcactgactcgaagcaaacaatcatgggaggtgggaacagaagatcaaaaggtggaaacagaaaatccaacaacagcagtggcagcggcattcctaaatctcgaaaaagaggttcggatgttaaaactgcattgttcgtcgaaggcggtttcttgtctgattggcatctcccttcccctacccaaattccagggagaagttctggatccaataacaaatctgggagccatcgtagaggtgaaggctctgtatctaaaagtgggtttgcgaaatctttgggagctactattcgatacaattatccttcatttgatgttcaggaagttgcatgtgctgggattgggaacaatggtgaagatagtaatttaaatcagctgcaaccttttgttttcgcagactccaagaagggtcaaattattgctcatatagaccaaacaccttcttcaaaaccaacaatgtgaaata

SEQ ID NO: 6494 - DNA, 445 bp, Glycine max
  Clone ID: jC-gmle01810020b10d1
catgtggtcattcaagagctggccacattcaacataattacatgtcctctttaggactgagttttcttagttcttcctaaaaaaagtaaaaacaaataactaggagctagaaatatagcattttaaccgagtgatttcagagatggtcatcccatggtaaagctaaactacgagagaatcataagatttactaagccaacatacaattacttataaattaacttttggcacctagtcctcgcgactttggaagcctaacagcactcaacggagtggtaatgccttgtgattctctacctaatcccgtgccttccacaaagcccatctttgccatcatctttgatccaaagcctttagtgtgtttttcaaaagcaccaacattagaagatttgtttggagctggcttagccgggctgttggagaattctacacccacaccaagtga

SEQ ID NO: 6495 - DNA, 607 bp, Glycine max
  Clone ID: jC-gmle01810020b11a1
cctccttaccagcacaagggttatggtcgattccttctagaggtgctatatgatgttgctatatctgaaaatgtttttgacttcacggtagaagagccattagatcacttccaacatgttcgtacttgtgttgactcacttcgcctgcttcagttttacccaattcagaatatagttactaaagctgtttcacttctgaagcaaggaaagttatcaaagaaagcaaattgtcctcgacttttgccacctcccagcgcaattgaggatgttaggaaaagtctgaaaattaacaagcagcagtttctccagtgttgggaggttttgatctacattggccttaatcctgttgacaagaacacggagaactttgttagtattattttgaaccgtgttaagtatgatatcttagggaaagattctgggacgtctgggaagcagcttattgaagtaccaagtgatgttgatcaggagatgtcatttgtcatgttcagatcagaagccaacgaagctagtagtgtgcaaatggatgacaatcaggctaatcaagaagagcaactccagaggttagttcagggaagggtgaaagaaatcagttgattgcggaaaa

SEQ ID NO: 6496 - DNA, 586 bp, Glycine max
  Clone ID: jC-gmle01810020b11d1
aaaccagaacccacatatttcttggatgtatcatattagtgcacgtcaaaaaaatgtacgagcaagacgtattagaatggacaataacaactgaatgtcactcaatcaactttgttgtggttaatctcagttaattacagcttaatagatcactggttccttcacagaatactataagagaatcttaaaatatatcctagaagaagaacccaaatacactaccgagtgtttgtccagaaaaacaaactcttaataggtccacgagaaaacaatcacacaatatcatagatgcatgaccttgtcatcccatgccatctttataaggacaaatctaattaaccaccacccctgagctcccaagatgcagggttaccttttccgcaatcaactgaatttctttcaccctttcctgaactaacctctggagttgctcttcttgattagcctgattgtcatccatttgcacactactagcttcgttggcttctgatctgaacatgacaaatgacatctcctgatcaacatcacttggtacttcaataagctgcttcccagacgtcccagaatctttccctaagatatcata

SEQ ID NO: 6497 - DNA, 547 bp, Glycine max
  Clone ID: jC-gmle01810020b12a1
cgccaatttcaataatccctggataaggtaacttttcttacaccctcctcctcctccttctcccccaaatcctctcacaaaacaaaaaccaaaacacagagaaaagaagagacactaaccactctgtgaaatcaaaaccctaataataaaaaaatggccacacttcaagcttctcttctctccaaaccttcccttctctccaaaccttccctcccattcccattcccgttcctctctccgaaccactccccattctccctctccttcccccccatgcgccgcgtcctctccacaccgttatgctgcaccttctgcccctccgaacccaatctcagcccctccgaaccggaacacgaagccggttcagccaacaccgaagagccgggtataaattcaaccgaagaaggtgcagcttcggtttcagattcgggtttggaagaagaagaaggcgccgaggcagtgcttcggagtggcgcggattcggagaagattgttgttgcgagtggaaggctctcgatagtggtgttctttgtggggctgtgggtga

SEQ ID NO: 6498 - DNA, 486 bp, Glycine max
  Clone ID: jC-gmle01810020b12d1
gtagcaagttaagatcaccatgtactactttatatattaaatcatcggtggttgcactcagtgtgtgcatggagtatattaaatccaggatctatttattatttgtagcactttcaactattatttgctgttaaataaaattcatgcagtatatgctagaaagcttatgttcaataaattcttaaaaaatgaaaaatgcgtaggctatcacattcctacatgttacacagttctcaccaaaaaatattgctcaagggcgatcatactgtaacagcggacctttgctgttgtacacaggaatcgttgctttgcagatatccaacgttgcttatcttttttcccatatgcatcttacgacaagaatgccatgcacaaaggaggggagctgcagaaaccagattaagaaaaatacctgtagggcttctaggtatactgtacagtgcttctcttaaaatagtacagtaatggacaagaagtggagagaaa

SEQ ID NO: 6499 - DNA, 465 bp, Glycine max
  Clone ID: jC-gmle01810020c01a1
tttagaatcagctctcactctcttcgcacctcaacggttctctgcaaaagcaccaatctccatcaagctccatgcttccacctcccatatcttctcttccaagtccttcttcaaaaccggaagactctgcttccagttatgctccactctgcaagaggtaacaccaacagagcaaacacttgagcctatccaaccaacagacaacgtaaagaagctctacgtagttaacttgtcttggtctctgacggcggcagacatcactgacctctttgcccaatgcggaaccgtaactgacgtcgagataataaagagcaaagatgggaggagcaagggctatgccttcgttactatggcttccggggaagaagctcaagctgctgttgataaatttgactcttatgaattatcaggacggataatacgggtagaacttgcaaagagattaaaaaaaccttcttctctttc

SEQ ID NO: 6500 - DNA, 437 bp, Glycine max
  Clone ID: jC-gmle01810020c01d1
gtaaaataatggtcatatatacaatttttgaacaactgtcaaaatatacacaattgtgtgcagtaaggtagacagaattctcttacaaaaatgtatcacgaattaatcgggcttaaccccagaaagataatctgttaccaccttcggaaggcctttaacaaaaaagcctggttacactgggagaagctcttggataatctgaagaatattcagtgcctgaccacatgttcttgatagggaactttcaccagtctataactctaccaccatttggacattgttcaatataacttcatcctctttaattatggtgggtataagagccgcaggcttaacgggtcccactgtacgaaccatgctgacaacaggggttacattgtgaacccctatcaaggtcaataatgtcactatttgcatccgggcttctggacgaatac

SEQ ID NO: 6501 - DNA, 556 bp, Glycine max
  unsure at all n locations
  Clone ID: jC-gmle01810020c02a1
ctgctatctaaaacagcttctagatactggattttttcatgctgatccacacccgggaaatttgatccgcactcctgatggaaaacttgccatacttgactttgggcttgttacaaaactgactgatgatcaaaagtatggaatgatcgaagcaattgctcatctcatccatcgggattatccagccatagtaaaagactttgttaaacttggttttattcccgatggagtcaatttggagcctatcttaccagttcttgccaaggtttttgatcaggccttagaaggtggaggggcaaaaaacatcaattttcaggagctggcatcagatttagctcaaattacctttgattatccttttaggatacccccatactttgcccttataattagagctattggggttctggaagggatagctntagtaggaaattctgaatttgccaattgtgacgaggcttatccttatattgcacagaggctcctcacagatgaatctcctcggctaaaggatgctctgcgttacactatatatgggaaatctggggttttgatg

SEQ ID NO: 6502 - DNA, 448 bp, Glycine max
  Clone ID: jC-gmle01810020c02d1
tcctttttttttttttttattaagatccttgatataaaaatggattagcgaagctaaacgggttgtaataattttaacacacgtacactaaagctgcctgatccattacacaacagatgacgttaatctaggacgcggtcaaccttgacgcactacgctatatcagacaaatgttccgcattacgtctaatatacgcacaaagtttacatgcctagtgtataaatgtgcttcagtcttgttacaatattacagggacccacatgcatctaccagtcttttgcatccttaatgggactacactctattagctatattaagcatgtccttatatatagttgcgttgcttgctagctgatccacataggttgggacaaaataattatgctacctcttgcgctttgacttcaaagaggtaaccgattgagagttactgggcccgttgcgttt

SEQ ID NO: 6503 - DNA, 303 bp, Glycine max
  Clone ID: jC-gmle01810020c03d1
atatggggtataagaaaattaaaatattaagacaaagatataataatataaaaaaaaaaaaattagagaatataaacttaattaagaaaaaaataagaagtaaaaaatagaaaagattaagatattaaaagaaagaaaaatattaataacaaagggatgatgggggagaaaaaaaaaaatattaaaaatgaagaggggaaaaaaaaaagaaggaaaaaggggaataaaaaaaacttaagtggaaaaagccggaaaaaaatattaggaatcaaaacaaattattgaaaaaaaggggggggggag

SEQ ID NO: 6504 - DNA, 297 bp, Glycine max
  Clone ID: jC-gmle01810020c04a1
cagtgtgcctttacgccaattcacacttctggaacattttcttgcacaacctttcgatgctggaatatggaaacggatctgctgaaaactccgggatcgctgatgacatgttactcactaggaacatgaaattgaattctaaggccttaatatcttacaatccttatactacttattgccacaccctttaccttaccgtagctgatagtcaagatatgttagatcagtcttttactaatacaacgaaactagtagtccactccgctggaaccaaccgaacattcgaatactatacta

SEQ ID NO: 6505 - DNA, 502 bp, Glycine max
  Clone ID: jC-gmle01810020c04d1
atgctcagtggtcgcccttttttttttttttttttttgccaaaaaggacaataaagtttctagccttattttatatattgctggattgatgtttttagctacattggtatgtgccagagataacatatataacaagtgtatgtattatagcataatccttagtttaggggcaaaaatgttcctccaacatgaaggttttaaaaacttgaccaagtcctttcccttgcacagaccataatatcactcatcaggatgaaagcactccatattgatcagtctgcttaggtagtgtagaagccaagaatttaccattggtacttagcagcaacaagaacctcctcatactgctgagcagcattgtcccaactaagatcctgcgtcatccctcgccgttgaagcccttcccagctctgcttatactgcctgaaggtcaacaagcagttccctatcgcgtttattaacttgttagtttctgcactgtcaaatgtccatccaaggcctg

SEQ ID NO: 6506 - DNA, 512 bp, Glycine max
  unsure at all n locations
  Clone ID: jC-gmle01810020c05a1
gctccctttgtcaaaacaggtggtcttggagatgttgttggatcattacctaaggctttggctaggcgtggacacagagttatggttgtagtacctcggtatagtcattatgctgaagcacaagatttaggagtacggaaacgatacaaagtagatggtcaggacatggaagtaacatatttccactcttatatcgatggtgttgacttcgtttttattgacagtccaaacttccgccatttacaggataacatatacaggggaagccgagaggatattctaaaacgcatggtgttgttttgcaaggcagctgctgaggttccttggcatgttccatgtggtggtgtttgctatggagatggaaatttggccttcatcgcaaatgattggcatactgctttgctgccagtgtatctgaaagcctattatcgtgaccatggtataatgaagtacacangatctgttcttgtgattcataacatagcacaccaggggtcggggccccgtgatga

SEQ ID NO: 6507 - DNA, 505 bp, Glycine max
  Clone ID: jC-gmle01810020c05d1
aagacgtaatggagtcacagatatcgggataatcttattaccaatgaacccaccaatgcatgacataatcatttactgcagttcaactgattgctgaaacttgtgcgaagaaatgagactattttcacgaacaaggtttaacaggcttacgaacataacatcatcaaattagataacaaagggatcaggttcaacatatttcatgattattttcaccaactgccacaatccatgaagacatgcattaatcatcatctccatctatataacgtctttcgttggcggccttggccttttcgagcatcttgtcgaggtcttgctccacttgggcctcccatttcagaagctggttcacaaacaccgggcccaaccccattccgaccacgtgctcccacggatggcgcatgtaggggagtttgcggagagcattggagtacatctgggttcccaaacccaataacgcgccgatcgccgtcgcactcaacatttttcttccccttttcct

SEQ ID NO: 6508 - DNA, 552 bp, Glycine max
  Clone ID: jC-gmle01810020c06a1
aaagattctactctgaaacgaggttatgttccataatccattttacatttcaaagtcaagtatgcatatttcaggtggctaaattgtctactggtgactctttagacatgacacagcaggatggatcattaataattgcaaatgatgccacagttatagatatggaggtaacctgattatttgtgttataccttgggacattccgctcatctattgggaatggaatgaatccacatattcacaagtaacatcttgtatcatgaaacaaaatccccatttaaattgcagaggactgaataactagtagttgttctcatgtttcctttgtggaacttaactcccccgtttcaactttttctccagggagctgctattgcttatgttgccgacctactgaaagttcctgcaatttttataaaagccgtgactaataacgttgatgatgacaaagcaattgtagaagaattcctgcagaatttggcagctctaactggtgaacttggtcctgctgtcgaacaagttataaatttatcaatggaaagtgcatatctg

SEQ ID NO: 6509 - DNA, 615 bp, Glycine max
  unsure at all n locations
  Clone ID: jC-gmle01810020c06d1
cggtcgcaccctgcgcccgcagccttaacgggaagatctcagaactataaacccacgtgatgggacccgcaccaatggagaacgtggctcacgtaagccaacatgatggttatgcttaatgcgtcggtcgacattagtgaactatctgagtgaccaatgctcgtggggctgctagctttcgtgattggagacttaaccaggacctaacacatgcacctgtacaacagactacgaattacaccgctaaatgtattcaccagccatccgaagaaaactgtacctacatgcatttaaatgatggcttttacagtactgcttgtcataatctggtgtgacaagttttccttcaaacatgcaaactagtcaacccattcaccagccatagataggattttctaccagtggaggcaagagatgaaggtctttacagtgctgcttatcatagtcacgtgtcccaggtattgctcctgtacataatctcagaaattcattcccagtaagacaatagtgagcaaatgcttagcctccatctactagttctggcagaataggcattgatgctgacttagncatgagctttccctatttacactggcttttcaccatattttcctg

SEQ ID NO: 6510 - DNA, 529 bp, Glycine max
  unsure at all n locations
  Clone ID: jC-gmle01810020c07a1
ctccttaatttctctcttcacttatcatcatacttatatattatataacccaataattaaattaaatacatgttagcactttaacattcctttctctaacctcgttcccactctcatattttcccttctgctgatattcagctaaactaagtcaataagatgactcagggaaagatagttgaagctgcagaagctcataaaacacttgaggatttcgatcctccaaagaagcgcaaaaggaacaagtatgcttttgcttgtgctgtgctggcctccatgacttccatcttgcttggctacgatattggtgtgatgagtggagcagccttgtacataaaaagggacctgaaagtgtcggatgtgcaaatcgagatcctgctcggaatcatcaacctctactctctgataggctcatgcctcgccggcagaacctncgactggataggtcggcgttacacgattgttttcgccggcgccatcttctttgtcggagcacttcttatgggtttcttccccaactattcctttc

SEQ ID NO: 6511 - DNA, 317 bp, Glycine max
  Clone ID: jC-gmle01810020c07d1
cctgggataactgtctgtaaccttacatcagcaccgtgaagcggtgaaatttgaaccacctcacaaccaaaacaaagcgaactacaagactcaaggattaaaaacaaaacaggcccctaagacaccaagcggacaaaaaaccaccggggggcccaccaaagctaaacaccaggcatacggaaaaaagaacacctacagcatgggaagaaaaggaagaacagtgccgacacacatattctggaggcaccagcaggcctaaacaccaaaaaacggggcaacccatttacaagccgaggttggcaaaagcctacaaccaa

SEQ ID NO: 6512 - DNA, 556 bp, Glycine max
  unsure at all n locations
  Clone ID: jC-gmle01810020c08a1
cagatttagtcggcaaagctgaggaaatatcaagtggatattattggctccatgatgatttgcatgatgataccagttcacgatgctcttcacaagggacatattccaacttgaattactattctgtggatgatcatcatcaagagtacaacgtgccatctttgagaaaagataaacttcccatcacaaagagtcacaacaagggcaaaaaggtttcctcaggcgaagacttgagcaatttcaaccaatataaactcatggtaggatcacaggttcctctcactagtaaaagcaagatgatgatgaacaatcatcatagattaacaaggaacaggtcattgattgatataaggagccaactattgcaccgttcactggttgaagaggtgaacaaaagaaggttattcaagacagttggtgctgtggagaatattggatttcaggcaccttgtgatgtttccacaaaaaggtcacagcatgtatgtgttgctccaaatgagaactctncaggagtggcagggaggaaaattagagatgatttttgagaatgatgctc

SEQ ID NO: 6513 - DNA, 579 bp, Glycine max
  Clone ID: jC-gmle01810020c08d1
atattcccgaatcgcgtactcggtggccgccctttttttttttttttttaagcctgaaattcatgtatatgcaatgtaggaatcagaatctcactataaatatattacagaggaagtcatataactgatgtttttcatttaataagagtgcatgatgctatctctgctgacaaataacaattgggttttttacttggtcaaatccatgctgaaatcccataggttttttgccaaatcagcatcagtcccctgtgaggttgttttggccacattactggctgaaaaatacttgccactagttcccttcacttgtgggtgcaatgctacatagcatgttgttgctgctccctgctggacatttttaagcacgagtcttgcaatagctttagttagaccgttcactggactgatatgacgggaaagattggtggcaattactcctggatgaagagaatttgcagaaatatctaccccatctttcttgagacgtcttgtaagttcatttgcatgtaaaatgttggcaagctttgactgcccatatgcacgccaattgctgaaacttgattcatcggtaatttt

SEQ ID NO: 6514 - DNA, 515 bp, Glycine max
  Clone ID: jC-gmle01810020c09a1
ctttcagctgcacaagagtctccaatcccaactctctctctctctccacttgccaaaggaaaaaggctaaagagaaacccacacacacacacacacacagaaatatgtcttccccaagcaagcgccgagagatggacttgatgaaactgatgatgagtgattacaaggtcgagatgattaatgatggaatgcaagaattttatgtgcaattccatggacccaatgacagtccttatcatggtggtgtgtggaaagtaagagttgagttgccggatgcttatccttacaaatctccttccattggatttatcaacaagatctatcacccgaatgttgatgagatgtcaggatcagtttgtctggatgttatcaatcaaacctggagccccatgttcgatctttaatgtgtttgaagtgtatctacctcaacttctgctgtatcccaatccatcagaccccttgaatggagaagctgccgctttaatgatgcgtgaccgaccaagttacgaacaaag

SEQ ID NO: 6515 - DNA, 560 bp, Glycine max
  Clone ID: jC-gmle01810020c09d1
aacaaatacaaacggcatttattgagataggtcaacgagttgcattcatggagttatgggtacacacaacataatattgcaagaaatggattagttctttcaggtaatccaaaatcacatccttatcgtactctttgcacgtctgcatctctaacaatcattctggagttggcaacaacattaaatatttggcctcgtgctgagatgagaagctatcttttggcctagagaacggtcagcctgagaccagtatgatatccagacactgcggatctcatgggtgacccgtgggtcagataaagcatcaacccatcggcgagcaaatctatcttgcctgtcaggtgcccaagaccggtatctctccgggctgcttgaagttgttctccttctcaattccacacttttcacgccttccactgcagatagcaggaggtatggggaacctttctgcatgacgaacaggatcataccttgaagggaagtaattgacctcctcatccctgtgaattgaattcatgaaaccttcatgatgatttttgaggtgagcacacttgggagca

SEQ ID NO: 6516 - DNA, 496 bp, Glycine max
  Clone ID: jC-gmle01810020c10a1
ccaaactctctctcggggctcgcctcagcttcacagcaccacgcgcacacccttccgatgccttcttcgcctcttctctgatccactcgccgcgcccacggcgcctcctaaatgtctgtcatcgacacccccgccgttcaccaccgcagcgggggcgccaccgatcaccgtcacccgtccaagcgcaaattcgacgatgaagacgacgaggatttctcggacttagtctgcgtgaggatgcggaaagacgaggccaaggcggtgaattcctggtccgcctcctcctcctcctcctcctccgacgccggcggctgctcctccttgcagcagcagcagcgatcgcacatccagttcttcgtgcgaatgatgtctgccggaaacacgattgtgatgcaagccttccccgaagacacggtcaaatcgattcacgagcgtatccaaagcatgaagggaatcccattgttcgagcagaggttaatttatcgcgggaaacagc

SEQ ID NO: 6517 - DNA, 567 bp, Glycine max
  Clone ID: jC-gmle01810020c10d1
aaaccctgttttatttataatttgtccctataaacatttgacaaagaccgatgccactgcaacccttgactactttggaaaatagactagtgaattttgtcacattatcaaattagaggacagatggaatactcctataatatgtacaacgataattttatgtgcagtcaaaaccacttctattcagattgcaggtgtgttcattcaccaagtaccaaaactgcagccaatgtgttcttgagtgatgacttcaagacgatctttcatgacagccatagatgaataagctgggaaacacagccggaaaaagcatgtgtgagatgaaggcaggcgatcaccaggttcaagggatctgtatatgtagagtcgggaagccaaaccacggaaaccttcaactggtaaatattttacagatgtccaaaagaataaaagaaccttcctttgatctgctgtcattcttccaacaatctcccaaaaccaagatatctgaatatctgtctctttatagccattatactagtgtgcgctttccaatcttcaacagaaatggtatcttcactcccatgc

SEQ ID NO: 6518 - DNA, 574 bp, Glycine max
  unsure at all n locations
  Clone ID: jC-gmle01810020c11a1
gaggattggatgcttgattgtgcactaagacaagttgtgacaaagcttgcaccagctaggaagaagaaagtggcacttctagttgaagcctttgaaatggtattgccagcagcagcaccaaaatgtgaaaccagtgtgagaaacaacaattcttcagcatttggtcattcaggaagaattcaagcttgtagctgatggatgctgctgagtaattagatagaaggtgcaaccagcaattacgtggaagtgttatcttgcacgggaagcataaccaaacatccaaagagtaatgtgcatgcatgcccatcacagaaagtaatttggttgggcatctccacctatctgaaacatggataaactaatgagcttcaagatttaagggacttgtaatcgttatacgaagagtgtgaaactccagaaagggaanttgtggtcggtatttagctgtatgggtttaaatttgctttagaaaaatggttagagaactttaattgtgtgtttactttggtatgtttggatttgactcactaatatattngtgttatgaaggttatccatgccttcggattcttgt

SEQ ID NO: 6519 - DNA, 537 bp, Glycine max
  Clone ID: jC-gmle01810020c11d1
aacagaatccggaggcatggataaccttcataacacaaatatattagtgagtcaaatacaaacataccaaagtaaacacacaattaaagttctctaaacatttttctaaagcaaatttaaacccatacagctaaataccgaccacaaattccctttctggagtttcacactcttcgtataacgattacaagtcccttaaatcttgaagctcattagtttatccatgtttcagataggtggagatgcccaaccaaattactttctgtgatgggcatgcatgcacattactctttggatgtttggttatgcttcccgtgcaagataacacttccacgtaattgctggttgcaccttctatctaattactcagcagcatccatcagctacaagcttgaattcttcctgaatgaccaaatgctgaagaattgttgtttctcacactggtttcacattttggtgctgctgctggcaataccatttcaaaggcttcaactagaagtgccactttcttcttcctagtggtgcaagctttgtcac

SEQ ID NO: 6520 - DNA, 574 bp, Glycine max
  unsure at all n locations
  Clone ID: jC-gmle01810020c12a1
gaggattggatgcttgattgtgcactaagacaagttgtgacaaagcttgcaccagctaggaagaagaaagtggcacttctagttgaagcctttgaaatggtattgccagcagcagcaccaaaatgtgaaaccagtgtgagaaacaacaattcttcagcatttggtcattcaggaagaattcaagcttgtagctgatggatgctgctgagtaattagatagaaggtgcaaccagcaattacgtggaagtgttatcttgcacgggaagcataaccaaacatccaaagagtaatgtgcatgcatgcccatcacagaaagtaatttggttgggcatctccacctatctgaaacatggataaactaatgagcttcaagatttaagggacttgtaatcgttatacgaagagtgtgaaactccagaaagggaatttgtggtcggtatttagctgtatgggtttaaatttgctttagaaaaatgtttagagaactntaattgtgtgtttactttggtatgtttggatttgactcactaatatatttgtgttatgaagggtatccatgccctccgatatctgt

SEQ ID NO: 6521 - DNA, 512 bp, Glycine max
  Clone ID: jC-gmle01810020c12d1
aacagaatccggaggcatggataaccttcataacacaaatatattagtgagtcaaatacaaacataccaaagtaaacacacaattaaagttctctaaacatttttctaaagcaaatttaaacccatacagctaaataccgaccacaaattccctttctggagtttcacactcttcgtataacgattacaagtcccttaaatcttgaagctcattagtttatccatgtttcagataggtggagatgcccaaccaaattactttctgtgatgggcatgcatgcacattactctttggatgtttggttatgcttcccgtgcaagataacacttccacgtaattgctggttgcaccttctatctaattactcagcagcatccatcagctacaagcttgaattcttcctgaatgaccaaatgctgaagaattgttgtttctcacactggtttcacattttggtgctgctgctggcaataccatttcaaaggcttcaactagaagtgccactttcttc

SEQ ID NO: 6522 - DNA, 597 bp, Glycine max
  Clone ID: jC-gmle01810020d01a1
ggcttatccaaggcaagtttaaagagtacattttcctcaccacggaatattttcctcatggatctactcgacattccgtaatgagtgagcttttgtatccgtatcgaagaatccggttatctactcggcagctattgaatcagcaaccgctggtacagtaagcggtgttcaaatagccgttgttgggatcttctccgctgctagctcttcttcttactaggttttgcttagcaagcatcttcagaaaattagagggattccgccaaatttaaggtttttctttgcaataaactgtaaatccttgacttccttgggtacaagcatgttcctaaatcaggaactgcatgaggctgctggaaccactgtgtttcatttcccggaagcaaggattctagagtggtttgatcaccaaagcagggcaccttcaagttctttctctcgttattgcacctgtgggtaataacagttctggattgtttagtctcaaacccatggtgttcatcaatgtcaaagctcatgaatctgtcattagttggggtgatgaaatggttacatatgtgggtgtgataaagacttcattcttaaagcaagcggagt

SEQ ID NO: 6523 - DNA, 517 bp, Glycine max
  Clone ID: jC-gmle01810020d01d1
gtaaaaagcaagtaacattaagttggattcggatacacaagataattcacattatctgaagtacttcaccaaacacaaatctaaaaactctcaaaagtcatttcgttctttgacgctcactttccggggacgaagttggtggcataggcccaggcgttgttgttgacagggtcagcaaggtgatcggcgaggttctccaatggaccctttccggtgacaatggcctgaacaaagaagccaaacatagagaacatggccaatcgtccgatcttgagttccttcagcttaagctcatgaaaagcctgtgggtcatgatcaaggcccattgggaccaatctgccacactttgtgtacagtgttaccgactttactcgggtgacaaaccccacaaacgtactccagatatgtggctcatacgaatgctggttcattctcaagtgagtgaatgcacacatctctcttccaccagagtcaccatcaacatccaactgtgatgcccttatgatctggtcatgag

SEQ ID NO: 6524 - DNA, 517 bp, Glycine max
  Clone ID: jC-gmle01810020d02a1
ttcaaaacactcataacacaaagcacaaagcaaagctcatccttgagttaaaaaatggcagcagcttcttccatggctctctcatccccatccttggctggcaaggccgtgaagctgggcccatcagccccagaagtgggaagggtgagcatgaggaagaccgtcaccaagcaggtctcctcaggaagcccatggtacggcccagaccgagtcaagtacttgggcccattctctggcgagcccccgtcctacctaaccggtgagttcccaggcgactacggctgggacactgctgggctttccgcagacccagaaaccttcgccaagaaccgtgaactcgaagtgatccactccaggtgggccatgctcggagccttgggctgcgtcttcccggagttgctgtcccgcaacggggtgaagttcggagaagccgtgtggttcaaggccgggtcccagatcttcagcgagggtgggctcgactacttgggcaacccaagcctgatccacgcccagagca

SEQ ID NO: 6525 - DNA, 509 bp, Glycine max
  Clone ID: jC-gmle01810020d02d1
aaaaatgggagtgaaaaaattcagagcggagatttataagaattaacataaaaaaaattcttacattttcactcacattttaaagggatagtaaactcgaccttagtgaaaaatattgggaatgcagaaattcatccaccatagctctttatacatgaagtacaatgctagctcgtagaggatatcactcaaacccaaaccacgaccactgatcagtgccagtatttataacatgaatgatcatcactgttgagcacatcaaccttggactttattgcacaaaatgctgtgttacatgcacaaaatgcttagcttccctctccacctctttccaacacttgtgtgcactcttcccttctttcattttcttcacaaaccctacaaacttcctccagttattcggttcaaacaaatgcgggttcattctcaggtaagtgaatgcacacatctctcttccaccaaagtcaccatcaacatccaactgtgatgcccttatgatctgctcatga

SEQ ID NO: 6526 - DNA, 510 bp, Glycine max
  Clone ID: jC-gmle01810020d03a1
ggggtaacttgacactcgtactactgtcaagttctgatcttcgtctctcattcattggggatgatggtagaacagagagattattcacccttaccaacaaatcccaatgctctgctgttgtggttgatgaaatcccaactgatagttctggccgatcgttccttgtaaggactccagatagcagagctttttatttctggtgctctgaaaagtctaagcttttgggaattgaattgcttggaaaggtaattttagctattcttcttgattgaattacttggaaaggtagtgtttgatattgaatttattctgctttcttcgtcgattctcctcgattttattggtgttttgaatatatttaatgattgatattgtgtcatcaaactcatttttgttcaaatcagatgaaggatttgctcaagaggaaaccattcattgttgagctgagtggcattagcaagtcacgacttgactgctttgctactcatctttcggcttttctagtgggga

SEQ ID NO: 6527 - DNA, 185 bp, Glycine max
  Clone ID: jC-gmle01810020d03d1
attataccatgtgtttttacctactcattcttttgtttttctctctatcaacccaatgccagactgacctattgaaggtatataaagcgaaattaacgtataaaatcatgcttcttatcctaaaagcccaaccccaatgttttttacttcttccaatctcccataacaaccttttatagtattcc

SEQ ID NO: 6528 - DNA, 559 bp, Glycine max
  Clone ID: jC-gmle01810020d04a1
tgaagaagcttcagcttcaaacaaagtcagcataatgaagctgctgaaaaccaaaactgtgagaagaggtttatatgctggaatgggccttcaaatcttccaacaatttgtggggattaacactgttatgtactacagccccacaattgtgcaattagctggttttgcatcaaatagggttgcactacttctatcacttgtcactgcagggcttaatgcatttggttccattttaagcatatatttcattgacaagactgggaggaggaagcttttgttgtttagtttgtgtggtgttgtggtctcacttgttgttttgaccgtggcttttcatgagactaccactcactcccctatggtcagcacaatcgaaacctctcacttcaacaacacatgccctgattacagcactgctttcaaccctggtgaatgggattgcatgaaatgcctcaaggcctctccagaatgtggcttttgtgcctctagagctaataagctcttacctggggcatgcttgattcccatgacacaacagataatcaatgtcaaaaagaggaca

SEQ ID NO: 6529 - DNA, 363 bp, Glycine max
  Clone ID: jC-gmle01810020d04d1
attgaaagtactaaattcattaaaacatgattgcaaattgtacacattcatagtcttttcaaggtccgctaatggacccgggatgcacacatacacaaagttcaggaacatataaaaagaaaagaccagattatagactttcacatacttcagttcacaccaaacaagggacctgcagaccattctcaaactcaaaacccaccacgaagacgcaagacaaggtgaagagtagactctttctgaatgttgtagtcaggaagagtccttccatcctccagttgcttcccagcaaagatcaacctctgttggtctggggggataccttccttgtcctgtatttatggcttgacattatcaattgtg

SEQ ID NO: 6530 - DNA, 383 bp, Glycine max
  Clone ID: jC-gmle01810020d05a1
aaagattctactctgaaacgaggttatgttccataatccattttacatttcaaagtcaagtatgcatatttcaggtggctaaattgtctactggtgactctttagacatgacacagcaggatggatcattaattattgcaaatgatgccacaggtatagatatggaggtaacctgattattagtgttataccttgggacattccgctcattctattgggaatggaatgaatccacatattcacaagtaacatcttgtatcatgaaacagaatccccatttgaattgcagaggactgaattactaggagttgatctcatgtttgctttgtggaacttaactgcaccgttgtaactttttcttcagggagctgctatcgcttatg

SEQ ID NO: 6531 - DNA, 500 bp, Glycine max
  Clone ID: jC-gmle01810020d06a1
aagtgaagtttcctaacacggggtttgcttagctgttgtttgtcttttctctcttctaacttctgccccagttggaggctctaatggtttgaggaatctgttatggaggttttgggaaatgggtggagggtggttctggaaattggtggctttgaagaaatgcaaaattaggacatttctatcacctaaagctacatgatagtcaggttaggactcatagttgctgcttcacttgcagcttttacagttaagcagctgaatgtcaaaagctcaaaaccagaacataaagatgagggctcagaagaggagcatgtcacaagagttactgatcttctccaagagaatgaaggggaggaggaagaagagaaagaggaggttaagttaattagcagcataattaatcgagcgaatgactctgaagatgatattctaccagaatttgaagatcttctgtctggggagattgagtttccgataccacctgataaggatgagaaaga

SEQ ID NO: 6532 - DNA, 491 bp, Glycine max
  Clone ID: jC-gmle01810020d06d1
gaatggaatgtcttgtatatacaataaacgacatggtacgatgcaaactatgtggatcaatttacactttgcctatggggcgtctacttaatataacccagctgatttgcgaagcacatctatgaaagtgtctgtgtagtctcactgagacatcattatcgattgctcgattggtttttcacacgaactgccacctgtcacaaacttacttcatctggacattttcagcgctgaccagcttttggatcttattcatcaccattggattcttcgtgtgttcctgtgcagccttgggattttcctggaaatcaatcaatacctgtctcataacagggtcttgaaggatgttctgaatttctggatcctgcattgccttggcctgtcgctccttcaattcgtcaggacttaagtctccacggctagccttgttaatttgttggatgcatgttctgatgccttcaagcaactcctggttggtagagtcatatttc

SEQ ID NO: 6533 - DNA, 520 bp, Glycine max
  unsure at all n locations
  Clone ID: jC-gmle01810020d07a1
agaaaaagtagttgtcaaagttcaaaggcctggcctaaagaagctttttgacattgacttgcaaaacttaaagctgattgcagaatattttcagagaagtgaaactctaggtggtccaacgagagattgggttggtatatatgaagaatgtgcaacgattttgtatcaagaaatagattatataaatgaaggaagaatgctgataggttccgccgagattttcgaaacataaagtgggtccgagtacctctggtttattgggattatactgcatcaaaggtgttgacattggagtatgcaccaggtatcaaaataaatgaagtggatatgttagcttcacgtggttatgatcgattacgaatctcatctcacactattgaggcatacttgattcagatattgagaacgggtttctttcatgctgatccacatcctggaaatcttgctgttgatgttgacgaagcaattatttattatgactntggcatgatgggggagataaaatttttacccgagagag

SEQ ID NO: 6534 - DNA, 569 bp, Glycine max
  Clone ID: jC-gmle01810020d07d1
ggaaatatatcttttttggggagggtcagatgaaagatccatacagcttgttcgtgaaacgaaaatttgggatatcctgctgccactatacgtgaacacgagacttgggcatctatgactacctcacttacacttgcaaggtgaactacttaatttaatgattgaaaacttatcaagcacctaacacaaacgactgtttaacaaactacaaattcaaccactaaatctattcaccagccatccgtaaatttttctacctacatgcatttaaatgatggcttttacagtactgcttgtcataatctggtgtgacaagttttccttcaaacatccaaactagtcaacccattcaccagccatagataggattttctaccagtggaggcaagagatgaaggtctttacagtgctgcttatcatagtcacgtgtcccaggtattgctcctgtacataatctcagaaattcattcccagtaagacaatagtgagcaaatgctaagccttcatctactagttctgtcagattaggcattgatgctgacttagcaatgagctttcccttatctaca

SEQ ID NO: 6535 - DNA, 435 bp, Glycine max
  Clone ID: jC-gmle01810020d08a1
agaaaagctacaagagaagaaaaaaaaaaagagagaaaagaaaaaatttgttttataactttttaacttattgttcacttcttcttcttcttcttcttcaatatcttggttctttgatattattctattgagcaaaaaatgggagttccagagagagaccctcttgcacaattgagtttgcctcctgggtttaggttttaccccacagatgaggagcttttggttcagtacctttgccgcaaggttgctggccatcatttctctcttccaatcattgctgaagttgatttgtacaagtttgatccatgggttcttccaggtaaggcagtgtttggagagaaggagtggtacttttttagcccaagagacaggaagtacccgaatggttcacgacccaacagagtcgcgggttctgggtattggaaagcaacttgg

SEQ ID NO: 6536 - DNA, 350 bp, Glycine max
  Clone ID: jC-gmle01810020d08d1
cgtcgtcctttttttttttttttttttttttttttttttttttttttttttttttttttgttttttttttttttttttttttttttttttttttttttaaaaaaaaaaacccggggggccttcccaaaaatacccaaaaaaaaagcccaaagggaaattccctggggcaacaaaatgtaaaggggaaaaccccccccccgggcccgggggaaaacacccccaaacctacaaatacacttattttctaacaacattcctccataaaaacaaaaccttttcccccccccccctcttttcaagagggggaggcaaactacacagaacaggcatttgaccaaaaaatgcccccg

SEQ ID NO: 6537 - DNA, 461 bp, Glycine max
  Clone ID: jC-gmle01810020d09a1
tgaagattccacaacagtgggagggagatccaaaaagagagagtggaaaagatggcgcggttgatcacagtggtgtggtgcgcggtggcggtgctattatgcgccgcggccggtgcgtcgtgggtggaggaggcggcgaacccgatacgaatggtgtctggcgtggaggcggaggtggttcgggtgatcggggagtgccggcgtgcgttgaagtttgctaggttcgtgagcaggttcgggaagagttaccaaagcgaggaagagatgaaggagaggtacgagatattctcgcagaatctcaggttcatccgctcccacaacaaggaagcgtttgccctatactctctctgttaatcatttgctgattggacttgggaagaagttcaaaggacacagactaggagctgcccaaaattgctctgccattctaaacggcaaccacaagctcaccgatgctgttc

SEQ ID NO: 6538 - DNA, 521 bp, Glycine max
  Clone ID: jC-gmle01810020d09d1
gacctactcggtggccgccctttttttttttttttttaagcctgaaattcatgtatatgcaatgtaggaatcagaatctcactataaatatattacagaggaagtcatattactgatgtttttcatttaataagagtgcatgatgctatctctgctgacaaataacaattgggtcttttacttggtcaaatccatgctgaaatcccataggttttttgccaaatcagcatcagtcccctgtgaggttgttttggccacattactggctgaaaaatacttgccactagttcccttcacttgtgggtgcaatgctacatagcatgttgttgctgctccctgctggacatttttaagcacgagtcttgcaatagctttagttagaccgttcactggactgatttgacgggaaagattggtggcaattactcctggatgaagagaatttgcagaaatatctaccccatcttccttgagacgtcttgtaagttcatttgcatgtaaaatgttggcaagctttgact

SEQ ID NO: 6539 - DNA, 610 bp, Glycine max
  unsure at all n locations
  Clone ID: jC-gmle01810020d10a1
ggctgattccacagacacacaccgctttactattatgcaagacccttctcgccccggccctcctcccttctaccaccaaaacggcggccagcctcctccccccgccgcctccgccgccatcgccaccggctacccctacgctgcccaacaacaatactacaacaccacttaccctcctcctcgctcctacgcctcccgctccttcttccgcgctttcttcgccaccatgatctgcctcgccgtcgtcttcggcgtcgtcctcatcatcacctggctcgtcctccgcccctccctcccccacttcaccctccactccctctccgtttccaacctctccagcacctcccaatccctctccgccacgtggcacctctccttcctcgtccgcaacggcaacaagaagatgaccgtctcctacaacgccctccgctcttccatcttctaccgccaaaactacatctccgagtctcagctcgctcccttcaggcaggacaccaggtcccagaccacactcaatgccaccctcaccgncgncggcacctacctcgagcccaaactggatcgacatctcaacgccgagaggaacgccagctcggtcctcttcgacgtt

SEQ ID NO: 6540 - DNA, 409 bp, Glycine max
  Clone ID: jC-gmle01810020d10d1
ccaaataaatatgaatatctgcctccttttttgtctccatttccaattaacatacaatggccaattttccactaacaaagcttcaaaactccactgacggctttaaaaaggcaagcacacaatctaagggtgcggatcactatatacaatcttataaacttccaacaaacttccattgaaacctaaaccaagccgcataactttaaaccgacaaaagcatcaattacctttatttaataaaaccagaaaattaaatttccccccattaccaaaccttgggttttgaaaaacatcaccctcagaaaattcccgtccacgcctgacattcccgatctccgccgaccaaatgaccgggcctggacttggacaagacgccgacgggtactttggggaacagaaccttgggaac

SEQ ID NO: 6541 - DNA, 492 bp, Glycine max
  Clone ID: jC-gmle01810020d11a1
gaggattggatgcttgattgtgcactaagacaagttgtgacagagcttgcaccagctgagaagaggaaagtggcacttctaggtgaagcctgataaatggtattgccaacatcagcaccgacatgtgaaaccagagcgagaatccacagttcgtcagcatttggtcatgcaggcaaaattcaagcttgccgctgatggatgctgctcagtcattcgatggaacgtgcaaccatctattacctgaagagtgaagtttgcacaggaagcataaccgaacgtgcaaagagctatgttcatgcatgctcatcacacaaagtcattgggttggacatcttcacctatctgatacatggatcaactaatgagctccacgatgtacgggacttgctatgggaatacagagagcgtggaacttctgtacgggaagtcgtggtcggaattaactgtatgggtttaaatttggtcatgaacaatgtttatagaactttaatt

SEQ ID NO: 6542 - DNA, 509 bp, Glycine max
  Clone ID: jC-gmle01810020d11d1
aacagaatgccggaggcgtggataaccttgataacacaaatgtattggtgagtcaaatacagacatactaaagaaaacacacacttaaggttctctaaacatttttgtaaagtatatttaaacccgtacagctaaataccgagcagagatttccttactggagtttcacactcttcgtataacgattaccagtcccttagctattgaagctcattagtgcatccatgttttagatttgtggagatgcccatccgaagtcctttctgcgatgggcatgcatgcacattactctccggatgagaggggatgcttggcgtgcaggataacgcttacacgtgattgctggaagcaccttatatctaactagtcagcagcatccatcagatcctggcttgagtcctttttgaatgacctagtgctgaagaattgatgattgttacactcggtatacatcctgttgctggtggtggcaatgccatttcaaaggctttaactctaagtgccccttt

SEQ ID NO: 6543 - DNA, 645 bp, Glycine max
  unsure at all n locations
  Clone ID: jC-gmle01810020d12a1
aaagggagcaatggaaatcttaagacttccttttgtgctgatcaatcaaggtcttctcaggcaaatgatgtccgcaagcaaatcgttggcagcgctgttccagttcttaaaggcgaaaagttttccttgcggatactggtggaccattctattgttgaaagctttgctcaaggtggaaggacggttgtgacatctcgggtttatccaacaaaggcaatctatggagctgctaggttgttcttgttcaacaatgctaccgaggccactgtgacagcctcactaaaagtttggcaaatgaattctgcatttatacgcccattccaccctgatcagaagagttaaaaatttgaattggagatagaagagctatagtcacaaaggattggaatacatcttgggttggcaatttgtacttatcagttgtaatgtcctcccctgaataaccgacataaggttatggttcttgctcaaagcgcattccttcatttttgcccagttatgtttatcagaattnttggtgtaatnttatcatatcatgtgatatgatgcttacangagaatctgttcaaagaaatatgatgttaatggtatcccattctatgctaaaaatatttacttatgggaaaagtttggttttgttctgtc

SEQ ID NO: 6544 - DNA, 554 bp, Glycine max
  Clone ID: jC-gmle01810020d12d1
gacagaaacaaaaaccaaacttttccatatgtaaatatttttagcatagaattggataacattaacatcatatttctttgaacagattctcttgtaagcatcatttcacatgatatgataaaattacaacaaaaattctgataaacataactgggcaaaaatgaaggaatgcgctttgagcaagaaccataaccttatgtcggttattcaggggaggacattacaactgataagtacaaattgccaacccaagatgtattccaatcctttgtgactatagctcttctatctccaattcaaatttttaactcttctgatcagggtggaatgggcgtataaatgcagaattcatttgccaaacttttagtgaggctgtcacagtggcctcggtagcattgttgaacaagaacaacctagcagctccatagattgcctttgttggataaacccgagatgtcacaaccgtccttccaccttgagcaaagctttcaacaatagaatggtccaccagtatccgcaaggaaaacttttcgcctttagaaactgaacagcgc

SEQ ID NO: 6545 - DNA, 243 bp, Glycine max
  Clone ID: jC-gmle01810020e01a1
gtcgttttgttttttatttctgttatgacaccgtctcacaggacacgttgcattgcgcaggatggggagagacggtgagattgacggcggagtgcggcggagaggatgcacgttcaggcggaacgacttctttccggaggagtcgttcaagagttggggaaactacgctcgagcggtgctggagacgccgtggaggctgaaggatcgtgtggggacgcgatcggaggaccagacggagttggt

SEQ ID NO: 6546 - DNA, 422 bp, Glycine max
  Clone ID: jC-gmle01810020e01d1
agcgtcaggacttacggacgtactcacacgatgcacaactaaggtttggactaatacacacacatgctgatatgaataacatagaccgtatgaaattgtacggagaagcctattgcctagatacaacaacctttgaacactctaatcatatgaaactgctgaacgagatactttcggtcatgctgcttattgcaggttattgcacggcttgacaacgtccagcagatcgcttctaggtctggaacactagtgccgtggcataagaagcgtgtgacgacgatagcgcatgttgtgccatgagataccctgatgagaccacgatcctgataaatgaatctacagggatcgagccgatatggaatatcgcgatagcagttgataaagaaggtattcctgtgacacaaggctcggacgaaagtttc

SEQ ID NO: 6547 - DNA, 257 bp, Glycine max
  Clone ID: jC-gmle01810020e02a1
gtcttgtggtgttgtatttatggtctgacaccggttcacaggacacttggaatcgagcgggatgtgcagagacggtgagattgacccgaggcctcgaactcgatgatgcacgctcatgcggcacaacgttgttccgcctggaaatatgtcaccagtaagatgaacctcctctcgagctggagacagtcacgccgtggtggctgattgatcgtatggtgacactagccaacgacctgacgactgtggaggacatgaag

SEQ ID NO: 6548 - DNA, 183 bp, Glycine max
  Clone ID: jC-gmle01810020e02d1
ataaataattataatagggggcacccgaaaaacggagttctaaaacaaccggggaaaaaaaaaaaaaatacccaaaaaaaggggaaaaaaccaaaacacaaacaccaagagaaaaaatgacaacccaaaagacagaaccacggggacccaactattaagcaaaaccaaaaaccatttacaaaa

SEQ ID NO: 6549 - DNA, 479 bp, Glycine max
  Clone ID: jC-gmle01810020e03a1
ctctgtctctctctctccaccattgccatggatccttacaagctccggccatccagcgccttcaattctcccttctggactacaaattctggtgctcctgtttggaacaacaactcctctttaaccgttggagctagaggtccaattctgcttgaggattatcatcttgtggagaagcttgcaaactttgacagggaacgtatcccagaacgtgttgtccatgccaggggagctagtgcaaagggtttctttgaggtcacacatgacatttctcacctgacatgtgcagatttccttcgagcccctggagttcagacgcctgtaattgttcgtttctcaactgtcattcatgagcgtggtagccctgaaaccttgagggaccctcgaggttttgccgtgaagttttacaccagagagggtaactttgaccttgttggaaacaaccttaccgtcttttctgtacgtgacggcatgaaatt

SEQ ID NO: 6550 - DNA, 437 bp, Glycine max
  Clone ID: jC-gmle01810020e03d1
gtcgaatgtttctagttgttttacatgtcatttcttacagctgccacactcatagtgaactaaatattgtcacactattgatcatacgaaatggtacgaaagagtacgttgagtgttatggctacgtaaagaatatgtagaataacatataatacattcagtggaacttgagactggtcaagatgttgttgtgcacggtgtcagtcaaatgatctaggaggttttggtatgggccaacacctgtgacatgagcttgtacacagcagcccaagattgccaacatagccaaccttacattcttaactggcttgagctccaaattcttcaaggacttctcatgcttaccaaagcctatagggttgaagaaagtgccttctggataagctggctcatcagatcctccaagacccttttctagtcctaggaagtattgcttg

SEQ ID NO: 6551 - DNA, 573 bp, Glycine max
  Clone ID: jC-gmle01810020e04a1
gggtgaggatggtgaggacggtgaagaagaacaagctgtgattggattatggagtggcattgcttggttggtagggatgactgagttcattgctgtgttgtctgaatatgtggtggatacaattgaggatgcatcagattcgtggggtttgtctgtgagctttctcagcataatcttgctaccaatagttggaaatgcagctgaacatgcaggagcaatcatatttgctttcaagaacaagctggtgagaacttgggagagtgctataaacttttcacacttgccctcatttaacataatattcatattggccaagcaatattttttttaattaattaaaatgttaaactaaagtaatgccttgaccacaggacatttcattgggtgttgcattgggttcagcaactcagattgccatgtttgtggtacgatacacacacctttaatatgtacacggacactttcataatttcatttagttactttttgttcccttctttaatgaaagcttatgcaattacacaatataggtcccattatgtgtaatcgttgcttggataatggtatcgatat

SEQ ID NO: 6552 - DNA, 385 bp, Glycine max
  Clone ID: jC-gmle01810020e04d1
taggccggccgccgcccttttttttgtttttttttttttttcttttgttttttactttttttatttttttttttttttctttttctttttttttctttttcttccaagggaatatatatggtgctggcctttcaggggacccccaaatattttaaaagatggacaagccccctggtttctacctgaacggccttacaaagtccccccacaggatccccagggcaaacacgcccacagactgtgaattgtccaaaagtggaaggtcttcacagccccgattggggccccaaaaaatgtatttgggagatctttttaacaagggggcatccacttgcccaaacggaagtcccccggtgacgggtactccccccctgacattcacggg

SEQ ID NO: 6553 - DNA, 345 bp, Glycine max
  Clone ID: jC-gmle01810020e05d1
ataaagaaccgagaatctttcaatcatctgtgtagtagtaggaatagtaataattctcccaccggtcagaaaagtagcaaacaatttacaaagatagttaaaaagagaggcaacttaaccacacctaaaagaaaagtttgcatacgttaaattccacaaatttacagccagtctataatttgtttcagctatcttacaatattacagtaacccacatgcatctaccatcttttgcatccttagtgggactacactctatcagcaatattaagcatgtccttatatatagttgtgttgcttgctagctgttccacatagttagggacaaaataatatgtatacctc

SEQ ID NO: 6554 - DNA, 325 bp, Glycine max
  Clone ID: jC-gmle01810020e06d1
ggccgcccttttttttttttttttttttttttttttttataaaaatggtctagcgaagctaaacctgattttataaattaaactcaataaactcaaacgcatgtcctaaccaacgaagacataactggagcaacaacatgagtctcgattccaacaaataccgcaacaacttcacagctaaggctgcatcctaatgtcacaagtaccgcctattgtctaacttattctaggactagaatatttcaacatgtcattgctgtctctaaaggggaaaaacaagtgttattcacgaattccatcaagcaatgcaggcgctgaagttcaa

SEQ ID NO: 6555 - DNA, 541 bp, Glycine max
  Clone ID: jC-gmle01810020e07d1
tcgtcctttttttttttttttttttttttataaaaatggtctagcgaagctaaacctgattttataaattaaactcaataaactcaaacgcatgtcctaaccaacgaagacataactggagcaacaacatgagtctcgattccaacaaataccgcaacaacttcacagctaaggctgcatcctaatgtcacaagtaccgcctattggctaacttattctaggactagaatatttcaacatgtcattgctgtctctaaaggggaaaaacaagtgtcattcacgaattccatcaagcaatgcaggtgctgaagttcaaaaattgaagcctgcaactcattaaaggttacagtgtgacccaaagccctcagcaccacatatttcacctttcacattagtatggagaaccatcgccatatgagaccaagcctttctttccatctgggcttctggacgatgacctggacctgctgtctctacttgctcttggtagagattccacggatgacctggacctagacctaaaccgggatttggatggact

SEQ ID NO: 6556 - DNA, 473 bp, Glycine max
  unsure at all n locations
  Clone ID: jC-gmle01810020e08a1
aacggcacctacttacgcagtacggccttactctctcttgccttgctgtctttgccttcgttccacccacacacaagttcatctttggcttgcaagtactaccaagatgtctgctaataaccccacaatggcacctaccagagaaccgaaggcagcacatgcggccaccaacggcgacgcagagcaatacttgcaagctggtcagggaggcagtcccattggacgcggcatgtccatcaccctaacgccggaacaattcgagcagctgtacttgcagcctggaggtaaaggaggaaagggagatctttcgaagcgcttcggtaacccgactccgctcggaatcgctggcttcctgctgtcattgacgccattatcaatctacttgatgggattcggccagactgctgccactncggccacatcgcanattggcgcatactacgcccttggtggagtctgcatgaatttggctg

SEQ ID NO: 6557 - DNA, 497 bp, Glycine max
  Clone ID: jC-gmle01810020e08d1
aattaacagttattcttttttttttttttttttttttttttttttttttttttttttttttttttttttttttgggtaaaaaacttttaaaaggtttatggcccctggggttttaaggggaaaaaaaacccagggggaaaaaaaaaaccccggtaaaaaaaagaagcctttttaaaaaaattctcgccatttgaaaaaaggaccctaatgggaaacgatgccgggaactaaaaatggaggggggggatgcaaacttgcatatgggcacaacctgctctaaatggtcactcctcaactgtggttgtgtctccacagaggaatccataactttaccattgaaaggctggatctgcctttgattctgctctaatacttctgcaacagtttgaagatcactggctgggtttatgccagaaccttgagcaacatcttgcattgtgtatattactgtgtcgctgtcaaattcaagatatacgcctgaatgatccttcatagag

SEQ ID NO: 6558 - DNA, 401 bp, Glycine max
  Clone ID: jC-gmle01810020e09a1
ctttcatttcatttccgttttctctccaaaaacgtctctctctctctctctcttttccctttaaacgccgaccaacgacacgacaccgtttcgatggtggtgaagatgatgcggtggaggccgtggccccctctcgtctcgaagaagtacgaggtgaagctagtcgtgaagacactaactctccagggctgcgatctggtgcgcacgtgcgcagagaaaggtttcgtgctccagattaagtggaagggtcccaaacttaccctaagctctctgcgacgcaacgctgttgctagaaacttcaccaaagaggtgcaccccgagcaaaacgaacgacgtcgttttgtgggacgaggagtttcacgcgctctgcactctcaacgcgtacaaagacaatgcctttc

SEQ ID NO: 6559 - DNA, 354 bp, Glycine max
  Clone ID: jC-gmle01810020e09d1
caccacaataagccattgaaatataaatggactgcacctgatattcgtaaattatatgaattcactaaaacaaaacaaaggtaaaaacaactcaaaatttcccaacttttttcccagtcacatctatttaaatgtcaaaatagtcacactgagacatcattatcgattgcttgattgctttttcacacgaactgccacctgccacaaacttacttcatctggacaattccagcactgaccagcttttggatcttattcatcaccattggattcttcgtgtgtccctgtgcaaccttgggattctcctggaaactaatctatacctgttatataacagggtctcgaaggatgccc

SEQ ID NO: 6560 - DNA, 565 bp, Glycine max
  unsure at all n locations
  Clone ID: jC-gmle01810020e10a1
acaggcttacccttttgcttcttctctctctcaagagtttccactcaaaccagatagatcacaacctccaaaacacaacaccacaaggaaacaaaacaacccattgagagcttgcacaactctcatggtagtagtagcactactacttcacacactctctctctgagtgcctcacaccacagattctgtgatatatataccaatggaggccctcaatgctgctggcttgacccctctatctgtgctctctgatacaaaaacaacaagaactaaacacccttctgtttctgtatgcaaagtctcaaacttttccacctcaaccaacaaaaaacaaaccttgctgcaaagttgcatatcaaaaactttgcatggggggctgattcttgcagcttccgttgtaaatggtggagctgccacagctttaacgtacgatgaagccctgngacaacctttgagcctccctggtgctggggactttgatgtgaacggttttgtggagagtgtcactggctttgcagctgaaaaccctgcaattcttgctgggggagtagctgttttggcagtg

SEQ ID NO: 6561 - DNA, 545 bp, Glycine max
  unsure at all n locations
  Clone ID: jC-gmle01810020e10d1
gaaagattaaatgttatactaaatctcaaaataactacaatgttaacttgacacctacctctacaacacatccatcaattacaaaaagtgtaccgagtagcacaaagtggaaggataatcataacaacttcaaaattatacaacttatgtcacggatcttatctgcaaattaagatgcatgactatttctgataggattatagattgtagagttgtacacctcttgatacatgctggatatttggataattgatttgccttccatggaattctgttcaagattaaaagaagtgaaggtctagggctgtgaaggggtaggagatgttggaggcttgaaatctggataatatgggtatggtgaaagtggccttggttgcacaggaagtgattcttctgccttgacttcagttttgggcacagagtttacttcaggagctactgcatccactttgggctcgggagttgctactgcttcagctttggactcgggagtagctactgcntctctgacagtgctatcagctgtagcaagctctgaacttttc

SEQ ID NO: 6562 - DNA, 564 bp, Glycine max
  Clone ID: jC-gmle01810020e11a1
agcagcagagtcgttgaatggggttaaaatggaattggtggatgctgcattccctcttcttaaaggtgttgttgctacaaccgatgtggttgaggcatgcactggggtcaatattgcagtgatggttggtggattccctagaaaagaaggtatggagaggaaggatgtgatgactaagaacgtctccatttacaagtcccaggcttctgcccttgaaaagcatgctgctgccaactgcaaggttcttgttgttgctaacccagcaaacaccaatgcattgatcttgaaagaatttgctccatctattcccgagaaaaacatttcttgtttgactagattggaccacaatagggcactgggccaaatttctgagagactgaacattcaggtttctgatgtaaagaatgtcattatctggggcaatcactcatcaacccaatatcctgatgttaaccatgcaactgttggggagaagcccgtccgcgagcttatagctgatgatgcctggttgaatggtgaattcattactactgttcaacaacgtggtgctgcaattatcaaagc

SEQ ID NO: 6563 - DNA, 524 bp, Glycine max
  Clone ID: jC-gmle01810020e11d1
gcgtaatagcagtgcataatactctacgtatgagtttgcacgcttgggcatcccacatacatcaagaaatcttgtacagccaccacaagcacagcaaaaagttctagccataaaaaaggggcactaacacataaaattagaggactgatccaaaattcaatatgcggaccatgggctaattgcatgactaaaactgtaaagctcaaatatactatcctcctaaaaggattagatgttgaaatacaagtaattccaatgaaagacaaactctctcgagtgatagttccttggaatcttagaaggagcattatgcaaaattgaagctacacttctgtgggcaaaccatgggaacctactaacaaggacagtagccaataaggagcgatggtctctaatttaggcatgagtaagccaatgccttctcctcagaaagctcttctgcggtcaagtccaacttcttcctagagaactcatcaatgggaagtccttgaactattgcacattccccattggcacaagtgaca

SEQ ID NO: 6564 - DNA, 601 bp, Glycine max
  Clone ID: jC-gmle01810020e12a1
agcagcagagtcgttgaatggggttaaaatggaattggtggatgctgcattccctcttcttaaaggtgttgttgctacaaccgatgtggttgaggcatgcactggggtcaatattgcagtgatggttggtggattccctagaaaagaaggtatggagaggaaggatgtgatgactaagaacgtctccatttacaagtcccaggcttctgcccttgaaaagcatgctgctgccaactgcaaggttcttgttgttgctaacccagcaaacaccaatgcattgatcttgaaagaatttgctccatctattcccgagaaaaacatttcttgtttgactagattggaccacaatagggcactgggccaaatttctgagagactgaacattcaggtttctgatgtaaagaatgtcattatctggggcaatcactcatcaacccaatatcctgatgttaaccatgcaactgttggggagaagcccgtccgcgagcttatagctgatgatgcctggttgaatggtgaattcattactactgttcaacaacgtggtgctgcaattatcaaagctagaaagctttcaagtgcactatcagctgctagtgct

SEQ ID NO: 6565 - DNA, 578 bp, Glycine max
  Clone ID: jC-gmle01810020e12d1
gcgtaatagcagtgcataatactctacgtatgagtttgcacgcttgtgcatcccacatacatcaagaaatcttgtacagccaccacaaacacagcaaaaagttctagccataaaaaaggggcactaacacataaaattagaggactgatccaaaattcaatatgcgggccatggtctaattccatgactaaaactgtaaagctcaaatatactatcctcctaaaaggattagatgttgaaatacaagtaattccaatgaaagacaaactctctcgagtgatagttccttggtatcttagaaggagcattattcaaaattgaagctacacttctgtgggcaaaccatgggaacctactaacaaggacagtagccaagaaggagcgatggtctctaatttaggcatgagtaagccaatgccttctcctcagaaagctcttctgcggtcaagtccaacttcttccttgagaactcatcaatgggaagtccttgaactattgtccattccccattggcacaagtgacagggaatgaatagatcagtccagcttggacattgtaggaaccatcagaatatact

SEQ ID NO: 6566 - DNA, 441 bp, Glycine max
  Clone ID: jC-gmle01810020f01a1
gaagaaagtaaaaaaaataagaataataaaagataaagataagtaaaagaatgaaaaaaatgaaaaaaaataataatattaaaggagaggaatcgaaacaaaaaaaataaggatgaatagaaaagaaaaaagaggagaaaaaagaaaatagaaaattgaaagggaggaaagtgagataagaggaggggaaaaaaaggagagaaataagatagaaaaaaaatagagagagaaaaaaaaaaaaaaagagaggaaataaaataaatgagaaaaaaaatataggtaaggtcatgaaaaggatgatgataggtggagagtaagtataataatgtttgagaagattactggaaagccgacttaatgtggaggaaacagtgacaaaaaagagtagaagatagaaaaagacaagattaagatgacagcaataaaggatagagaagtaaa

SEQ ID NO: 6567 - DNA, 332 bp, Glycine max
  Clone ID: jC-gmle01810020f01d1
atccttaaaataaaaaaccaggggtttataaaaaaacgggactttttttaggttacccccccgcaaaggcgtcttccaaggcctttgggggggcgaaaaggggggggggccccttttgggggccccaaggttcttcccaagggcggaaaccccaagccccaaaaaccctttacccaattggggcacaatttcccggggcccttggggccccaaaaaaaccagggggtggcccggggagggggcaaccatctgggaccccgccgggtcagggattgaactggggggaaaaacttcgggggagaaaccactggggagcccccctgggggggccc

SEQ ID NO: 6568 - DNA, 478 bp, Glycine max
  unsure at all n locations
  Clone ID: jC-gmle01810020f02a1
tgaagtcttgcccttctctcttcaactccaaacacaagacatcatcatccatggctgcctccgtctccactgtcggagctgtcaacagagctcttttgaacctgaatgggtctggacctggggtttcagctcccagttcatccttctttgggagcagcttgaagaaggttattggctcaagggtccccaacacaaagatttcctctggaagcttcaagattgttgctgtagaagagaagaaagagattgaagagacccagcagaccgacaaggacagatggaagggtcttgcctatgatatctcagacgaccaacaggacatcacaagaggaaagggtttggttgactccctttttcaagctccacaggatgctggaactcactatgctgtcatgagctcctacgagtaccttagcactggacttcgncagtacttggacaacaacatggatggattntacattgcttcagcttttat

SEQ ID NO: 6569 - DNA, 500 bp, Glycine max
  Clone ID: jC-gmle01810020f02d1
agcatcacaaataacaaacgtattcacacgtcccacaactttgttttcgacgaatacacacatcaactaattagaatattataaccgtaagatattatttgcagaagcctattgtctagttacaacaacctttttacacttcaatcatttgaaactgctgtaagagatacttccccttttgctccttcttccaccttattccactgcttgtcaacatccacagaacttttcttgctctcgaacacttttgccgtgtcataagaagcatgtaaccccaatagcacatagtataccaagagaaaccctgtccagaccccaaacctgataaatgaatctttatcaatagagccaagaaggaatatgttaatagcaatagataaagaaggtagccatggaaccaaaggcaccccccaaagtttcggttgctttgcctgtggaacaaaaagccaaagacccccagtccctaaaatccacaacggtacagaaactgcatacccaac

SEQ ID NO: 6570 - DNA, 573 bp, Glycine max
  unsure at all n locations
  Clone ID: jC-gmle01810020f03a1
gttcattctctttgcgcagttccctacctctcctttcaagatgcagatcttcgtcaagaccctcaccggaaagaccatcacccttgaggtggaaagctctgacaccatcgacaacgtcaaggccaagatccaggacaaggaaggaattcccccggatcagcaacgtctcatcttcgccggaaagcagctcgaggacggccgtaccctcgccgactacaacatccagaaggagtcaacccttcaccttgtccttcgtctccgtggtcgcatgcagatcttcgtcaagactctcactggcaaaaccataaccctagaggtcgaaagctctgacaccattgacaacgtcaaggccaagatccaggacaaggagggaatccccccagaccagcaacgtctcatcttcgccggaaagcaacttgaggacgggcgcaccctcgccgactacaacatccagaaggaatcaacccttcacctcgtcctccgtctccgtggtggcatgcagatcttcgttaagaccctcaccggcaagactataaccctagaagtcgagagnctcgacaccatcgacaacgt

SEQ ID NO: 6571 - DNA, 319 bp, Glycine max
  Clone ID: jC-gmle01810020f03d1
catgccaaataggtttatttatttaagtgctaacacatgcctacggtatttattgagatagctaaacgagacgcatgcatggagtaatgggtctcaaaaaaaattgcgctaaatggataaatacaaagaaattgatcgaggatcacaaccggagggcactctttgcaagattgcaactctcacaatcatactggggtagagaacaccctttaatggccagggcttatgcttagacgagatgccttctttaggccaaagcacggggagccccaaaccactgagatagccaaacactgtggatctcatgggtgacccctgg

SEQ ID NO: 6572 - DNA, 522 bp, Glycine max
  Clone ID: jC-gmle01810020f04a1
tctctctctctctctcgctctctgatctgttttgtttcaggagccacccgctcctgcagttttcttttgcggttggagtggaaggccattctcgcaacgtttgagttcagcagatccagaatttttcagaaaacaggtttaggagaatgaagaatacggaacgaattgccaatttggctttagcaggtttaaccttagcgcctcttgttgtgaaagtagatccgaatttaaatgttattttgactgcttccctcactgtgtttgtgggctgttaccgctccgttaaaccaaccccaccaactgagacaatgtccaatgaacatgccatgcgttttccctttgttgggagtgcaatgttattgtcactcttcttactcttcaagtttctatccaaggacttggtgaacactgtattgacaggctacttctttgtacttgggattgttgccctttcggaacattattaccatttattaaacgttttctgccaagcattggaatgaggacctcatagtctggcgt

SEQ ID NO: 6573 - DNA, 460 bp, Glycine max
  Clone ID: jC-gmle01810020f04d1
catgatccaaaagaatagtcaaataaatattattttacagacaaagatttgtttacaccaacctattacaaaaatttagtccttttttttttctctttgttttcccgtttgtgtgagtaagtatatatgactaggaattaattgattaattttttaattaactagcagggaaccccattttgattattattttcccaataataagcgagaaaggtcttggcagcatctaagctagggaaataagtgggttcaaggaatatctgagtgaacccattatcggcctcggagctccccatcataaccgtcacaacctgcttataggcgtagaagaacctcttcatcgccacctcaatcgcctgcatcccctgcaaaacatgaaccttcttgaacccgtttcttttctctttctccgagtaaacctttatcgtcgtctgcatcatcccgggcccacccgtggggt

SEQ ID NO: 6574 - DNA, 471 bp, Glycine max
  Clone ID: jC-gmle01810020f05a1
gtggggtttggtggagagagagaagcctggggagtataattggggagggtacgttgaactcatggagatggcgaagaagcatggcctgaatgtgcaggccgttatgtcatttcaccaatgtggcggtaacgtcggagactcttgcactattactttacccaaatgggttgtggaggagattgattatgaccccgatcttgcatatactgatcaatggggaagaagaaactatgaatatatatcacttggatgtgatacttcggcagtgctcaagggccgaaccccagttcaatgttatgctgatttcatgcgtgctttcagagacactttcaagcacctccttggtgacaccattgtggaaattcaagttgggatgggaccggcaggtgagctgcgttaaccttcttacccagagcaaaatgggacatggaatttccaggaattgggtgtttcaatgctatgacagttatg

SEQ ID NO: 6575 - DNA, 588 bp, Glycine max
  unsure at all n locations
  Clone ID: jC-gmle01810020f05d1
actactcactggtcggcggtcgcccttttttttttgtttgttttttaagtgactacttgtacaaagtagagtcacttgtaagaaaatacgcccccaaaggcaatgatgacgtccacaatatataagggtaacgtatcgaagatttaggtgcctagaatctagaacgacaatctagtacaaaattttacgtagccctagtaccgaaatgccggtgaacactgactgaagctcttgcacaatctgatgaagatccagtgtctgaccagaagatctcgatagggaacttccagcagtcaagaactacaccatgcatctggacattgatcaatgtagcttcatcctctctagttatggtgggtataagagccgcaggcttaaagggtcccactgtaggtaccatgctgaaaacaggggttacattctgaactcctagcaaggacattactctcaccagttgttcccttgttactgcatcgatgcccttgacgatctcgtccaaaagaaattctcggaaaaaattccccctgtcagacaacatanacgctaaagctgcccttggttgcactggctgctgtgatagaggaatga

SEQ ID NO: 6576 - DNA, 506 bp, Glycine max
  Clone ID: jC-gmle01810020f06a1
gtggggtttggtggagagagagaagcctggggagtataattggggagggtacgttgaactcatggagatggcgaagaagcatggcctgaaggtgcaggccgttatgtcatttcaccaatgtggcggtaacgtcggagactcttgcactattcctttacccaaatgggttgtggaggagattgataatgaccccgatcttgcatatactgatcaatggggaagaagaaactatgaatatatatcacttggatgtgatacttcgccagtgctcaagggccgaaccccagttcaatgttatgctgatttcatgcgtgctttcagagacactttcaagcaccttcttggtgacaccattgtggaaattcaagttgggatgggaccggcaggtgagctgcgttacccttcttacccagagcaaaatgggacatggaatttcccaagaattggtggttttcaatgctatgacaagtatatgttgagtagcttaaaagctgctgctgaagctg

SEQ ID NO: 6577 - DNA, 499 bp, Glycine max
  Clone ID: jC-gmle01810020f06d1
ataaaaatgggctagcgaagctaaacctgattttataaattaaactcaataaactcaaacgcatgtcctaaccaacgaagacataactggagcaacaacatgagtctcgattccaacaaataccgcaacaacttcacagctaaggctgcatcctaatgtcacaagtaccgcctattgtctaacttattctaggactagaatatttcaacatgtcattgctggctctaaaggggaaaaacaagtgtcattcacgaattccatcaagcaatgcaggtgctgaagttcaaaaattgaagcctgcaactcattaaaggttacagtgtgacccaaagccctcagcaccacatatttcacctttcacattagtatggagaaccatcgccatatgagaccaagccttttttccatctgggcctttggacaatgacctggacctgctggctctacttgctcttggtagagattccacggatgacctggacctagacctaaaccggga

SEQ ID NO: 6578 - DNA, 550 bp, Glycine max
  Clone ID: jC-gmle01810020f07a1
gatggctttaggtgttcctgctcttccgttgacatacgtggctcacgttctggcagttgttgccagcgtcttggtcgtggtctgggtcgtcaatttcaggggtggcttggcttgggattctgataacaagtccctcatcttcaacattcatccagttcttattgttattggcttactagttcatgggggtgaagctattataagttacaaagcttttcccctaaagaaggaagtgaagaaattgatacaccttgttttccatgccatcgcattaatacttggaatagttggaatttatactgccttcaagtttcacaatgaaagtgggattgccaatctctacagcttgcattcatggcttggaattggggttattgtcctttatggcattcagtggatatatgggtttgtgatctttttcttccctggtgggactccagacattagacgcgcctaacttccttggcacgcgctatttgggcctgttgtatttgtcttggctgtgggcactgctgctcttgggtttctggagaagctcacttttcttgag

SEQ ID NO: 6579 - DNA, 411 bp, Glycine max
  Clone ID: jC-gmle01810020f07d1
tgctggcgctagcgaccggtcacggaacagggtcgaggagcgaccctgctcggtaggccgcccttcgtccttttttttcttttttttgtttttttttttttttttttttttttttttttttggtattttttttttatttttttttttaaaattttttaaagttaaaacaaacaaccaaacaaataacacacaaaccaaaaacaaaaattgataagaaaacaaacggaaaaagctacaccgaaacaaaaagacaaaaaaagagataaaagaactgggccaaggcaaagaacaactcacaaaacgtcaaaaaagggcggacccgctaggggagctgaggcacgacgcgagggggggccggggggcccggaggacacgggggggatcccaggactggaccggatacctggggaa

SEQ ID NO: 6580 - DNA, 432 bp, Glycine max
  Clone ID: jC-gmle01810020f08a1
gatggctttaggtgttcctgctcttccgttgacatacgtggctcacgttctggcagttgttgccagcgtcttggtcgtggtctgggtcgtcaatttcaggggtggcttggcttgggattctgataacaagtccctcatcttcaacattcatccagttcttattgttattggcttactagttcatgggggtgaagctattataagttacaaagcttttcccctaaagaaggaagtgaagaaattgatacaccttgttttccatgccatcgcattaatacttggaatagttggaatttatactgccttcaagtttcacaatgaaagtgggattgccaatctctacagcttgcattcatggcttggaattggggttattgtcctttatggcattcagtggatatatggggtttgtgacctttttcttccctggtg

SEQ ID NO: 6581 - DNA, 460 bp, Glycine max
  Clone ID: jC-gmle01810020f08d1
gaccctatgtaacgtctaccatttgtattacaaatgaggaaaaaaatattacagctgggttccagatggcaaagtaatcgtcaatcacaggtatcaaggtgcaacaaattacttgcttttgttaggagcaggattgaaccccatgtatcttcagtaaaaaagcaattaaacctttgatacaacaattacaaggtttttaaatagaataatatgcctcgaaaaaagacagtttacacaacatctagctggaggaaggggaagtgttctttgattagggacccatcatatcccctgggttcaagaggttatgtattttggcctgtaatatgagtggactttaatctttttgttggtggagacatgaaaagctttctaatggaacctacaggatcatccaccttaacaatgggcatagatgatggagatctattcggcgaatgttgcaattgattcttctgat

SEQ ID NO: 6582 - DNA, 542 bp, Glycine max
  unsure at all n locations
  Clone ID: jC-gmle01810020f09a1
tgcaaagccaaagcacacttctggaagactttcttggacaatctttaatgctggaatatggaaatggatctgctgaaaattctgggattggggatgttagtagtcaggaggaactgaaattgtattatcaggctcaaaagcttataagtttatgcggttggaaactacgtcctctaccttatgtagttgattggaaggatatgtcagatcagtctcttaataatacaactaatctagttgtccattctgctggaaccaatgaacatttgaaaacagatgaaagttccaaggattctatcggggaacaaatggatcccaattctgcagtattagattgctccctatgtggagccactattggattgtgggcattctgtacagttccgcgacccgtggagtcaatcagattacgtgggatatgctgaagtgaaacgtgaaaatgctgatcttgaaattaggcagggtgtaaataataccatgcatgatgttgcaaatcattaaaggatacttnttcaggtttaatatgacaattgcagggggtc

SEQ ID NO: 6583 - DNA, 528 bp, Glycine max
  Clone ID: jC-gmle01810020f09d1
gcggccgcccttttttttttttttttagtttgaatgattcagtgttcgattaatctgactagatgctacaatggctaatcttaagagcctactggtctacaatttggctaaaacatgctgttcctgtacctcacaccttgggattacctggtcgatgatgcttatacgttcttcttggcgagatagccagatagatcacctaggggtacgctgaatggcataccggtgctttcaagcaccagcgccagcataatccaccagccacaaatgcatgtgacaaaggcgaaagccccttccgctcgtagaagcgaggtgggatcgcggccctctccaatgcggaagtatccagctgccaggaggaagaaagcaacgttcagggtgaagaagagaatcacaaaggtgacgttggtgcggagggatccgagcatgtagatgaagaccatgacgccccaaatcaagagataaactgcaacgctctctgcgaataccggatttgcactaccctcggtagcacttcccgtagcactg

SEQ ID NO: 6584 - DNA, 553 bp, Glycine max
  Clone ID: jC-gmle01810020f10a1
gggcacataccaaagatgagaaaaatgatcacactcttgttgttcatggcttggctgatgcttgtagattcgtttgtaatgatgcaaagtttctctcacgtggcataatgaggttggatgctcgtgcacgtcaagatgttgcttttcttgggactgaatttctcaaacttgatgctcgggcaagagaggatactgagaaaattgaccgtgatgtcaaggaaaaagctagccgacttagtcatattgctactatattgaaggataaagctcagtccagattaaaaaatgctgctgatgagcattggagtgatggggccttagaggctgatttacgtcttgctgacttacgtgctaagcaacgtgcgatggaagatccccttatggccttggagcttatcaaaaacatccacaacaggatggtgagcaagatgtataactttccacttcgcagagataaaggatccctttcagaaaataatggtagaggtcgaataatgcttgaaaagaatggaaaaaccccaaattcctttccttgggatgtgaccacagaaag

SEQ ID NO: 6585 - DNA, 503 bp, Glycine max
  unsure at all n locations
  Clone ID: jC-gmle01810020f10d1
gtagcagaagcaatatgagttctttcgtacaaacgagtataatcacaaatgtgcatctaagatctatgaatatgagcaaagaactgcattttatgatgcacataaacagcatattggcatcttacactagcagtagtttctttctagggattgcgtgggttaatcctatactagttagtatacttgggaggcaactatgctgtacagtgcaatgtttaaaatatttctcatttggtatcttcattatcagattctatgcttcctttttcttccatggtgttttcatccatcatgaacctccagctatcgccttcctctatttcccattgttttttcagttcataaatagctttggatgctgcggcagcaatggctgggttgctatcttctgccagtctctgtaatgcccccatccctgcatttccaagagtccacatggatggtgctgctgccaatgcattcgctaaagcccgctagtgctgacatcangggaactagaacac

SEQ ID NO: 6586 - DNA, 577 bp, Glycine max
  unsure at all n locations
  Clone ID: jC-gmle01810020f11a1
caaaatttatgcagctgatcaatctctttctctctctatctgtctcttccatggaatggtagatttgaggtgaaaaggttccacattggtcaggttccgatctcacaatggggaagtcaccaggaaaatggatcaaaactgtattgtttgggaaaaagtcatccaaatcaaatatttcaaaaggcagagagaagcttgttaatcaagaagaaggagttgtagttacctccaaggtgctagaaactggtttggctttagaaccaacctccgatactattgccagacatgaggaagacctagagctggaaaatgaagaagcagaaaatgttatacctgggaatcaagaaatagacacagtgggatcaattaatgaagatgctgcactagatccagagaaaataaggctggaagaagctgctaccaaggcacaagctgctttcaggggttatttggctcggagagcatttanggccctaaaaggcattataaggtttgcaagcactcatccgtgggcacttggttaggagacaagctgttgcaacattatgctctatgtatgggattggcaagtttcaag

SEQ ID NO: 6587 - DNA, 540 bp, Glycine max
  unsure at all n locations
  Clone ID: jC-gmle01810020f11d1
cagaaatcatgcttaaagcataaattaaatttaggtatagttgcatcatgcaaaaactagaaacctataatgtacaaatcaccctcaaagcccaaaatgcagcaaatgaagaaataacctgaattcaagcacacctatagtcccatcaattcaacaattctcatcaaagatacatataaaccacacagtttcaacctcctcatgttcctctccagaacatctgccttcctcaaattaccgcctccactctgcttgaattacctttccattcccatctctagaagatgatacagttctgtcacttctgtggccacctttgcctcctgattgaacttgtctcagtgtcctaggtgaatgcgaactaattttgcagttagttgaggatggcagagaatgtcgccgagtatggttgtttttttcacttccatcttgtccaaatctcggggatccttgtgccttcaactttgcctttgcagattcagttgctgccatgtaacttgtagtgctggactattctngataccattctctgacgttcct

SEQ ID NO: 6588 - DNA, 599 bp, Glycine max
  unsure at all n locations
  Clone ID: jC-gmle01810020f12a1
ctctgctctattttggaacgtctcactccccgagatgctgctcgcgtctcttgcgttagcagtgtgatgtacatactgtgcaatgaagatccactgtggatgagtctatgcctaaaaggagcatctggtttccttcaatacaaaggctcttggaagaaaactgccctgcataatgagaatctgctagacaaatacaaagagtacagtcaaggacctttacattttgacgggttcaactctttatttttgtacaggagattataccgctgccataccacattggatgcattttatgcagatactggaaatgtgaaaagaataaaagacatcccgctgaaggacttttataatgagtatgatgcaaagaaaccggttatgctcactggattggctgatacatggcctgccaggcataaatggacaactgatcagctgttgctaaactatggagatgtagcatttaaaatttctcaaaggagttcccggaagatctccatgaagttnaaggattatgtctcttatatgaaagttcagcatgatgaagatccctttgtatattttgatgaaaagtttgtgaagctgtacctagcttattgaag

SEQ ID NO: 6589 - DNA, 544 bp, Glycine max
  Clone ID: jC-gmle01810020f12d1
tttttttttttttttttttttttttttttttttttttttttttttttttttttttttttttttttttttttttttttttttttttttttaaattttttttatttaaaaatttttaaaaaaaagaaaaactaaacaaaaggggggaaaaaaaaaacaggaaaactaaaacaccaaagggatagactgaaaagggggaaaaacaacaaaaaaaaaaaaaaaaaaaaaaaaaagggacaaaaaaaaaaaaaaaaaaaaaaaacctcataccacgaataaaaaaaaaaaaaaaaaaggaataaaaaataagagggggggccaaaaaaggaaaacccgccgaaaaaaaaataaaaaccccccaagggggaaaaagaactgataaaatttgaaaaaccccccacaaaagggaacaaaaaacaccccaaaaaaaagggggaaaataatcaccacccccagaaaaaaaaagcaccaaaaaaaaggtaaccgaaaaaaaaaaacttcaacggcgaaaacttaaaaagggcccccaattttaacaccccccggg

SEQ ID NO: 6590 - DNA, 554 bp, Glycine max
  Clone ID: jC-gmle01810020g01a1
ctcgagccgctcgagccgattcggctcgagcttgaatcttcgttatccttctttttttctccttgaactcgaatattcactatggcagatgaggtggttctgctagatttctggccaagtccatttgggatgagggtcaggattgcacttgctgaaaagggtatcaaatatgagtccaaagaagaggacttgcagaacaagagccctttgctcctcaaaatgaacccggttcacaagaaaatcccggttctcatccacaatggcaaacccatttgtgaatctctcgttgctgttcagtacattgaggaggtctggaatgacagaaatcccttgttgccttctgacccttaccagagagcttaggctagattctgggctgactttgttgacaataagatatttgatcttggaagaaagatttggacatcaaagggagaagaaaaagaagctgccaaaaaggagttcatagaggcccttaaattattggaggaacagctgggagacaagacttattttggaggagacgatctaggttttgtgatatagcacttatt

SEQ ID NO: 6591 - DNA, 477 bp, Glycine max
  Clone ID: jC-gmle01810020g01d1
aacaccgaagttacattcaaatttactccatcagtcagtaccaacacactataaactatgccttgtgatgtatgagagcaaacagaactcaaaaggacaactgaatgcacgaggttccctcccacctggtgggatctaaaaaggatacacatataaagatttactcagttcaacacaaaatggtaccttgagtccacatagctctcaacatcccagagaaaagaaccaaatgtcacagcctctaaaacaagcttctttaaaccaccaaagctaattttgatgttttcatccttagagactgccccctcaggtgttacaacaatttcaggtcttccaaacaatgcttctgtgtgcttctcgatgatgctgacagcctctttggatctaattgttgcatatctttgtagtgtatcaccatcaaaggacatcacgtagttacgcaacctggttgccttacaccataggcaaaaccaccgg

SEQ ID NO: 6592 - DNA, 537 bp, Glycine max
  Clone ID: jC-gmle01810020g02a1
gaaatagaatcgtcgattttctctttctctgactctagggtttcattattttcttctgtagatccatctatctagcttcggagctgcaaatggacgtcgcagtcactgccttccggtcaccgctgatcatcctccgaagaccggtcaacgagtctgcctcagctcggttcggttccacttttgggttttccagaaagcaacggttcagttcagtatgtatccccaaacacaagcacaagcaaggtcgtagaagagggtttgtagttagagcttctgcatcctcatctccggagtcggatgatgccaagattgctcctcttcagtttgaatcctcaattgggcagttcctttctcagattttgaaagatcatccgcatcttgtgcctgctgccgttgaccagcagctccagcaactccaaactgaccgcgatgctcatcaacaaaacgaacaaccttctgcttcaaccactgatttagttttgtacaggagaattgctgaggtgaaggctaatgaaaggaggaaagctctggaagaga

SEQ ID NO: 6593 - DNA, 444 bp, Glycine max
  Clone ID: jC-gmle01810020g02d1
tttgtttttttttttccttgcgaccaaagaacttgatacaaattctcacaattggcaaccaatacagaagctgttcataaattagatttgttacttagtgtactaccttgtgtcgaaggattacattcacttggttgggtgcgtttttttcttggcgaagaacattacaacctttgaaggaaatgatgactttttcttctttttgttcttatttgaggctgattcagcttcagtgttattggaaggaacttttccctttgggcttgatgaatcatgtgcaggctcagttggatcagaagtttgttcattcaattcagtagccttctcttgatgcttttgttcaaccctccatgttcttaattcatgttctacagctaactttccttcattggccttttcggaattcccagttgcaattctcacagaaatttttttactgacaac

SEQ ID NO: 6594 - DNA, 600 bp, Glycine max
  Clone ID: jC-gmle01810020g03a1
aaaaaaaatagtgagaaaagagggaaagtctttataaggcggtaagactcgccattaccacacgaagtgatatagcgttgccattctcatcctcttctttctctctctaccattgccatggatccctacaagcaccggccatccagcgccttcaattctcccttctggactacaaattctggtgctcctatttggaacaacaactcctctttaaccgttggagctagaggtccaattctgctggaggattatcatcttgtggagaagcttgcaaattttgatagggaacgtatcccagaacgtgttgtccatgccaggggcgctagtgcaaagggtttctttgaggtcacccatgacatttctcacctgacatgtgcagatttccttcgagcccctggagttcagacgcctgtaattgttcgtttctcaactgtcattcatgagcgtggtagccctgaaaccttgagggaccctcgaggttttgccgtgaagttttacaccagagagggtaaccttgaccttgttggaacaaccttcccgcttctttgacgtgatggcatgaagttccagatatgggtcatgctctaacccaatccaaga

SEQ ID NO: 6595 - DNA, 424 bp, Glycine max
  Clone ID: jC-gmle01810020g03d1
acaatgacgaacgatacatattgcacaaagacagcatcagtacaaatctactatatcgatggaccgagcctgacctatctgactcaggttgacaggatgccttaacattccctagctatccacgaactgaatgaacgcacctggaaatttcaatcaagacctggagtagcgaccagctacggcatgaccctaacttactgggccgaagcacttgatcggaagggacaatgaacggtatggtctttttcaatgaaccaggaattgaggattacggtacccttaccaattaggggctggcaatgtgcgctacaagggctctgatctgagctagacactgaatgtgcttgggactccaactatgaacaaagaggcggattcatgcatctaacagctgaccctagtattgctttaacgcctgaatcat

SEQ ID NO: 6596 - DNA, 565 bp, Glycine max
  unsure at all n locations
  Clone ID: jC-gmle01810020g04a1
aaaaaaaatagtgagaaaagagggaaagtctttataaggcggtaagactcgccattaccacacgaagtgatatagcgttgccattctcatcctcttctttctctctctaccattgccatggatccctacaagcaccggccatccagcgccttcaattctcccttctggactacaaattctggtgctcctatttggaacaacaactcctctttaaccgttggagctagaggtccaattctgctggaggattatcatcttgtggagaagcttgcaaattttgatagggaacgtatcccagaacgcgttgaccatgccaggggcgctagtgcaaagggtttctttgaggtcacccatgacatttctcacctgacatgtgcagatttccttcgagcccctggagttcagacgcctgtaattgttcgtttctcaactgtcattcatgagcgtggtagccctgaaaccttgagggaccctcgaggttttgccgtgaagtttacaccagagagggtaactntgaccttgctggaacaaccttcccgtcatctttgtacgtgatggcatgaag

SEQ ID NO: 6597 - DNA, 522 bp, Glycine max
  Clone ID: jC-gmle01810020g04d1
gaaggaagaaaacttgtttattatacagcttatgaaatctgaaaattttagagtcaccttagtgccttaatctattacaacatgcgcaaagttggtataaatatatctcaaaagagtgtcagaaacacacgataaaaattccccttcaaataacgtgtcaactacagagatttggcatgcacaccccagcttccgaattctgttgctgttgttccttccatattcttcctgtgactctgagcttcagttcctttctatccccaccagagaaaaatagggccatgtttctttgaatgatgagcccatcatggctatccctaaccttacggtgactatcccgaacacttcgtggtgtaccctcccaaatgagtttcctaccattggccccaacctctaggctatagctataattccgagcttcattctcatcacccataaaacgaaggaatgccatgtatacaggtgccatgccaagctggaaagcttcaaaatgaaggcagaaattttggccaaaacaatgaa

SEQ ID NO: 6598 - DNA, 562 bp, Glycine max
  Clone ID: jC-gmle01810020g05a1
atcatccgcagctgctgttattcgcaccgcaaacaaacagtgagccatggccgtcggaaagaacaagcgcatctccaaagggaaaaagggtggcaagaagaaggcagctgatccctttgccaagaaggattggtatgacattaaggccccttctctttttcaagtgaaaaatgttggcaaaaccctcgtctctcgtacgcagggtaccaagattgcttctgaaggacttaaacatagagtgtttgaggtctccttggctgatcttcaaggggatgaggatcatgcattcaagaagattaggttgagagctgaagatgtgcaagggaagaatgtcctgacaaatttctggggaatggatttcacaactgacaagctgaagtcattggtgcgaaaatggcaaactctaattgaagcccatgtggatgtgaagacaactgataactacacattgaggatgttttgcattggatttaccaagagaagagctaaccaagtgaagagaacctgctatgcacaatcaagccagattggacagattcgtaggaagatgatggagatcatg

SEQ ID NO: 6599 - DNA, 377 bp, Glycine max
  Clone ID: jC-gmle01810020g05d1
gacataatctagtgacaaaaatatatatatcaaatttctagtataattgttttcattgctagtaaacatatggcaagttatatcattcaaaatatagctacaatgacgaactttattcttctattccacgcacaattatatgacgtgccaggcccttcatgaaacgatgaagtgatggtaaaaagacaaagacaacttatgagaacaaacaggacagaatctaaaggacccaattattatgcatggtcaagaaccacttccttagttcacacttcaaagctttgatgtaaccctcgggtgatgcacgacagtgcaattgtgaccatcctgactgcggataacatcgggcattggacacgaccattggggacagcaga

SEQ ID NO: 6600 - DNA, 452 bp, Glycine max
  Clone ID: jC-gmle01810020g06a1
aaagctttttgtgcgaccaagaggttggcacctaccggaggcacatattctgattgatggtgaacctgcaactggttgccttgttgattttggcctctatttctaccacagctactcagcattccggcgcactcaaggtgctggctttggccctttcttttatcttcccaagatggagcattcaagggaagctaagatttggaacaatgtgtttgagaaagctgataaggtagcaggcatctaaagaggaagcataagggcaactgttctgatagaaacacttgctgcagtgtttcaaatgaatgaaatcttgtatgaactgaaggaccattcagtgggtttgaactgtgggcgttgggattacattttcagttatgttaagaccttccaagctcatgcagatcggctattaccagataaggtcctaggtggcatgactcaacacttcatga

SEQ ID NO: 6601 - DNA, 514 bp, Glycine max
  Clone ID: jC-gmle01810020g06d1
aaaaatgggagtgaaaaaattcagagcggagatttataagaattaacataaaaaaaattcttacattttcactcacattttaaagggatagtaaactcgaccttagtgaaaaatattgggaatgcagaaattcatccaccatagttctttatacatgaagtacaattctagctcgtagaggttttcactcaatcccaaaccacgaccaaagatcagtaaaagtatatctaaaatttatgattcttccggttgagcatcagaaccttggtcttcatcttcttcacttccagcatccttaatttggtcttcatcattttgacttccagcttctttattcttttcactgaattttaagcgaagcggtcgtcccattaactccttcccattcacagtagaaatggcagcctctgcatcctccctggtaagaaaagaaacaaatccggacccagcagatcgtccagaagggctgtcaaagacaaccctggctgacgatggcgttttgaaattttcagcg

SEQ ID NO: 6602 - DNA, 532 bp, Glycine max
  Clone ID: jC-gmle01810020g07a1
gtctatgcataagttaattcatttaatctagttattttgtttattccgttaacacttatgtatctatgctatttataagtgtaataaataaatgaaatggcatggtggtggtggaattgagttgatttagcatcatttgcattgcagccttccgggtgactatggatttgaccctctgggactttcagaccctgaaggaacaggagggttcattgagccgaaatggctagcatatggtgagataatcaatggtcgttatgcaatgttgggtgcagttggtgcaatagcacctgaaattctaggcaaggctggtctgatccctcaggagacagcactcccatggttcagaacgggtgtgttcccacctgcaggaacctacaactactgggcagactcctacacactgttcgtgtttgagatggcactgatgggatttgcagagcacagaagatttcaagactgggccaaaccaagctctatgggcaaacaatacttcctaggactagagaagggtcttggaggttcttgtgag

SEQ ID NO: 6603 - DNA, 540 bp, Glycine max
  Clone ID: jC-gmle01810020g07d1
gtgtgcaataatcataccaaggttaaaacctactcaaacctctttcatactctcaaaccttccattacgagaccgacctagtgcatttatataatgctaatctaacatatgtcatcttactcctttaatttattgtccaatcccatagttccctacttgtaccaccacattaattaacatcacaatatatttaacttattcactcaaactgactgattcttctgctttattggtatatcattagagtcaggacttgtctgccaaaacttgaagttcaaagatcttctttccagcatgttttccacttcctcaatcggaagtcctttggtttctggcacaaaaataatgacaaacacaatggctgcaacagtgatgaatatgaatatcatgaatgtagatgaggtcccaatggcttgtgtcaaggacagaaaggactgggccacaatgagattagagacccaatttgaggtagatgccatccccccacagattcctctgtatcttagaggatagatctcagagttaacaacccatggaact

SEQ ID NO: 6604 - DNA, 350 bp, Glycine max
  Clone ID: jC-gmle01810020g08a1
gaaaaaagaccctttccattctcctccttttcttcctcctccactggctgcacctcgctgccgtgtctctgcctagcgtgaaattggcctcatttcccatctgggtcctgtgaattgcgattggaaccgcgttttccccgcttctgggcttggctcagaagtagtcagaatgatgtctgtcacaggcaaaagcattgattttgctggcaaaaacttggtctcttgtggctgctcttccaatgcttcttcgtttgataggtacactgtgaggaactatgccaagctgaatagtaataattctaaagggtgtggcaaagatcatggggctcgtaaattggtttgttgtaaga

SEQ ID NO: 6605 - DNA, 287 bp, Glycine max
  Clone ID: jC-gmle01810020g09a1
aaaccctagaacgggagagatttcattccccgaacaatctgtttcttctctctcctcatatctgagttcccaactttcctcacctgagatctggtgtgacgtgcatcacaattgaatcgaattgaaattagttgtcgtggttgcagcatggaatgccgatggtattagcgaaaagcgattcgatccagattcgctaggtatggcacgataacctgtataaggagttcctgttgattccccaatttttggccaatcccctttaattggcctggcacacagttttcccg

SEQ ID NO: 6606 - DNA, 578 bp, Glycine max
  Clone ID: jC-gmle01810020g09d1
ctctaattaattccctttgttatcaaaatggctgtggctatggctgcttgcagtcttggacttcacttgagtgctgacaacaccttgagaccttttgaaaaaaccactatcttgaaggcactctctatctctgatgctactaaaccatgttacatttctcacaaaacaagattatcatcttcatcttcaggaataacaatgatcccacgagcaacaacagttattggtactgtggaggatggaaatcaaggagaggctgataccattccaactccggtagttattattgatcaagactctgatccagatgcaactgtggtcgagataacctatggtgatcgccttggggctcttcttgacactatgaatgcgttaaaaaacttggggctgaatgtttgcaaggcaaatgtctttctagattcttctggcaagcacaacaagttttccatcacaaaagctgattctggaagataagtggatgatccggagttgttagaagcaatccgtttgacaatattgaataacttgattcagtgtcacccgaattaagcgcccaataagctttgggaacacctttt

SEQ ID NO: 6607 - DNA, 554 bp, Glycine max
  Clone ID: jC-gmle01810020g10a1
gctggctgaccaagagaagaaactgtttcttgttgaccttggattagcaacaaaatggagagacacctccagtggacagcatgttgactatgatcaacgccctgatatgtttagaggaactgttcgatatgctagtgttcatgctcatttggggagaactgctagtagaagagatgatcttgaatctcttgcatacacactagtattccttcataagggccgattaccatggcaaggttatcagggtgatagcaaatccttccttgtttgcaaaaagaagatgggaacatctcccgagacactgtgctgcttgtgccctcccccttttagacattttcttgagactgtagtgaatatgaaatttgatgaagaacctaattattccaagctaatatctttgtttgacggtgcgattggacccaatccagcattgcggccaattaatactgaaggtgcccaaaaggttgggcaaaagcggtgtaggttgaatgttgaagatgatgattcacagccaagaaagaaggtccgtttagggattcctgctacacaatgga

SEQ ID NO: 6608 - DNA, 551 bp, Glycine max
  Clone ID: jC-gmle01810020g10d1
gtactacctttaatattatattaaagagaagatgtcatacagcttaattgcttcttattacaagaatgtcatggagataataaatctgaaaaacctcagcaacatacctgattgaatattagttgaattaagcacgcagcatgcagagacaaaatagaaaaccttgaataaacataatggaggaacatataaagctaaacagcattcattactctgcaacattccccatcccagtaaagcatataatagaaggggagggacagggaacagaacaatattcttataacataacaaaataaggttctctgctggcacaacaattagttcctttctacaaaaagatcttttgtggtggggcagatgacaactcataatccgcttgtcaataaaatgctttaaaatgtcatggaaatcagcatactgtgcgtccgtagcacaaacaggcaaggtaaaggttttttgaccatttttccttaaatgtgtgccgggaaattgcgatgtacgtagagtttcctgagtttcatcactgagtttgcgcctcggatacttaa

SEQ ID NO: 6609 - DNA, 638 bp, Glycine max
  unsure at all n locations
  Clone ID: jC-gmle01810020g11a1
ctctctctctctcaactcccaattactttgttgcatttcacacaccaacttcccatagaagagagaagagagaagagactcttccttccatcctgcaactcaaatcatcatgcaagactccagctcaatgaagatctcccctctggatctcatgtccgccatcttcaagggcaagctcgacccctccaacgtctcctcctccaccaacgccgccgccgccgccttcctcctcgagaaccgcgacttcctcatgctcctcaccacctccgtcgccgtcctcatcggctgcgtcgtcgtcttcatctggcgcagatcatcctcccccaaggccaagcctctcgagcctcctaaacgcgtcgtcgagaagcttcccgaaatcgaagtcgacgacggcaccaagaaggtcaccatcctcttcggcactcaaaccggcaccgncgaaggcttcgccaaggccacagctgaagaggccaaagcgcgatacgagaaggccacgttcagagtcgtcgatatggatgattatgccgccgatgacgatgaatacgaggaaagggtcaaaaaagagactcacgttctttnctttttagctacatatggtgatggtgacccactgataatgccgcgagatttttaatggt

SEQ ID NO: 6610 - DNA, 414 bp, Glycine max
  Clone ID: jC-gmle01810020g11d1
acctccaaacatttttttatagttcatacagtacaaggaattgtctgcgtctctgaacctttctttgaggttcatcatacattacaaaaagaaaactgaagtaaaatagttcatagtctaggtataaacagtatataataaattacacgaaccaaaaagaatcctttagaaaatatagtgaaaaagaatcgtaggaaatgtcgtcgtgatggcaacaagcgccccccctcaattttgagggcactaatgaaaggtggcacaaataaggccctttcaaaatcctctagccacaactctatgttttattaatatcttcgtgacccccacggcttgcattcagatatcatcaccatacatcgcgcaaatatctgccagtagtttgtagattctttaccatgctctcaaccttggaac

SEQ ID NO: 6611 - DNA, 516 bp, Glycine max
  Clone ID: jC-gmle01810020g12a1
gttcaacccctctgaccccattgtcattattctcagaagattatattagttatatttattattattcccttgtttaatttcttcaattttgatgttgaatctgagagaagagagagagagagtcgtgtgccacaattttcccagctttaattggagtgatttctgatattttgtgttagagttcaatccagatcgtgactagagaagcaagagatccttgattttgctactgtttgaattttggggtccatagcaaaatgggggttatgtccaggcaggttgtgcctgtctgtggcaacctctgttgcgtctgtcctgctctgcgggcaagctccagacaaccggtgaagcgttataagaagttgctagctgatattttcccacgcaatcaggaggctgaacttaatgatagaaaaattggaaaactatgtgactatgcttctaagaaccccctaagaattcccaagattactgataacttggagcaaatatgttacaaagaattgcgttatgaaa

SEQ ID NO: 6612 - DNA, 541 bp, Glycine max
  Clone ID: jC-gmle01810020g12d1
ggtaaagagacaacagctaaccaaaacaaaaacaaagagagtgttcatctctatataaataaatagttacatacacatctattatgccaatcttgtaccattaacatccagcagctttcaagaatttatcaaaggggcttgcaggtggtagtttcaaagaatgttgctgtccaaagtcatatgaacataggcgaacttgatattgtgcttgaattggctgctgactcactaacttcagatcaccttctgaataatccagtgtcttaattggcagaggggaaactttcgtttcattttcacttgaaagaactagtgccctagtctcctgctggtgcttgaaactgtgaagaattgacattttctgttgtttccctgttacaagtgcctcacactggttcttcatttgatcataaggtacaggagttgaggaaatggggaaacttgccacttgtcgtgcggtttccaaaaccgattgtaagagttgattaacacttagaatgtccgggctattgctagatagtgatgatttacgatctgactg

SEQ ID NO: 6613 - DNA, 508 bp, Glycine max
  Clone ID: jC-gmle01810020h01a1
ggagatacttctcaatttataccatccagggatgctgacattgctatcctggaagaaccagaacatttgaattggtatcatcatggaaagcgttggacggacaaattcaaccatgttgttggtattgtccacacaaattatttagaatatatcaagagggagaaaaatggggcactccaggcattcctggtgaaacacataaacaactgggttacaagagcatactgccacaaggttcttcgtctctcagctgctactcaggatttaccaaagtctgtaatttgcaatgttcatggtgtgaatcccaaattcttgaaaattggagaaaagattgctgcagagagggagctggggcagaaagcctttacaaaaggggcatatttcctgggaaagttggtgtgggcaaagggatataaggagttgatagatttattagcaaagcataaggctgaccttgatggtttcaaagtggatgtatttggaaatggagaggatgctaatgaagttc

SEQ ID NO: 6614 - DNA, 416 bp, Glycine max
  Clone ID: jC-gmle01810020h01d1
atcattactgaacaatttatttcatgttaaaccgatgcaaattcattacagcttattctcacaaggttacttgggagaacgtcctgttactttacattagcacgtgttttggtaatattgaactacctcacttacaaaaacaaaaagaactacaaaatttaaggattgaaaacttagcaggcacctaacacaagcaactgtaaaacaaactacaaattcaaccactaaatctattcaccagccatccgtaaatttttctacctacatgcatttaaatgatggcttttacagtactgcttgtcataatctggtgtgacaagttttccttcaaacatccaaactagtcaacccattcaccagccatagataggaatttctaccagtggaagccagagatgaaggtcttacagtgctgc

SEQ ID NO: 6615 - DNA, 508 bp, Glycine max
  Clone ID: jC-gmle01810020h02a1
ggagatacttctcaatttataccatccagggatgctgacattgctatcctggaagaaccagaacatttgaattggtatcatcatggaaagcgttggacggacaaattcaaccatgttgttggtattgtccacacaaattatttagaatatatcaagagggagaaaaatggggcactccaggcattcctggtgaaacacataaacaactgggttacaagagcatactgccacaaggttcttcgtctctcagctgctactcaggatttaccaaagtctgtaatttgcaatgttcatggtgtgaatcccaaattcttgaaaattggagaaaagattgctgcagagagggagctggggcagaaagcctttacaaaaggggcatatttcctgggaaagttggtgtgggcaaagggatataaggagttgatagatttattagcaaagcataaggctgaccttgatgggttcaagatggatgtatttggaaatggagaggatgctaatgaagttc

SEQ ID NO: 6616 - DNA, 358 bp, Glycine max
  Clone ID: jC-gmle01810020h02d1
agtgactcaaatatatgtataatataggaaatattctgttacaaaaccaacaaacacatgaaagatacatcagaaaatttttaaaacctacgcactcctacaaaaagcatgaagtttggtacatccaagtgcctttaatttactacacaaatactatttagttgaaaggccaagaatgatcaatacgtcactatggctattaaaatccaacatgaacctactcaatgtcgaacttctttcttatgtccataatgaacttatagaccttgtgttgatcaggaagagacttggcaacactgtctttctgcatgcacttcttggcccaagaacatacttggggcactaactctctatgttg

SEQ ID NO: 6617 - DNA, 546 bp, Glycine max
  Clone ID: jC-gmle01810020h03a1
gctattagctaatgttttgggaatttcagttataagactctcaggtggtggtgcatcgctgagttgtgtgagagtgagaaagagagagtgtgtgtgtgtgcagaagatgtggccattcagcagaaaaggggcttctggtttttcatcatcatccacggcagagcaagtcactgaaggaattgatggaactggtctcactgccattgtcacaggagcatccagtggtattggcactgatactacacgtgtcctttcattgcgtggtgtccatgtgattatgggtgtgagaaatatgcttgctgctaaagatgtcacagacacattacttaaagagattccctgcgctaaagttgatgccatggagttagatctcaggtcattggagtctgtcacgaaattcgcatcagagtttaagtcctctggtcttccattgaatatgatgattaacaatgcatgaattatggcatgtcctttcaagctctctcatgacagaattgaactacagcttgccacaaatcacttaggtcattgtctcttgaccaatct

SEQ ID NO: 6618 - DNA, 530 bp, Glycine max
  Clone ID: jC-gmle01810020h03d1
gcaaggaaaatttaatcccctaaggtttaatttatgctatattctaaaaatcaaaccattcatagctcctaaaatgagatattgatcaactccacaagctagttaacatacttcattacttactgtcctaagagaagtatgcatatacagctcatcaatctacagattcatgcaatagtcctcatggtcctgagcttcagctagaccaggcacattgaagagttcattaacatctgcacctagtatgcatatacaactcgtcaacctactgcctactgattcaggcaattgtttacatgaccatgtgctttatccgagatctggtacggtgaagtgctcatcatcatcttcatctaggacttcaatcctaggctttttgtaagacaacaaggatttgggggctttgtgtgagccaacactgctagtcattggaagctgaggaacttcaaccgccgctaaagcttcatgaagaaactgttcaccaaaaaggcctacatctgctagccattcaaattcttcaaactcaaggg

SEQ ID NO: 6619 - DNA, 452 bp, Glycine max
  Clone ID: jC-gmle01810020h04a1
gctattagctaatgttttgggaatttcagttataagactctcaggtggtggtgcatcgctgagttgtgtgagagtgagaaagagagagtgtgtgtgtgtgcagaagatgtggccattcagcagaaaaggggcttctggtttttcatcatcatccacggcagagcaagtcactgaaggaattgatggaactggtctcactgccattgtcacaggagcatccagtggtattggcactgagactacacgtgtcctttcattgcgtggtgtccatgtgattatgggtgtgagaaatatgcttgctgctaaagatgtcaaagaaacattacttaaggagattccctccgctaaagttgatgccatggagttagatctcagttcattggagtctgtcaagaaatttgcatcagagtttaagtcctctggtcttccattgaatatgttgataaacaatg

SEQ ID NO: 6620 - DNA, 530 bp, Glycine max
  Clone ID: jC-gmle01810020h04d1
cacgaaccaaacagaatttataaaaagaccagaacaaacaacagtttttaaaaggccactattgaccatggaaacaatttaacaagagtaaacctttcaggaacattaaaaaaaaaatcccaaagatcttcggaacttccacatgcttagacttcaagacacctacagaacattctcagacttttaaaacccaccacgaagacgcaacacaaggtgaagagtagactctttctgaatgttgtagtcagcaagagtccttccatcctccaattgcttcccagcaaatatcaacctctgctggtctggtgggataccctccttgacctggatttttgctttgacattatcgattgtgtctgagctttcaacttccaaggtaatagtcttgcctgtcaaagtcttcacaaagatctgcatacctcccctgagacgaaggacaaggtgaagggtggactccttttggatgttgtaacctgccagtgtacgtccattttaagcttgtttccagcaaataaacctttgtggtctga

SEQ ID NO: 6621 - DNA, 371 bp, Glycine max
  Clone ID: jC-gmle01810020h05a1
aaagctttttgtgcgaccaagaggttggcacctaccggaggcacatattctgattgatggtgaacctgcaactggttgccttgttgattttggcctctatttctaccacagctactcagcattccggcgcactcaaggtgctggtttgggccttttctttaatcttcccaagatggacctttcaagggaagctaagatttggaacaatgtgtttgagaaagctgagaaggtagcaggcatcgaaagaggaagcataagggcaactgttctgatagaaacacttcctgcagtgtttcaaatgaatgaaattttgaatgaactgaaggaccattcagggggtttgaactgtggccgttgggattacattttca

SEQ ID NO: 6622 - DNA, 466 bp, Glycine max
  Clone ID: jC-gmle01810020h05d1
aaaaaattgagctcgaaaactcacacacaccatcaatttaaaccttgaattttaaacattgtaattggaggtcgatataatatacaaccatgacagtactctcagtagtgctaggaaagttgggtcaagggataatgcagcaacaccatgcatgaagttactaacaaaatctgagccaacaaacaaaacagaaaacaaaacactctatgactcaagctgagcataccagatgccctggatcttgacatcctttggagcctttgctcccaaatcagtgtcagatggacgaacactctcgaacacaccgataacctcacgcgtctcaagcttggtcttggtgacactcaaggtgattttgcccttggatgatgaggcacatgtattcgcttacttgacaggttcttcctaattttctgtttcactagcaggcggagcaaatgcaatgtcatcacctgcggaaacatct

SEQ ID NO: 6623 - DNA, 516 bp, Glycine max
  Clone ID: jC-gmle01810020h06a1
tggtaatggcagcgtcactacaagcagcagctactttcatgcaacccaccaagttgagcaggagcaacactttgcagcaaaagtctactcagtccatttccaaggcttttggtttggaacctgttggagctaaaaaggtcacatgctcccttcaggctgatcttaaggacttggctcacaagtgtgttgatgctaccaaaattgcaggattcgcccttgccacctctgccctcgttgtctctggggcaagtgctgaaggtgttccaaagaggctaaccttcgacgaaatccagagcaagacctacttggaagtgaaggggacaggaacagcaaaccagtgcccaacaattgatggtggattggactcatttgccttcaagccggggaaatacaatgccaagaagttgtgccttgagccaacttcattcacagtgaaagccgaaggtgtggccaagaatgctccccttgagttccaaaacacaaagctcatgacacgtttgaactacactctggatg

SEQ ID NO: 6624 - DNA, 381 bp, Glycine max
  Clone ID: jC-gmle01810020h06d1
acaagccgataatggaataaaaaaaccataaaaattaaaggggactatttaagcaagcgaatttgattttgggttttgaacaaaacccaaattttttaccccccaaaaatgttttttgattggctaaacaaaactgggtcacttggtttacacaaaaacattggacaaaagtttggaacttaatttccaatgataacgtaaaaaaaagaaaacctagaacaaactgaatgcatcatgaaatcaagccccaacaatttcagggggttcctttgccactatttcatcagcaggtttggttaccttggcaccaacatcctttgagtaatctccatgaacctccattagtttcccaagaacaaacttaggggcttttaggatctt

SEQ ID NO: 6625 - DNA, 493 bp, Glycine max
  Clone ID: jC-gmle01810020h07a1
ggaacatgatttagaaaactgccaagcccacccatattcattctctcaaaacttccaaccatgaactgaagcaccacacatacccacttcctccaaagacatcatttttattaccaatcttccaatttcagagaaaattctttgtgggcatctcttaattaaaaaaatgtcaagcttccccaacacggtggcggaaggccgcaggtccagcaaggcaccggaaaaatccactttttctcagacttgcagcctcttgagccagttcttgaaggagaaacgtgcttctgctgattccacctttcgaattggtgggaaaatggaacccatagcgagtaccaagggtttgttaggaagcctgcaaaactctgatggggctttgaaactaagcgcttctgccatggaatttcttccccagcttgtgaaaaacccctgcattaagaagtctagatcacagggacctgaaactccccaattgacaatattctatgctgga

SEQ ID NO: 6626 - DNA, 588 bp, Glycine max
  Clone ID: jC-gmle01810020h07d1
agcattaatagaatttttatttctcacacaataaatacaagagattctgcaaactgaaaaagggatttcttactaaagcaaactcaaacaagaacaacttccactcatttggcatctaccgtagtagaacaggatcaaaagcagctctctgatagaacacacgtatgtattatattgaacatcttgcacagtggttcatttctcacagctattgcaacttaaaatacttgcaaagcttctgcaaattccaaactttctttttctcccttctttatggatatgacaaagtgatcagatcatgaaacaataatcaatccattgaatttgaatctgatttttggtttggatcgatgccaccattcttcatcttaggaagggacaacaaataggccaaagcctgcaaaatcaagttcccaaatttaactttagatcaaattttctgtgattttacaagaagaattatatttatatttatgtgacacataacttgtaattaacttacctactaattaagcgcttaaactggattagtggttggttaagtgtgatgtagtaacataggttgactgtgaaaataccgataaattt

SEQ ID NO: 6627 - DNA, 516 bp, Glycine max
  Clone ID: jC-gmle01810020h08a1
ggctcgagggcaaacaaagatggttcactccaacatgcctccaaagtcccccaaactctctctcccggataataacattccaatcccccttcgccagaacgacatcaccgcagcgtcgtctccaatctgcgctgcctacgacaactacctccgcctccctgagctcagagccctctgggcctccaacgacttccctaattgggccaacgagcccatcttaaagcccaccttacacgccctcgaaatcaccttccgcttactcgcaaccgttttatccgacccgaggccgtacataaacaagcgcgagtggacccggcgggtggagtctctcgccacggcccaaattcagatcatagctatgctgtgtgaagatgaagaagaaaaccccgagacacgtggcacgacgccaccggtgagtgacattaacggcttcatcgctcaaagcagaagctacagcgaggagagcctggctccgcgccttgccacgtggcacaaatccaaggacgtggcgcggag

SEQ ID NO: 6628 - DNA, 562 bp, Glycine max
  unsure at all n locations
  Clone ID: jC-gmle01810020h08d1
ttgttccataccaatttacctttgcatgcactgaaatcggatatacagctagccaaaatctgattcagccacattccaaatatctaatcaacaaagaatcatcaatgcatcctcctacgtgggatcaaggcttgaatggtgaaattttaactttaaaaccattcaaaagtgctacagcgcatatctacatttgctaaacaaaagagatctacataaataaaaaaagaaaaacaattgcattcatcactacactactgcttcgaatccaaagaagatccgccctcatcatccaaaaaggcaccaccacctgaatcgttggaatttttcactgcttccaaattcccatagttttcacatagctccgaatagactccactgtctaccttggataccccagacagtgatactaatcccatagcagcaatgctgttngcaatagcattaatatctctggttccagtgtaaagaccacgacttccagccacaaggatattgttttgaatttcgtctggattacgtaaaattgcatgcagagtgtccctcatcatctgttgttaccctg

SEQ ID NO: 6629 - DNA, 518 bp, Glycine max
  Clone ID: jC-gmle01810020h09a1
gcagttcagagaagcccaagcatggatagctcgtgttcgtgagatggatgtttttcaatcaacaacaaatcaaacattacaagctgaattgagagagcgcacagagcaatataatcagctctggatgggttttcagagacagtttgcagaaatggaaagagttcatttgcatgctattcagcaactacagcttgaactggctgatgcaagagagcggagtggaactttcaatgatgattcaagaatgtcccaaattaattcaaaaaataatgtaactcagtttggacaggaaaatggaagccaatttgacttgaatggaagcaatgctccgggtggaaataatggtcttcttccaagtgaaagcactgctaatgatggaccatttgtatctacaggcaatgcatcaatccagactgaacatgttgctggtgttcctattgctccatcatctctaattgtcccaccttcataccttccacacagccaagtaactgcatggcatccatttgttatgcatc

SEQ ID NO: 6630 - DNA, 518 bp, Glycine max
  Clone ID: jC-gmle01810020h09d1
gaaaaggttaaccatgctgattaatctttcaagcattcataaaaaaatcgcagtttatcagatgcaatgtatgcagcaagaataccacagcaagaggcccacattaatgaaagcacactgaattgtaacagctgggagaaataaactactacagaaactggagatggagatagcaccggcaacttaaaatcacattttgcccagggcacaagattactccgtcaatgcttcaaaaaacattctcccacaaacccgataaataatcttgtatgttttcatccgcatcctggtgagacaggataatctaacacgcccttccatcttcctatctttgagaagggtacacagcaccagttgccctgtcataaaataacagttagcacaacacatcctttcttcagtagatactcattctcatcatagacaaaccaaatcatagcagatattatggttcggcagaaaatgtagagtcatacctggtctgctgtttagaagcaaagcttgagactagccttcca

SEQ ID NO: 6631 - DNA, 409 bp, Glycine max
  Clone ID: jC-gmle01810020h10a1
gatttggccctgcatgcatgcgccggggagcctcccctcacattcctcgactcacttcttcttggagagtgggaagatcgcatgcagagaggactttttcgctatgatgttaccgcctgtgaaaccaaggtgattcctggtgaatatggtttcgttgcccagcttaatgagggtcgtcacctcaagaagagaccaactgagttccgagttgacaaggtccttcaaccctttgatgaaaacaaattcaactttaccaaagttgggcaagaagaggtcctcttccaatttgaagctagcgaggatggacaagtccagttctttccaaatgctccagttgatgttgacaattctcccagctttgttgccatcaatgtcagtcctattgagtatgggcatgttttgctgattc

SEQ ID NO: 6632 - DNA, 438 bp, Glycine max
  Clone ID: jC-gmle01810020h10d1
agaacaaacagataactgaatttattatttctcaaagtcaagtcaagcattatgatacattataccccaaaacaccaacaacagtacttaggggagcagttattacatcggactttaacatgaacgcggaataaaggccgataaaagccaatacatccaacacaggacctttaggcttaagcccagcacagtactttgtgacttaaacggggacacaattcagcaatttttcttaaagcactacggatttgctgaatttggtcataatttgaaagccttgctaggggctaaacgcacatttttgggaaccaggttccaccacagtagggggttcgcttgggctgactggattaacttctttgggactttcaacggtgacatcctccaatttaccacagccaatgggtttaaaaataagatcattggcttcttgaaacc

SEQ ID NO: 6633 - DNA, 521 bp, Glycine max
  Clone ID: jC-gmle01810020h11a1
cgacatttccgtcgccgagggcgaatcccccaacagcttgttcaacatcataggcaacttgctcttccccttactcgcattcgcgggcctgttcttcctcttccgcagagcccaaggcgggcccggcgggcctggcgggctgggagggcccatggacttcgggcggaacaagtccaagttccaggaagtccccgagaccggcgtgagcttcgctgacgtggcaggcgcggaccaagcgaagcttgaattacaagaggttgttgatttcttgaagaatcccgataagtacaccgcgctgggcgcgaagattccgaaagggtgtcttttggtgggcccaccgggaaccggaaagacccttctggcgagggctgtggcgggggaagctggggtgccgtttttctcgtgcgcggcttcggagttcgttgaactttttgtgggagttggtgcgtcgagggtgagagatttgtttgagaaggcgaaggggaaagcgccgtgcattgttttcattgatgagattgacg

SEQ ID NO: 6634 - DNA, 493 bp, Glycine max
  Clone ID: jC-gmle01810020h11d1
gtgctaattgttttttctccttgaatttgataaaataattattgattcttacagtgtacaagtcagagcgtattttatagtacaaacataattctgtgacttgcgtgtatgattatgcaacatataattcggcttttccatcaatgaatagactcatgaactcttcaccatccacagtttctttttctatgagaagttgagcaagcttgtgaaggatatcaatgtgagttgagataatatgtgttgccctagaatatgctctctctaccagttccctcacttccgcatccactacatccgcagttgccctgggagaatccttttgcgatgacatctggtgacccaagaatgggttttcaaccaggtccaccaatggcaacttgtccaatttttttgctgaatccaaatctctcaaccatctgccttgccactcgtgaaacttgcatgaagtcgtttgatgctccggtggtgacattttcctggccaaaaataa

SEQ ID NO: 6635 - DNA, 483 bp, Glycine max
  Clone ID: jC-gmle01810020h12a1
ctaccattagactctagttctgaacgacttttcaagagaatcaaaccatggcagtggaagtgtgcggtccccactgtgcttccaccaagcgggtgctggtttgactggttgagaaggaagtcgaattagaggatgtacctgttgatgtcattaagggggagcataaggatcctgagtacctcaaactacagccatttggagttgtacatgtcatcaatagatggatgattgtacgccttagcctattatgagggacaaatgaggttttatgcagatataggcagatcaaaaggcgaaggagcgtaagaaagagtattacaagagaagggtcttgtggatggatggcgaaacagctaaaaccaagtttgtagaaacagtcgcttacaacttgtggcctaatcattgagcctaaatataatgatgggtgactccaaatgccaatgagattgatgagagtgatcgtataatggaacaagtgtagaa

SEQ ID NO: 6636 - DNA, 303 bp, Glycine max
  unsure at all n locations
  Clone ID: jC-gmle01810020h12d1
tatatatattatgtgantgaaggatatgtatactataaagagttatagtatatagttctgcataaatgtagtgtaagatgatggtattacatagattgttattatatgtactatatatatatatatttctattaagtatgtatagttatgatgtggtggttatgagcggacggaatttaatttagggtcgacgaggacgatattagtaggccgcggttgttttttttttttttttatagaagaagaatatggattgttttaaataaaaagaagtgattgggtgaaagggaataaaagcatgag

SEQ ID NO: 6637 - DNA, 394 bp, Glycine max
  Clone ID: jC-gmle01810021a01a1
gaactgtttacgagtgaccacagtaggcacagccacaccccaatgcctttctccattctttccatcttcaagggataagcttgtcttcccaactcacagaggtttcaagaaatccttgcaaaactcaacactgtcatgcccttctctttactcaaccggtgctgcctatagaaagtcccgttttgtttgcaatgctcgtgaagcagtaaatgaagttaaagtggtgactgactcaagctggaataaccttgtgattgcaagtgagacccctgtgctggtagaagtttgggcaccgtggtgtggtccatgcaagatgatagcgcctgttatcgatgagttagcaaaggattatgctggaaaaattgcatgctacaagcttaacacagatgattct

SEQ ID NO: 6638 - DNA, 565 bp, Glycine max
  Clone ID: jC-gmle01810021a01d1
aagagtacaagtattacttaaaattgtcaaatcccagaaggaaagatggtctttaaacttataaacaaacactatctattgccatttaaggaatggaaaagaattgaagagaatgaaatttgcaatgtcactattgtcacttctcccattccatcccttcaattctagcactgtaatgcatgcaattgtttatcattttctcagtttataattcaacatatttttccactgttgcggacagtgtagatttgggaacggcgccaattatgctttcttttttctctccattcttgaagaacagaactgttggtatgcttctgatgccgtactgtgttgctatgtttggagaatcatctgtgttaagcttgtagcatgcaatttttccagcataatcctttgctaactcatcgataacaggcgctatcatcctgcatggaccacaccacggtgcccaaaactctaccagcacaggggtctcacttgcaatcacaaggttattccagcttgagtcagtcaccactttaacttcatttactgcttcacgagcattgcaaacaaacgggac

SEQ ID NO: 6639 - DNA, 468 bp, Glycine max
  Clone ID: jC-gmle01810021a02d1
ttgttttttttttttttttttttttgattattttgtttttattttttttctttgtattgtttattataaatgttacatttgtatttacaatgcataatgacttttgttcagtgttttttttttataaaaaaaaaaagtaaaacggatatatacacatacgcaaagatcccatcacgctgaaaagaaaaactatagaaccccaatggcgtaagagagaacgtcggaaacagcagccgcatggaaggtgcagacccgtaataagcggggaaaaaacaacgggggcaaaaaaaggggggggcgaaaaaaccggcgcttcttaaaagaaaagtttttttgaaaagaggcccccataaaaaaaacgggacttttttacacaacatagcaaaggggccgaggggggacaaaactccgggaaaaaccccaccaaaagtcttcaatggagcgaacccatgcgggggttcttacggg

SEQ ID NO: 6640 - DNA, 551 bp, Glycine max
  Clone ID: jC-gmle01810021a03a1
aactgatccaattattgctctttttgttcctgagatgggaggcggtaaccagcctgccagggttagtctgattcaaatccccagcaaagaggaactcaggcagaagaaccttttcagtgtcagtgactgcaagatttactggcaaagcaatggagactaccttgctgttaatgtagagaggtacacgaaaacaaaaaaaagcacatacacaggctttgagcttttccatataaaagaacgggatataccaattgaagttttggagcttgagaataagaatgataagatcattgcgtttgcttgggagccaaagggtcacagatttgcagttattcatggtgataaccctaagcctgatgttagcatttattccatgcgtactggtcagaacagccgagtttcaaaactcattactctgaagggcaagcaagcaaatgctctgttttggtcacctgccggtcgctacattgtactggctgggttgaaaggcttcaatggacagttggaaatttacaacgttgatgaacttgaaaccatggctactgctgaac

SEQ ID NO: 6641 - DNA, 401 bp, Glycine max
  Clone ID: jC-gmle01810021a03d1
gcacaaacccacatataataataataataataatctaactccacatttcttcaggcatgttgttagcgcgaaggaagcgaggaatatgagtgaacacttcccgcccaaggaggcagcaaaaatgtctttcacgttaaatttgacaatacgaaaaaaacaaaactaatgaaagattacaaaatcgggtcttacaaagatgaaatcgaagtaagctgcccaacaactatacctcgacaagtgaataaaatgttcgaatccaaggcctcccagcttaaaaactcactcttgaccatactcaaggtgaaggacctgttttgttacatcgatcacttccttcacctcgatgtcctttgcctcgtattcctccatttcatggctagccttttcatgcctgaactttt

SEQ ID NO: 6642 - DNA, 610 bp, Glycine max
  Clone ID: jC-gmle01810021a04a1
aatttgaggaaaacgaaaagaggaggggaaaagagggactttgagaatggggagaaaaataggcttcgggccctattggctgaaggaagaatcttctgtgacatgccagctttagcagaccgaaacagcattcttctaaaggataccagccttgagaatgccttaatatgccagccacagcaaaggaacatccatggtcgaatatttggaggtttcttgatgcatcgtgcatttgaattggctttctcaacagcatatgcctttgctggattagctccttgctttcttgaagttgatcatgttgatttcttaagacctgttgatgtaggggactttttgcgtctcaaatcttgtgttctgtacacggaggttcacgatccagatcagccacttatcaacgttgaagttgttgctcatgttacacgacctgagctgcgtactagtgaggtatcaaatactttccacttctctttcactgtcccgccagaagccaaggcgatgaaaaatggattaaacttcgaatgtagtaccagcacagaggaagaagccgacgtatatagagcgcaagatgctgacaactgatgaattctcaagccttagagaaaacatc

SEQ ID NO: 6643 - DNA, 416 bp, Glycine max
  Clone ID: jC-gmle01810021a04d1
aagtaatagtaatataatatcacttgctttatatgccacaagtaacagacgtagcaatccactatagccatcattgattgtacagaattcattgtaaactttctttcattggcttacctatgtcactccttatacaacttgcacagcaggtgcctactagattcaggttcatatacttgtctaaacaccagttgccttctatcaagtccaatgatgctagacatataaggcatactagatccctcttaaaattgggcagaaaaatctattatataagagagttaatcatctttgaacttctgctcacataattagcggtggatattttaaatactttatcagctaattgatgtctatcttcttatgctctgaagaattcattcaagttgtcagcatctatgcgctctaatatacgt

SEQ ID NO: 6644 - DNA, 565 bp, Glycine max
  Clone ID: jC-gmle01810021a05a1
ggagaaagttgaagaatttaacacggagaggatgatggaggaatttgagagggtgacaaaggatgctgagaggattcaaagggaaaccctgaagaggattttggaagataatgcttctgctgagtacttgctgaatttgggcttgaatgggaggacggatcctgagagtttcaaggcctttgttccacttgttactcataaagatttggagccttatatcaatagaataattgatggtgatttttcttctgttctcactggcaaacccatcacaaccatgtctttgagttctggcactactcagggaaagccaaaatatgtaccatggaatgatgaattgtttgacaccacattgcagatatatcacacctcttttgccttcagaaacagggaatttcccataaacaatggcaaggccttgggctttatctacagcagcaagcagttcataaccaaagggggtgtgctagcaagaactgccacaaccaatgtgttccgtaacccgggttccagcatgcgatgaaggcgattcagtccccaatttgcagccctgatgaagtcatat

SEQ ID NO: 6645 - DNA, 358 bp, Glycine max
  Clone ID: jC-gmle01810021a05d1
agggaaacttttatttgcaaccctttttattgggaggaattccccccttacaattttataggccacgggtgcaattttgcctcccaggggatgccaaaaaaaccgggaatttgattcagggggaaaaaaatgaacctcaagggaaaacaattttacaacataaggacaaattttttcgggaaaaacatttaaccccccatttactggttaacagtaaaaaaaaaccttaaaattccccgaattatgtctacaggctactattatgggccaaccaaattttcccacagcagaattaattcaaaactggaaatgccccataagcaaaaaaaccctaaaaaaaactttaaaattccccatt

SEQ ID NO: 6646 - DNA, 499 bp, Glycine max
  Clone ID: jC-gmle01810021a06a1
attcttctctccctccttcattttcatttacttctctggaggtatataactattattcttttttttttttaaacataaaaattgtttaaatcttttgccatgggaacccagattttgcggcctcaggactgtttcgtagaacgaatcatgtctcctcccgctgacttttcccggcggaggagttccggtaactactgtaattattattaccacagcaaccatgttgccacttccaggtcgtgccggaagccggttgcccgacccgataaaaagaaacgggttgttccggcttctggcatgccgctggtggcggagacctcggcggcggtgtttaggagaccgagcagtgatgattccagggtggcgaggagcaatggtttggagaaggtgacgattctacggaggggccagtcgctcgattcggctgtgaagagcgacgtgtacgccggatcggcgttcgctgtgtctccgtcgccggaagcgcttcctttgccgtctt

SEQ ID NO: 6647 - DNA, 455 bp, Glycine max
  Clone ID: jC-gmle01810021a06d1
caaccaatatgctttctcaatttcatttaatctaatcattaggagacaaatcaaactgcaaatattttttaaccaaagtatttacatcggtccataaccttggatcatctaactatatttcatctaggagcaaaacacaatagaaatacaaatttccagaccccagtgtaagatgatgcacctattttttacctcctttttatcaaaaataagatgatgcatccattatagagcatcatacaaaaaatgaagaaaaaaaaatgcaattcttcccttgtcttatatgtggttgttacaagtatttttgggtcaaggcattgaaactttttccctctctacaaggagctgaaactgatatactttgttatatacacttttacagccaacaaggaacaaatcattttgaactcagatcttcagcagtggtaccctcaatatcaatataatgatgaggg

SEQ ID NO: 6648 - DNA, 358 bp, Glycine max
  Clone ID: jC-gmle01810021a07d1
tttataaggagcagaaaatatcccaacagcttaaaaaaatttaataggccactccactacccatgtgggcattcatgtacatcacttagaaatataaaatggaccgaggattgaaaactagaatagaaacctagaaaaaacatgggcgtctcacggccaaactacccagccttctaaggttcctcaccatcatgagtgtacggcggactaaaagaaggtgctccttcaatttccatgcattaaaaagatagagaccagagagtgcacgcgagcttcactattttgcattcatatcgatgtacactataaagatacatagacgtcaacggatgaacttttaacggagaggcatacgggg

SEQ ID NO: 6649 - DNA, 480 bp, Glycine max
  Clone ID: jC-gmle01810021a08a1
ccgtgatacccctcttcacttggctgtgaaattcggggatgaagtggccaccgagttgcttatggttgctggggcagattggagtttgcagaatgagcaagggtggagtgctcttcaggaagctatttgcagtagagaagagggtattgccaagataataattaagcattaccagcctctggcttgggcaaaatggtgcagacggatgcctcgcttggtagggaccatgcggaggatgagggacttctacatggagattacattccattttgagagttctgtgattcctttcatctcaaggatcgctccttcagacacatacaaaatttggaagaggggtgcaaatttaagggcagacatgactttggctggatttgatggtttcagaattcagagatcagatcagagcattctttttcttggtgatggttctgaagatgggaaagtcccacctgggtcactctgcatgatcttacacaa

SEQ ID NO: 6650 - DNA, 449 bp, Glycine max
  Clone ID: jC-gmle01810021a08d1
aaaggtgaatttaaactgcaatcatgaatataaaagttgctcgctgtgattgcaactatcctgagttaatggtttctccacatatattgaaacacaatcaacaaattctttggtgtaaagttgaaaactccagcaactattgcaagaatcacaatgtgtcttttccttatgccacaagccccaaattgtcaacgcacaactccttggaggaccactcactcactcttatgaagtgggctagtcagttatgactttttcctttctttgacttgatcttctcttgcatcttctttgtctttgcttcagcagtaacccaagtatagtcagatggaattgcaaaagggtcttcaatattttctatcctactgctggatcctggagcagatgtactagagcgataaggagcctgtatccattgaaaccaagacgatgccgagaagtgaggcact

SEQ ID NO: 6651 - DNA, 465 bp, Glycine max
  Clone ID: jC-gmle01810021a09a1
gagcaagttgaagagactgcttctttctgcaaataattttacagggaccataccagaaacatatagcaaactaaagaatctcactgagtttaggatagatggaagcagtttatctggaccaatacccagtttcattgggaactggaccaatcttatcagactggatttgcagggaacaaatatggaaggcccgattcctcccactatatctcagttgaaacttttgacttgaattgagaataactgatttgaatggaggaccaagtatgacattttctgaactgaagaatttgacaaaattgaaacgactggaattgagaaattgcttaatcacgggttctattccaggttacaatggagataggcaaacttggctactttagacctaagctttaacatgttgactggttcgggcccagattcaatacaaaaaatggataacctagaatacttgttactaacaat

SEQ ID NO: 6652 - DNA, 426 bp, Glycine max
  Clone ID: jC-gmle01810021a09d1
caagtctgtaatcacctttccatgctcgccggccaatttctccaaagcgctgactttgttctccatcgtgcaatcggtcaaaccaatttttaggagccaagaatcataatgggaaagaaaagatagattttattgaatagtaagaaaagaactaaatataggagagaaaactttgttccaaggatttccccttcacaaaggatttcttttttcacgaagaactaatgctcaattacaaattatccaaatctgaatctcccctatccttttatccctatttatatctaataaactcttctaactaactaactaacttattaatagtctaactatgttaactaacttttccttctccttatatcctaacagctaagttagcacatccactacagacgtgacatttttattgcggtttttctgcacaag

SEQ ID NO: 6653 - DNA, 398 bp, Glycine max
  Clone ID: jC-gmle01810021a10a1
atggacgtgtgttagttggctaatgaggagtcctcatttttcttcatctgtatctgaaccctaatcccttctgaattggaaagaataagaatcattaatggagggagtgctgtccgtgaatgatcaacagagcatggtctattcttttactggaggtcgtttagggccagaccgccgagactgcgcgccagttccttcaggccacaagttggaagcttgaggaggctcttcagttgtttctgatagggagtgaaggtggggccgagccgttgcctgtgccgtcggctacgatgttgcacactacgtctttggaaaatgtcgattcctggaccgatcaacagtcttttagtgaaccgaggaaggacgctgcggttgtaagtgaaagtattgggcttaat

SEQ ID NO: 6654 - DNA, 494 bp, Glycine max
  Clone ID: jC-gmle01810021a10d1
aaaaaagtttcaataaccttttctttgaacactaaacaacctcatgaaaaagatgaaaaacgggatcatatagatgggaccaatctgaagttctcagtctgcaaatttcacccagtaatgaacccgaactcagtcccaagtcaccgaaatcatagagttggcaaggcctgattcctggaaggttgaattaatttcatagtccagaattttagatgctccaggaattgcatgtgttaatctaaatgaatttgtttcatcttcccctagttgagcagaaatgaaagaccacagcagctgaattggatcagtgcgtaagaagtttcgctgaacccggcgtccatctggaagccgaacaccaactctgcataggagatttctttcaaccttgggttcttcaggcagggttggatatgtgggtctcttagccatgggtgtttcttgccattgactgcacatctgatctttttggctcttcagcctagcagtgatcttta

SEQ ID NO: 6655 - DNA, 457 bp, Glycine max
  Clone ID: jC-gmle01810021a11a1
aggaaacaatgattctggaggaaagcaacttgagaatggagataaaactgaacaaattgatgaaaaagccaagaagtcagacgtagatatggaagaaactgatctgaatgatactaacaataaattagaaaatgattcagcggaaattaagaatagtcatgtgaaaggggaatatgagattactgaaaagcctgaaggtgaagaagcacaaaagcttgaaattgaaccagcagagaaagttgccgaagaagcggtggacactgaaaaatcccaagggcccctactgactactgaattagaaaaagaagagaatgaggagaaaacagatactgtgattctagatgcttatgggggaatcgtgaaagataatcctaatgctgctgcagaaatgtaatggggttatttggagctgtgcacagtgaaacactttaacattagacatactgttgtgtaagct

SEQ ID NO: 6656 - DNA, 388 bp, Glycine max
  Clone ID: jC-gmle01810021a11d1
taaatgactagaaaacacaaatgggtcacagaagtctacaatctacattagctggactccataaaagcagaagccctaatctaaactaaaataagaagaggaatttaatttcctaatcctaggtagcaagcaaaaccaaatctttaaataaaatgcgagactaccgtcatccataaggccacaaaataacttaaatatgcatcacaaaagtcatggggcaacagtacagcacatttctacaggttacacaccagtatgacaaatgttgaagggtttcactgggcccagttcccaataaccccattacatttttgcatcaacattaagaatgtatttgacgaatcccccattagcatgtaaaatcacagagtctgatttcaccaaaaac

SEQ ID NO: 6657 - DNA, 459 bp, Glycine max
  Clone ID: jC-gmle01810021a12a1
gtgagtcaccgttccgtgttcccgccgagtcggtataaacgagtgagcgagtcacaactcaccgcgctgcatggaccctctagaagctttggtcgcccaaatccaagggctttcgagcactcccggcgacctcactcgcctccacagtgttctgaagcaagccgatgactcgctccgatccgagtcaactcgcctcggtcctgattcatacccacctcgacccctccattcattccctcgggtttctctacatcctagaagcttcaatgaccgatccggtaaccaaaacgcaggctgagaccgtcgttccgatcgttactaggtttattggcgcttgcagcccggaacagattcgcttagcgcctgataaatttttatctgtctgtaagaggtttaaggatcaagtgatgctgctggaagctcccatacggggtgtggctcctttgttcactggtcttc

SEQ ID NO: 6658 - DNA, 405 bp, Glycine max
  Clone ID: jC-gmle01810021a12d1
tcaacattactgcactatgcttggtcaatagagcatacataattaaatgtgcaaagaatcagttatagattttatatagttaataagttgagacaattcaacatcctcagaacaagcactcttccatttgggactgaaataaaacactcccccactctcagaaccaggaataacaaaagataaaggaaacgggtgatggaccataaccagatctacttccatcattcctagccccttaaatgttgaacttttgtggaacgtcaaagtcatcaaagtcatatctttgtctctctcttccagccttagacaaatacaactgatcgcatgaaatttgttcgtctgtcgcaataagtttccttgagagtgccattattctttggattgatgaatcaatatgttcaatca

SEQ ID NO: 6659 - DNA, 596 bp, Glycine max
  unsure at all n locations
  Clone ID: jC-gmle01810021b01a1
cttcatctcccaagggattcaatacaataccaggctagaagaaactccactcatcaccatctcaagcaactaattaacaagctagtactctttgagtgtttggcaattggcttagatttcttgtacttggaacaagatggaaagcactgtcacatttgagactgatctcaacctcaaggcaaccgagcttagattggggcttccaggaacagaagaaattgttgaaaaaccacttcctgcaagtgctagaattaccaacaaaaggcctttgtctgaaacctctgaggagtgtgcttcaaagggttctagtgctccacatgtggaaactgaagcagcccctcctgccaaggctaagatagtggggtggccaccaatcagatcctacagaaagaacagccttcaggagaatgatggtgctgggatttatgtgaaagtgagcatggatggagctccttacctcagaaagatagacttgaaggtctatggaggctacacacaactcctcaaagctctagaaaacatgttcaagttgaccatangtgagtattctgaaaaagaaagttatanggatctgactatgcacctacatatgaaga

SEQ ID NO: 6660 - DNA, 569 bp, Glycine max
  unsure at all n locations
  Clone ID: jC-gmle01810021b01d1
accaacacttagtatattacattgtattcttgtatcaacacaaccaaaaaacttggattaaacaatattacatataacctttaattttctatctctcctctacacaaagtttcatttgaaatctctaagatttctcacatgaaacttcaaaaaggatcagtggaaacaacatcataagcatagcatccaaccacagatgccaaaataataaccataaaagttgccaaacttgaggaagatcgaaactgcaccgtatcttccatcttctcctgcttcagagtataactccatataaaggtatgccaaaagcacacactagagtgatttcaaaagtcaaaacccttcagatccgagaacacaagcttttcagcatgtttttcccttcacccccaaaacactttttttaattctctgctcatagtaatttttagtggtttggttttctcatacagcacaacccaaaccccttgcctctgatcctttcatgattcttagccttttgcaagaagtcacaaacatgtcccatggaacatctncaactaacatccagtcaccatcttttgcttcat

SEQ ID NO: 6661 - DNA, 555 bp, Glycine max
  unsure at all n locations
  Clone ID: jC-gmle01810021b02a1
attttatgtggtctggtgtcattggccctatctagatgtacatcatatatgtttactattgttgacaatctgcacaaggccactggcattccacgatcttcattccctgtattgggaggcttatcagttgggttgatagcattgatatatcctgaaatcctctactggggttttgagaatgttgacattttattagaatctcggccatttgttaaaggcctttccactgacctattgcttcagctaatagctgtcaagatagttgcaacttctctatgcagggcttctggattagtgggagggtattatgccccgtctctctttattggtggtgcaactgggatggcttatggaaaattaattagtttggctgttgctgagtctaatcccacaattaacctctctgtgttggaagtggcatcaccacaagcttatggcctggttggaatggcagcgactcttgcaggagtttgtcaagtaccacttactgcagttttgcttctgtttgaattgacacangactaatcgattgttctaccacttcttggagcaata

SEQ ID NO: 6662 - DNA, 453 bp, Glycine max
  Clone ID: jC-gmle01810021b02d1
gcaaagtcatggtggtattactattatattgcagtaccaaattgatcactgcaaattaaatatcagacaatacgtgctatatcaaattacaagggttctctcttggggaactacatttactttcatcgaacataactatacacatgaactccactgaacctttttttacgtacacccacgaaaccaacgtgacaggatttaacttgacgtgttaaaggcagatattatagtgccaagaaagagtcttcagcctcctaacggtgattaagtcagtgtgaaatattagctgagggactgtctggtggccaaagcactgcatgttagactgatactctctgggtctataatgccaactggatatgttctttcatagatattcctcacaacaggaacatgattgaatctgcgctccttcataatcatttgagcataatgaagttccatatcaggtgt

SEQ ID NO: 6663 - DNA, 310 bp, Glycine max
  Clone ID: jC-gmle01810021b03a1
actgattgtaagtaagcagctttttcaaaatcagggtgttcggtcatgcctggactgttgcagagttgtgttaatactttagtgtggtgactgaccactgtgatgaaacacaaatcctttctgaatagagttggttgttaccatgacagtacaccatgccaatgagttcaggtggaaaaactgtagataccatccatggtcttaataaatcagaacatacacttactattttgacaaaatgcaggtgtaatttcaatcgttgaactgctgctacttgtattcagtcagtacttgccaatgaaacgtgtat

SEQ ID NO: 6664 - DNA, 328 bp, Glycine max
  Clone ID: jC-gmle01810021b03d1
agtgatgtaataggatacacatttcattggcaagtgattactgaatacaagtagcagcagttcaacaattgaaattacaccagcattttgtcaaaattagtagtgtatgtactgatttctgaagtccatgaatggtatttacagattttgcacctgaactcattgggatggtgtactgctatggaaacaaccaaatctagtcagaaaggattcgtgttacatcacattggtaagtgacctgaacaaagtattgacactactttgcatcagttaacgaatggcctaacaacctgatttcgaatctgatgcctacttacaatcaagactt

SEQ ID NO: 6665 - DNA, 633 bp, Glycine max
  Clone ID: jC-gmle01810021b04a1
aacaaaactctctctctcaatctccttaccttgcaagcaccccacccacacactgtccaacgttaaccgatcaaaaacccatctctgtctacctttgtttgatctcaaagttggctctcacaaaaacgtgaaaaaatttcattcccgtgagattctcctccaccgatgcagattgaatttcaggaatcctgggtgtctacgatacgtaatcacccttttccatgtttttattcattcgatctgtgatgatcataatgtcactcatcggaaacttgttgatcatatgattttgttcttccttcccctgaatcccctgttttttcttttaccttttttttttctggttgcgtattcagcaagtgtacttgatgaattggattaaactgataattctacgatctgggaaagtcatacccaaaatacaaaaatcaaaatatattataaaaaaatgtttttttttcacctatccttgaataattggttgcaaaagcggttccatttacaagcccctgtttctgggtgtttggccaatgaagatgattttgctgggtcgattattccttttcaatggggtgatctcactttgatgaattacgatgactcacgtgaatagagattttaacttggattaaa

SEQ ID NO: 6666 - DNA, 508 bp, Glycine max
  Clone ID: jC-gmle01810021b04d1
aaaagcctaagagtgatgatgagatatcaacaaccataagacagaagctactaaggcccttgttagctgtttacctaccttggaccttcaagatgcattcttttgattatctttacgaaatggccaaggaatttaaattctaaaatgctatgcatgatgcccataaatttaaggacagtatggtgcaaagaattgtggaggactggagtgaggcatataatagaaggggagggacagggaacagaacaatattcttataacataacaaaataaggttctctgctggcacaacaattagttcctttctacaaaaagatcttttgtggtggggcagatgacaactcataatccgcttgtcaataaaatgctttaaaatgtcatggaaatcagcatactgtgcgtccgtagcacaaacaggcaaggtaaaggttttttgaccatttttccttacatgtgtgccgggaaattgctatgttcgtagagtttgctgagtttcatcactgagttt

SEQ ID NO: 6667 - DNA, 494 bp, Glycine max
  unsure at all n locations
  Clone ID: jC-gmle01810021b05a1
gagaaatagagagagaacttcaagtgagggtgagagtgacacaaatctagagagagcactagtactctaaaagtctattatattcttcaaaatatgaccatgcatcgcgagtcttgggcttttgtcttcggcgttatgggcaacatcatctcctttggagtgttccttgctccattgccaaccttttaccaaatctacaagaagaaatccactgaaggtttccagtcacttccttatgttgttgcactgttcagtgcaatgctttggatttactatgctttcgtgaaaagggaaactgccctccttctcattaccattaacacatttggaattgttgtggagtcaatttacctttctatcttcctaatttatgccccaaggaagccaaggcttacaaccatcaagcttcttctcttactgaatgtgtttggattcggggccatgctnctatcaactctctacctgtcaaagggagcaaagcgttttgctatcat

SEQ ID NO: 6668 - DNA, 529 bp, Glycine max
  unsure at all n locations
  Clone ID: jC-gmle01810021b05d1
caaccaatatgctttctcaatttcatttaatctaatcattaggagacaaatcaaactgcaaatattttttaaccaaagtatttacatcggtccataaccttggatcatctaactatatttcatctaggagcaaaacacaatagaaatacaaatttccagaccccagtgtaagatgatgcacctattttttacctcctttttatcaaaaataagatgatgcatccattatagagcatcatacaaaaaatgaagaaaaaaaaatgcaattcttcccttgtcttatatgtggttgttacaagtatttttgggtcaaggcattgaaactttttccctctctacaaggagctgaaactgatatactttgttatatacacttttacagccaacagggaacaaatcattttgaactcagatcttcagcagtggtaccctcaatatcaatataatgatgagggaattgttacctttccactttcataacatcaattggagagaatacattgntttttaactggaacctggaatgcat

SEQ ID NO: 6669 - DNA, 448 bp, Glycine max
  Clone ID: jC-gmle01810021b06a1
tccatgtttggtccaaagcaaaccaccctcgattttctcgggttggggatggctgctgggggcacccctggtggaggcttatcggcactcatcacctccattggtggtggtctggatgttactactgcggcggcatcctttgctagtggagaattccctggcaaagatattggaaggaggagcacttgatattttgggtgcaaggactatattgttcggggcgataagttctggttgtacagtgttatgtggtccttgcacattgagaagttgcagttcaattgggggagaattagtaagaagatatagcatgctcctattgagcagtgctacaggcaattctgaacgggtcgttttggattatcctatgcctctaatgtgggcggaagagaatgtatattgtttattatatcaaagaagaggcccatagagccttctttccatgagt

SEQ ID NO: 6670 - DNA, 418 bp, Glycine max
  Clone ID: jC-gmle01810021b06d1
agaaaaacaaggcaaagtttttattcaattgagaaagggaactatataaatatatctatatatagatagatagatcgatatacctattcttacaactcaattgaaggcagtactgagatagttcttgacaacattttcattcaatatttgcaacactttggtgtttgtagggcctacacatcttgatgtcttgaactggctcacagcagctcctaatgcacgggaatgctcaagtatcttctggaatgttcctgtgcaaacaactcggaattcgagggcacctatgcagttgactttgcgtgagcttgtgtcgccagcatcaacaaaagacttgtccaaacagttgcagcatccacacaagcacttcatcacttgctttaccacttatttcccacaagattacatagtgccctggctc

SEQ ID NO: 6671 - DNA, 447 bp, Glycine max
  Clone ID: jC-gmle01810021b07a1
ccgtgatacccctcttcacttggctgtgaaattcggggatgaagtggccaccgagttgcttatggttgctggggcagattggagtttgcagaatgagcaagggtggagtgctcttcaggaagctatttgcagtagagaagagggtattgccaagataataattaagcattaccagcctctggcttgggcaaaatggtgcagacggttgcctcgcttggtagggaccatgcggaggatgagggacttctacatggagattacattccatttagagagttctgtgattcctttcatctcaaggatcgctccttcagacacatacaaaatttggaagaggggtgcaaatctaagggcagacatgactttggctgggttttgaaggttttagaattcagagatcagatcagagcattcttttccttggtgatggttctgaagatgggaaag

SEQ ID NO: 6672 - DNA, 449 bp, Glycine max
  Clone ID: jC-gmle01810021b07d1
aaaggtgaatttaaactgcaatcatgaatataaaagttgctcgctgtgattgcaactatcctgagttaatggtttctgcacatgtattgaaacacaatcaacaaattctttggtgtaaagttgaaaactccagcaactattgcaagaatcacaatgtgtcttttccttatgccacaagccccaaattgtcaacgcacaactccttggaggaccactcactcactcttatgaagtgggctagtcagttatgactttttcctttctttgactcgttcttctcttgcatcttctttttctttgcttcagcagtaacccaagtatagtcagatggaattgcaaaagggtcttcaatattttctatcctactgctggatcctggagcagatgtactatagcgataaggagcctttatccattgaaaccaagacgatgccgagaagtgaggcact

SEQ ID NO: 6673 - DNA, 412 bp, Glycine max
  Clone ID: jC-gmle01810021b08a1
ataggatctcacatggacactgttgttgatgctgggatgttagatggatcactatgatattgtctctgcaatatcatgtcttgaaggctatgcatgtcaatggaaagctacataagctaaagcgccccgttgaggtgattgcatttagtgatgaagagggtgttagatttcaaactactttcttgggcagtggtgctatagctggtattttgcctggcacaatattggagatatctgataagagggaggtgatgattaagattttcttatggagaactcaatagacattacagaagaaagtcttttaaagctcaagtatgacccaaagtctgtttggggctatgttgaggtttacattgagcaaggtcctgtgctagaacaagttggtttcccacttggtgtggttaaaggc

SEQ ID NO: 6674 - DNA, 473 bp, Glycine max
  Clone ID: jC-gmle01810021b08d1
acacaagcaactaaaagaaaaagagttaactcatgaattaacttacgttaattaacctataattacaagctataatatctatttattgctttacacagttaccatatcacttatgataggttttccagaaatgacaaggttgctaaactggccgcccagacatcattgtctagcacatgctcttgtggagaatgacttattcctccgagacaacgcacaaacagcattcccacctttgttaagtgagatattgccattgcatcatgccctgctccactcattaacgttggcacttcatcttgaatgtcaccctccatcttcttgagtgcacaataagctgcagacttgagctgtgaactcagatcagaatcacaaatcacagcacctgcatcatgcttgtgttcaataatacaggagaccgaacgcttgtcacatatttggtaaatctgtttagaataatcatagataacagc

SEQ ID NO: 6675 - DNA, 434 bp, Glycine max
  Clone ID: jC-gmle01810021b09a1
ggcagatagaaaaaaagagcgacttttgagttcaaaagatgactaacttcccattgatcaacttggagaagctcagtggtgaggaaagaaacgataccatggaaaaaattaaagatgcttgtgaaaactggggattctttgagctggtgaatcatggcattcctcatgacatattggacactgtggagaggttgtccaaagagcactacaggaaatgcatggaagagaggttcaaggaattagtggcaagcaaaggtctagatgctgtccaaactgaggtcaaggatatggactgggagagcacctttcacttgcgtcacctccctgaatcaaacatctcatagattcctgatctcattgatgagtacaggaaggtgatgaaggattttgctttgaggttagagaaactttgcagagcatctgctggacttgtt

SEQ ID NO: 6676 - DNA, 586 bp, Glycine max
  Clone ID: jC-gmle01810021b10a1
gttcaggtctacccagagaaaggaacagttgctttttctgctggtttgcatggctgggcttttaccctgactaactttgccaagatgtatgcatccaagtttggagttgatgaaggaaagatgatggaaaggctctggggtgaaaacttttttgatccagccacaaagaaatggaccagcaagaatagtggttctgctacctgcaagcgtgggtttgttcagttctgttatgagcccatcaagcagattattaacacttgtatgaatgatcagaaggataagctgtggcctatgctgcaaaagcttggggtcaccatgaaatctgaggagaaggacctcatgggtaaagcattgatgaagcgtgtcatgcaaacctggctttcagcaagtagtgctctattggaaatgatgatatttcatctaccctttacattaacagcccagaagtatcggggggagaacttggttgaaggttctcttgatgatcaaatgcttctggtattagaaattgtgatcctgaaagttctctgatgctctatgtcatcaagaagattccagcatttgtaaaggtgagatttttggcttt

SEQ ID NO: 6677 - DNA, 462 bp, Glycine max
  Clone ID: jC-gmle01810021b10d1
acatcgatgcaaggaccaaataacagcattacaacattcacgggcaaaaccacaaacaaaactaacagaaattaaatctaaagtagcattgttcacaagagaaaataaattcgactaagttcaaagtaaaataattcatgaaacaaatttaaagcttgtcttcaaactcggagagaggagtcatctgttccttcaagcccttcctcttgcgaatgtcagtgacaagctgtgcagcttgtgatccagcctccaatgggtcagaagacatcatgtcccagtgatcaaacacacattgtgggaaggcctggcctgatgttgcagccctcaatgtgctcgagaaaccaaaggactcgatgacagggaggtatgccttgatgttgtatagtggggtacctggcctctgcatttcctcgaacacgtgtccacgcttctgttaagaacactgtagattccaccaagagc

SEQ ID NO: 6678 - DNA, 484 bp, Glycine max
  Clone ID: jC-gmle01810021b11a1
cgatttctcaacactgtatgctcctctcatccgtgatgggcgtatggagaagttctactgggcacctacaagggacgatcgtgttggcgtctgcaatggaattttccgcactgacaatgttcctaaggatgacattgtcaagcttgttgacaccttccccggccaatctattgatttctttggtgcactcagggctagagtatatgatgatgaggtgaggaagtggatttctgttgttggtgttgacttcattgggaagaagcttgtgaactccaaggaaggacctccaacctttgaccaaccgaagatgactttgagcaagctcttggagtatggtaacatgcttgtccaagaacatgagaatgtgaatagagtacaactggcagacaagtacttgaaagaagctgctcttggtgatgcttatcaagatttcatcatacagaggaactttctatggcaaagcagtttagctagtaaacatttc

SEQ ID NO: 6679 - DNA, 458 bp, Glycine max
  Clone ID: jC-gmle01810021b11d1
aggttctcagggtgtgtataagcaggttccatcatcacttcttgcagttgggtcgaagtttgaggcatttggatcagtacaaccttcaggaacgggaatgtttacttgctgagctgctttgccatagaaagttcctctgttgatggaatcttgattagcatcaccaagagcagcctctttcaagtacttgtctgccagttgtactctcttcacattctcttggtcttggacaagcatgttaccatactccaagagcttgctcaaagtcatcttcggttggtcaaaggttggaggtccttccttggagttcacaagcttcttcccaatgaagtcaacaccaacaacagaaatccacttcctcacctcatcatcatatactctagccctgagtgcaccaaagaaatcaatagattggccggggaaggtgtcaacaagcttgacaatgtcatccttaggaa

SEQ ID NO: 6680 - DNA, 380 bp, Glycine max
  Clone ID: jC-gmle01810021b12a1
aggcggtgagggtggttggaggtgaacagctcttcagatctgttgagacttaagcaggaccgttgtctaggagagagaagccaaagcaacagctgggaaaaaaatagagtttctgttgaaaagttctagttattgatgttgaaagagagaaagttaagtacccaccccctataactaatgtacatgagggaaataaattattatgtttacaaatatatatgttattttcagtattaaccatatcttattacttcatgttatgttttgattaatggttcacaaataggtcctactgatttaggattagatttacagtttgataaccatgagagagaaagaaatatatgctatcagcctataacaattcttgtttaatggac

SEQ ID NO: 6681 - DNA, 457 bp, Glycine max
  Clone ID: jC-gmle01810021b12d1
cctttacaaagtctttctcagaagtactcctgtcaggccgatcatttttttctgatttttttctgctttccctacctgaaagatcatctgttgctttttccacactgatgttctttccaggcagttcagatcttgatacccctgaagaatctttagaactaaaaccattaaatctatcaaggcttctttcaatggaattaagcccattatccttaagatcttcagtcaccaccttggaagaatgtgaatgattggattccttggtcaccttgtcatcatgcaacagatcagtagcagcatcattgctacttctggatggtaaagagatggttttgacctgattattcatcaaattagtttcacttctatcatgctcatcaagttgtgcaatgccattaacaggtagatcatgtctatctgacaaaggtttcttaatccctgactgataggcagcatc

SEQ ID NO: 6682 - DNA, 601 bp, Glycine max
  unsure at all n locations
  Clone ID: jC-gmle01810021c01a1
gctgcagaggaggaaattgaggtcctggggaatattcttctccaccctttgtttggtggggagaagagaacggaatcagaattgagattggatgggaaatactttgtgaggcttaaggatcgtgattggtattggagagcttttctacctgaaggagagaatagagaccaccctgcttgcaacccttttggaccaagggggagaagcattgaaggactcaaattccctaaaagtcttgtttgtgtggctggtttggatcttctgcaggattggcaattggcatatgcaaaaggtcttgaggattgtggacaacaggtcaagcttctttttctcaaggaagccactattggcttctacttcttgccaaacaatgaccatttctattgcctcatgaaagaaatcaacaactttgtcaattctgattctgactgttaatatactattagtactaagacgacagacgactactactactactgctactacttaaccttaccttacctacaggaggcatacataactaaagcttgacattttacttgggttcctcttttttntttttctctcccccacttttggatcctgtcttttctctttttct

SEQ ID NO: 6683 - DNA, 448 bp, Glycine max
  Clone ID: jC-gmle01810021c01d1
acatataacatacagattcatataacaacaggttgggatattctccggttcacattcagtaattagtgctacaagaggaaaccattcacttaatcaaacaaagtgatgaaccaatcctcatcttctatctcccctcctgccattgacctcaaaacgttaaaaggggggctgaagcgttgtatacggtggttcgaccaaaccccccaaatgaaccgagttctggtactgccaaagccggtgataggtgctaccttccaaaagacacaaacagagaggaacaggaagcagtagtccccaggtcacagaactctcaaattgaccaccatagatgttatgacaataacaagtaatgctacacaatcttataactacacaccttactacaaactagaaaaagagaaaagacaggatacaaaagtgggggagagaaaaaaaaaaaaagagaacc

SEQ ID NO: 6684 - DNA, 604 bp, Glycine max
  unsure at all n locations
  Clone ID: jC-gmle01810021c02a1
gtcaaaagcttgtcacccaaggttgtgacccttgttgagcaagaatccaacaccaacacttctccctttttccaaaggtttgttgagaccttgagttactacactgctatgtttgagtccatagatgtggccctccccagagatgataagcaaaggatcaatgcagaacaacactgcgtggctcgcgacatcgtcaacatggtagcttgtgagggggatgagaggctggaaaggcatgaactcttagggaagtggaggtcaagattttcaatggctggttttgcaccatgccctttgagttcctcagtcacagctgcagttaggaatatgttgaatgaattcaatgaaaattataggcttcaacatagagatggcgctctttatctaggatggaagagtagagctatgtgtacctcttctgcttggagatgttactgactcattgtcattgtcattggtatatgtatttttttttatccacaaatattatntgttagtaatatattagcttttattagcggngaatttgaacccatcacctctccccattcccatcattggtatatgcatattttccctcttgtaatttcttccttttatgaca

SEQ ID NO: 6685 - DNA, 353 bp, Glycine max
  Clone ID: jC-gmle01810021c02d1
ggaaaaaagcttagtctttaattaaacctattggaaaacaggggatacccctaaataggggcttaatgtcataaaagggaatgaaattgaccaggggggaaatatgcatttccccatgatgggaatggggagaggggatgggttaaaattccccgctttttaaagctggtatattactacccaataattgttggggataaaaaaatacccctatcccaatgactaagcccgtgtgttagcatccgcttcctggtgagacgggacactttgctctactcttccatcctagaataagagcgccgtttctatgttgaagcctataatgtatattgaatccattcagcatattccta

SEQ ID NO: 6686 - DNA, 545 bp, Glycine max
  Clone ID: jC-gmle01810021c03a1
gcttcctctctctttctctttctttttctcaattgctgcgaaagaaaaaagaaacggaatcgcattaccaaagacgaaaacgaaagaaagaaacgatgatgcagctgcagcaacaccatcaagaggtggaagaagcagaagaagaggcttcgaattcttcttctcatcatcacaacaaggcatcgccttctcccagtttcagcagctactcatcggagacactcgccgagatcgccgccagggtaatcgaggagctccgccgcgaccctagttcactctccgtcgacgacgacgacgacgcacttttcccgccatgggaaaaccaaaacgacagcttcgtcccccaaaacgacaagccggcagaacaaaacgacgacgacgacgatgatttcgaattcgcgttcgtttcgcgagacttcacttctccagtctccgcggacgacatttttcacaacggtcggatcaaggcgatgtacccaatcttcggcgttgtcgttccctcaaacgacgccgtttcgagcgttgttccgaataatacataatat

SEQ ID NO: 6687 - DNA, 490 bp, Glycine max
  Clone ID: jC-gmle01810021c03d1
acagaaaaaagaatatatactactgcatctcatccgctttaattacaatattcccggcccaaaaatatcaaaacaaacaaaggcaaggaaaaccatcagaagaaactaatgaagcaagggatatataatctgctaaaataaaacgaactacagaagaagaagaaggaaactataatgaatggaataattaataataaatatcgtttaatttttaattacggtcgaaaaatcaaaagggacgcaaattccgaccaaggccattgacattagcaaaaagtccaaccaattctggcctgtaaggtaagaaggacttgctcttgcactgttccatatgttccgatccgttctgaggcttcgccgccactttgatcttcggaatctgaaacaccacttctttgagtactctctgttgttgtcgttgttgactattattattattatcctttccgtcactgggactcctcaaaagcaaatttcgaacacgaagctt

SEQ ID NO: 6688 - DNA, 524 bp, Glycine max
  Clone ID: jC-gmle01810021c04a1
attctttagaataatcaaaaagaatattaaattcaaataaattttagatagaaaaaagacttaaaaaggaggatttgaaatgcgagatctaaaaacatatctttccgtggcaccagtagtaagtactctatggttcggggctttggcgggtctcttgatagagatcaatcgtttttttccagatgcattgatattcccttttttttcattctagttattgacacggaaaggggtgaagaagattatagatccaattaagtattaaatatatgtaattaatatgtaattaatctcctcttctttatttcgtcttttatttcttcttttttttacaattgtaatagaataagttaggaaagagaaagaataagggttaatttggcctaattgaaattcggagtgaaactcgggatctcgtccaggcttccatggaattgaattaataattcaattccatttctattaataaaagagtgaaagcagaaatttaaatggaatgtataaggtggtcggcaacatttcat

SEQ ID NO: 6689 - DNA, 357 bp, Glycine max
  Clone ID: jC-gmle01810021c04d1
cttaaagtagtagttctagcggttgactcgcttttttcaaattgtttttcattattaagaaaaggtaacaaagataaaatacgagcttgttttatagcaattgttattaatcgttgttgttttaaggtcaatctatttacgcgtctggataatatttttccttgttcactaataaatcgactaattaaacccatgtttttataatcaattcggtcccccgattggatcggtggcaaacgcctacgaatagatcgtttgaatttcattaagagtcgcttaaattttttccatggttaattgatccttattccaaaattcactttgattccaggaattcctataagggattggcttttt

SEQ ID NO: 6690 - DNA, 505 bp, Glycine max
  Clone ID: jC-gmle01810021c05d1
aggaagaatatgtattcatttataaacaatggagtgataaaaaaaaaggctacagttgcattcacaatgcaaaatgacacttgtacagtgctttttttttaaccccaattcaagtagtacgtatatatacacatttgctattataaattcaagtctaatgtttagactttagaacataaatggcgtcggagagaatgttggtatcatcgtcggcatggaaggtgctgacccgtaataagcgttgctgaaactccggtgccgaaccttggcagttccgccaccaccggcgctcctcttcttcgcgtcccttccagcggaggccacctcacctttccggggactctctctatccctcagcgccggcgccggcggcgtaacatcctccgagattgaccccagcgacggcctccactccgccgagcccatcctcatcttcttacgggagggcacaacggcgacggccgtcgccggaaccagtgacctctcttcctccttcgctggaacc

SEQ ID NO: 6691 - DNA, 557 bp, Glycine max
  Clone ID: jC-gmle01810021c06a1
cataatcattgcaataaacaagatagataaagatggagcaaatccagaaagagtcatgcaagagctttcttcaattggtttaatgccagaagactggggcggtgacatcccaatggttccgataagtgctctcaaaggaaagaacatagatgatcttttggaaactgttatgcttgttgccgagttgcaagaactgaaagctaatcctgatagaagtgcgaagggaactgttgttgaggcggggctagataaatcaaagggaccattcgcttcatttattgtgcagaatggcaccctcagacggggagatatagtagtttgtggagaagcttttggaaaggtgcgggctttatttgatgatggtggaaagcgggttgatgaagctacaccctctatacctgtacaggttattggattgaataatgttccaattgctggtgatgactttgaggttattgaatcccccgatactgcacgtgatagggcagaaactcgtgctgagtcattgcgtaatgagcgtatttcagcaaaggcatgggatggaatgtcaccctttc

SEQ ID NO: 6692 - DNA, 505 bp, Glycine max
  Clone ID: jC-gmle01810021c06d1
actaaaataattaattttcattactcgaacattaattacgtatacaagggaaaagtgaattaaaatgagtttgactgggggatacactgagaaaagagaatatactacgttacacgtagtagtacaatatgagagtgatatgggccaaattagagaggctaattcttgcgcccaacagttacagctacccgaacaggcaaatttaaaccacacctttacattaatcaaacgaaacacttataccaaagactacgtactattcttgcattgtagatatgagcgatattagatgtgacctcactcagtaaagtaattgaacgtttaattagattattttctttttttaacttttcttgtcattgatcccttgtttctccacattcatataatctcaatgacgaaatcatatcagactttgccaacagcaccaccgtgattcggttccattgttcctatcttcacaacgttaatgatgtgcccattcaattcttgaaccttcactggc

SEQ ID NO: 6693 - DNA, 476 bp, Glycine max
  Clone ID: jC-gmle01810021c07a1
gagaaggtttggttgatttgatagggaaattgatattggtgttcccgatgaagttgggagacttgaagtccttcgcatacatactaaaaacatgaagctatctgatgatgttgatttagagagaattgcaaaagatactcatgggtatgttggtgctgaccttgctgccctttgcactgaagctgctttgcaatgcattagggagaagatggatgtaattgacttggaggatgagactattgatgcataagtactgaattccatggcagttacaaatgagcatttccagactgcccttggaacaagcaacccatcagctatacgtgaaactgatgtagaagtgcctaatgtcagctgggaagacattggaggccttgaaaatgtcaagcgtgaacttgcagagactgtacaatatccagttgagctcccagaaaagtttgagaagtttgggatgtcttcatctaaaggagtacttt

SEQ ID NO: 6694 - DNA, 491 bp, Glycine max
  unsure at all n locations
  Clone ID: jC-gmle01810021c07d1
gtaacagactacanatccgtcaaatcttattancagaccatgtgcttttatgcagctctatacgaccactcttgaagaaagtgcctagagtaaatagcatagcagcagtctaacgattaccacattcacctagacgtatcatatgcaacgttcggatctagtttcagacacactcttcagcgaacacgaactcatttacattgctcaagtatggcgtttagactcccaattgcaagacctgagtaatgaaagactcctggtaagcctaacttcacttgctagcattatcaagagcatgctcgttcaagcacttgccagacaattggactctcttgacattctatcgctcttggacacgcatgttaccgtacagtaagagcttgtacacagtaatcttgggctgttcaaaggtacgaggtccatattctgagcccacaagcttcttctacaacactgtctatagctacacgtgataatcactgcctcactta

SEQ ID NO: 6695 - DNA, 504 bp, Glycine max
  Clone ID: jC-gmle01810021c08a1
cactctcatagctgtagcggcgacactaagatcggagaaagaatggcgaaaacgacgtcgttgctgctctttacactgctcctcttcggaaccctagctctcatccaggcgaagaaatcgaaggaggatttgaaggaggtgacccacaaggtttactttgatgttgagattaatggaaaagaagcaggtcgtattgtaatgggtctttatgggaaggctgttccaaaaactgcagaaaacttccgagcactttgcacaggggataagggaactggtaaaagtggaaagcctctccattacaaaggtagctcattccatagaattattcctagctttatgcttcaaggaggtgattttacacaaggaaatggaatgggtggagaatcaatttactgagagaagtttgctgatgagaacttcaagttaaagcatactggaccaggacttctatcaatggcaaatgctggtcctaataccaatgggttacaatttttcattacaact

SEQ ID NO: 6696 - DNA, 420 bp, Glycine max
  Clone ID: jC-gmle01810021c08d1
cagccatgttcacttagatttccctctacaatgttatgttacaaatgccattttccatattatcattagggggaaaaactttatctaataagtatcacaaacatacaactagtcattgatctattagaacatgcttataaaagataagtagtctcgtagatggaattgaaatgaaaactgggaacaccttcaacaagtcctgattgagaatcaagaagtacaattatagagggagttcaccactgtcaacaatcacaaccttgctcttgggagtgccactttgtgttccttcagcttcaatcttgtaaacaacatccattccagaaagaactttaccaaaaacaacatgccttccgtccaaccagctagttgtcacagttgtaatgaaaaattgtgaaccattggtattaggaccagcat

SEQ ID NO: 6697 - DNA, 511 bp, Glycine max
  unsure at all n locations
  Clone ID: jC-gmle01810021c09d1
acatgacactcagttgggaatgagaggttttctgattacagggctaaagaatgttcatcaacaagttacacagggaaaaaggcagatgcacactgctaagcatgataatgacttctgtttgctttttgattcatcctattcattattcgggaagcatcattaagtctatctgctctctcataaatgctagcaacaacaagatgcaactctttcttgttgatattaggattggaatccagcttctcaaacaatgactctaccatcacgaaatcttttcttgcaccatatagactcagcatctggaaatgaacttcatctggaaaaacacacccttcttcatgcatctgtctatataaagcatctgctntatcaaattcacgcaactttccaaaagcattcaacacaagagcaataacatcagaatcaggaaaatatcccaccactctcatcttctcaacactttaactacattgccatactttttgtcttagagaanagataatcatgcacc

SEQ ID NO: 6698 - DNA, 421 bp, Glycine max
  Clone ID: jC-gmle01810021c10a1
ggagtacgtgcgtggcggcgaactcttcaacaaggtcgcaaagggaagattaaaagaagaagttgcgagaaattactttcagcagttagtttccgcggtggagttttgccacgcgcgcggcgtgttccacagggacctgaagcccgagaacctgttgctggacgaggatgggaaccttaaagtctccgactttggtctcagtgccgtgtcggatcagataaggcaggacgggctgttccacacgttttgtgggacacctgcgtatgttgctcctgaggtcttgtcgcggaaaggctacgatggtgcaaaggttgatatttggtcttgtggggttgttttgtttgttctgatggccggctatttgcccttcaatgaccgtaacgttatggctatgtataagaagatttacaagggtgagttt

SEQ ID NO: 6699 - DNA, 469 bp, Glycine max
  unsure at all n locations
  Clone ID: jC-gmle01810021c10d1
acaaatacagtagaatctaatgctccgtcaggagcaaacctaaaatgccggaaaattctcgagggaaaaagaaagtaaaatttaacttacacacagcctaaaacaacaagagagaaatagtatgctatcatcttctgtcattctcctgctaccttaattaatgcaagcattcattatcttttttgttttcattctttggaaacaatcatagtgctcaagacatggtcagatagtaaacatggccatattttcctgttgacattcgaactttgattcaccatgttgtgagatactagtctcatctgctagacctaactctcgttcgaacaaacattcattatctgaatgtctgttaagggcagagtcagaaagtgttcgatgttgttggaattcagattgagtgtgtgtagattgatgacaagaagaagaagaagaagcagattcctccatccctaaatctncaacgcgg

SEQ ID NO: 6700 - DNA, 542 bp, Glycine max
  Clone ID: jC-gmle01810021c11a1
cagagattcaagagaatggagggtgtgagccccgagcccctgagatcagaattggattccaaatccaaacatgacacagcaaaagaagatgatgacgctttgaaagacagcactgaagccgaagtcaccaaaattcgtctcatgagagcctttgttgaaagccgagatccctcttccaaggaagaaatagattaaatgaagagaagattcttgcgggctcgtagtttggatgtggagaaggcttcggcaatgttccttaagtacttgaaatggaagcgttcatttgttccaaatggttgcatatcaccgtcagagattgccgaagatattgcacaggacaaggtgtttacgcaaggactcgacatgaagggtcgacctatagatgttacctttgctgcaaaacattttcaaaggcaaaaaggtgccgatggtttcaaacgggatgtggggtttgttcttgagaagctttgttaaggatgtcaacggggcaagaaaagttatttggcattgcagacattaaaggatgggcatacgtaaacagt

SEQ ID NO: 6701 - DNA, 431 bp, Glycine max
  Clone ID: jC-gmle01810021c11d1
ctaaagaataatctgaccaactagagaactccaatctgcatttaactcctggtacagaagttgaaattatttggagaaaataaattggccaaaaaggctttcaatgattttaatcagctattctggataggaactaatggcatttggcctccgtatatatccgggatttgactctcctctatctcttctagcaatgttgatttcagctttttgttctccacgaatacgatctttttcttggtattttcatcaatgaaagggtaaatcattttccaaattttcataaacatataaggtgcgtgtacaataagcatcttccccaatctttcagggtagcaatcctgcaaaatggatagagaattaaggtatccacgaaggtcactgtttacgtatgcccatcctttaatgtctgcaatggcaagaaacttttc

SEQ ID NO: 6702 - DNA, 521 bp, Glycine max
  Clone ID: jC-gmle01810021c12a1
gaggaaagaaaagcattagaatagcgttggaggaggatccgtcatccctcgcaaagtattacttttgcagagctcatcaaaccgaaccttcattcccgtcttcacgttttcttttctttcaccaacaacaacttttgtttcttttcctttttattgtattggtgaagcttcaccataattcaattatgagctccaccacttcgaaagccacgttcacgatttgattcctggatccaacgcattcattaagcttatgcgatggcgtggtttaatgggaaaaatacatggggaaactttcctgatttggcgggagccgtcaataagcttcaggagagtgtgaagaacatcgagaagaattttgaatctggtcttggattcgaagaaaagggtgaatccagcaatgaagatgccggaacatggcctatacctgctgacaggaaaaccctatttaatccgtcatgtctttatggcgaacatagtgaggaaactactgatgaaatgtctaaaaagacaatactttt

SEQ ID NO: 6703 - DNA, 453 bp, Glycine max
  Clone ID: jC-gmle01810021c12d1
ggagtaaccactggacaaagtgttcaatatttgattgatcagtgttattggtttccttagaagtcacagattgtagaatagaagtgtcagtatcatctctgttctcactatcacttgatgcctcgggttgaacagaagaatttctcttttcactttgttctgcttggaccctctcttcttctttactctcctcttttgtctcaacttgagaattttcatgcccatcactaatatcatgtgattcacccgactccgtagtgacaccctcaactacattgtctccaagattagaaggcataaattgcactgacactagactcccagaggatcccggatcagcaatctctttctcttgagaatgttctacagaatctgaactctcaagcttctcaacaggggattcaggcaattcacaggcaactccagtaaatggttttcttcctttccatgatc

SEQ ID NO: 6704 - DNA, 281 bp, Glycine max
  Clone ID: jC-gmle01810021d01a1
gtacattctccttgggaatatgaatgctatatgaatctagagtcacattgctggctagaggcgttgggaatgcagatcacggtcattgcagaaaacatcgtgtataggaacaatttttttttattaaatgtattgcacattcaaataagaggatcctcttggttaaattaagaaggaaatacatatttttttggttcaaaaaaaaaaaaaaagaaaaatacattaaaaataaatagaataaaaaaaaaataaaaaaaaaaaaaaaaaaaaaaaaagggtgt

SEQ ID NO: 6705 - DNA, 301 bp, Glycine max
  Clone ID: jC-gmle01810021d01d1
gacccaaaaaaaaaaggattcccttttgaactaaaccaaaagggacccgaaaatgaaagggggactccaacaatgaaaaaaaagaagaacgtatacacagaagctcagggaatgcccgggaacgggatacccaaacccccaaccccgaaaggggaatctaaacccaaaacaaatctccaagcccagagggaaggggccctgagcccgagcccaagcaggcgccaccatgactgcgaaggcaagggcctaattttggggcacctaaaccaaaacaacgggccggggctgaaaaacgtacggg

SEQ ID NO: 6706 - DNA, 403 bp, Glycine max
  unsure at all n locations
  Clone ID: jC-gmle01810021d02a1
tgaatatgatagaaaatcaaaaccatcgtggaagaagcacatatggcaagaaaaaacggcaaaagtttcacctttgttaccatctaaagggtgcattttacatggattaagtggtgatcattctgaatctctgtttcttttgaccaaggaaggtactttggtggagagaagattacatcaaaggaagtggaaatgggtagtccatggaagtcctgaacatcaaactttgacatcgattacactagcgctgcaagatgaatcaagcgaaacattcatttctttattctttcctacttcaactggatctgtttttgagtatcaaatgccaaaacagaactgttccaaacaatcagtttccaggagcatggggaagtcatgagcatcccttacatgcanaagcagc

SEQ ID NO: 6707 - DNA, 505 bp, Glycine max
  Clone ID: jC-gmle01810021d02d1
aaaaacataattatttctctaaaacaaattaatctaaacatgcaatttatatattattatctatttgatgcttgtatttttttacatgtttgttacagacggctcatctccccgggctttttagctgaacactactacctatttcagcctctggaagaggtaagttgttaactagaatgtgtgtttgtacatcaagtgcttctggcatgtaagagattgcagacagtattatgacgatgctaatgcaatccaataattttccaagcataaactgtttggagtgccaatgatccgtgaccaagtccattctgtctcctctacaagttgtaattctgccaacctgccatctctgagctcaaatatgacagaaccttcagaaaatggaattggtctggtggatgccacctttggttcacaatttaagttaaggtcagcaaggttatcttggtccttgttcaagccagatgcacaattttcatcgatccgaactggtttctcctcatgg

SEQ ID NO: 6708 - DNA, 562 bp, Glycine max
  Clone ID: jC-gmle01810021d03a1
atccaattgaaattttaaaaatgactgggataaacttaagaattcaattattgaaattgaataagtaaacaatttaattggattggtcgaatggtatcaaaaaaatggagtactaactcccatttcttatttattattgaattaaccgatcaacttgctttgttatcgaacatttctttttgatttcaaaaattttccggaaaaaatttgaatctatttttatatgcgaatcaatcctactacttctggtcctgaggtttctgcgcttgaaaaaaaaaatctgggacgtatcgcccaaataattggtccggtactagatgtagcttttcccccaggtaagatgcctaatatttacaacgctctgatagttaagggtcgagatactgttggtcaacaaattaatgtgacttgtgaagtacagcaattattaggaaataatcgaattagagctgtagctatgagtgcgacagaaggtctaatgagaagaatggaagtgattgacacaggagctgccctaagtgttccagtaagtggagcaactctaggacgaattttcaacgtg

SEQ ID NO: 6709 - DNA, 354 bp, Glycine max
  Clone ID: jC-gmle01810021d03d1
gttaggaattcccatgttcggacgcaaaaactgggtaagaaaacacattggtgggccttaatgggggcccagctcggaaaaaagctcaatttgccccaaaaggggggcttttggcctccgccttattcaaaagaccctccgggatttcaagagttgggggggcttttggggggaaaagggggctacccttttccggagtatttactaaaaccgggggcccattatgggttattatcccaaaaccgcccattggggcccccggtaaccctggggttttaaaaaagccgtttctcaaagagcctgaatttacgggggggggaaaagggccctgattggggaaaacccccaattggc

SEQ ID NO: 6710 - DNA, 534 bp, Glycine max
  Clone ID: jC-gmle01810021d04a1
gcatctcattaaaaatgctcatagctatatctaatgagcatctcattaaatatagctatgaaaaattactgcgccaggctaaagctccaagtatgtttttacaatccttcaaaaattttgattctttgtgtgtgtatggtgatgataacttaattagtgttcatgaatatgtcaagccttactttagtggttctaaattgaaaagctttctagctggtcataatatcaccattactgatggtattgacaaaactagtgcaactttgcaatttagaaagttagcagattgtgattttctcaagagaaactttaagcagatgtctaatgttttgtgggtggctcctgaggataaggcgagtttatggtcacaacttcattatgtttcgtgtaataatctggaaatgcaagatgcttatcttgtcaatctcgtaaatgtgttacgagaatcgtatttgcacagtccataggaagctcgccaattgagaaggaaagctctctctcgtatcgaatggctgcaaaaagctgatgtgccta

SEQ ID NO: 6711 - DNA, 436 bp, Glycine max
  Clone ID: jC-gmle01810021d04d1
aattcatcgaggttttatgaccagcttgctattgtgtaatgaatgataaatcaggcaaactgaaaacgtcatctatattcgacttagaatgtaaacttagagtgtaatttacaaatgaagaataaagtaaataaacaaagcatgtgtgtaaagagcaataagagcaggataacaaaatagaaaaacaaagagcgggggaggggacagtgttcttaacggcatcatatacgagcgacgtaggaattcgcctgtgtaacatatctaacccaccggtatggttcatgcgttgcagatttctttgctatctgcaaatactttacctgaagccgtgaaacgttatgcattggtatagtaaatgtcatgctcacaggtcctgattcttttggtatattaacgtgagattcctaagaaagatcgactggggatctgagcacac

SEQ ID NO: 6712 - DNA, 412 bp, Glycine max
  Clone ID: jC-gmle01810021d05d1
actaaaataattaattttcattactcgaacattaattacgtatacaagggaaaagtgaattaaaatgagtttgactgggggatacactgagaaaagagaatatactacgttacacgtagtagtacaatatgagagtgatatgggccaaattagagaggctaattcttgcgcccaacagttacagctacccgaacaggcaaatttaaaccacacctttacattaatcaaacgaaacacttataccaaagactacgtactattcttgcattgtagatatgagcgatattagatgtgacctcactcagtaaagtaattgaacgtttaattagattattttctttttttaacttttcttgtcattgatcccttgtttctccacattcatataatctcaatgacgaaatcatatcag

SEQ ID NO: 6713 - DNA, 244 bp, Glycine max
  Clone ID: jC-gmle01810021d06a1
ccaaaaactaaccctcttttttttttcctacaattttaatataacaaatggatttcattccctccattttctccttcaaacgcagaacctctctctagccgtttccaaattcctccgttttctttttttctttttcttttcattttccactaaaaaaaataaataaaggaaagaaaaagaaaaaaagaagcgagatgaggttcttcttcgagttcgtgtcttgttgcggcctgccgacgcagcg

SEQ ID NO: 6714 - DNA, 515 bp, Glycine max
  Clone ID: jC-gmle01810021d06d1
ctcactagtcggcggtcgcccttttttttttttttttaaaacgtaaaaatgaaaatttattcccacgaaagaaaatataattagatctctggtgttagttacaaagtaatacaaggaaaatcctcagccggggtcaaagattatgtaatgtagcagtgtgcaaacatttggaacagagagatcccatcccctgtatgtaactttggtaacatctttgaataaatatttggcaagatctcacaatggcacccgggatagctgactgaggccaaacgaacatttacatgtgagggttctattctgatggaggtctgtaatcaagcatctccctgatatttaacctgattgaaggtcccatggctgagcatatgtgagcacttttccagtacacacctttagcacctgaaggtttgtttgcctctactgatttcactgcagcaagcacgtttacaagaagatcctcttctggaaagtcagcttttccaaaaggtaagtgcacgattccagttttgtct

SEQ ID NO: 6715 - DNA, 420 bp, Glycine max
  Clone ID: jC-gmle01810021d07a1
gtcctggacaggcaaaggtgttttcaaagatttttgggcatgagttaagcctgggggatacaaaatctcagtctataactattagtatctccccataggtggaagacgatccgggtttcacttcagactcctatgaagttcaagcactaggggtgaaccatgcttatggaaatttcttccaatgggactttaggtgacggtaatgaaggaacattggttcctcaattgaatcaaatgatggctgggaatattaatgctcaagcaagggttccttgtctagatcttggtaatgtagactcatcatcaatttatgcagatgagcggaagcccaaaaaatgaggtaggaaacctgccaatgggagagaggagctcgtgaaccatgatgaacttggagcaaagacgtgaggaagcttaatagag

SEQ ID NO: 6716 - DNA, 508 bp, Glycine max
  Clone ID: jC-gmle01810021d07d1
tactgtaaaaacaaagtgcactaagaacaatattatgttagccacttaacctacaagacagagtatttctaacatggtttacaatatcattgagatgctacacataaatatgatctgacaatcaacttttggatagggatgcttcaagcttttctttcaactgtatagcagcagcctcccctccctcagttcttatggagaatgtatgaattattttatcatctgcagttgaaacattagagtcttgagccacaatttgatgctccctgaacgttttaacaacattcgaaacagggtgaatatctaaggggcatctcactgtcacaactgtgtcatcctctctttcctgaaaatccatatctggcaatgacaatttttgggccttattgttacccatgttcttctcaagcttcaacaccttgatcttcatctgcagatcagtgataaaggtaatggcatcaccaagcaaagatgccttgtccatcttagatatattagggacaacagc

SEQ ID NO: 6717 - DNA, 408 bp, Glycine max
  Clone ID: jC-gmle01810021d08a1
gaccaacccaatctctaaggaggaggatatgcctggaatgtggcttttggatcagaagaactgtgtgggggagccatttttgcggccttgtcatggtggtgatgtgaagggtgtggagtttgaacaagtgagagaggactatggagaatatgtgcatgaacaagaggaggtggaggaggaggatgaatatgatgatggtgattaggatgagcttgatggcgggttccatctctcgcccaagtgtatttctatggaggggatgttttttgggaatgggggtctcattcaagctatggaatctgggcatatgcctttcggatctgggattgatctccgtgactattctgtgggagattttctgtctttcattgatgattctcatatgattactggatcataattttatgt

SEQ ID NO: 6718 - DNA, 422 bp, Glycine max
  Clone ID: jC-gmle01810021d09a1
ggagtacgtgcgtggcggcgaactcttcaacatggtcgcaaagggaagattaaaagaagaagttgcgagaaattactttcagcagttagtttccgtggtggagttttgccacgcgcgcggcgtgttccacagggacctgaagcccgataacctgtcgctggacgaggatgggaaccttaaagtcttcgactttggtctcagtgccgtgtcggatcagataaggcaggacgggctgttccacacgttttgtgggacacctgcgtatgttgctcctgaggtcttgtctcggaaaggctactatggtgcaaaggttgatatttggtcttgtggggtttgtttgtttgctctgatggccgggtatttgccctttaatgaccgtatcgttatggctatgtataagaagatttacaatggtgagtttc

SEQ ID NO: 6719 - DNA, 462 bp, Glycine max
  Clone ID: jC-gmle01810021d10a1
aaatacaatggaggacttgagacagaggaagcatacccctacactggaaaagatggtgtatgcaaattctcagctgaaaatgttgccgttcaagtcattgactcggtcaatatcaccttgggtgctgagaatgaattaaaacatgcagatgcatttgttcggtcggctagtgtggcctttcaggtggtgaatgggttccatttctacgagaatggagtttacactaatgacatttgcggtagcacttcccaggatgtgaaccatgccgtccttgctgtggggtatggagttgaaaatggctgtccatattggctcataaaaaattcatggggagaaagttggggtgagaatggctactttaaaatggaattggggaagaacatgtgtggtgttgcaacttgtgcgtcttatccagttgtggcataaattgcataataatattggccctggtgactaccacct

SEQ ID NO: 6720 - DNA, 493 bp, Glycine max
  unsure at all n locations
  Clone ID: jC-gmle01810021d10d1
ctatcaatatatgatcgttatttatgtctgtgatacacacaattcaggccatgatattcttacgtgatttacagcaacttctaacttatttaatacatcataccaacccaactaggagcaattttcattatacaatgacacttatctttaaactctgaagcatgacaaggtggtagtcaccagggaccatattcttatgcaatttatgccacaactggataagacgcacaagttgcaacaccacacatgttcttccccaattccattttgaagtagccattctcaccccaactttctccccatgaattttttatgagccaatatgggacgccattttcaactccataccccacagcaaggacggcatggttcacatcctgngaagtgctaccgcaaatgtcactagtgtaaactccattctcgtagaaatggaacccattcaccacctgaaaggccacactaaccggctcgaacaaatgcaactgcatgttta

SEQ ID NO: 6721 - DNA, 445 bp, Glycine max
  Clone ID: jC-gmle01810021d11a1
gaggaaagaaaagcattataatagcgttggaggaggatccgtcatccctcgcatagtattacttttgcagagctcatcaaaccgaaccttcattcccgccttcacgttttctttcctttcaccaacaacaacttttgtttcttttcctttttattgtattggtgaagcttcaccataattcaattatgagctccaccacttcgaaagccacgtccacgatttgattcctggatccaacgcatccattaagctctcgcgatggcgtggtttagtgggaaaaatacatggggaaacttccctgatttggcgggagccgtcaataagctttaggagagtgtgaagaacatcgtgaagaattttgattctgctcttggattcgaagagaaaggtgaatccagcaatgaagatgccggatcatggcctatacctgctgacaggaaaaccc

SEQ ID NO: 6722 - DNA, 462 bp, Glycine max
  unsure at all n locations
  Clone ID: jC-gmle01810021d11d1
ggagtaaccactggacanagtgttcaatatttgattgatcagtgttattggtttcctcagaagtcacagattgtagaatagaagtgtcagtatcatctctgttctcactatcacttgatgcctcgggttgaacagaagaatttctcttttcactttgttctgcttggaccctctcttcttctttactctcctcttttgtctcaacttgagaattttcatgcccatcactaatatcatgtgattcacccgactccgtagtgacaccctcaactacattgtctccaagattagaaggcataaattgcactgacactagactcccagaggatcccggatcagcaatctctttctcttgagaatgttctacagaatctgaactctcaagcttctcaacaggggattcaggcaattcaacaggcaactccagtaaatggttntcttcctttccatgatccaagttct

SEQ ID NO: 6723 - DNA, 474 bp, Glycine max
  Clone ID: jC-gmle01810021d12a1
cccaaaatttgttcttcaggtgtatcgagattttgctaccacaggtgatttgcaatttggagtaaatgtgtggcctgctgtccgtgctgctaatggagtacatggaacaatttgatagagatggtgatggtcttattgagaatgatgggttccctgatcaaacatacgatacatggacagtccatggtgtgagcacttactgtggttgtctttggcttgctgctctacaagctgtagctgtaaatggcccttgaactaggtgacagagaatttgcagaatcatgtaaaaggaagtttttgaatgctaagccagcatttgtagaaaaattgtggaatgtgtcgtattttaactatgacagtggattaagctggaacatgtaattcattcaagcagatcaattggctgggcagttggttacatcatttttcaggctgtcctatctttttgaggattctaaaatcaaaagtgctcat

SEQ ID NO: 6724 - DNA, 443 bp, Glycine max
  unsure at all n locations
  Clone ID: jC-gmle01810021d12d1
tgtacagtacaacagttatagtaaaggccaaaggacgggtaacctatgttgttttaaactaagtggctatataaattataagttataatcgaactctgcttatttccaaaacatttccctccagaccttgaccgccattattaacagcttctctaggtgagggttgggtaaggaacaatggggaaaaagttacctatacaaaagttatgttttcttacttcttacatgttaacgatcagcaagcacaattaaatacagaattgctaaagcatcctgcttttgttgcaatcttcctcacacctgtttcattatgagagtatcctccaataacaggagataagtggattctgtccatgatattgattttaggggcctctagaattgccttgggccgatttattgcatattgcatgccccanatagctaggggcctcatatacata

SEQ ID NO: 6725 - DNA, 561 bp, Glycine max
  Clone ID: jC-gmle01810021e01a1
gtggaaaggaagatagtcctatgtgtgacgtgccagggtttgaaaacagcaagatgaaattgctaaggcatgtttcatttgtggattgtccgggacatgatattcttatggctacaatgcttaatggagcagcaatcatggatggagcgttgctactcatagctgctaatgaaagctgcccacaaccacaaacatctgagcatttagctgctgtagaaatcatgcgtctacagcacataataatccttcagaacaaggtagacttgattcaagaaaatgtcgcaatcaatcagcatgaggcaatttcaaagtttatacaaggaactgttgctgatggtgcaccagtagtacctatttcagcacagttgaagtataatattgatgttgtgtgcgaatatattgtgaagaagatcccaatccctgaaaggaactttgtttctccacctaacatgattgttattcggtcatttgatgtcaataaacctggttatgaggttgatgaaattaaaggaggtgtagctggtggaagcattctgaggggtgttttgaaggtcaatcaat

SEQ ID NO: 6726 - DNA, 562 bp, Glycine max
  Clone ID: jC-gmle01810021e01d1
aagaggtacagttgggaaaataaaccaataacgatgtgaaaacaaaatagaagacaacaatcaaaaaacgttttcttctccacctcacaaaaatggttcccaacaattgcctcccttcccacatatctaaattcatctcagttttttatagctgctggtgtttcttgtgatcagtgttcaactcagatggggggcgggagggacatcaagagtgattccagcttggatttgtccccacccgataagacgccaatgcttctcaacacgtcgactaagtgcaatcttctcacccttgctagtgcacacaggggaagtaagttgcaacttcgccaagtcattcttcacagcaactactctagcccccgtcgacattgatccaatgttcaacattagcatctctcctttggccagcttggataccttcccctgtctctcagacccttttgttcggacaccaagaagtcgtcgaagcaggaaaaagtttacctccagttcaacaaaaacctcaggtagtgatccaacctctcctaaaacttgacctaccaacctatcagcgcgtgtc

SEQ ID NO: 6727 - DNA, 540 bp, Glycine max
  unsure at all n locations
  Clone ID: jC-gmle01810021e02a1
aagctgagttcgatgtaagtgcaaaagaggcaactcttgctgaagccaagggtatcaatggtttgcgagctgtttttggggaagtctatcctgatcctgttagagttgtgtcaattggacaaaaagttgaggatctccttgctgacccaaagaatgaaaaatggttatctttttcgtcagagttatgtggaggtacccatatttcaaacacacgagaggcaaaagcttttgcacttttatctgaggagggaattgcaaaaggaatacgcagaataacagctgttacaactgatcgtgcttatgatgcaatgaaagtggcagatgaatttgatcagcaagtagacgatgcggctaagttagaaggaagtttgctagaagagaaagtttcatcattgaaaagcaatattgaaactntatctattcctgctgccaagaaagctgacatcaagaccaagatagcccgacttctggatcaagtaagaaaagcacaaaagctggttgctgatgaaaacaagcttaaagctttaacgattacagcag

SEQ ID NO: 6728 - DNA, 404 bp, Glycine max
  Clone ID: jC-gmle01810021e02d1
cgaaaatggtgagtttaaaatttcaaaatatcttcataatctatcagagcagttgctactgtattgtggaacaatttgtgatctatacataaaccaaaaactaacatgtttgtatcaaaagaatattcaggcactaaattagaaatttgttcaactcattcggatctaataattacttcaagtgcccttcccttctgtatgattataccaaacgaaagatccatatcattgcttacaccccaggaaggatatactgcaatactccatttaactcaatttcatcgacgcaaatttttctgcaagatccatagcttcgtttacatgtgatgcctctgtaccctgacccgtagcaagaccaccttttcctttaccacatgtcccttttagaggccccaaagcattac

SEQ ID NO: 6729 - DNA, 477 bp, Glycine max
  Clone ID: jC-gmle01810021e03a1
aaaagccttagccttccctacaactccaaacacaaagacatcatcatccatggctgcctccgtctccactgtcggagctgtcaacagagctcttttgaacctgaatggttctggagctggagcttcagctcccagttcagccttctttgggaccagcttgaagaaggttattgcctcaagggtccccaacagcaaggtttccggtggaagcttcaagattgttgctgtagaagagaagaaagagattgaagagacccagcagaccgacaaggacagatggaagggtcttgcctatgatatctcagacgaccaacaagacatcacaagaggaaagggtttggttgactcccttttccaagctccacaggatgctggaactcactatgcagtcatgagctcctacgagtacctcagcactggacttcgccagtacttggacaacaaaatggatggattctacattgctccagcttttat

SEQ ID NO: 6730 - DNA, 391 bp, Glycine max
  Clone ID: jC-gmle01810021e03d1
gggttctggttttcttttattatctggcctcattcaacagaaaaacccgcccacccaaagacagggaacccaaacccccaccaacccaagggaaaacaaacaacgggggcccccaaaccaacagaggcccccccagaacccaaaaaaggggaccccaggggcaagccaaaaaacaaaagaaccacaagaaacaccaaacccacacccccccgcgcacaaaaaaacaacaggccccaaaaaaacccccccccgggcccccaacagcccaccccccaccggaaacgcccagagaacccccaccaaaaaccgtgcccgccacaaacgcccatctgccgccccccaacaaagagccaaagacaaccaccccgcacctaaaaacccccaccgggac

SEQ ID NO: 6731 - DNA, 176 bp, Glycine max
  Clone ID: jC-gmle01810021e04a1
ctgaaaatgcggaatcctctgcatgatctggaatttgtgttttctttcgtttgttcgtttgtttaattcaataaaggaaattagacatgaccctcttgttgagtatgctctgtctatttgaaaatttccacacctcttttaattgtcgtaatgatgtgtgaagtgtgtgttatttt

SEQ ID NO: 6732 - DNA, 459 bp, Glycine max
  Clone ID: jC-gmle01810021e04d1
ggtgcagattctatatcatttacaaagtcaaggcttgcatggattattatgaacatgctaaatatgtacatttttattttcctatatacctccacgcacatgatttgtctaaggttctataatagtttgaaaatactccagattaggatagcaagcaattcttcgacgactaaaacgccgcctaacagattactacgttaccaagttccatgcattacatttacattctgaaaggtgcagtaaaaggaaatagtctcggtgtacaatcatctagtctatatcaagaaaagggtacttggattcaacataattttctttgtcccataggaatgatccaaaagcaagtgcctccaaaactagcatagtcaagcccgagaaagtgagtgaaagcaattcatcattggatgtttcaattgaaccatcctcggagacacgaatatctggccttccaaacagggc

SEQ ID NO: 6733 - DNA, 583 bp, Glycine max
  unsure at all n locations
  Clone ID: jC-gmle01810021e05a1
gtaagtgccgagtttccctcaagtgtaacagctaacactatcaaagtgcagatgccactaccaaaatgtacctccagagttagttttgagctggaacctggagctgtaggacaaacaactgattttaaggaagcaaataagaggctagaatggagtgtgctccgatcccccgacgatctttcttaggaatctcacgttaatataacaaaagaatcaggacctgtgagcatgacatttactataccaatgcataacgtttcacggcttcaggtaaagtatttgcagatagcaaagaaatctgcaacgcatgaaccataccggtgggttagatatgttacacaggcgaattcctacgtcgctcgtatatgatgccgttaagaacactgtcccctttcccgctctttgttgttctattatgtattcctgctcttattgctctttacacacatgctttngttatttactttattctttatatgaaattacactctaggttacattctaagtcgaatatagatgacgtttcaagttggctgaattatattcattacaaatagcaagctggcattaaaccttgatgaat

SEQ ID NO: 6734 - DNA, 451 bp, Glycine max
  Clone ID: jC-gmle01810021e05d1
atattatcggtggtcgtgctttttgcgtgcttggagtttaccttttttaggatatatttactatacgctaggtttcaaacgaaaacccgcccgtaacccaaaggaaagccgcatatggtagggagcaaacgcaccacaagcatagcaaacagccacaggcgccggctatcacacccctacaggggacacagtagtcgccaaaaaagactgcccaagggcgagcatacgggaacagaggacctatgctgtcgtacacaggaaaggaagcagcgcacacatccaacggggcaaagggcaaatcccataagcaactaacgaccagaatgccatgcacaaaggaggggagccgccgaaaccagattagggaaaataccgggagggctgctaggaatactgtacaggggggggctaacaatagcacagccatggacaagaagtggagagaaaaatt

SEQ ID NO: 6735 - DNA, 461 bp, Glycine max
  Clone ID: jC-gmle01810021e07a1
actagattcatttgagattgttcttgcaggtgctggtggtcacagtaaggaattggatggtgaaagtacccttggattctgatgagttgtatgaaatacaaagtcatgaatctagtttaaagaaaaaactcatccctcacactaaccaattcagggttctagacaaagctgctgttctacctgaaggcaatgaggcaaggagatggaaagtctgcacagtgacacaagtggaggaagtgaagattctgacaaggatgatgcctattcttctaagtacaatcattatgaatacatctttagcccaattacaaaccttctacatccaacaaggtaccttaatgaacacatacattggcaaactgaacatcccagcagctttcattcccataattccattagtattcatgacccttttgatctcggtttacgaatttgctttcataccactttgtccggagaat

SEQ ID NO: 6736 - DNA, 442 bp, Glycine max
  Clone ID: jC-gmle01810021e07d1
ccgtttcaggaatcacaacaaagtacaataatgaagatggtcaccgggtataaattattgtatagtctattctatacaatcttaaccaatctccacgtgacacattattaattctttttaacaaactgataaaaatataattccatgtcatgtgtagatcagttggaagttggaataatgcgattctggaccatataataatttctcgtgagagtggatttttctggtttatttatcttcattctggggaatgttttgaaccgtggatacaaaactagtagagtacacgttttcatcattacgaggaggtggatctttgagcaacattcccttatcaaatggtacaacactttggtatttgtaccattttgcacacatcagataaatgagaaagttaatcaggctgagtatagccaaataccagtagaacaattgaacatgg

SEQ ID NO: 6737 - DNA, 555 bp, Glycine max
  Clone ID: jC-gmle01810021e08a1
catgggcccatgatgagagatatgcgcacaaatcatcacgctattaatactactgctccgctacttgctgcctaggctagtgcgcacccctgtcttcaacctcttaccgtgcgaatctctcaattcatcaaaactaacaacatcatcaccatcgtcgcaccgaaatcaatcgccacaacctcgggatctcagattcgacgcgccaaatcatgtcgaaggcgcgtgtctacaccgatgtcaatgtccttcgccccaaggagtattcggattacgagtctctcacccttcaatgggggtaatgttccgaaccctaatttttatgtttctcttattcttttctgatccccaaagtgaacaatccacaatgaaggggaattttattgtctgatcttagagttagtagataggttcttagctgctggtctgttgcattcttccccattccttgtgaattccaatggcatagtgcaattttatctagcatttcgtggtaactaactgattgacgaagaattatgccaatttcgtagctctgaaatgtcctttttattggat

SEQ ID NO: 6738 - DNA, 426 bp, Glycine max
  Clone ID: jC-gmle01810021e08d1
tgatacacttccccaggaaaactaatctctaataaactgaatgtatcggaggtgcgctgttagggtatcatacaacaatcccgaatatattaacttaagtttatggatccatatgtgagcaagttactgtgtcctcattctgctactctcagctgcccttacctgagagaaatatggatgtgccattgcttctctagctgttagcctgtcctggtgatcatatcgaaggagcttatcaagaaaattaattgcctcaggagacacatgatgctgattatctggattgatgaatttagaccagggctttcgactgtgtcttccaacaagtgcatcaagttgaggatcaagctccagatgatacttagtaagatatgcattcaattcatcagtcccaagcaccttaactattctgacaagctgatcatg

SEQ ID NO: 6739 - DNA, 596 bp, Glycine max
  Clone ID: jC-gmle01810021e09a1
ggatcatacaaagttgctgtggttaacaggaagagaccctcaattcttgcactttctaggcaaaagttgacccaacttccaggaacttctattgagggagttgaaaagggtggctacattatttcagacaactcgtcaggtaacaagcctgatgttattttgattggaactggttctgagttggaaattgctgctgctgctgctgaggatctaaggaaggaaggaaaagctgttagagttgtttcttttgttagctgggaactttttgatgagcagtcagatgaatacaaagagagagttctccctgcttcggtaacagttagagttagcattgaggcaggatcaacatttggttggcaaaagattgttggaagccaatgaaaggccataagcattgatcgatttggagcaagtgctccagcaggaaaaaattacaaggagtttggattcaccaagaagctgtaattggtgctgccaaagaactttcgagaacatatgttgacttctttaagtttatctcattctaaacttgtgggttttatggtggtggtttgggtactattacattaattcgttttgaaaatcactttagcccc

SEQ ID NO: 6740 - DNA, 343 bp, Glycine max
  Clone ID: jC-gmle01810021e09d1
tacccaaagccaccaccagtgaaaaccacaagttctagatgagataaaacttaaaagaaagtcaacaaatagatctaccaaagttctttggcagcagcaataacagcttccttggtgataccaaactccttggatatttttcctgctggagcacttgctccaaatcgatcaatgcctatggcctttccttggcttccaacaatcttttgccaaccaaatgttgatcctgcctcaatgctaactctaactgttaccgaatcagggagaacactctctttggattcatctgactggtcatcaaaaagttcccagcttacaaaagaaacaactttaacagcttttc

SEQ ID NO: 6741 - DNA, 441 bp, Glycine max
  Clone ID: jC-gmle01810021e10a1
cataccgaacactcttcttcaatcaagcgaaggtggtctcgattgcaagtgatccacgatacactctacgcttcacaaaaccttcaaacccaattccacagaattcttctgcttcaccatgccaccaaagcctttagactatgggtcaataaatgaaaacgtgaagaagagtcaatatgctgtcagaggtgaattataccttcgagcttctgaacttcagaaagagggcaaaaagattatctttactaatgtttggcaaacccgcatgcattgggacagaaaccactgagcttcccttgccaggttgttgctttgtgccaagctccattcctacttgaagatcctaatgttggactgctattccctgctgatgcaattgcaagagctaaacactatctttcattgacctcgggtgggttaagtgcttatagtgaactccgt

SEQ ID NO: 6742 - DNA, 353 bp, Glycine max
  Clone ID: jC-gmle01810021e10d1
ttcaaaaatgattttaaaaaaagggttagggttaaaaaaaatctccaaggaggggcaaattgttaaaacggggggtatggtttttttctttccgggggatggatgggtaaaaaacttccaaaagcgcacgagttttatgcagcttttacaatggtttttttacaaccttgaaaaacctttatcgtcttccaattgcccccagaattcatgattgaactttttgaaactttccataatatcagggttgttttccttagctgggaaaataattggcctaaaatggaaccccccttttttttgaccaaatcctgaaccaggaaccggggatttgccacggggttccaaaaacttgg

SEQ ID NO: 6743 - DNA, 518 bp, Glycine max
  Clone ID: jC-gmle01810021e11a1
cggggaccaatgatgattgtaactaaattaatggcaccaattcaatatgtagcttgccataaaaacacactcagatcagttacactgataccaatcaattttgttcaaggcatgtagcatcggagctgctgactaatattggggacaatgatggtaactttgtcatcacggggaccaatgatgattgtaactaaattaatggtaccaattcaatatgtagtttgccataaaaaaaacgtataaacgttacagaataaagaacaaaccaagctaatccaagtgaaaaaaagagtacccgaatattggttatttaaaattgaaggtgatatcactatattccccttcccctttctggattgaatcccaactttgaacagtaacattgaaatcgttaaattgttagaggtttggtatctttgatttgggaaaaaggaattattgtttgtgaaggaagaaactgcttatgttgggttaagttaacccgtcctggattcagattaagagattttctggttagc

SEQ ID NO: 6744 - DNA, 452 bp, Glycine max
  Clone ID: jC-gmle01810021e11d1
agtttcttccttcacaaagcaataattcctttttcccaaatcaaagatgacaaacctctaacaatttaacgatttcaatgttactgttcaaagttgggattcaatccaggaaggggaaggggaatatagtgatatcaccttcaattttaaaaaaacaatattcggtactctttttttcacttggattagcttggtttgttcttttttctgtgacgtttctacgttttttttatggcaagctacatattgaattggtgccattaatttagctacaatcatcattggtccccgtgatgacaaagttaccatcattgtccccaatattagacagcagctccgatgctacatgccttgaacaaaattgattggtatcagtgtaactgatctgacgtgtgctttatggcaagctacatattgaattcgtgccattaatttagttacaatcatcattg

SEQ ID NO: 6745 - DNA, 224 bp, Glycine max
  Clone ID: jC-gmle01810021e12a1
tgttgatcaatgatgatcggaagtaagataaatggaccaatgtgatacggggctagacctaattacacacgtaagattaattacactgatacgatacaaaactgatcgaggcatgtatcatggcttctactggataataatgtagacaatgaaggaaaaagtgcaatgaagggggccaatgatgattgaagattagataatgggtataatttaatgtgtaacta

SEQ ID NO: 6746 - DNA, 404 bp, Glycine max
  Clone ID: jC-gmle01810021e12d1
catttgctttacctttacaatgaataaatgacttctatccaactcgctgttgactcgcctctaacaattttacgattgcattgtaactgtgcatagtcggcatcaactactggctggggccggggatattcacagatagaacctgtaattaggaacgcgcattctctggccctttgaaggacactcgtactagcttgcacagatgtttcacacgcgacctttgaccgatcatataatggtgggcgacgtagtgaactgaggccatgaataaaattactagcagtatagacgcccgagatgacggagtaccatgattgttctcacaattagacagcatgttgcatgctacatgcctggaacacatgagagtggcatcagcagaagtactctgagtgtgcatttat

SEQ ID NO: 6747 - DNA, 591 bp, Glycine max
  unsure at all n locations
  Clone ID: jC-gmle01810021f01a1
ctcgagccgctcgagccgtgctcatggaaaagctcaagaatccatttaccgccagagaaatccagttgctccagaggtgcagggcaatggaagaggaaatgagaggatagtagacctacatgggttgcacgcaagtgaagccattcatgtgctgaaacatgagttgagtgtgctgaaaagcactgccatagctgccgagcagcgtttgcaggtttatattcttgtggggacaggtcatcataccaggggttctcgcactcctgcgagacttccaatagctgtacagcgttttcttcttgaagagggcattgacttcatggaaactcagccaggcctactacgtgttgtgatatattgaaccagccaagaatgtgtacaagttttttgacacagtataaagtccaccaacacggacattttagttattgttgtatctgtatatgcccgaagaacaggaaaaaaatagaagaaaaaaacagttaggggagaaggaaagagaatggttgtagcagaattgtatcgttaaggttaggggcagcgtcattttcttccgtaatntgtaccctaatttttttttttattagatgtact

SEQ ID NO: 6748 - DNA, 386 bp, Glycine max
  Clone ID: jC-gmle01810021f01d1
gactgagcttgatagcccaacgaacacaaaaaggatacacaacatggaggatccgggaccaacatctcatctgggaacaaaacacggcccctaatgacaaactagttattccgacgaaccatgaaccacaaaaacaaaaacatagcttaaaagaacagataagcaaacgcccagatatgtgacaagtaccatggcacaaaatagaagcctcccgggttttcgcgctgcgccaaacagtgaaacatttcgaccccgcgatcaggaggttcaccgtttcgcacaaaagaattgcaatcgggccagacctgaaacccaaacgggcttaaaaaaaacggttgcggataagagacggaaaaagaattttccggacaaaaatgcggggagaa

SEQ ID NO: 6749 - DNA, 482 bp, Glycine max
  unsure at all n locations
  Clone ID: jC-gmle01810021f02a1
gagcactaagttttctgatgtgttggcattcagtgggccagcacctgagaggatcaatggaaggttggccatgattgggtttgtggctgcaatggcagtggaagtagccaaagggcaaggtgtgttagaacaaatatccaatggtggcatcccatggttcttggggacaagtgtggtccttacccttgcttccttgattccactcttccaaggtgtcagcgtggagtctaagtccaaagggttcatgtcctcagatgcagaactgtggaatgggagatttgctatgttgggtttgattgctctggcttttactgagtatgttaagggtagtactttggtataattcagtcatgaaggcacaccacaatggacttaatctcctttgtgattagagagaccaatgtttatttgtacttcgtgtgtttatttaatctacatatcanaattatttcggtaatcataaccaaacttcttcacattga

SEQ ID NO: 6750 - DNA, 494 bp, Glycine max
  Clone ID: jC-gmle01810021f02d1
acacgaggcaaacagcaattcaatgtgaagaagtttggttatgattaacgaaataattttgatatgtagattaaataaacacacgaagtacaaataaacattggtctctctaatcacaaaggagattaagtccattgtggtgtgccttcatgactgaattataccaaagtactacccttaacatactcagtaaaagccagagcaatcaaacccaacatagcaaatctcccattccacagttctgcatctgaggacatgaaccctttggacttagactccacgctgacaccttggaagagtggaatcaaggaagcaagggtaaggaccacacttgtccccaagaaccatgggatgccaccattggatatttgttctaacacaccttgccctttggctacttgcactgccattgcagccacaaacccaatcatggccaaccttccattgatcctctcaggtgctggaccactgaatgccaacacatcagaaaactt

SEQ ID NO: 6751 - DNA, 549 bp, Glycine max
  unsure at all n locations
  Clone ID: jC-gmle01810021f03a1
tgacaattggtttgatgcagtagcagtgtcagctgaggttgcggcggagaaaccaaatccaactatatctctcaaagcatgtgaattattggatgtaaaacctgaggatgctgttcatgttggggatgaccgcagaaatgatatatggggtgccagggatgctggctgtgatgcttggctttggggaagcgatgttcactcctttaaggaggtagcacagaggattggggttcagattctttctaagagatgtatcacaacagcagatacatggaggaggatcaacttaccaacatggagtgtgaaatcctcaaaggattggactgaaaattaagtattccaacaacatacctctttctagaaattcaagacctacgagcctatgttgaccacagcgngttgcagcacacttatctcatcttgttgatatggtgattcacacaagggaaagtcaaaggtagtttttcttgatatggtgattcatgataggcgacattaggtagcttactgacatttggacaagggtatngaagtttgaagtgaatatgg

SEQ ID NO: 6752 - DNA, 441 bp, Glycine max
  Clone ID: jC-gmle01810021f03d1
ataaaaaatagaccttcgtttggggaaaaaaatagcggccaaaacccaaacggggataaaaagttccctcaggggggcccccccatgggggaaaagataacacccctttgtaccccaagatgaaccccaggttatccaagatgaagccccagtgacctggaaagccgaattcccagggccaaagggtgacaggcccccttagggcgccgatgaaagcaccccctttcaggaaaaaaccccagagggcttgccgggggggaagcacctgggatccgagaaggaaaaagcggggcggcaaaccgggggggccaacaaggggtaagggggttagagatgtccaaaagggggttggccccggaaacacaatttgtggctcccaccgcgggggggttacacccgcaggggggaaaagtggcccctcccagggataggggggggggg

SEQ ID NO: 6753 - DNA, 554 bp, Glycine max
  unsure at all n locations
  Clone ID: jC-gmle01810021f04a1
gccataagtcccttccctattgtaatttctgccagcctcaaaaaagacttgctctgcctctgccactctctgagtaggactacactgccatggctgcctcagtctccactgttggagctgtcaacggagctccactgagcttgaacagctctggagctggagcttcagttcccagttcagccttctttggcaccagcttgaagaaggttattgcctcaagggtccctaacgtcaagatttcttctggaagtttcaaaatcgttgccgcggaaaaagagattgatgagaaacaacagacagacaaggacagatggaaaggtcttgcctatgatgtttcagacgaccagcaagacatcacaagagggaagggtttggttgattccctcttccaagctccacaggatactggaactcactatgcaatcatgagctcttatgagtaccttagcactggacttaaacagtacaacttggaatacaacatggacggtttttacattgctcctgctnttatggacaagcttgttgttcacatcaacaagaacttcatgacc

SEQ ID NO: 6754 - DNA, 432 bp, Glycine max
  Clone ID: jC-gmle01810021f04d1
ggaaaaaaaaaacccaggttcccaattaaatttaaacccgggaaaaggtcacctgggaggctgggaccggtttgacccacaagggcagcttcggggaaaggaaaaaaaaaaaaagggttgaaacaaacgggggtcaaaagggcccccggggaaaaaagggtttggcccaaagggggtaacccccctggggggtaaccaaatcgggtggaccccggaagggccgagcatgcccaaggtccccccttacttcccccctgggggggcgctcatcgggttccaatttcaagcctttttgggggaaatttgaaaagactttccaacaatcgggggcaatttttccccgggaattcagaacaattttccccccaaaagggttccccaaaaattctttttcaaagggggaaattcccaattgccttcccccaaaacttt

SEQ ID NO: 6755 - DNA, 552 bp, Glycine max
  unsure at all n locations
  Clone ID: jC-gmle01810021f05a1
atgaaggcagatctttcagactaagagcttatgtgatgcagttggacgcagagacacttcagagacttgctactgtacgatcgaaggaagctatatcattgattgaaaagcaaactcaggccctgtttggaaggccagatattcgtgtctccgaggatggttcaattgaaacatccaatgatgaattgctttcactcactttctcgggcttgactatgctagttttggaggcacttgcttttggatcattcctatgggacaaagaaaattatgttgaatccaagtacccttttcttgatatagactagatgattgtacaccgagactatttccttttactgcacctttcagaatgtaaatgtaatgcatggaacttggtaacgtagtaatctgttaggcggcgttttagtcgtcgaagaattgcttgctatcctaatctggagtatttncaaactattatagaaccttagacaaatcatgtgcgtggaggtatataggaaaattaaaatgtacatatttagcatgttcataataatccatgcaagccttgac

SEQ ID NO: 6756 - DNA, 176 bp, Glycine max
  Clone ID: jC-gmle01810021f05d1
aaaataacacacacttcacacatcattacgacaattaaaagaggtgtggaaattttcaaatagacagagcattctcaacaagagggtcatgtctaattccctttattgaattaaacaaacgaccaaaccaaagaaaacccaaattccacatcatgcacaggattccgaattttcag

SEQ ID NO: 6757 - DNA, 460 bp, Glycine max
  Clone ID: jC-gmle01810021f06a1
ggcacactcactcactggtcattttatgttttttctctctaccctcattcattctcagtctcaattttgttcaacactctcagagcccttttctgctcccacgcatatgcataccgcacaaccacgatcacctttcgagtaatatggagatcacgagcagccataacagcggcagcatgatgtggtttttcaaagataagggctttgatgacgacagtgcacaaggaatgttccgaaagtgccggcgcctcgagggtgtgcaccaagaaagagcaagtgagaattgggactatttgagaagcattggcattgaggaaaggaagctaccctcaattgtttcaaaatgccccaaaattcttgcattggatctttatgagaagattgtgcccactgttgagtgtctcaggacattaggaacaaaacctaattgaggttgcttctgccatagccaaatttcctt

SEQ ID NO: 6758 - DNA, 445 bp, Glycine max
  Clone ID: jC-gmle01810021f06d1
gatatgattgtttgagtccttgtgaaaaactcaaccaagctcccttgcagctgtgacaaaagctgcttcatctggtaactccacttcataagttgggagagtaaccctcagtatccattccaggcaaacatatctaaatcatagattcaaaggataacctatcatcttagttacaacatatgacaaaactatgaatttgaacaaaagatcagacatatatggaatcacaaaaatctttgagagttaccggactccacatcagaggacagaaatattgataaactatttaactaattatgaaaatcaatcaaaaataaaaataaaatagggatgagacctagttactcaaggcatgcccttctaacaagccaaatttcatgaagaacttcttcctattacaatccaacatttcactcaagctacaatttaaactcctctactttag

SEQ ID NO: 6759 - DNA, 527 bp, Glycine max
  Clone ID: jC-gmle01810021f07a1
taattctcctctcctcgcactccaccacgacctccacggcttctccacacctcgcaccctcgcactcgcagtctctctctctcatgctctcgccaccacaaaaatggtgcttccttgaaacttggtgaaacctagtttcatttttctaccattcttatattgattttgtgttggaagcagctcgaattttgtgagtgacgggtgtcttgatagagtagctatagtatccgattatgagagtaaaagtggggactattctaatccatggagactttgcaccgagacccaggtggaggaattgaaaatcttgatctgcgtgtgtccaatttgggccaccaggatcatttttgctgcagtctatgcccagatgtcaacattgtttatggagcaaggaacaatgatgaacacatgcattggttccctctaactacccctctcaacatttgatgtcatgagtgaggatttgagggtccctttctatgacaggataattggtccaatcataaggaaagtcacaggcaatgaaa

SEQ ID NO: 6760 - DNA, 427 bp, Glycine max
  Clone ID: jC-gmle01810021f07d1
gttacatatgtgagttttgcactgtacagaataagaacatttactgccaacaatttacctatgtgaaccttctcacttagaggctcctgagagaggccaagtttacttttatgcgtagcatatatgcaaacagaagaatcaatgacagaaggaaatatcagaacatgcttccactccctgaaaaatcttaacagcttgtaacttttggcagcaactatgaacacttaacatatttaagaagccaagtccagctaaagacaatgaaaaggaattgagatgacctttgtgcaagttatcaagaatccctccaggctttacaccgtgctgggcgaagttaccatagtaagaatgaaagaactcaagtaatttcccaatgaaaagttcagaagtgtcattgcagtacctaaagtcttataagatttggaga

SEQ ID NO: 6761 - DNA, 456 bp, Glycine max
  Clone ID: jC-gmle01810021f08d1
aaagtaacgggtagataactttaactcattcacaaatatggagcaagcttgatagggcattctgtattctaagataatacatattaaagatgttacatataggctattcaaacagtggctggtactggagttgaaggagggacacggttttcaactggaatttcagcaaactcagacaatatagcacggaattcatctccggtcagtgtctccttctccagaaggacttcgacaatcttgtcaatcgcctcacggttgttccttatatggactagtgcaatttcatatgcttcatctgagatcctcttgatggcagcatcgatgtcttctgcaagtctctctgacattgagttccttgccatcattctcatgatgacatccccactttgtgctgatgcttccataagtgaccaaggaccattatcagacatttcagatgtggttaccatctgtttt

SEQ ID NO: 6762 - DNA, 523 bp, Glycine max
  Clone ID: jC-gmle01810021f09a1
aaaataatgatgattcttcatgttaaatctttgcccttctgattaaccttgcaacttcgagaaatttcaaccacctctctctcccaaaatctcagagtgtgctgcttcagtgtcttggtatcaaagatggcaacattgactgcttcaagtaacttagtctctagaaattctcatgtccatcatggaccaacaactgcttcatatgagtctaaagcagtagcaatgggacttagatctctaaagcagacaaatactcatagtggacttagaatttttaacccggtggatgagctacttaacagaaccccaattaaaaccaatgcaatgcaagctatgaggaagggacctcaaggcaagaatgcctggcctaaaggtataatcacatgtggcatgactttcataattataggaacggaagtggctccatggtgcaaaactggagggttaggagatgatcttggaagtctaccaccagcattggcaggtttcgggcatcgagtatgactattgtgccacgctatga

SEQ ID NO: 6763 - DNA, 449 bp, Glycine max
  Clone ID: jC-gmle01810021f09d1
acatgcactcactacactgatttgaatagtgtaatttccgtgtccatgtacatttctataatatatttagaagaaaacacaaattggaagaaggataaaacataatattaataagaagcaaggagctgggggaacttcatgagactaagattccctcacatctttgttctcattattatggtgttgccacattttcctttgcctgtggagcaatttcttctccatcacttccaggttcactgccaggaactcccaggcttagcagcacttcctcccacttcttagcaggccccttccaggaaagatcttgagccatgcagttctttattatttctgtaaaagctggagttccatagactgcaagggcccttttgacagtctttgctatagcatccacatcagctggatccacagcatcacattcaacactgaaggcacccatctgaaat

SEQ ID NO: 6764 - DNA, 528 bp, Glycine max
  Clone ID: jC-gmle01810021f10a1
aaaataatgatgattcttcatgttaaatctttgcccttctgattaaccttgcaacttcgagaaatttcaaccacctctctctcccaaaatctcagagtgtgctgcttcagtgtctggtatcaaagatggcaacattgactgcttcaagtaacttagtctctagaaattctcatgtccatcatggaccaacaactgcttcatatgagtctaaagcagtagcaatgggacttagatctctaaagcagacaaatactcatagtggacttagaatttttaacccggtggatgagctacttaacagaaccccaattaaaaccaatgcaatgcaagctatgaggaagggacctcaaggcaagaatgcctggcctaaaggtataatcacatgtggcatgactttcataattataggaacggaggtggctccatggtgcaaaactggtgggttaggagatgttcttggaggtctaccaccagcattggcaggtttctggcatcgagtaatgactattgtgccacgctatgaccagt

SEQ ID NO: 6765 - DNA, 454 bp, Glycine max
  Clone ID: jC-gmle01810021f10d1
acatgcactcactacactgatttgaatagtgtaatttccgtgtccatgtacatttctataatatatttagaagaaaacaaaaattggaagaaggataaaacataatattaataagaagcaaggagctgggggaacttcatgagactaagattccctcacatctttgttctcattattatggtgttgccacattttcctttgcctgtggagcaatttcttctccatcacttccaggttcactgccaggaactcccaggcttagcagcacttcctcccacttcttagcaggccccttccaggaaagatcttgagccatgcagttctttattatttctgtaaaagctggagttccatagactgcaagggcccttttgacagtctttgctatagcatccacatcagctggatccacagcatcacattcaacactgaaggcacccatctgaaatccagt

SEQ ID NO: 6766 - DNA, 481 bp, Glycine max
  Clone ID: jC-gmle01810021f11a1
aaaagccttagccttccctacaactccaaacacaaagacatcatcatccatggctgcctccgtctccactgtcggagctgtcaacagagctcttttgaacctgaatggttctggagctggagcttcagctcccagttcagccttctttgggaccagcttgaagaaggttattgcctcaagggtccccaacagcaaggtttccggtggaagcttcaagattgttgctgtagaagagaagaaagagattgaagagacccagcagaccgacaaggacagatggaagggtcttgcctatgatatctcagacgaccaacaagacatcacaagaggaaagggtttggttgactcccttttccaagctccacaggatgctggaactcactatgcagtcatgagcttctacgagtacctcagcactggacttcgccagtacttggacaacaaaatggatggattctacattgctccagcttttatggac

SEQ ID NO: 6767 - DNA, 457 bp, Glycine max
  Clone ID: jC-gmle01810021f11d1
taagatcatctcaaacttagcatcttctctttgcacctaagacattgagaatgctaagaatgttacacgcaagttccatcacaacttctagcacttggattagtacaacaaccttcacgaacagaaatatttacttgccaagtttgctttgcctccaattcaagactggaagaaagttcccctctgaatagcatcctcgttagcatttccaagagcagcctcgttcaagtacttgtcagccaattggactctcttgacattctcttgttcttggacaagcatgttaccatacagcaagagcttctccagagtcatcttgggctgctcaaaggttggaggtccatcttttgagttcacaagcttcttcccaacactgtcaacaccaacaccagaaatccacttcctcacttcatcatcatatactctggccctcagtgcaccaaagaaatcaatggat

SEQ ID NO: 6768 - DNA, 501 bp, Glycine max
  Clone ID: jC-gmle01810021f12a1
ctttcattcacccttggtgtgaaacagatgatttgctgctgtaacaaaatggatgctactacacccaagtattccaaggccaggtatgtatgaaattgtgaaggaagtctctttctacttgaagaaagtatgattcaaccctgacaagattccttttgttcctatctctggttttgagggagacaacatgattgagaggtccacaaaccttgactggtacaagggtccaactctgcttgatgcacttgaccagattagtgagcccaagaggccctctgacaagccccttatgcttccccttcaggatgtgtacaagattggaggtattggaactgagccagtgggacgtgttgagaccggtgtcttgaagcctgtatggtggggacttttgcaccaattggactgacaactgaagtcaagtctgtggagatgcaccatgaatctcttacagaggcacattctgttgacaattgtggattcaatggtaaaaatggtgctggt

SEQ ID NO: 6769 - DNA, 432 bp, Glycine max
  Clone ID: jC-gmle01810021f12d1
cgggggttccgacaaacacaacacattaaaacacagataaataaaagcaattttgccaccgtcgatcaagaacccagttctgggaacaacagttgcgagatgatggtggagacttcaaactttgtccgaaaaacaagctacctagaaaagaagacacaagagtacagaaaagaaaccaacatttattgtaaccaacatcccctgatgaaccagcccgcacgattcacttcttcttctgggcagccttggtgaccttggctccggtaggatccttcttctcaacgttcttgatgactcccacagcaacagtttgacgcatgtccctaacagcaaacctaccaagtggaggatactcggagaaagtttcaacaaccatgggtttggttggaatcatcttaacaaaaccagcatcaccgttcttcaaaaacttgg

SEQ ID NO: 6770 - DNA, 603 bp, Glycine max
  unsure at all n locations
  Clone ID: jC-gmle01810021g01a1
aactagcagagctattttccaaagaatgaagaactacaccatctatgcagtatctatcacaatccgtatagtgtttggcttcatgtttattgcactgatctggaaatttgacttctcacccttcatggttttgattattgccattctgaatgatggaacaatcatgacaatttcaaaggacagggttaagccatctcccttgcctgatagctggaaactgaatgaaatctttgctactggggttgtgcttggaggttacttggcactgatgactgttatattcttctgggcaatcaaagagacgacattcttccccgacaaatttggagttagaccaattcatgacaatccagatgaaatgactgctgctttgtatctacaagtcagtatagttagccaggctttgatatttgtcacccgttcgcgcagctggtccttcatcgaacgccctggattgctgttagtgactgctttcgttattgctcagctgattgctacagtaatagcagtgtatgccaactggngctttgcaggatccaaggattggttggngtgggcaggatgattggctctacagtattgctctatttccactgacatatg

SEQ ID NO: 6771 - DNA, 544 bp, Glycine max
  Clone ID: jC-gmle01810021g01d1
gcaagatgccgttaaagcttttccataaactcttattctccaaccacaaaattcccaataagctcattggctagtcacttgccacttcaaagtgacatacatcaattaacaccaccctggttgagggaaggacccaaaagcatatgaaaatcaaggattgaagctaacaccacttttccccaagcatcaaagcaaaaatttagaccaaaacatctgaaaagacatgaaagaaagataaacagactgagagagagatatatcacaggcttcctctcccaaccgagtaagcataaatagagttaggccttctccttgtctctccgttcattttaatcattgaattttggcccttttggtatctacatcgttcttgtgtaactattacacggtgtaatgctgctggattgtgtcaatgtccagacccttcagcttcaccacagactcaacatgtcccttaagtgtgtaaagctcacgaagccttgcaacttcagctctcctcttggcctgctcagcaatctcagtgagttctctataactgctcttt

SEQ ID NO: 6772 - DNA, 562 bp, Glycine max
  Clone ID: jC-gmle01810021g02a1
tttcccaccaaccctcctctccattcctcaaaacaatcgttaatctcttctccattgtgaactctgatattctccaagtacacaacacaaacacacatcaatttatagcacccgatttctcttttccccctcaaattcagctccattttgttacagattcaaataataagccaagcagccacaccatgatctcgtcaatgaaatgcacagcctcatctctcacatgttctgctttctcaaacagaaagcttcccattgcaaggcctcaactcgtgacattaccaaccatcaacaacgttgaacaaaacatgggtccctctcagttgtgttcacagaagcctctctacctttcatccaccgagaacttggcattggtgaggagaaggagagtgacggagtgccaggcctatgaagctgacaggtcacggcctctggagatcaacattgagctgccggctgaagaggcggcgcagaggttcaagattggtgtgtattttgctacatggtgggctttgaatgtagttttcaacatttacaataagaaggttttgaatgcttttcc

SEQ ID NO: 6773 - DNA, 470 bp, Glycine max
  Clone ID: jC-gmle01810021g02d1
aataataagtactgctctacatgattatttttcaagaaattcttcatagactttcagcctcaagattaagtacagtttagtgcattccatccttctaaagctaatttacaaagatcaaaacgtgattacaaatgctgctgctatggcccaaaagaaataaacttaaattcctattaacaacaaaacatactagctaattaatgccatagtcctcatcagtgacactttgagctccaaccatgagtcatcgtttccttgtgttacataaaagcttcaaaataaccaccttactgtttagcctgtgaatagaggaaggtgccaagaattgcaatggcagcaccaagagcattgatgggctgaacaggcgtgtgaaagataaggatggaagaaacaatgaccgaaatcctcttcattgtggttccaatgctaaatgttaagggagatatctgatcaagagacatgtatgagac

SEQ ID NO: 6774 - DNA, 220 bp, Glycine max
  Clone ID: jC-gmle01810021g03a1
gaaaaaaaagcaaaagaaaaaaaaagaaaaaaaaaaaaaaaaaaagaaagaaaagaaaagaaagaaaagaaaaaaaagagaaaaaaaaaagaaagagagagagcagtaagaaagcagacaaaggaaaaaaagaaaagaaaaaaagaagaaaaaagaaaaagagaaaaaaaaaaaaaaaaagaagaaaaagaaagagaaagaaaaaagaaaggggaagagg

SEQ ID NO: 6775 - DNA, 569 bp, Glycine max
  Clone ID: jC-gmle01810021g04a1
cttagctccaaaaacccatttctgtttctttctgttgatttgatggatccgcagatctaatgatttcacacactttcctcactacggatcattgtcttcttcatctggggcaccccaatagcttcttctaatcgacagtccaattttgttggtttgtggtggatcatcttcgtcgttgtggtgactagtgaggagtgcaggactatacctatctatatagtgtatgaaaattcaggggggtgaagtcgtttttggagtagttgataaatgttgaaatccttgacggttgtttggtgaaatgagggatgttatcggggttgatgaacttattgagggcctgctttcggccgggttcagatggatttacacttgcaggttcggatgctggaggtagacaggatggactgttgtggtacaaggactcggggcagcacttgagtggtgaattttcaatggctgtaatccaagccaataacttgctggaagatcagagccagattgaatcaagctgtttgagctcccatgagtctggcccttacggtaccttcgtcgtatctatgatggccatg

SEQ ID NO: 6776 - DNA, 391 bp, Glycine max
  Clone ID: jC-gmle01810021g04d1
gggaaaaaaacctcggaagaaacctaaaaaagaaggggattcctaaaactaaccccatttcgccgtgcacaacgggacaaaaaggaaggggcgcccccagaacaatttccccaaggccagggcccaaattccccacaggaccctacaacagacctctgcaaaggggcaacccaccccgggttcccaaaccccaagataacgcaactcccaaaaggggggggccccgcaccccccccgaggaccgttccttccccggaaccgggcacccctcggctaccaaacatttcgagtcgctggggccctcgcctgggaaacccccccgggggaaaacccccccgcatctccccagattgaaaaagggccaccggcccgggctatcccaggcgggccc

SEQ ID NO: 6777 - DNA, 568 bp, Glycine max
  unsure at all n locations
  Clone ID: jC-gmle01810021g05a1
cggaagcaatctggtgggaagaaaaggagtagaggtgatttttttggtaaattacaggtaatcaaggagtggagcaatgtttctgaaatgttttggctgcacaagttcatctcagagaaagtatccaacaataatagaagagttgtgccatcaattttctctggccgatgttaggaaatcaaccaacaactttgataaaaacagattaataggatgtgatggaattagtgaagtatataagggttgtctccaacataatgatcgttctgattatacagtcacatttaagcgatttattgcagaacgttgttatccaccactggacgacctgttcaagaatgaaatagaattgctctgccagatgcgtcaccctaattgtgtctctcttataggattctgcagccacaaaaatgagagaattagtgtgtatgagtacatgtccaatggatctctagatcgataccttgaaggatctatagatcgacatttacaaggtggngatatggaagcactgtcatggaagataaggctagagatatgcataggggcagctcgtggattacactac

SEQ ID NO: 6778 - DNA, 469 bp, Glycine max
  Clone ID: jC-gmle01810021g05d1
acaaaaaataaactttattaactaaaacgaacaggtagcataacattaatatcgtgtcaaggaaaaaattaaatgtagaaaagcaacaaatgcgcaagcggaaagagaaagacatcaagactttaacattgcacacattgtaaaatgtagacaatgtaactcaaaattatacaggataacaatccaatatgaacaagataacttattttattatctcaactcttagcttctctccaagtggagaatgcttaggttctcagggtgtgtataagcaggttccatcatcacttcttgcagttgggtcgaagtttgaggcatttggatcagtacaaccttcaggaacgggaatgtttacttgctgagctgctttgccatagaaagttcctctgttgatggaatcttgattagcatcaccaagagcagcctctttcaagtacttgtctgccagttgtactctcttcacattctc

SEQ ID NO: 6779 - DNA, 440 bp, Glycine max
  Clone ID: jC-gmle01810021g06a1
caagtttcaaatggaaccaaacaccggagagacatatgatgatgttgctggggtggatgaagccaagcaggacttaatggaggcggtggagttattaaagaagcctgagaggtttactgctgtaggggctcgcattcctaaaggagttcttcttgttggtcctccaggaactgggaagaccttgttagccaaggctattgctggagaagctggtgttccatttttctctatatcaggttctgagtatgttgagatgtttgttggtgatggtgcttctcgagtacgtgatttgttcaagaaggcgaaagagaatgccccttggattgactttgatgatgaaattgatgctgatggaagacaaagagggactggaattggtggagggaatgatgaaagagagcagaccttcaaccaaatattgacagaaatggatgggtttg

SEQ ID NO: 6780 - DNA, 451 bp, Glycine max
  unsure at all n locations
  Clone ID: jC-gmle01810021g06d1
aaagtaaggtagaaatcttataatcattcacaaatatggagcaggctgcagagggcattctgtattctaagataatacatatgaaagatgttacatatataggctattcaaacagtggctggtactggagttgaaggagcaacacggttttcagctggaatttcaacatactcagacaatatagcacggaattcatctccgctcagagtctccttctccagaaggacttccacaatcttgtcaatggcctcacgggtgttccttatatgctccagtgcaatttcatatgcttcatctgagatcctcttgatggcagcatcaatgtcttctgcaagcctctctgacattgagttccttgccatcattctcatgatgacatccncaccttgtgctgatggttacataagtgaccaaggaccaatatcagacatttcaaatgtggtcaccatct

SEQ ID NO: 6781 - DNA, 157 bp, Glycine max
  Clone ID: jC-gmle01810021g07a1
acgggaattattatactatagatgataatattatgcttctttaaagagatgactaaattcataattttactgaatatataataatagagtatagcatgattaatatgttatgatatatgttaggggtcgaatcaagtgacatatccaataacgatga

SEQ ID NO: 6782 - DNA, 513 bp, Glycine max
  Clone ID: jC-gmle01810021g08a1
gcatattcccatgggaagagttggggatgacttatggttccaagaccccaatggggacccaatgggagtgttctggttacaaggggtgcacatgattcactgtgcctacaacagtttgtggatggggcatatgattcagcccgattgggacatgttccaatcggatcatgtgtgtgccaaatttcatgcgggttcgagggctatttgtggcggtcctgtctatgtaagtgacagtgtgggctctcatgactttgatctgattaagatgcttgtgttacctgatggtaccgtgcccaaatgcatacattttgcactttcaacaagagattgccttttcaagaaccctttctttgaccaaaaaaccgtttttaaaatttggaacttcaacaaggtacttatgttactcacatacatttgttacacaaaattgccatttaggttaaacacaaatttgttaattaacattatggagaggtattggtgctttcaactgtcaagggctggttgggaccc

SEQ ID NO: 6783 - DNA, 452 bp, Glycine max
  Clone ID: jC-gmle01810021g08d1
aaacaatcagattcactttactaaaagaaaacgagctagtttccaattttttaagtgcaaccagtttttgctataaacaacattcaagcctatcaacggtagaaccacaggacaaaacctagaagaaaattgccaaatcagaaaccccgccattctcttcaatccaagcaaggttgagagtgagttttccatcagggagccactcaaaagcaacatcagaaccattcagttggaacttctttggagattcacttgagtaagcaaggaatctcccatcacccttaaccttaacctttgcacccttctcaacacactccaattcttgaattggccctccactgttgaacatgtttgtgagcccaattggtgcaaatttgatgctgccacctagcttttcaactgggacacagttgtagatctcaaaagtggaaggttgaatagtaaaattgagt

SEQ ID NO: 6784 - DNA, 548 bp, Glycine max
  Clone ID: jC-gmle01810021g09a1
aggcgctaggcgctgtaggtggtggtggtgccccagtgccagtggtatgttctagtgttcggaaccatcgatttcgcgtttctttctcttcttcttctccgtcgccgggacccaaaacggcggaacaagtgggaattggagctctgaaatctgactacaaacccggtgtgtttgatgacttgcttctcaaattgtttcgtaacaaattggtacaggaggcggggtgggactcgaagaaagctggatatgatggactaattgaagttgccaatcgtataatgatgaagggcactaccaattctgataccgtagaagcagcggtacgaatattgaggtctctgttcccttcatatcttttggagctctataaaatgctcatagcttctataggaggaggcaaaatcgcagctatgatggttgcaagggttactgtactgacttgacaatgggtcatgcggccctgcaaagtcaattctgagacctaccagatggaaccttatgcagtaatgggggtatgtggaagatgcaggatccgggagaaagcaatg

SEQ ID NO: 6785 - DNA, 459 bp, Glycine max
  Clone ID: jC-gmle01810021g09d1
attaaacatcaacgtattcaagtaaaaaatattaacatataataatctaattacaaaaggatgaattatattaataataaattcatctgagctttcgtcaaagatgagctatcgtcgctatggagttccatcttcaagtacaggttgggaccagaatttgcaaactggaaagtctacataaatgatgtgaaaaccccaagcccaagaaaaatatatcatgtctttgggcacgcagttatatcaatatttctggcaaccattcgtcgttggtttgcatttggacatgcttccaagcaaggttccttcacgatagtatcatcccgtgggggaagaactccaaatttgaactgacagctgtaatcggcaaagttaggctccataagtaatggaacccccatatggtccttaaagaaggtctgtgtcggaaacttacaggtgtgggtgcaaatacccacacat

SEQ ID NO: 6786 - DNA, 420 bp, Glycine max
  Clone ID: jC-gmle01810021g10a1
cacgctctttcctcgttgaggcgtataggttcgggtgctgctcctctcgggaaagacttgatggaagagtgtggcaggcgttttcctcatgttgccatttgtcagggttatggtatgacagaaacttgtggcattgtttctgtggagaatccaagagtaggggttcgtcatactggctcaacgggaacgctagtttcaggagtcgaagctcaaatagtgagtgtggatacacagaagcctctccctcctagacagttgggagagatatgggtgcggggacctaacatgatgcaaggctatcacaacaatccagaggccacgagattgactatagataaaaaagggtgggtacatacaggagatcttggatattttgatgaagatggacaactttatgtggatgaccgtatcaaagaactg

SEQ ID NO: 6787 - DNA, 388 bp, Glycine max
  Clone ID: jC-gmle01810021g10d1
atactactatgatacactatagtgtatatatggaaatttaacttgtaaaatttttgtttcttattttaacattttttctaacttcaaaagaagaaaatttagttcacaaacaccagatgcaaaggaatgctagtataatctggactatggagggattattgcatggttttaattttaaacttgattgggtatatagattaatcttgcaggatgcactgatgcgcgcactcctaattttcaatatatctcagaaattgtttgtccaaaaagaatgtaatatattatattttggatcgtgcttttgcagtaagctctcttctgagaatttttcctgaagctgtcttaggaacattgttgatgaatgttacccttcgcaattttttgaaag

SEQ ID NO: 6788 - DNA, 547 bp, Glycine max
  Clone ID: jC-gmle01810021g11a1
ctctttcctatcacactttctagatagctagcctgtaagatatatatatagatatttcatatatatcctatggtccgtgagtgcccttgctctgtaccaaccctttcttccacatgttgagtttcagcatcgacctctcttgaatccccatatcaaatacccaccgaattcaaccccccatataacaaatctcctcccatcccatttttcagcaccaaagtttgaaacttttctcaattgggttgatgagagtttgactcaaatttttatttttctaacgaagcagtagctattagaagtgcaaaaattaaatgtccaacatattcttgttgatgtttgagattcatgtatccgattctcagagaaatcttcttttccagatgtatgatcaattccactgttaggcgcatgacccatctagttcaatccttctcaaatgctttcctctattggttgtactccgtttatgattgctaaacctctcttagtctaataattatcaactactagctataatattattataatattatcatcttattatctt

SEQ ID NO: 6789 - DNA, 425 bp, Glycine max
  Clone ID: jC-gmle01810021g11d1
caaattacagtaatggcccatgccacatttacagaaccagcacccaacaatcccatccgttttacgatacacattcattattattattccttatcaccatatggtagtgattacaatttctcaacagactcaaacctagaagaagaagaagaaatcctcatcaaatctcagactcagagaccatggatctcaatactgcaatatatccgcagaagccataatagggtggttcagataccccatattcaacgggttgaagaagctattattattaattggctcaacgaaggtgctcgatgttgctgctgctccaaaacccgccacagtggtggcattcaacacgtcaacgatctcattcagagactctaacctgtgactaagctcacccacctgagccctaagcaccgagttctcagcctcaacgc

SEQ ID NO: 6790 - DNA, 462 bp, Glycine max
  Clone ID: jC-gmle01810021g12a1
aaaacatctcaatgggttcttcttctattacaacatcgcccgcaaccatgaccatggctgcgatcgtgctcctgttcacggtctttgccgtttcctccgccctagacatgtcgataatctcgtacgacagcgcccacgcggacaaggccgccacgttgcgcaccgaggaggagctgatgtccatgtacgagcagtggctcgtgaagcacgggaaggtgtacaacgcgctcggcgagaaggagaagcgcttccagatcttcaaggacaacctgcgattcatcgacgaccacaactccgcggaggaccgaacctacaagctcggactgaaccggttcgctgatctcaccaacgaggaatacagggccaagtacttgggaaccaagatcgatcccaaccggaggctcggtaagaccccgagcaaccgctactcgccacgtgtcggcgaacaattgcctgattccg

SEQ ID NO: 6791 - DNA, 451 bp, Glycine max
  Clone ID: jC-gmle01810021g12d1
tattgctgctgcattgtcacataatctacagaaccttgaaaactaacagcaatcaaatatgttcgccatttggaatttgaatacaaatacagtgcatcgataatataaccctatgtacagagccaatgtctgactgaaatttgatacagaacattatctattttgtatcataataaaatggtaaagatctttatgttacgtgcagcattatgtgaagaagggggaagtgcatccagctggtgctttagtccttcgtcttcccttttacttcatcattggctccttctgcacgttcacatttccttaaactgcttaagcactgctgaccttgttcttacgtccgaaggtccaatggggtttcgctggagtacgccttaatgccttcactccaaaggggttgttcttgctcctgagacaagttccagcgtaagtgttgcagatgggatagtct

SEQ ID NO: 6792 - DNA, 500 bp, Glycine max
  Clone ID: jC-gmle01810021h01d1
agttattccgatattcggacgcatcaacttgttatgaaatcacattgatagcctctactcgtgtcctagctcgtctaagagctagatttgcctcaattgtttgtctcttgccttccgccttattcaaattagcttctgctatttcaagagtttgctgtgcttcttgtggatcaatgtcactacccttttccgcatcatttactaaaacagtgatctcattattgtttattctagcaaaaccgcccatcagagccatcgttaaccattggtctttaagaagacgtattctcaaaatacctatatctacggctgtggcaataggcgcatgatttggtaatactccaatttgtccgctattagtagataaaatgatttccttcacttccgaatcccaaacaattcgattgggggtcagtacacaaagatttaaagtcatttcttcaaattgctctccatttctaagttcgtagctttcgcagtagcttcatcgatattaccta

SEQ ID NO: 6793 - DNA, 562 bp, Glycine max
  Clone ID: jC-gmle01810021h02a1
gagacagggtgttaacggctagaaacgaaggaaggagtaacataaaatggaggttcaatttgccctcccattccactaacacacatcacatctccctctcgcacgcgacgagggagctccgcttcggaatctcactccctctttctgctaattgacaagatggttgctcagaaattcgttgttgatttgaacaagccccttgtgttccaggttgggcatcttggggaagcctatgatgagtgggttcacgatcctatcgtaagcaaggaaggccctcggtttttccaaaatggttttctcgagttgttcacgcgcaccgcgtggtgggtgattccaaccgtttgggtgccggttgcaagttggttcatttccaactccgtaaaatcaggcctcccttctcttgatgtagctctgctcgtctttcttggcatcttcgtttggactttggccgaatacacattgcaccgtttcctcttccatgtcaaaaccaagagctactggggaaataccttgcattatcttctccatggctgccaccacaagcaccccatggatagctata

SEQ ID NO: 6794 - DNA, 319 bp, Glycine max
  Clone ID: jC-gmle01810021h02d1
acaataaacaaattcgttaattataaaattttgcaggatgttttgacccccgatgggggcacgttaacccttaaaaacatcaattggggagctatacaattagacaaacgggacttgtattatgaaattcttaccacattttgtgtgaaactcctgtatgaactatttttaaccaatgaacaaatcctaccttgactgtgacttatttacgtgtggcatccccttttgattgaaggagtggaaccggtccaaaaactttattccaaaggggtaaaagatgcccaaagccttaaatctggatcctatggtgatggttaaa

SEQ ID NO: 6795 - DNA, 576 bp, Glycine max
  unsure at all n locations
  Clone ID: jC-gmle01810021h03a1
ctcgcagccccgagtctgtgcaagacactatcaaagagcttgaggaaaatctaaaggaaggcattgccaatgcagttggctcttctctgacaaagctttctcaagcaaaagtgataggcatttcttgtgatgtttgtgagcctcatgatgtgcagagactggctaacttcgctgtcaaagaacttggtcatattgacatttggataaacaacgccggaacaaataaaggttttagaccattgcttcagtttagtgatgaagatattaaacagattgtctcaacaaatttggttggatctatcctctgcacacgagaagctgtgcgtattatgagaaaccaagccaatgcaggtcacatatttaatatggatggtgcgggttctggaggctctagcacacctttaactgccgtatatggttctacaaagtgtggccttaggcaacttcaaggatcactattaaaggagtgcaagcgatccaaagtaggtgtccatactgcatcttctggcatggttcttacagatctgcttttaagtggctcaacggtccanaacaagcagatgtttaacatcatct

SEQ ID NO: 6796 - DNA, 480 bp, Glycine max
  Clone ID: jC-gmle01810021h03d1
agcacactgataaatatacattcaaataaatatattgggtagaaaatatgaaatttcactagtctacaattcaatgaaggctatacatagtaacatactatgactataagcatcttaatgaagaatgctgattgcagggcagcctatatacatagtacatggggagccaaatgtctgagctaagggtgtcaaatgataattgtttaggtggacatggtgggaaaaaaacagatccactttggttataacttagactttagattcattctattgtcttgatgatttcaggcaccaattacctgtccacaaaagcaaatgcatttttgcattggcagcaatacatcgtcatgttccaggcaaattgctgcctgtgctggaaagaattatgaaggcacagacaactgaaagtgagaagactgataaccaggtgttctctgtgtacatttccattgcatcagtgaaagaaaaccgggctcgatc

SEQ ID NO: 6797 - DNA, 544 bp, Glycine max
  Clone ID: jC-gmle01810021h04a1
cataatcattgcaataaacaagatagataaagatggagcaaatccagaaagagtcatgcaagagctttcttcaattggtttaatgccagaagactggggcggtgacatcccaatggttccgataagtgctctcaaaggaaagaacatagatgatcttttggaaactgttatgcttgttgccgagttgcaagaactgaaagctaatcctgatagaagtgcgaagggaactgttgatgaggcggggctagataaatcaaagggaccattcgcttcatttattgtgcagaatggcaccctcagacggggagatatagtagtttgtggagaagcttttggaaaggtgcgggctttatttgatgatggtggaaagcgggttgatgaagctacaccctctatacctgtacaggttattggattgaataatgttccaattgctggtgatgaatttgaggttattgaatcccttgatactgcacgtgatagggcataaactcgtgctgagtcattgcgtaatgagcgtatttcagcaaaggcaggggatgga

SEQ ID NO: 6798 - DNA, 459 bp, Glycine max
  Clone ID: jC-gmle01810021h04d1
cacaacagaacaagaaccattcacttgttgatcacttcacactgttcatggctgaaactgaaagcccaacccacacaaaattcaaacactttctggattttacaaaactacgttccagttcctcctctagttatccccccttcttactcaattttttttcccacccctttgaactacaaaaactaaaatttattttaatgttttaataagcaaccctagaaatatgttacaagttacatgttacatcatcaaagcctcacggcttcaaacgctactccaaacctttaaacatttcaccccctagttcagatcatccaccctttcgtttaaaaaaatcacaatcgggtcagaacttcaaaccgggacgggcttaaagttaacggttacggagagaagacgagaaagagaatattctggataataataaggtgagaaagagagactgtaatatggatcatt

SEQ ID NO: 6799 - DNA, 599 bp, Glycine max
  Clone ID: jC-gmle01810021h05a1
aaaaaaacatcaaccgaaggggtcatttctcccaatccgctagcttctgctttctgtcttccagtgcgtgaaggatacgatgaacatcatgtctacccaccagtgtagttggcctgtgagaattcaggatcatcctgacaaaggaagtattaacaaggctccattttccagaggatcggaattccttaatgttggataccatgctcaaaaatatggccatagtgccagaaaatgtaggcccatttttgccagttcagtgagcaacagtatggatccttctgattcagatgacactgataagaaaaaacctcagaatggtgaaatgggaggagtgaatagtgaaatgcttagagagagtctcgagaaaatagttggagaagatgattccacgtttagtggatttgaccttgctactcttatcaggaacaaatatgggaggtcttatgatgtacagttgattaaataaggaattcatgggaagaaatctccttgcgatgaatgtcatgtggaagtacatggagcagagatctttcccattgaccgaagaagagtatattatgaggcttgatgatattgcaacaccttaaatgttggggagc

SEQ ID NO: 6800 - DNA, 506 bp, Glycine max
  Clone ID: jC-gmle01810021h05d1
ggtgccgaggcaactcttataatggtcatcagaagatctcttctgttcttttggttttgaggggaagggaaaacaaaaaagaaaaaaaacctaaacatgagtattagtatcctagtaagttacagttcacattcaaagaattgaagtgctgctcctctcagtgctattttgaagataactggtattcacacaagaaaatgatacaacaaagaagaaaataaaagatacaacttagatcaggtaccaccaatctctgttggtgtggtacaaggtgccagtgtgttatgaggcaggttaataccaccccctctaacagaaatgccagggaacttcacagtgctggccctactcacgagatttgagtcaagatacacaacaatcaccgtggtatcatcatggaaatgacgacgaactccgtgatcaattttctttaaatctgaatatctcatttctctcttctttgcaacttcttgaagcgcagcttttaccagcctcctaacgctttc

SEQ ID NO: 6801 - DNA, 490 bp, Glycine max
  Clone ID: jC-gmle01810021h06a1
aaattgcaaaatgctttacaagaaatgaaagctcagttagatgaagcccatgctgcaattatacatgaaagagaagcagcaaaaatagtaattgaacaagcactaccagtgattaaagaggtaccagttgtggacgaaaccaagctagagttactgacaaataaaaatgaggagttggagactgaagtagaagagctgaaaaagaagattaaagagtttgaagaaagttgctctgaaattgagaacgagaaccaagcaaggctgaaagaggcagaagaagcacagcttaaagcaacacaacttcaggagactaatgaaagattagaattgagtttgtcaaaccttgagtccgagaaccaggttctatgccagaaggctttggaagaatcaaaatatgaagaactctttgaagagatcaaaatcctcaaggatcagatagcaaatctacaatcagagaatgaatccctactgagtcaggcagcggctgctg

SEQ ID NO: 6802 - DNA, 323 bp, Glycine max
  Clone ID: jC-gmle01810021h06d1
gaagcttaatgtacataattggctttttaggcctggcaggccctaactgggggtttatgccactcatggcccttgagggcttacaactggggatgaaataaagaattggcttcaaaacaaagaattttaagagggaagaaaactcaggcttgaagtactgagagggatgcttttagatgggatcattttttcttgggactggctctctatttataggggctgaaatgggcttacgggcctttgtagttgcgcttaaggccacaccttgcgcttagcgcgttcaaaacgcgcgctgggcgctccatgcacccttggcctgtgct

SEQ ID NO: 6803 - DNA, 547 bp, Glycine max
  Clone ID: jC-gmle01810021h07a1
gtaaacttgagcagcttcactcagatgaagcatatgagatgattcaaaaccacttgagtctcattctcggtaacaaagctggagatttaacatcagtagctgaaatcagcaaattcagggtagggcaggtctatgcagcatcagtgatgtatggttattttcttaagcgagttgaccaaaggttccagttggagaagacaatgaaagttcttccaaatgcaacagaagaagagaatggtgttcatcgaaatacgatggacaatgcaagacccagtattgaacaggacacttctcaagtgatgtctcatcctgaagtatctgcctggcctggtggtgatgtcagtcccggtggatttggctatggtataaaggcaaccaggttgcgtaactatgtgatgtcctttgatggcgatacactacaaagatatgcagcaattagatccaaagaggctggcagcattatcgagaagcacacagaggcattgtttggaagacctgaaattgttgaacacctgaaggggcagtctttaggatgaaaacttcaaaa

SEQ ID NO: 6804 - DNA, 457 bp, Glycine max
  Clone ID: jC-gmle01810021h07d1
ctatagtatatacataggaattagtgaaacaatatttggactttaaactcatcagtcagtaccaacacactatgaagtatgaactgtatcttgtgatgtatgggagcaaacagaaatcaaaaggacaactgaatgcacaaggctcccacctgtggtctctaaagaagatcgacatacaaagctttactcagttaaacacaaaatggtaccttgagtccacgtagctctcaacatcccagagaaaagaaccaaaagtcacagcctctaaaacaagcttctttaaaccaccaaagctaattttgatgttttcatccttagagactgccccctcaggtgttacaacaatttcaggtcttccaaacaatgcctctgtgtgcttcttgatgatgctgacagcctctttggaactaattgctgcatatctttgtagtgtatcgccatcaaaggacatcacata

SEQ ID NO: 6805 - DNA, 482 bp, Glycine max
  Clone ID: jC-gmle01810021h08a1
cctgtatcgacctccatctattttctcgttccttctgggagtgtgtctcgcctccatcgcataccctgcgccgaaacctggcatcattacatcggcgaccctctcaccgtagtggaattgaatgagaaagatgggagcgtaaaattcacttgccttggatcagatctgactcagaatcaggtgccgcagtacacggtgcctcccaacgtctggtttggctcttttcctaccaaggactatacctactctgcggacggggtattcggaagtgctgaagctgaagctgaagctgaagctagagatagtgagaggaactacactcttgtaggatgcacttgtgcccctgcgtttcagtaccaggactttgagctcgctaaaccttcttatatactcggtcgttttccccaattccaccctctcgtcactgttctcacatttctcgagtgactcacactatctatctgttctgctttacggctttc

SEQ ID NO: 6806 - DNA, 412 bp, Glycine max
  Clone ID: jC-gmle01810021h08d1
ttcattaggaaagggaatggaagaattagtcctactggtaaaaccggaaacagaatactgttgacaagtaaaacatttcaacgctctaaagaggcagggaccaatacctaaaatcaaaactagggataagataagttttccggcgaaaagaacaacaacaacaacaacaacaacaacgtaggaagggttatttctcgcgttgaaagaggcattaattagaaatagaaggaagggggctatatgattattagaaagccgaaaagcaaaaccgatagatagtgggagtcactcggggaatgtgagagcagtgaccaaaggggggaattggggaaaacgagcgaggagataagaagggttagcgagctcgaaggcctggtactgaaacgcaggggcacaagtgcatcctacaaga

SEQ ID NO: 6807 - DNA, 542 bp, Glycine max
  Clone ID: jC-gmle01810021h09a1
cagctatcggggaagcaattggtttaggagcagccattgattacttatctgggattggtatgcaaactatacatgattatgaggtggagctcggtagatatctgtatgagaggcttctttcagtcccaaatattcgcatctatgggccagcaccttcagaaaaagtcgaacgagctgccctttgctctttcaatgttgagaatttgcaccctactgatcttgcaacacttctggatcaacagcatggagtggctatcagatcaggtcaccactgtgcccaacccctccatcgctatttaggtgtcagctcaagtgcacgggctagtctctatttctataacacaaaggaggatgtagacaactttatccatgccctcaaatgacacagtcagctttttcaattcattgatgtaactgatatgtattattatgtatattatatttagtttataccagaatgagagggttggcttaattggtaagacaaacttgattaatgaaatggtcctgaatttcattcttcctggtcatatcattggctg

SEQ ID NO: 6808 - DNA, 471 bp, Glycine max
  unsure at all n locations
  Clone ID: jC-gmle01810021h09d1
atttagtgcgttaagagcattttctttacacaaaaattcaggaggtagataggttgcaatactgcaattagtggatgcctattaccagccaatgatatgaacaggaagaatgaaattcaagaacatttcattgatgcagtttgtcctaccaactaagccaaccctctcattcttgtataaacaaaatataatatacataaaaatacatttcagttacatcaatgaattgaaaaagctgactgtgtcattgagggcatggataaagttgtctacatcctcctttgtgttatagaaatagagactagcccgtgcacttgagctgacacctaaatagcgatggaggggttgggcacagtggtgacctgatctgatagccactccatgctgttgatccaaaagtgtngcaagatcagtagggtgcaaattctcaacattgaaagagcaaagggcagctcgttcgactttttctga

SEQ ID NO: 6809 - DNA, 492 bp, Glycine max
  Clone ID: jC-gmle01810021h10a1
cagctatcggggaagcaattggtttaggagcagccattgattacttatctgggattggtatgcaaactatacatgattatgaggtggagctcgtgagatatctgtatgagaggcttctttcagtcccaaatattcgcatctatgggccagcaccttcagaaaaagttgaacgagctgccctttgctctttcaatgttgagaatttgcaccctactgatcttgcaacacttctggatcaacagcatggagtggctatcagatcaggtcaccactgtgcccaacccctccatcgctatttaggtgtcagctcaagtgcacgggctagtctctatttctataacacaaaggaggatgtagacaactttatccatgccctcaatgacacagtcagctttttcaattcattgatgtaactgaaatgtatttttatgtatattataatttggttatactagaatgagagggttggcttagttggtatgacaaactgct

SEQ ID NO: 6810 - DNA, 447 bp, Glycine max
  Clone ID: jC-gmle01810021h10d1
aaaaatttagtgcgttaagagcattttctttacacaaaaattcaggaggtagataggttgcaatactgcaattagtggatgcctattaccagccaatgatatgaacaggaagaatgaaattcaagaacatttcattgatgcagtttgtcctaccaactaagccaaccctctcattcttgtataaacaaaatataatatacataaaaatacatttcagttacatcaatgaattgaaaaagctgactgtgtcattgagggcatggataaagttgtctacatcctcctttgtgttatagaaatagagactagcccgtgcacttgagctgacacctaaatagcgatggaggggttgggcacagtggtgacctgatctgatagccactccatgctgttgatccagaagtgttgcaagatcagtagggtgcaaattctcaacattgaaagagc

SEQ ID NO: 6811 - DNA, 495 bp, Glycine max
  Clone ID: jC-gmle01810021h11d1
aattttggaccataaattatttctaattacagccttaaaccaatcttaatatacaacgcaatcaacttgacatgccaattgtgtcctttattcttacgagaagttgtgtgctttgcacgtcaattttcttcaaaaatgtcatgctttgtcgaaagtccacagactttcaacttccacaccaaactattgatatgcaactaattacttgaccaataaatagaagggaaaattgcaagctgtaagaggagaaacaatgcttctagacagataccgaaaatgataattgctttccattttccaaccattgtacttgaaccattatttgagaagtacgtgcaacaagctccagctccgaaagaaagtaatcttcacaaaatgaaagaattgtattgtaaacttttgaagccaccttactgaaaacttatgggcagagttcatgattattcgctcagaatacatcggcaacttatcaccacgactacgtaagatcccaag

SEQ ID NO: 6812 - DNA, 449 bp, Glycine max
  Clone ID: jC-gmle01810021h12d1
taaatactgggaccttactatctactgtacgaatgagagtacatttattgaggataaactattgactgaaatccaatgtgggggcaggagaggacttcgagcacacgttaaaaaaatggctttacgcagcagacctttcaccaactagaagcattaggtttcttttgatgcttatatatataaatctgtgataagagatcactacctgatccttgaacaaattgcatactagtgaacttccctcaaattctcaaccttggacttggcttggcaaatagcctaggcaagcatcaccaatttaagaaagattaaaccagcacctcaaccaaaaactactgccaagaagcactctgtccacttgacatggctcgagcttcagccaaagagacagccatggcgagcataatctgctccttaaactctcggaacaatgggttctgggcactttg

SEQ ID NO: 6813 - DNA, 472 bp, Glycine max
  Clone ID: jC-gmle01810022a01d1
tttaccaaccctcatccaaacacacggtgaattgggtaaaatatggttgcagatactaatttaaaggattacatttatacctacccaactattacatgccagcatactaacttccggtgcatataactttactggacagtttatacaataaaataaaatatacataatggttaagaatgttacataggtggaaaatacttccttccacgccagatatcactcttctagtcttctgtggtgttaaatactggagctagtcacggttattcacacgccatgaaacaatgcaaacatgtatgaagcctatgttatgtataccactgccgtatgttcatatacattgcagaaccactatctaacaattgggtcaagagcctctgataaaccatgacatcaagtgggggactcggccagaagaagagtatgccaccaaccacaagcaacatttttaggggcacaaccttcaatgatg

SEQ ID NO: 6814 - DNA, 422 bp, Glycine max
  Clone ID: jC-gmle01810022a02a1
ggttcttctacttcccaggatgctttcaatttatcaattataccacaccacagaggattccagtgattgagtgagtggatatgaatatggaaggaccttatgatttattatgcaatggaaaagctggtaacaataagcctgtagatcattaaatactctccttataaaccctgcaccatgatatcatcattaccttggtttgatctaagagtgttttatgtgagagtgtgtggcattcaggttgatgaatccactccagagtttctctctctcaatcatattcctcttaggcctgatacccttgtaaaggtgaacggggttaggagaagcatttactctgatggagaagagtttttagatctgggaagggatagagtggataagaaattcgaggaagctacctttgtgaacactgatagtat

SEQ ID NO: 6815 - DNA, 324 bp, Glycine max
  Clone ID: jC-gmle01810022a03a1
gttcaagcaaggtcagctgtgcaagcattgcttgtccgtggtgagaggagctactaccgacatctctcaacggcgggtatcgtggaacatagacaccatcacggtggctgagcgtttgtaagctctcactggcggaggatgtccactcttccataggtaaaggatcagcactcataggacaaatagaacgaggccaacgacaccactgactctggtgttacgagttaatggggaatcacaacgcccaaggttaggaatgaggactgtacagactggccgtcgaactgctttatgccatgggattgttaccactctgttgtgtca

SEQ ID NO: 6816 - DNA, 442 bp, Glycine max
  Clone ID: jC-gmle01810022a03d1
attttgcatactgaaaaagggattcttactaaagcaaactcaaacaagaacaacttccactcatttggcatctaccgtagtaacacaagatcaaaagcagcttctctgatagaacacacgtacgtatgattcaacatctttcacagtagtggttcatttctaacagctagctattgcaacttaaaataattgcaatgcttctgcaaagtgctaactttttttcccccccttctttatggatatgacaatgtgatcagaatgaaacaataaccaatccattgaatttgaatctgattttgggtttggatcgataccaccattcttcatctcaggaaaggacaagatataggccaaagcctactaattaagcgcttaaaactgcattagtggctggtttaagtgtgatgttagtaacatcagcttggttattaaagggtgatct

SEQ ID NO: 6817 - DNA, 576 bp, Glycine max
  Clone ID: jC-gmle01810022a04a1
gaattgtactatataatataaccaaaattaaaaaaaaagaaaagaaaaaagaaacaggagcagaagaggaagatgctggtgagtgaatcgagtggttcgaaggtggatcttccggaggagttgctaaatgttctaccgtccgatccttacgagcagctcgatgtggcccgcaagatcacctccgttgcgctgtcgacacgtgtcgacgcgctccaatcagagtcgtccgctctacgcgccgaactcgccgataggaaccggctcatcgccgagctccagtctcaggtggagtccatcgacgccgctctctccgaagccgccgataagctagcccgagccgaccaagacaaggagaatttgctgaaggagaacgcttcgctttccaacacagtgagaaagctcaccagagatgtctccaagttggagactttcagaaagacgcttatgaaatcacttcgcgaggatgatgatacttctgaaggaacgccggacactgcaacttagttacacagtcaagcaagtttcactttcacatcgcaatttggagatgatgatgcatcttcaacgctttcttct

SEQ ID NO: 6818 - DNA, 437 bp, Glycine max
  Clone ID: jC-gmle01810022a04d1
cctaaaaggacaccaatggtcgacctgttaacagacttgctcttgtcaagaaaagtcattccccaattcaaatttacaggcttggaaattcaaataaaactttatcacgcaataataagtaatatgtaatttacaatgggaaaaggttgctaaagtagggggaatatcagttgttacaaattaactaggaagttggaacaaaacttcagtcatgaaattaatttccgcatgatagtgctaatggacattgcgcgttatcagtccctcaaatatagtataaaggtccttgttttcaggcccaaataactcattagctttctgtagggtttcctctttagtttgtttatgagaattcagttccttaacatttgccaaaaatgcaccaaactgctcataagataaacgactcctaacttggcgaaaaaactcttttccat

SEQ ID NO: 6819 - DNA, 424 bp, Glycine max
  Clone ID: jC-gmle01810022a05a1
agagcatgcgagtttctaatcaccataggcttctaattcataccacgaatggactcactacaactactctcagaactgctggaagtactctgctcaaaacagctggcagtccgatggccctttgtcctgatggctcacatgctaagggtgatcatgtgacacacgcacgggagaacaactcgatctaggtgtgatgcttggattgctgatattagcgagtgaaacatctggttcgacacaagatgatcctttacaaactatatcaattaacttctccaggctgacgtctgttcaagcgtaatccagacgattattgagattactacaagcattcgtattcaccagaaggcactcttgagtgaaaaggcagcaactagaactgtatatatcgaaaacttgatgtctaagtgtgcagtacaactat

SEQ ID NO: 6820 - DNA, 394 bp, Glycine max
  Clone ID: jC-gmle01810022a05d1
gaaacgttcaagatccagtcgtacattttcaattaaatgttaaaaagggtatatgcctatatacatcactggatgacacatcaaaagaattctacgaataaggtcgcttccttacaaacctaagagactcagcttacaattttgcacgctcctatgtacaaatgtgcctgcttttattatgtcataatgcatgcccttaccaccaattgtaacatgttattagtcacgtgttatataccaaggcccaggaacactatctggaattgtggctcgccaaaatcaaagcacccctaatgttcacttccttatcaaccggaatacctgccgcaactttcatgagaggcatttttgcgaatttcctacaacggagaccagttccaacaagcacaacacc

SEQ ID NO: 6821 - DNA, 563 bp, Glycine max
  unsure at all n locations
  Clone ID: jC-gmle01810022a06a1
caatcccacacgcttcctactcctccctttcaccacttttctgctcccccttgagaaagaatttgaatcatcaaaattaaaaactcgcaccaacaatggccccaagagacagccgagccaccgcgttcgccggaccaggcccaggccccatcaccggcccacaaagagatccgctaccgaggcgtccggaaacgcccctggggccgctacgccgtcgagatccgcgaccccggcaagaaaacgcgcgtctggctcggcaccttcgacacagccgaggaagccgctcgagcgtacgacaccgcagcgcgtgagtttcgcggtgccaaggccaagaccaattttccgacaccctcggaactcatccttaacaacaacattcgcagtcccagccagagcagcaccctcgactcttcctctcccccgtcaccgccaccgtcgcttgaccttaccctaacccctctctccgtggccgtcaccgtcttcccggtggctcgtccggttctattctttgacgcgttcgcgcgtgcggacgccatgatcgncgtctnccgccgcgagatgtg

SEQ ID NO: 6822 - DNA, 542 bp, Glycine max
  Clone ID: jC-gmle01810022a06d1
ggatggaaatggaaatatttatatattttgagaaattacagaaacaaccatgagatactctgttaagttctcagttgcaaaaaaaagcaagaaaaagcgcgtttgcttttcggttataacgtgtatttacataacgtgccgattatatcttcatcacaaaatggtcaacaacaattccgagcatcatgtcatccactactcacacttagctgctgctccctctccgtaacactataatttctcgagggcaatttcgtcacaaaaaaatgcgtagtagtgttcccagatgcttaaaaaagtagtacgaaaaaaattgcggaaaaccagatctccctgcatgaatcaggcaacctccgggagaggaggcacgttcaggtcaagatcaaggagcacgcggcggttgtaatcggaatcggagtcgctacggcggaaatcagcggcggtgcgttcaaagccacacatctcgcggcgggagacggcgatcatggcgtccgcacgcgcgaacgcgtcaaagaatagaaccggacgagccaccgggaaga

SEQ ID NO: 6823 - DNA, 534 bp, Glycine max
  Clone ID: jC-gmle01810022a07a1
aaactttcgaaagattttatccaattgaaattttaaaaatgactgggataaacttaagaattcaattattgaaattgaataagtaaacaatttaattggattggtcgaatggtatcaacaaataatggtagtaccttaacttcccaatttacttaatttattaattgaattaaccgatcaaacttgcttgttatcgaacattttctttttgatttcaaaaattttccggaaaaaatttgaatctatttttatatgcgaatcaatcctactacttctggtcctgaggtttctgcgcttgaaaaaaaaaatctgggacgtatcgcccaaataattggtccggtactagatgtagcttttcccccaggtaagatgcctaatatttacaacgctctgatagttaagggtcgagatactgttggtcaacaaattaatgtgacttgtgaagtacagcaattattaggaaataatcgaattagagctgtagctatgagtgcgacagaaggtctaatgagaggaatggaagtgattgacaca

SEQ ID NO: 6824 - DNA, 425 bp, Glycine max
  Clone ID: jC-gmle01810022a07d1
tttttttttttttttttttttttttttttttttttttttttttttttttttttgggtttttttttatttatgaagaattcccatattcgggcccctcatttttttttgaaggggaaaaaaaaaacccaaccccgggccttatttgggaaaaaaacaaatttggccgaatggggcggcactagccaaacgccttaaaaaaaaaaaaatttgggtaggaaaaaattgttttgttttttggggttaaaagaaaaaaaccttttccgcaaaaatttctaaaacgggggaacaatttttggggggtatagggaaaccccccaaaaaaaccctgggtaacacaaggttcttaaaaaaaaggtttttccccacaccctttttccccgggggggccatgggggcccgtttttgttataaaaaaaattggccgg

SEQ ID NO: 6825 - DNA, 498 bp, Glycine max
  unsure at all n locations
  Clone ID: jC-gmle01810022a08a1
ctgatgcggagatacctaagtcagaaactgaaggtgtgcttgaagataaagccttgcaaacaatacttgatgaagcattggtcaaaaatgaagcagttgatgaaagtagtccagaggatagacagctagaagcagaatttacagagaagtttaacgaagaggggcagacaccacaatatgatattaaggagactgcagaaataaacaccaccaatgctactgagaaacaggaagaggttcctgcatctaatgcaaaggaaaatgtaggggtcgaggacgatagcaaattcaatcaagaagaagccaaagggattgaagaagcaacaataaagcagttaccagttgaagaagtagagacaacattgcccactgattcctttgtccaaggtgatactgatcaaaaaccgaagcaacaaacactgcaccatgatgaatcagaagttattgatattgctcagaacatctacacaccagaanattgaactcgacccgaagttc

SEQ ID NO: 6826 - DNA, 435 bp, Glycine max
  Clone ID: jC-gmle01810022a08d1
cttcctcttgtatgaaattcccatcatcgttgatctctaatttctctccggtgtgtgatgctggtacctgttcatgttcttcagtttcataatttaattttgtattgctttctgatgccagatgtccttctgctgttatataatttgcaatcatattttgcatgcttgatccttgcgattggttgtctgattgttcttcttttactatgccaacattggcattggtttcaggttcctcaacaacagtggacattctatcaagttctttttctggtatgcatctcttggcattattgattgcttctgattcatcatcatcaagtgtttgttgctgtaagttttgatcagattcaccttgtacagttacagcaggcaattttgaatggacttcttcctcttgtggaccttctgtttctgaactttgtatctctgcat

SEQ ID NO: 6827 - DNA, 548 bp, Glycine max
  Clone ID: jC-gmle01810022a09a1
attgaagtcaaaagccttagccttccctacaactccaaacacaacgacatcatcatccatggctgcctgcgtctccactgtcggagctgtcaacagagctctttggaacctgaatggttctggagctggagcttcagctcccagttcagccttctttgggaccagcttgaagaagggtattgcctcaagggtccccaacagcagggtttccggtggaagcttcaagattgacgctgtagaagagaagagagagattgaagagacccagcagaccgacaaggacagatggaagggtcttgcctatgatatctcagacgaccaacaagacatcacaagaggaaagggctcggttgactcccttttccaagctccacacgatgctggaactcactatgcagtcatgagctcctacgagtacctcagcactggacttcgccagtacttggacaacaaaatggatggattctacattgctccagcttttatggacaagcttgatgttcacatctccaagaacttcatgacccttgccaacatcaaggttcctc

SEQ ID NO: 6828 - DNA, 396 bp, Glycine max
  Clone ID: jC-gmle01810022a09d1
aagggaaaaggccccaaattaaatttaaggggcccccgccccccaaattttttggggaaagggggcccccccccaaaaaaaggggggggccccccaccccaaaaaaaaggggggggcccgcccccaaaggaaaaaaaaaaaagggccccccacaacccccacactttttttcccccccaaaaaaaaaaaaccccaaaaagaggaacccccctcccccccaaaatttgttgggccggggggtacccccccccccacccccccccaaaaataacccccccgggggggtcccccccccccaacaagaaaagggaaagggccccccaaggagaaccccccgcattacattggaaaaaggaccccccgggaaacaccccgggaaaacctgcgccatttttc

SEQ ID NO: 6829 - DNA, 461 bp, Glycine max
  Clone ID: jC-gmle01810022a11a1
agcgtagctcgcttcgtctctgctcttgcccgcaatgtcctcttcctttcttggagacatcctactaaggaagacgtcgacctcaatgtcttctaccagagctcgtagtaatggcttcatttccaatttgcctgattgtaaatatgctgcatcaaaccctaagattcgccaatttttatgcaatgaagctccgaagaagagcgggttttatcggagatgttgcgtgctttgtgtgtgattgaagctgcttcgcttaatttggttttcgacttactgtgctgctcttcagttagtgttttgattgggatttttcgattttcgactgattataagaacttctattccaaggaaaagaaggtagttccgaagaggaatgacatgaaacatgagttccttggttatgaacatgttggagatttcattcgatcataacgattatatactggtgtacatgttaactt

SEQ ID NO: 6830 - DNA, 352 bp, Glycine max
  Clone ID: jC-gmle01810022a11d1
gaaagcaccgtgacaatacaataagcatatcacatgtgcgtaaaacataaagcataataatagaaaaataagataataagaatcgtgaaaatgttgaacctatctctctatagagtgtagaataaacactatactttccttgtcaaagagctcgctctagaaactcaaatcatgacttcaacatcttatacgttgggcatgagacttcattctctatctttctaagggatctgtcattctcttcggatcactcctaaagtatcaaatagggaccccaacttgccagcttgagcaggactaatgcttgaattacatgcccatttagttgagttgtggcgatcaaaaatcttta

SEQ ID NO: 6831 - DNA, 453 bp, Glycine max
  Clone ID: jC-gmle01810022a12a1
aaaaaataaaaaaaaaaaaaatttaatctatataaatataaaaataatatatataaggggcaaatagtaaatcgaggtacccattttatgataaactttccttccatttttgttcctctagtaggcctagtatttgcggcaattgcaatggcttctttatttctttatgttcaaaaaaacaagattttttagatacagaaaacaaagtaaaattctggggttttttattccccaattataatactaaattcaaaaaaaggagagtaatgagtataatctttcgctcagacgatgtactgatatattctatggcggaggttcgaagaacaagcaatgtattttgggccgctttcactttgttaggatcattggggttattgttcgttgcaatttccagttatcttggtatggatttgttctttatttctgagaaaattagtgatttttctttta

SEQ ID NO: 6832 - DNA, 392 bp, Glycine max
  Clone ID: jC-gmle01810022b01a1
ttcgaggccaatccgaccttcagcgaggagcaactcatcgatgttggtccaggatctggtcacgagtggcaggctcctcgacagaatgacctccgtggcccatgtcctggcctgaacgcctttgtcaaccacggctttcttccacgaaacggatatgccacgatttctcaatttatcgatgccacgactaccgtcgtcggtatgggcccaattctcgctgccttcctcgccgtccttggtgcaagtatcgatggcgatggtttatcgtggtcgatccacggaacaccaccgctcggtgttggtggaccactcgcacggatcggcaactgcattagcggattcgcactacaagtacgagtccgatgccttcccaacccgaattgatctttacc

SEQ ID NO: 6833 - DNA, 480 bp, Glycine max
  Clone ID: jC-gmle01810022b01d1
tttattggagccgcttagaagttttcatcattcgtctctatctccgttcagaaacatcatgaatcctctacctcgtgatgccctccctggtgcttcgctgataacctgggaactgctgaaggagttgtgcgtccaaagcacgaagctgtgggcatgagagtgggccaagaaggttttgcagtgggctggtcagaccactgagggcaccgagaagatctggcttggcttgtgcggcgaattgataggcgaggcaggcaaagttgtttccctcgaggaggttctggccgttcatgacgccgccgctgaggtcggtgatgtcgacgccagtgaaagtgttgacgccgatggtgttgactccgatgttggcaaacttggggtggagacggatggcattggcagcatcgccgaggaagtatgtgctctcgtatggagcagtgagcgatcgactggtccagttgtctggatgcgctctgcacctgg

SEQ ID NO: 6834 - DNA, 520 bp, Glycine max
  Clone ID: jC-gmle01810022b02a1
aaaacactcataacacaaagcacaaagcctagctcatccttgagtttaaaaatggctcctaccttcttccatggcttcctcattcccatccttggcctgtcaaggatcccaaaactctggcctcatcaatctcctataaagggctctgcttatcctactgcaaaccctgagtgttcgatgactcgcttgtcaaatagtttcctaacaaaaagcgacacgaggcggggtgggactcgaagaaagccggatatgatggactaatcgaaattgccaatcgtataactgattaagggcactaccaattctgataccgtacaagcagcggtacgaatattcgaggtctctgttcccttcatatctattggagctctataaaatgctcatagcttctataggaggaggcaaaattgccgctatgatggttgcaatggttactgtactgacttgtcaatggctcatgggcccctgcaaagaccaattctgtagacctacccgatggaaccctatgcagtaatgggtg

SEQ ID NO: 6835 - DNA, 447 bp, Glycine max
  Clone ID: jC-gmle01810022b02d1
tacttcaccaaacacaaatctaaaaactctaaaagtcatttcgttctttgacgctcactttccggggacgaagttggtggcataggcccaggcgttgttgttgacagggtcagcaaggtgatcggcgaggttctccaatggaccctttccggtgacaatggcctgaacaaagaagccaaacatagagaacatggccaatcgtccgttcttgagttccttcaccttaagctcagcaaaagcctctgggtcatcagcaaggcccaatgggtcgaagctgccacctgggtagattgggtcagtgacctcaccgagggggccaccagcaatacggtaaccttcaacggcaacccattaggataacttgtgtggcccagatggcgaggatgctctgggcgtggatcaggcttgggttgcccaagtagtcgaagcccaccctcgctgaagatc

SEQ ID NO: 6836 - DNA, 472 bp, Glycine max
  Clone ID: jC-gmle01810022b03a1
caacaggggaaagtggaaggagaacgcaaaagggtacccttgttttcattgtctcgattgttttcctattgtcatttatcatcataaaccttcagagccatgagcccagctttgaaaacaatatcacaacggtgccattactacctatagctagaggggtcgctgagggtgtatcagccaagtcaaatccatatctatcacagaaagcttcatataattggacaaatgccatgttatcttggcaaagaacagctttccattttcaacctcaaaggaactggatgaacggtccattgttttacatggggtggtaccatatattttaccaatacaatcctgattcagcagtgtggggcaacataacatggggccacgctgtatccagagacttgattcactggctctacctttccattggcgtggttccagattagtggtttgacatcagtggcgtttggtcaaggtcagcaac

SEQ ID NO: 6837 - DNA, 501 bp, Glycine max
  Clone ID: jC-gmle01810022b03d1
atgtatataatatgatatgaaaattaagataaaaataaaataaaacaatagaaggctcttttgtatataattactctagtggtagactttaatgactcttgacaaattccaaataatatggatatccatggcatgggtatgcctacaagctgtaggataactcaagctaattaaacttatcagctttatgcctttatgcatgttgatgccacaagactttcattgtttccttagttggcaggggcaatagtaataaccgtttacaaaatatataatgcaaatgtgcatccatagctttgactttcacaacttctggtcaaaggggaaggggcgtatgaaagctgagttcaattgccaaatcttgagcgaggccttgatgtttatgtccgtcgcgttgttgaacagaaacaatcttgcagctccatatattgcttctgttggataaactctagatgtgatcactgttctccctccctgagcaaagctctcaatgatagaatg

SEQ ID NO: 6838 - DNA, 614 bp, Glycine max
  unsure at all n locations
  Clone ID: jC-gmle01810022b04a1
ctccgctttccctgcaaccaaacagcacctaattccttccaaactcgagccattcttctctgtcatgaaccgcttgtcgcagctctcatcgtacaccgtcgccatagtcaggaagcaccgttcgcctcatcgcgaaccgctccctgcgccaccggtgctgctcgttcccggcgaaaccagagtaccgcggaattaggtctttccgttcagaattcgcgttgaccgccgctcgctgctactccgccaagaaagggcgcaagagcaaggcggagcctgaagtgccggcggtggtgatggagcaggagaaagacgctttctacgtcgttcggaaggggacgttgttggaatctataacagtctcgctgattctcaagctcaagttggatcttccgtatgcaatcctcctgttagtgtgtacaagggatactcgttgtcaaaggacaccgaggaatatcttgtctcacatggactgaagaatgctttatacacaattagagctactgatttgaaagaggatttgtntggcatgcttgttccttggccctttcaggaaccttctaccaaagagggcacatcaaattaggacgtatctaaacagagtatcttgggagtgc

SEQ ID NO: 6839 - DNA, 535 bp, Glycine max
  unsure at all n locations
  Clone ID: jC-gmle01810022b04d1
gcgtcttgaaaatgtaactattaaaacccagtaagagtccgaatggatacaaaaagttaatgaaacagtactttcaactaagaggtatgataatattagtgttattgaacaagtatcattttgctatagaccgtaagatattcaggtcttccatatgctaaagaatgaaaatgataaactctaacttgatgtgactgcagtgttgagaagtcctgataggaatcctccatggcggaaaaaaatcatggaaattgaaaacgctgaggctaaaagttattatgactacggagccaggaccagtagaaaataattcattcttagggtttgattgctaaataattgggtcaccaattcttaggagtaatctgtaaattgcaggcgtgttctgcaacaaacccaaaacataaccagcagcggccatgagtgaattacacacactcttcctggacttggccatctacaagattgatagccaaatttgcttgagcgtcagcatcagagtngaagttccttagaacatgactgatctggaatg

SEQ ID NO: 6840 - DNA, 565 bp, Glycine max
  Clone ID: jC-gmle01810022b05a1
gaaagtggaatcaccaatcttgtaacggaactttttgataactagctgtgtgaagacgacaactgccacccattccaacacacagagaggctattagcaattacctttccttgtttgttccgtcttatactctctctagtctcttcgtgcgaacatcatataaaccacctcggattttgcttcctctgctgcgttttaacgcccatcacgcgtttctttgcttatacactaactaagatttcaaaccccccgcggccaactaactaagatctggttttgttctgattgattcgtgcattggactgtgaaacgcacgccaaaatgtggtggatgatgaacgagactggaggcaattactgttctaagatgagcgatgatttgtgcagcaatgtttgtgatcaggaatcaagtcaagtattgggcatgtcacgaattcgctgtattctgcgtggtttggatgtgaaaacctatatattcatgtttgctgttatcccaatgtgcgtctttggaatctatatacacgggcagaagatctcctactttctgcgacccgtgtgggaaaaag

SEQ ID NO: 6841 - DNA, 523 bp, Glycine max
  Clone ID: jC-gmle01810022b05d1
tttcttttttttttttttttgaaggcaagccagttctcaaaacagcactttaattccagtcctcttcaatagagatgctgctccccttgaatgaaagtccagctctaaattatatacagaactcccccctagatcaaagaatttatcagcaattaatgaattcccaaagaatatctcactggacaatgatacagccatacgagtgacacacaaacacaatcatgacaacctcagttaaaaacctccgagagaggagagtcacttgagctgtacaagctacaaagcttagaaacaagccagcatctcaaatgacttcccagtatcatctctctctcttgcgatttcccggcaaaagaaatttatacttctcagaattttccagaagaaaagcacgaaggtgaactgcacaatagaaatggggcattgatcccattttaccaatgatatccctgaagtgtactcctccggcagcatgtgaaataaatcggtccctttgcggatcaccttctgaattctttcggga

SEQ ID NO: 6842 - DNA, 579 bp, Glycine max
  unsure at all n locations
  Clone ID: jC-gmle01810022b06a1
caattatgcatatctgttacatgatgtagatatcgggtacacgttgagtgtctgtgtgataccttgctgaatgctgtgctctgtcatacgatgcccttgagtagagaaacaatcgataatcttgacactacataccctcaacatctcatccattcattcattgattcaccacccgggttggaacatggtttaaattgaaaagcaagaatcgggggcaaaggtgattgggtcaggaactgacaagaaaaggattcctggcattgatatccacttgaacgatggtgataagtggatgtttgctggccatgaggtgcgtgtaatggacactcctggtcacacccaaggccatataagcttctattttcctggatctggggcaatntttactggagacactttgttcagcttatcatgtggcaagctctttgaaggaaccccacagcagatgctatcttctcttaaaaagatcatgtctttgccagataatacaaatatatactgtggacacgagtatacattgaataatacaaagtttgcattgtctatcgaacctgaaaacgaggaacttcaatcctatgc

SEQ ID NO: 6843 - DNA, 485 bp, Glycine max
  Clone ID: jC-gmle01810022b06d1
acatcgagaacatagcatcaagcatatattattccacggatggatttatatcctaccctacatagaacaagtttcttcaaacgttcaaaatattgtaagtcaaaaatctaaaaattatcctttgcttgccggatgccaccaagggcttctgcatcatttgctgtggctgcaatgtttagtgattgccggattgcagcactggatgtacgaaggaatggattacaagccttttccatcttcagtgtggagggaatcgggggcaggcctttacttcgaaggtaagctacttgggcagcataagattgaagttcctcgttttcaggttcgatggacaatgcaaactttgtatgattcaatgtatactcgtgtccacagtatatatttgtattatctggcagagacatgatctttttcagagaagatagcatctgctgtggggttccttcaaagagcttgccacatgataagctgaacatagtgtctcc

SEQ ID NO: 6844 - DNA, 555 bp, Glycine max
  Clone ID: jC-gmle01810022b07a1
ctgatgcggagatacctaagtcagaaactgaaggtgtgcttgaagataaagccttgcaaacaatacttgatgaagcattggtcaaaaatgaagcagttgatgaaagtgtccagaggatgacagctgaagccgaatttcagagaagttaacgagaagggcagacacccacatatgatattaaggagactgcagaaataaacaccaccaatgctactgagaaacaggaagaggttcctgcatctaatgcaaaggaaaatgtaggggtcgaggacgatagcaaattcaatcaagaagaagccaaagggattgaagaagcaacaataaagcagttaccagttgaagaagtagagacaacattgcccactgattcctttgtccaaggtgatactgatcaaaaaccgaagcaacaaacactgcaccatgatgaatcagaagttattgatattgctcagaacatctacacaccagaaattgaactcgaccgaaagttcattgtggttgaggaacctgaacaacctgaaaccaatgacatcggcatagtaaaagaagaacaag

SEQ ID NO: 6845 - DNA, 464 bp, Glycine max
  Clone ID: jC-gmle01810022b07d1
cttcctcttgtatgaaattcccatcatcgttgatctctaatttctctccggtgtgtgatgctggtacctgttcatgttcttcagtttcataatttaattttgtattgctttctgatgccagatgtccttctgctgttatataatttgcaatcatattttgcatgcttgatccttgcgattggttgtctgattgttcttcttttactatgccaacattggcattggtttcaggttcctcaacaacagtggacattctatcaagttctttttgtggtatgcatctcttggcattattgattgcttctgatccatcatcatcaagtgcttgttgctgtaagttttgatcatattcaccttggacagctacagcccgcaattttgaatggactcttttctcttgtggaccttctgtttctgaactttgtatctgtgcatcagacaattgattggaatatgttccttct

SEQ ID NO: 6846 - DNA, 507 bp, Glycine max
  Clone ID: jC-gmle01810022b08a1
ggtaagggtgctgcatccactcattcattactcactatactcatacggggtttctaaatcatatgccaaattagtagacaccctatgaattgttgttctgccatggcgtcccttctcaaatcaccttcctttctctctcctttgaaccaaaagttgaattatgtaagcttttctcccatgaccacaaacctgcaatccaaattttgtcgtgctagtgtaagaaatgggagatggcatgttcctagtttgacaataaaatctcaggcagctgttgaaggggatgtacttgagaaagaatcagtctctatcaatgaagaaagtgattacggggtcgtttgtatgcaccatgttggaattttatgtgaaaacctagaaagatcacttgaattttatcaaaacgttctaggcctcaagattaatgaagcaaggccacatgataagcttccatacaggggtgcttggttgtgggtaggctctgagatgattcatttgatggagctttcaaac

SEQ ID NO: 6847 - DNA, 507 bp, Glycine max
  Clone ID: jC-gmle01810022b08d1
gaaaagatcacttgccatattctaatttctttcaatcttatttctcagtattcacgtaccgtttatccttacaggtgtgctatatataagatgaacgccagtattctattgctgctagtgccactgcatagcagagtagcaaacaactttactatggctcttactagttacaatcccttcagcctttacatacatgtaatcatttgtaactttatttctacattctggtgacttatagcgacaaaggggtgtagcctagcaagtaatatccataaacatcaaccatctacttgtgtaaactctagagcatttgcatcgggatcacgtgcaaagattgctggtcttccagaatgactaagtgtgtaagggatccccgctttatcaaagattgctttcagcttggaaacatcacgaatcgcaatacacgtgtgacgatctcgaccaccatgttgagctcgtccagttaaagggtcagggtttggaagctccatcaaatgaatcatctca

SEQ ID NO: 6848 - DNA, 362 bp, Glycine max
  Clone ID: jC-gmle01810022b09a1
gtgttgctccaattcatcaactgaattgtgtatgcggccccaaaagattgaacatgatgacgatcatatgagagcattccagccgtcagattccgattgatcattgagaaatggagaagagacactgtgagggaagatactcaccgatgcttcaaccacacagacacctaatgcaggtgcttatgggagtgactacaatggtacccatcatcctaggtactgcagcacgtgttgtagtccgtgcatcactggccatcgtagagctgatggacattggacgatgcagatgcatgaccatagtgaccatggggaccgagaaaacgtcaccatgacgagttctagttgttgaaatggagacagca

SEQ ID NO: 6849 - DNA, 447 bp, Glycine max
  Clone ID: jC-gmle01810022b09d1
aaggtctaattgtattaaactgtttttccttgaatgcgctacacattatcacaacaaatacttgttttctacttatgaaattctccaccaggacaaggccctacaccgaatgaaaaggacttcgaactgcccaacatactttgtcaaatttaggtgagactttatttttttgtatgttgtcaaatctaaatgattggaggtagtaggagtaaccgattgcagaattcgtcctaaacagtatttgtcaaaaaattgtcaccatctattgcaaaagaggacgcttcctacagcaaaaataatcatttcaaaatggaagctaggcaaaatgacgaacagttaactctctcacttctaccaactcaacctgttagtgaaaaacagatattcgcaattcccaacttctgaacttagaaaaacgccgctgattcaaaaactatctaaagcaac

SEQ ID NO: 6850 - DNA, 587 bp, Glycine max
  unsure at all n locations
  Clone ID: jC-gmle01810022b10a1
cttgctctacctctgccactttctgagtacaatacaacactgccatggctgcctcagtctccactattggagctgtcaacagagctccactgagcttgaacagctctgaagctggagattcggttcccagttcagccttctttggcacaagcttgaagaaggttactgcctcaagggtccctaacgtcaagatttcttctggaagtttcaaaatcgttgcggcggagaaagagattgatgagcaacaacagacaaacaaggacagatggaaaggtcttgcctatgatatttcagatgaccagcaagacatcacaagaggaaagggtatggttgattccctcttccaagctccacaggagactggaactcactatgcagtcatgagctcttntgagtaccttagcactggacttaaacagtataacttggataacaacatggacggtttttacattgctcctgcttttatggacaagctngttgttcacatcaccaagaacttcatgaccctgcctaacatcaaggttcctctcattcttggtatttggggaggcaaaggtcaatgaaaatcctttcaatgcgagctc

SEQ ID NO: 6851 - DNA, 473 bp, Glycine max
  Clone ID: jC-gmle01810022b10d1
agtaaaacaccttctattatttgaagccacaaagttcagcagaaccacaatgaacaccaggaaatattaattgattatctcaagtgttttttttagtagtgagacaatgtaactcaaaattataaaggataacaatccaatatgaacaagataaattatttgattatatcaagtcatagcttctcttcaagtggagaatgcttaggttctcagggtgtgtataagcaggttccatcatcacttcttgcagttgggtcgaagtttgaggcatttggatcagtacaaccttcaggaacgggaatttttacttgctgggctgctttgccatagaaagttcctcttttgatggcatcctgattagcatcaccaagagcagcctcgttcaagtacttgtctgccagttgtactctcttcacattctcttgttcttggacaagcatgttaccatactccaagagcttgctcaaagtcat

SEQ ID NO: 6852 - DNA, 353 bp, Glycine max
  Clone ID: jC-gmle01810022b11d1
gcacgtatctaaatagtcttatttaaatagaactgttactgtggagagggaacaacatttccatattttatgaagatattaggagcccatgcaaaacaaggggctgcaagccaaccatgtttgatcctaccgacgctgtaacactggaagagaccgagaattggaacatggcaggaatgcaatattcttcagtccgcaggggaaaactccttagcctaagtgagtggaacttgagtctgtaatgaaaaaaggagcgccgaacaacagcggtatatacttatggaaccagccgactctgatattcattgtgaggactcacttgccaagcaaaggggatgtgcaaatccaatcga

SEQ ID NO: 6853 - DNA, 543 bp, Glycine max
  Clone ID: jC-gmle01810022b12a1
cgggttgaatatacacactttttggatttggttgcttctggagttgttaattcttcatcacaagctagagataaagcagcgaaatcagttgaattttggggactaaggaaagggtctattagctctttgcatgctatactttttacttccaagccaattccttcattgcagtttgcagcatattttgttccttcaaatgagcctgttttaagcattgctgtccttgaagataatgcttgtaactcaaacatatatgctgctagtgaagaggatatcacccgtcttgactcgccaatagaagaaaaagtccatctgaaagaggaaaatctttcatggtagaaagggcaccttatgaggttcttgatatggacttgcttgcagaccaaccagtaaatctcttccttgcatggtctttgttgatatcacatctacagtcattaccttcatcatcatcttaaagggagagactgatccagtacatacaagactctgctactgcagttattgtggattgcctctatcagcatattcctgtggagattt

SEQ ID NO: 6854 - DNA, 52 bp, Glycine max
  Clone ID: jC-gmle01810022b12d1
gcttcggtattgtgggggaaatcggctccttatcttatgaggatccttggcc

SEQ ID NO: 6855 - DNA, 502 bp, Glycine max
  Clone ID: jC-gmle01810022c01a1
ctgttgccatcacataaaacagtttcggtagttttggccttgatcgtacactttgaacctcgctatggacagactaatatgctggtctacttgggaatttgttcattagttggctcacttacggttgtgagcataaaggccattggaattgcaataaagcttacacttgatggaataagtcaaatagcttatcctcagacttggttttttcttaccgtggccacaatctgtgtcattacgcagttgaattaccttaatagggctctggatacattcaatgccacaattgtttctcctgaatattatgtaatgttcacaactcttactattattgccagtgcaataatggttaaggattggtccggtcaggatgtcagcagcatagcccttgagatatgaggattcatcactgttcttacaggaacaatcatatagcacatgactagagaacaggaagaattctatatgcaaatgacctcaacttggttaatggggaggattt

SEQ ID NO: 6856 - DNA, 430 bp, Glycine max
  Clone ID: jC-gmle01810022c02a1
gcttctgttacttacttttcattttcttcgactcacacgacttattctcacgttcgtagccaattgggatatttgtttcggcgaagtttggtacgacgcatgcctgacaggccccagccacccggaagcgacccatagttttgtttggctctttccttcgttggaccgaactacttcacgatcgctttgtccgcacagttctcacgagtcacgatacactagacgaacaccacgatgctctcattcagcatactggccctcctggcgctgccgctctttggctcagtcattgcggaagaggccgtcgttccgaccaagagcgttgaccaaaccaactccatctactccaacgcacaagaagcatttccggacctgctcaatgccttacccgtggaatctctacacgcagccctaagcggtcttcaggact

SEQ ID NO: 6857 - DNA, 383 bp, Glycine max
  Clone ID: jC-gmle01810022c02d1
caaaatgcccaaagatgcataatgtacccaccaaagatcaaatcctcatatgccccatgtgtccctatgcccaaccatgtgttttcgctactccaatgcgccagccgatgtaatgtctctaccgttgtcgaaatgaatgtaatgttgggtatcgtaaggaacgtatgcatgactccatgtccatgccgtgtaatgctgtgatgctgaaaggagagtcgttatcattacgcttttcacctcttccttttcctcctcctcctcctcctaattcccacctcatccttagaccatcatagcaagcacacctcccatcgcagcgtatccctagcaaattggtttgcagcagccgcccatctgcaaccccggctccccgtcttcgtcgc

SEQ ID NO: 6858 - DNA, 456 bp, Glycine max
  Clone ID: jC-gmle01810022c03a1
ccctgaaggaacgaccattacgaatcccccagcccatccatcgatagtcttcttccttcctttggtattagggttgtcggaatctgcaacacctgctccttgtccgacgaggatctcaatgcattcctggtgaagtgtcaactgatgaataaatctccgtagccccgatacggcgtttcccgttaagatggagattgttagggacctactattagatgagcatgccccgcctcaccacgcgctgcaaacccttagccttgcctctgcctcaatctcagcaatggaatgcttcggatgatggctctgtcagtacttcttcccatctgaacatactcgatgagccgagccccttgggttttgcgcctatgaagagtccttctctgttggatatgattcagatgaagctttctcaaggaagtgcgcatcagaaagaagatttaagctccgagccaaaag

SEQ ID NO: 6859 - DNA, 310 bp, Glycine max
  Clone ID: jC-gmle01810022c03d1
tttcttttttttttttttttttttttttttttaaaaccctacaatctaattatctttttagatttatgcaaactgagcttgcctgtgatcatatcaactacagctctacgatcttttttattccaagggatgacatggctacaatccactttattttatacgcaacacatgatttacttacaagcagacatcatctgtgcattactccccgaaaacaaacaataaaattgaatagcaaattcagagctatcacatcttcttgaccatttattcatggtccctgccaggattattcttttaaacaactttt

SEQ ID NO: 6860 - DNA, 572 bp, Glycine max
  Clone ID: jC-gmle01810022c04a1
ccctgaaggaacgaccatttcgaagcccccagcccatccatcgctagtcttcttccttcctttgttattagggtttccggaatctccaacaccttctccttctccgtcttggatttcaattcatttctgtcgatggttcagctgatgaagaattctcggaagcccgaaacggcgtcctccgtgaagttggagatcgttgaggactcactagaagaagagcatgcccccctcaacaagcgctgcaaaccctcagcctcgcctctgcctcagcctcagcaatggaatgcttcggatgatggctctgtcagttctccttcccatctgaacatactcgatgagccgagccccttgggtttgcgcctcaggaagagcccttctctgttggatttgattcagatgaagctttctcaaggaagtgcgcagcagacagacgatttaagctccgaggcccaaagggagagcaagtgtgccagtgctgctgcggcatcgtctggtgccggtgccgatgaccagctcaaagctttatacttaccggcttcgcttctgaggattggttcgtaggagtataaatc

SEQ ID NO: 6861 - DNA, 439 bp, Glycine max
  Clone ID: jC-gmle01810022c04d1
acgatctaattatattattagatttatgcaaactgagcttgccagggataatatcagctacagctttacgatcttatctattccaagggatgacatggatacaatccacataattgaataggcaacacatgatttacttacaagcagacatcatttgtgcataacacccagaaatcaaacaataaaataaaataacaaatacagagctaacacatttacttgacaatttatacatggactctaccaggattcttcattaaaacaacttttccaaatcccagtagttcctagggtagaaattaaacttgcacatgtttacaaagacataaaatattccctatgcagctagacactgctagatagctccatacttgcccaatttgaaattccaaatatgagaataactacctggcatgactgttaccatccttttctgata

SEQ ID NO: 6862 - DNA, 546 bp, Glycine max
  unsure at all n locations
  Clone ID: jC-gmle01810022c05a1
gtatatatatgatgaacgctatgaatatggaacttatgccatttgatctacttgagttcagtggatctcatcaattgtatgactggagaaagagagctcatcaaagcaagtaagtgacagctacactttgtctgattgcttaaaattatatcttcacctgttgcaaaatcatttataactttgtcttgttatatgctgggtgatttactgaagagggggcaaaattaggcataattcataacactcttataataaaatattaagaatttagtcatatctttatcttggaaggttcaccatttgcctttgaaactttattacagtggacctggatcatcgaattattgagtgtatttaacatgcattggatttgatgtttcggcctttttttccttgagtttttcttttccttcaaagggaaagttggaccaaacaatgttagaaaagctcttaaatttaaaagtaaggttttctgaatgaagaaaacttangaacagagcttctatagaagctcattgatggagcttctacttttgtggaaacaag

SEQ ID NO: 6863 - DNA, 419 bp, Glycine max
  Clone ID: jC-gmle01810022c05d1
tgtcgtccttttttttttttttttttttgtaaattttttatcttttttaaaaaaaacaaagggatttattgaaagagtttacattgccatgccggcatttaattcacgagaccgaaggtttgcttctaacaccacagcccgaccctgacctttattgcgggaacaatggctctgaaatttactcaccttcagttctctcgtttagaaggggatcgactgcttgacgaagctcatgataacaaatccgcggtttttgtgagaaaagtgactgaaccgcgagaaaacaatgatcctatcttcatagccttgacttatgtgaaccgaacctttcttttgacggcaccgaaccagacatgtgtgaaagcccaaattgccacttttctacagcactcactaagtctccgacgaatgacccctat

SEQ ID NO: 6864 - DNA, 375 bp, Glycine max
  Clone ID: jC-gmle01810022c06a1
ggatatatttgatgaaagctgtgaaaaaggtacttatgccatctgaacgtgtagtgcacactcgatctcatcaactgtcgtccggataaagagagcttatcaacgcaagctaatgactgctacactatctacgagggcctaatattatagctggaacctgatgcaaaataactcgtaactgagtttggtatatgctgctgattcactgaagacggggataaattaggcgtaattactaacactctcataagttaatatatgagactatagtcatatctactatctaggaacgtgcaccattgcgccttcgatactaaattacgcgtggacctggaacatcgaatgatcgaacgcatataacatgcattggatctg

SEQ ID NO: 6865 - DNA, 392 bp, Glycine max
  Clone ID: jC-gmle01810022c06d1
ataaaaaacaaatgaatttaataaatgaatttaccttaccaaacatgaatttaatcaatggcagggggcgtatggttattataaaatgccccaccatccctttattagtgaaaaattgaatgggcgagtttggaacccaaaggggcggacatttgaatgggccacaaaaacaacacaaaacagaaggtgggaatagccgccattttgggaacaaacactgggtgaagcggcggaaatcttggaggaattgggtatatacgggtttgaccaaaaaggtaacccgctctgaacttcaactaaccactccattgtaaaaaccccaatgttagatattttcctagtttcacgaagcaacccacaaattaccctcgatgttgacggaaaaatcaata

SEQ ID NO: 6866 - DNA, 592 bp, Glycine max
  Clone ID: jC-gmle01810022c07a1
attctagcgagcagagcttttgtcaattttctattgaccttctcggtggaggaattttagtggacaaaactggagattggatcacacttatacaaaattctccaattagtaacttgttgagagttgctgcttggaagaaaaggcttgtttatgggttaaaattgtgatgtctggggaatgcagcagtcaaaaaggagtgattgggcctcattggtacaagtgtttttaacaaacagcaacagtacagagcatttcgatgcatgtaagtggacaaaatcggaaccacattcctgggaattgatcttcccaatagaggtatgtggtcctaataatggttttgaaatgtggagttctgagtgggcaaatcaaacttcatggcacttgagtttccttattgacaatcccaaacagtctacagtttttgatattctcttgggaatttctcaagattttgaaattgctggtaatactcttatgccagctttttctgttccacaggctactgccagatcttctgaaaatgcggaatcctctgcatgatctgggaattgtgttttctttcgttgggtcgttggttaattcataaaggaat

SEQ ID NO: 6867 - DNA, 443 bp, Glycine max
  Clone ID: jC-gmle01810022c07d1
tgcatgatgtgtactgatggatgaccagctcgctagctgactggcgggctgccgtcctttttttaaaattcacacactgaacacttgaaaacatcctttataagagcagaggttataactaaccatacagcaattatttagcggacatgatcatgctaagatgtctacataggacaacacatacgaacaaatcgaaatgagcccacttctttcaagatacgcagacgagttcacactaaacatagcatatgctactacagcagcgtgagcatacacaatgatggattcataattttaaaccagcattattacaacatgaagacagacaccgacaatggtctaacattcatagaacggggtgatatgggcaaattggacaaaaccaggcccagaagacagaaactcgaggaacctcatactttagattaggcatcattgggacc

SEQ ID NO: 6868 - DNA, 558 bp, Glycine max
  unsure at all n locations
  Clone ID: jC-gmle01810022c08a1
ccttccttttcttcttctccttcatatgttctctctcaccattctcttcttcttctccctttcttagattctccctcttttctctctgccctccgccatgactgaggataaggagatgtcttcctctgtcaccaatggcgatgattccctcactggtcacatcatatctacaactattggaggcaaaaatggggaacccaaacagactattagttacatggcagaacgggttgtaggaactggatcatttggaattgttttccaggcaaaatgcttggaaactggggaagcagtggctattaaaaaggttttacaggacagaagatacaagaatcgcgaactacagttaatgcgtgttttggatcatccaaatgtgatctctntgaagcattgtttcttttcaactacaagtacagatgagctttttcttaatttggtgatggaatatgttccagagtctatgtatagagtcattaagcactataccaatgctaatcaaagaatgcccatcatctatgtaaaactttatatgtaccagatttcagggggctgcttata

SEQ ID NO: 6869 - DNA, 503 bp, Glycine max
  Clone ID: jC-gmle01810022c08d1
aaagaaaaacagataggatagcacattacatttcacaaggaactggtcaacaacattacaaatcgccaattacattaacaagaggaaaccaaacccaacaaccccaccatcaaaactcatgtggaccctccttccctccttccatctaaggcttttgttttcccctcacagaagcaatctaagttctgccatttcaggccaaatatactttactactatatgacatgttgacgtttacaataaacaaaggctatttagcctgaggaaataagatccaccagtagcaacagagaatcaaaaagtatgcatatgctgatggatctcaactgcaggcatccagcaccccaagtctcagtctaggttcagcttgaaactacactggtcaggccacagaacatgctaatttagacaaaaataacggtgtcacttttgtttaacttatcaactagtatacactaaagcccccctaaagctcatcatcatgatcctgctggaggaacaaa

SEQ ID NO: 6870 - DNA, 133 bp, Glycine max
  Clone ID: jC-gmle01810022c09a1
gtcatagatgcgtcatatcatatttcgttactgactacactgaccctgcttttcaacataatacggcttcatgggttactatctgcggctggatgctacaaggtggatgcccttctcagatagccaacctttc

SEQ ID NO: 6871 - DNA, 529 bp, Glycine max
  Clone ID: jC-gmle01810022c09d1
cttggattgatcaattacaacataccaattgcctatttataggctcaagtcactaacctctcaatggtggtgaatgtttctacattactttaggtctttctagagttttcatgatagattagtatcatgatagttctagattcttctatcttatacatagacttatagttctagattgttctaccatattcatacacattatagttctagattgttctaccatattctatagttctaggatattctactatatacatattatatttaagaatattctagaaatttgtagcaatttcaacaacacacaacaaatccgacaatcagaatcaagaggcccaattttaattctagggcttgctccatgatcaaattagtaccaattattttttcatccgctattccttggctcatcctccatgatatttgaagctctctttctctagttgattgattaattgttgtaacaccttcagatacttgtttgacttatgatcaagtatcatccttcttgaaagtctgagctttccat

SEQ ID NO: 6872 - DNA, 518 bp, Glycine max
  Clone ID: jC-gmle01810022c10a1
gtttgggctcttccaacattggctcttacattaatggccagtggaaagccactggttcttctgtcacttctgttaatccttctaacaatcagagtatagctcaagtgaccgaagcaactttgcaagattttgaggaggggtttgcgagcttgcagtgaagcagctaagacatggatgactataccggcaccgaagagaggtgagattgtgagacagattggtgaagcattgagggccaaattggatcctttgggtaggctggtgtctcttgagatgggaaaaattctcccagaaggaattggggaagttcaggaaattattgatatgtgtgattattgtgttgggctaagcagacaattgaatggatcaattataccatcagaacgtccagatcatatgatgtttgaggtatggaacccactaggaatagttggtgtaatcagtgctttcaactttccatgcgctgttctaggatggaatgcttgcattgctttagtctgtggttactgtgttgtgtg

SEQ ID NO: 6873 - DNA, 496 bp, Glycine max
  unsure at all n locations
  Clone ID: jC-gmle01810022c10d1
aaacatcaaacactttttgactgggaaaagaattctcagcttattcatttaacatttatttaagatatcttatacattgaaactgtcatatcaaggtgccatccttacagcaagcatgtcttgttaagacaacactttgaacccatgtcagccagactaacatctcggtatatatagaactctcttcagactgcaaaatcgcattattttgtgcagcctcatgtgctaggatagctttctagccaaagtttatcccctgagctaatggtagttcacttccataattaatggtacatgtagaacgccgcatgtattgcttccatgagtcacttcccgcttcacggccaccacctgtcgccttttctccaccaaaggcaccaccaatttcagctccatttgtaggtatgtttgcattcactataccacaatcactacctcgtggcccgatccatttgaatatagttccaggtctttgggtaaagatngaactacttaa

SEQ ID NO: 6874 - DNA, 614 bp, Glycine max
  Clone ID: jC-gmle01810022c11a1
cgtgatattctctgcgtatattactgggatgcctcgtgctttgacactgtttgacgctcgtgaatgtgtgaatatgattgctcatgacttatagctgtaggtacttggttaacgtagaggtgtccaccagtcttcggcatcaacgggctcttcagcatataggattgattgcgcccattgcatggctgccccatagaggcttgcctgaacgagctgttgccattcttcgggcttggcttttgagcattaccttcacccatatccaaaggactccgataaagttatgcttgctaaacaaactggactttctaggagccaggtgtcaaactggtttatcaatgcccgagttcggctttggaagccaatggttgaagaaatgtacttggaagaaatcacggaacatgaacaaggtaatgcctcagaaaacaccaaatcaaaggaatcgagcaaggagttgggttcaacagcaaatgttgcacccgaatcaggtgccattaaactcgatcatctacaatcaaagcaagatagcttcatacaccataacacttcttcaaccgagatctcaacatactcttcaatgtctccaatgggaaggtcccttcaatccccctctg

SEQ ID NO: 6875 - DNA, 410 bp, Glycine max
  Clone ID: jC-gmle01810022c11d1
attgaatcttatttaatttacatgcttacatatattcttttttttttttatattcttttttttttttaaaacaaaaaaaaaccatgggcggcccgaattttttaaaccaccaaaagaaaaaaatgttttgacccccatggctaaaggggcaaccccccagccccttgctttatttattcccccccccccccccatttataacgccctccaaaaattgggaagaccgaaacactggggggggcaaaattttctggcctctccaatttttgagggggggggccccccccccccctcccggaaatttcaccaaacaaaaattcggggatgctttaaaattaggggcggcaatagctggggcacttgaaatttgaaaaaaaacaaaaaacccccctcttttttttttccggggg

SEQ ID NO: 6876 - DNA, 219 bp, Glycine max
  Clone ID: jC-gmle01810022c12a1
aactcatttggtaagccgtattttgtataatatttctctgcaccaatcataagggaggcatcgcctgctgctagcattactcattcctccaccattcacttgacgggaagtggaggcatgaacaagcacagtgcgtcttctcaactgctttgcctgttaagaagacaacactatctgcgctgctcgaattgtgactgtgactcttgatacattctcaag

SEQ ID NO: 6877 - DNA, 298 bp, Glycine max
  Clone ID: jC-gmle01810022d01a1
cttcggagtgaaaacagatattagcattgtaaaattctgaccccaacaagtacaataagagtgttgcagggcacagaccttggctacaacttgtctagactatatcaggctgtctcaacattcgatgatgcatattgtttgaaagtaaataatttgacaaaccttggctaagcatcaattggcattaagtgtaccccttcacctcttaatggcacaattcagccaacaatgtgacagtggacattatttaatgattccttgattgattatgtttgagtttaaaaaaaataaattaaaa

SEQ ID NO: 6878 - DNA, 451 bp, Glycine max
  Clone ID: jC-gmle01810022d02d1
ttatttgttcactacgtattatatgcaataaaatattatatggcagaaatattctaagttggaaaaaatagaaactaagatataggatttttcaggaaggggttaaaaaagattattttattgatatttttagaatatttctatttcgacacaaacaagaaggaataggaatcggactctaggaaaagacaaaaaatcccccctagagtaccttttccatattttaattgattttgtttcaaattatctatctatatagatatctattttatgtttagtatcgaatccaattttattgtattttacaatcgaaatttctataatagaactctctattatagaaaaatgaaatctgaaaaaaacagtgtcataaccataatattcgaatttattggggggttgaaaaaacatagtcaaatagtcttcctgacaatatccatactcgagttta

SEQ ID NO: 6879 - DNA, 335 bp, Glycine max
  Clone ID: jC-gmle01810022d03a1
ctagctcaacaacaagcatatccttcatcattgtcaccacccctttgcacaatggagagggagagagcattgtttgagagggtgagaaagaatagcacagtggaagaggaagtggaaaatgaagtagaggaggaggatgaaagtggcgttagtattactgaagaagagaagaagaaaggggttggtagtagtggtgggagaagagggtcatgtggaggtagtggaggggtttctccaccttcatgtcatgcatatatgtgtgttgctgatttaacttgatgcagagaggttccatcgccgccacaaggtgtgtgagtttcattcaaaggctcctg

SEQ ID NO: 6880 - DNA, 404 bp, Glycine max
  Clone ID: jC-gmle01810022d03d1
acccaaaagaagcaatatctttttattctaacccaatggaagataagagcacaccccaatcaagaagggtgcttctataggataacaatggtgataaggcaaacagaaaaaaaaggccctctttccaaataagaaaaacagagctcaggaaactagctagcttacattgcatattaagacatcaggctttggctgttggaagtttttgggatttttgattcttgctcatgtgaacatacaatacaaagggggttttattatataccttgggttgtaagaaaccaaagggtgacagaagagagagagctttgtgaacactttggcttcatttgatgttgaaagacttgtagccggaactccctggtagggtcatttgaattctctccctctcatttgcaagcctg

SEQ ID NO: 6881 - DNA, 472 bp, Glycine max
  unsure at all n locations
  Clone ID: jC-gmle01810022d04a1
gtaaacggctgttttgtatacgagctgtcccggtctcagcctctacatcccaaaacatcaaaacaactggttgggctccttgtatggcttcttcctcagttggtagaagagctacatattcaacacaatctgtatcgacaaatgagccagttgtatctgtagattggctntatgataacctgaaggagccagatatcaaggtactagatgcttcgtggtacatgccggatgagcagaggaatccaattcaagaatatcaggttgctcacattcctggtgcccttttctttgatgtagatggaatagcagatcggactacaaaattaccacacatgctgccatcagcggaagcggttgctgctgctgtttctgctcttggcatagagaacaaagatgatttggctgtttatgatggaaaaggattatctagtgcagctcgtgtttggtggatgttcccagtatttgggcatga

SEQ ID NO: 6882 - DNA, 353 bp, Glycine max
  Clone ID: jC-gmle01810022d04d1
ataagccacatgataggatttaatattagtaacatttgaacatattagcaattctcaagaatctcaaccacaactaaaccaaaacaacaaacagtaaagcatacaaaaattggtgtgttcaaaatgtttgacaaatgaaaacagccccttcacttgcagatactttttggtggcatgcaaatttagctgtattgaattcataaagtgtcaacaggtgtatttgattgtgctccccattcagtccaagatccatcataaactgcaacatcagactttctaagacgatgaagacccaatgcaagaatgcaagcagttacgcctgttccacatgaagtcacagctgggctttccag

SEQ ID NO: 6883 - DNA, 554 bp, Glycine max
  Clone ID: jC-gmle01810022d05a1
taagcgatgaaagcttagtaaatggaacttatgccatatgatcttcttgtagtaaagtgatcttatcaattgaattctggagaaagagagctcatcaaagcatagtagtgacagctacactttttctgattgcttacaatgatatcttcacctgttgcaaaattatttataactttgtcttgttatatgctgggtgattcactgaatagggggcataattaggcataattcataacactcttataataaaatattaagaatttagtcatatctttatcttggaaggttcaccatatgcctttgaaactttattacagtggacctggataatcgaattattgagtgtatttaacatgcattggatttggtgtttgagtcctttatttccttgagtttttcttttccttcaaaggtaaagttggaccatacaattttagaaaagcttttaaatttagaagtatggttttctgaatgaagaaaactcaaaaacagagcttctatagaagcttattgatggagcttctactttagcggaaacatgaagcctaaaaatg

SEQ ID NO: 6884 - DNA, 452 bp, Glycine max
  Clone ID: jC-gmle01810022d05d1
ataaaaaacaaatgaatttaataaatgaatttacattaccatacatgaatttaatcaatggaaaggaactaatgattttaataacatgcccgaccatccctttattactgaaaatttgaatgtgccagtttggaagcccaaggtacctacatttgaatgggcaacaaatactacacaaagctgcagttagtaataactgagattttggatataaacattgcatgaagcgggagaaaacttgcagcaataagttatatacaagattgtcaaaagatgtacctcgcactgaactccaacaaaccacacgagtgagaaaactcgtatgtcacattatatccaagtttcacgaatcaaccaacaaattacactcttttttcacgtaaatatcaataaaagaacactgtgcagcacaccaatttttacgatccatgcccgaaaaaacaaaatctcat

SEQ ID NO: 6885 - DNA, 428 bp, Glycine max
  Clone ID: jC-gmle01810022d06a1
cgcgcgtgcacgtgtttaaattcaggtcggagagatacgctggagttcgtgagggatggtttgaagtcgatgcgcgtgaacccggggctgtcggtgttcgcggcggatccgcaggtcacgtgggggttaatggctgagttggcgaattctggaaccggtgatcccagggagagctgcggggagacggacataatgctgatggccacggaggtgcatgagatgctggacgcatgagagcatgaaaggattctggcgtagtgcacgaaggtgctgagagacgtacggttcaagttaagggacgaatgggcttcatgttatcacaggttctgataaagaatgtatgcttgtgttgttgcttattatgcacttggcactattggatgtgatcctttggaaactactgagattattgaacttggtggtgctta

SEQ ID NO: 6886 - DNA, 480 bp, Glycine max
  Clone ID: jC-gmle01810022d06d1
caaaaaaatcatgtactatataatgggcttctgcaaaactagcttcccaggcagggaatgaagatttcgttttgtatgtagcaatgggtaagcatcaattgagtaatttcttatgcagtgtttgttacaaaaaccacataacaaggtgttttctgttgaaggatgcagcatatatactagttccccctggcaacaatttctaggctgacctgctccacttctggccttactgttatctgaaaccagttaagcaattggtataacactcaattcctggattccagtaaacaacacaaaaacatgctactctacactaattcctcggaaagagtaactccacatactgcatccaaaatccaatgatttacaatctgagcccccgatggcgtggccttcaatagtatgatgtggccatctagttttaaaggataaatattttcatcataatcacagcagtgcctccacatgagtaaaccaaga

SEQ ID NO: 6887 - DNA, 552 bp, Glycine max
  Clone ID: jC-gmle01810022d07a1
aatctctagttcacaggagaggggacagatgtttattggtcctggagtggatgtttataaaggtcaaattgttggcatccatcagcgacctggggacttgtccttgaatgtttgcaagaagaaagctgcaaccaacgtacgtttcaacaaggaacaaacagtgattcttgatacgccatttggactatagtctggatgactgcattgaatacatccaagaagatgaactagtagaggtcacccccgcaagtatccgaatgtgcaagaatccaaaaattacaaacaagaaaacaaggtagactctcactgtgaagcagtaacttgcgaatgctttttgagttaaccagtgactgctggtgtgctgaagctgcataactcatcaatgctgttgctgctaaagtgatgaagaaacaaatcattaccattgatgtaatgtcacatatattcttccgaagatgcaggcagaataatatagaagctggctgaaagccctattcattatagctattggtcattacagttgattaaagggatgaagttatactgaatttt

SEQ ID NO: 6888 - DNA, 356 bp, Glycine max
  Clone ID: jC-gmle01810022d07d1
ccattgtgtttttttgtttttttgttatccttaaccagtttgaggaagaattaatgtcgggaaccttacttctcacccagaatttacaaatcgcacataaaacatttgtcgtgcataccttgaatcaccagcgcgaccattttgctataaggaatagggcttccagtcagcatctatattattttgtctgcattttcggaagaatatatgtgacatcacatcaaaggtcatgatctgcttgttaatcactctagcagcaacaacattgagtgagaatgcagctccttcacaccagcagtcactggttaggtcaaaaagcattctaaagttactgcatcacaaagaaagcctacctt

SEQ ID NO: 6889 - DNA, 525 bp, Glycine max
  Clone ID: jC-gmle01810022d08a1
tcgcaacactgcaagtgtgaactagtaacaaaagcaaaagaaagattttctccgatggcgacatattttcatagtaactcggaaattcaagctggtgctgacggccttcaaaccctcgtactaatgaaccccgggtatgtccaatactctgacacgccgccaccaccgcacggcggaaacctcgtattcctcaactccgccgccggaaacgcctccctacaaagtctcccccacgcgccgcccccccacacgcagcaatttgtcggtgtcccactctcggccgccgcgcatgagccgccggcgtccatgcaccacgacgtctccgccctgcatggcttcctgccgcgcatgcagtataacctctggaacacaattgagcacaacgcggcggcgcgtgaggccccacgcgccacccaggggctgtcgctgagtctgcacggggaccacatgcgcgcgtcaccgtcctcggcttccggggccttcaacggcggcggcgtggcggggattcagagcgtgctgttaagc

SEQ ID NO: 6890 - DNA, 356 bp, Glycine max
  Clone ID: jC-gmle01810022d08d1
gggggaaaaaataaccgggcgaaacccccaaaaagaaaaaaaaaggggccccccccccaaaaaaatttgggaaccccccccccccctccccttttgaaaaaaaacaaaaaaaaataacccccccaaaaaacccccgggcgttaaaaattcaggccctttaaaaaaaaaaaagggggggttgggggggggaaaaccccccaaagggaaaaaacccctttttttccaccaaaaaaggttccccccccccccaaaaaaaaaaccccggggggtaaaaaaaaatggagaaccccctttcccccgggggccccaaatgggcacccccccccctaaagggttttataggcgccaaaaggggg

SEQ ID NO: 6891 - DNA, 476 bp, Glycine max
  Clone ID: jC-gmle01810022d09a1
catgcctgttctctcaacgactcctccgcgaaagagtatcattcaatatttcggctgggtgtgaatccacggggtctgaagtcgttgcagacatcaccgctattctaagagtgtctgagatcccttattgatgtccgatctgtacaacagaagacggctagttgcagtactgccgctaaccctgcgccgcacggtgggcatcgagctctgccttctgaaggcggtagcccttcagacttgctctctctagctggtggtggtttcttctaggctcttcactctgttcatgacttttagcctgcatagttttaagtaagacaggacagacagcgccttagtgactagctacgatcaccgcgtgttcttgatcatccacttgtgatccttctactactactactactacttactctccacacaatgatgctcagaatcaagaaggttaccactgacgtttccaactaccagaatgacga

SEQ ID NO: 6892 - DNA, 478 bp, Glycine max
  Clone ID: jC-gmle01810022d09d1
aacccataacataaaacatttattaatatacaaacatttattacaaagggaaaccagaaatacagcaagtgaagatttcatccttaagaactactacaagaacaaacagataactgaatttattatttctcagagtcaagtcaagcattatgatacatcataccccaaaacaccaacaacagtactcaggtgagcagttattacatcgtactttcacatgaacgcgtcataaaggcagataaaagcaaatacatacaacacaggaccttaaggctcaagcacagcacaatactatgtgacttaaacggtgacacaattcagcaattattcttaaagcactacggatttgctgaatttgttcataattttagagccttgttagtgtagaatcacacattcttgtgaaccagctaccaccacagtagggtgttcgcttgtgctgactgcatcaacttctttgacactttcaacgttgaca

SEQ ID NO: 6893 - DNA, 550 bp, Glycine max
  Clone ID: jC-gmle01810022d10a1
catgtttgttctctcaacgactcctccgcgaaagagtattattcaatattttggttgggttgaatcccggggttgaagcgttgcagacatcacggctattctaagagtgtctcgctccctcattcatgtccgatctgtaccacggatgaccgggtagttgcgtaactgccgttaacccttcgccgcacggtgggcgtggtgctttgccttctgaaggtggtagcccttcagacttgctcttcctcgctggtggtggtttcttctagtttcttcactcttttcattacttttagcctgcatagttttaaataagaaaaaaaaaacagcgactttgtgactagttaagatcaccgtttcttcttcttcttcttcttcttcttcttctactactactactactacttttcctccacaaaatgatgctcagaatcaagagggttcccactgtcgtttccaactaccaaaaagacgacgctgcagactctcctcgtcccgtcggaggttgtggtcggaatcgcctcaaagcttgttgccttccagatgcaaagct

SEQ ID NO: 6894 - DNA, 478 bp, Glycine max; identical to SEQ ID NO: 6892
  Clone ID: jC-gmle01810022d10d1

SEQ ID NO: 6895 - DNA, 624 bp, Glycine max
  Clone ID: jC-gmle01810022d11a1
ggtctcgagtatgctgcgaactatgacttggcatgcacaattccagtatcagtgtgattagatcgtggtcaatgagctttggagacaggttcactggcactgacctcaaattgcagtcttgactacttaacagactgaatggcttggacagtgacaattccgttgacatgtcggttaattgatgcctgaaactgacagtttgagactaactataataagcaagaacagtagattgagcactcttaggtcagcagtgagactgaagctcttgatagttctcaagtgagatctgctgaggatgctcagcttatagaagaggctagagaagccacaagatcgggagaaaggatgagttgggaacagtatggagctcttagaaggaaaattggtggtacatacacggattttttcaaatcttacgttgaagtggacggcgcatatgtagaagagggatgggttgacaaaacatgcaaggtgtgcaagaaggactctaagggcgatgcaaggcaagtggacaagctaggacgatatgttcatgtagcatgtctagagaaggccaatgcaggaaacttgcttaccagactctcctctagatgaagagaagcatatacaagagtcatcatg

SEQ ID NO: 6896 - DNA, 370 bp, Glycine max
  Clone ID: jC-gmle01810022d11d1
cggggggaaaaaaaaaaaaaaaaaccctttttttttgggccaaataaccctttttggggtttcggcccccaaaaaaaaaaagctttatgaaaaacaaaaattggggggggggaaagcttcctttttggtccctttggccccccggggacccccccccccccaaatcccccctttggttaaaatcataagcggggaaaaggggggcccaaaaaaaaccctgggggctaaaacctttctaaaaaaagggttttcccccccccattttcacgccgaggaaatcttcgttgtcccctctttttttaaaaaaaaaatctgggaaaaaaaggtcccactttgggctttttttaaaaacgcccaaaaaatttttttt

SEQ ID NO: 6897 - DNA, 517 bp, Glycine max
  unsure at all n locations
  Clone ID: jC-gmle01810022d12a1
ggcaatggcggaggaagcacagtactcatcgggacccgattccgcgcccctcaagcgcaagtacgaagaccaaccctccggcatcgagcttgccaagcagcgtgctcaggaagtcgccgcacgcctnctcaacgccgctcctcctccgccactcgacgccaagcgtnccaaacccgacaccggcttcgattctctcgatttgaagcctctgtattccgcatctcctcctcccgtctcctacggtcaccaaggttccagcaagaagattgatatccctaatggcagggttggtgtgattattggtaaaggcggagagactattaagtatctccagttgcagtctggtgccaaaattcaaattactcgtgatattgatgcggaccctaattcttccactaggacggttgagcttatgggcactcctgaagcaatttcctctgccgagaaactcatcaatgaagttcttgctgaggctgaatctggnggttcttggcattgtactcgaagatcacgggac

SEQ ID NO: 6898 - DNA, 506 bp, Glycine max
  Clone ID: jC-gmle01810022d12d1
cggcggccgcccttttttttttttttttttttttttttttttaaagataatgaacattttaaattattgtcacaagttcaaataagcttcccaactagttttttcagtcgcctccaaaatgagtttctatttaaccgtacaagatattcaaaaagtaaaaaaaaaaaaaacaatacaccatttcttccatctaaacaatgcaatgctacattggtgtcactagtaccataaacggggaaacacaataaaaatcgtctatgagaaggggaggggaagggtggccaaaatatcaaggggatgctttagcaatggcactctggggtgcctgagcattcccattaccatcaccggtatacgccggagtctgtgtataaccagcaccataagaactggtgctgtatgaaggcaacgccttgaccataaccaggctggccaccctgcggagcaccatatgtttgaagaccgttccctgggtgcacttgaccaccataaccaggctgtgattg

SEQ ID NO: 6899 - DNA, 306 bp, Glycine max
  Clone ID: jC-gmle01810022e01a1
atcgataccacaaaagtaggaaatggtgaagcctttgaggcagatgatcctatgagatgtcctgtggacaagctcattgatggggtgaagatggtaggtacacatgatggggaggtgactgatttgtctatgtgccaatggaatgacgaattcgattggtatctgagtcacaggatggcacgaacaaagatctgggaagatcgaaaggcacatccactggcaattggagagatcacattgatgggaattcgggtttttttgctacatgtattactgcttctcataagtcggatcatattgtactta

SEQ ID NO: 6900 - DNA, 387 bp, Glycine max
  Clone ID: jC-gmle01810022e01d1
gcacattcctggaaatgagggggaaaaaatcatttacatgtcataagcgtggagttgacgacatgcaataaaagacggctccttgagagatcaactccagctattgcaggcaagctacagttgatgatccagtatctgattgacttgctcaaagatggatcgcgtgtgcatcgcaatcggcgggtctgacgggtttatgggagcagccacatgaatcagccacgcagtttttagcggtggatcattggcaatatcacaagccaattgctgatgaagtgaaagccgtacaccttggctttaaggcagaggaaccattgacaaaaatccgcgtacatgaacctgagttcataacccagatacaacggatacatcaattgtatgtagagc

SEQ ID NO: 6901 - DNA, 428 bp, Glycine max
  Clone ID: jC-gmle01810022e02a1
tgagaactaagaaggagaagcaaatggcttcctcaatgatctcttccccagctgttaccactgtcaaccgtgccggtgccggcatggttgctccattcactggcctcaagtccatggttggctttcccaccaggaagaccaacaatgacattacctccattgctagcaacggtggaagagtgcaatgcatgcatgtgtggccaccagttggcaagaagaagtttgagactctttcctacctgccagaccttgatgatgcacaattggcaaaggaagtagaataccttcttaggaagggatggattccttgcttggaattcgagttggagcacggtttcgtgtaccgtgagcacaacaggttaccaggatactacgatggacgctactggaccatgtggaagctgactatgtgaggttgcacatgatgc

SEQ ID NO: 6902 - DNA, 484 bp, Glycine max
  unsure at all n locations
  Clone ID: jC-gmle01810022e02d1
gtgtccgaaaacagaaaccaaaaatacaggatgatgaaatctcaaaaagcaaaaacaaatgggaatgtagtttaagtacaaacaaacaaagtggggtggcggctacaaatgctttgcaaatttttcacacttagaagcctgggggcttgtaggcgatgaagctgatgcactgcacttggcgaacgttgtcgaatccgatgatacggatgaagccgttggggtatgcagtcttagcctcttgaagctccttcaacacctgagaagcatcagtgcaaccaaacataggcagcttccacatggtccagtagcgtccatcgtagtatcctggtgacctgttgtgctcacggtacacgaaaccgtgctccaactcgaattccaagcaaggaatccatcccttcctaagaggtattctacttcctttgccaattgtgcatcatcaaggtcttgcaggtangaaagagtctcaaacttcttctttgccact

SEQ ID NO: 6903 - DNA, 598 bp, Glycine max
  unsure at all n locations
  Clone ID: jC-gmle01810022e03a1
taaattaaaaatgaaatctaatcacatttatatgaatcaaaaacatttaaagagtgattttatttatgacatcaatttcttagctgttttaaggagggccgctaaaaattgaaaataaaagaaccttctcaagtgggcaaatgtgacgcattaggcccaaaaactagagataagtggaaaaggccgatatacactaaggatgccacattgcaatttgcaacttgcaagtagaaccgtccaaactgaggctcgagaattccagaattcatatacgtatcatgatacactcattgcatgttttcattaagaaaattgccatcctacttacccatgaattgcattgcatgctntcattaagaaattggcatgtcacccaccaggctggtggagataatctattttcaaagattaatctaatcatataaaagagtgagaaaataataattacacacaaaagtaagaggtataaatataaaattttaaagataaatacttataattttcttaaataagagatatattcatttattcctacataaaaaccaagtcaaaaaatttcaaatctttaaaattaggggaccacaaaatttaaaattta

SEQ ID NO: 6904 - DNA, 418 bp, Glycine max
  Clone ID: jC-gmle01810022e03d1
aaaagcaaaaatttccttttgaaaattaaaataatcaatagtcatttatttatgggaaccattttttattctgtactataacaatatgggaaataagaataaaaaagggggggggaaaggggcattggaaagaacagtatcctatttttataaaaattccaggggccactttctttacttttagttctacacactagagcgccaattagtaactttctaactgttgaatgaaatgacagaaatccacttgcccatgaaacgttaatggcttaaagggcattggaccacttagctggtttcctaataataatgagataaaaaaatgatgcgtgaagagtctcagctttgtcagcatatgaaaggggggccattattgtttcttccttggtgacctaaaaccctgttgctttaatttata

SEQ ID NO: 6905 - DNA, 290 bp, Glycine max
  Clone ID: jC-gmle01810022e04a1
gaccagcgtggcttataacggattgttgaatcgcacacagactttgatactagaatgacctatgaatgaatgaccatagtcgcaatatgaggctgccttacggagtccgaggatctatttagacaccagcttgaaagacgacgatatgagcgccgtcttggtcaactacatcacactcagtatcctctcatatatggtctgctactacgatgtctgcaagatactaaacactacatggctgagaggctcggacctgagatctactactagtgatgacactgtcaaactgc

SEQ ID NO: 6906 - DNA, 444 bp, Glycine max
  Clone ID: jC-gmle01810022e04d1
gcgcagtggcatagccatagaacattctataagacttccgctgtataaaggatttatgtacactaaacgggttaactggaaatcctataagcgcgtatggttccccaaatgacctgtcagagtgagaagtgtggaggcttagaattaacctccacaacctatggtctaccccacatgagtgttcacaggatataaaagcataggcaggttctttctactcctgcacattgcctatcttatccaagtggaaagcccacaacattctcatcattagcgaagcatggaacatcctgacagaaagagaacatatgctggagccggtgtgttcattattcaggcaacaccactgaatcttggatctgctggcaaccaacaggacattttggtgccacttcacctcgaactgatatggcacaccctcgcctacacacaaaatatccacag

SEQ ID NO: 6907 - DNA, 381 bp, Glycine max
  Clone ID: jC-gmle01810022e05a1
ctctggaggctgactgataaggattatgaggaatttaagcagcaagagattgatgagctagttgagaagactcagcaacgtattggtgaactacttgaccttgagcccgaggaagcccgatgatgacgatggggatcaattgagagatctaatcgctaaggagaaagagtgtttcacgctcttgatagtctcaaaagaggatgaacacactcatactagtgaacaacatgcaaaatttgaaacaccaactggttgcataactaatggatcagagtattatctgatattggtagattgcaatgcactaactggagatcgccatcgtgacaaatggctggagaggttgctttaacgcattcagtacatgtgtgattctaatga

SEQ ID NO: 6908 - DNA, 463 bp, Glycine max
  Clone ID: jC-gmle01810022e05d1
ggaactagggttttcttttttttgcttattaatgatttgaacaagttaatactacaaaatcaaagtcaaactatgaaatttaatgctatggctaatacaacctttatgatgtatgaggtaaaaccagctagttcatgtgaagtattacacacaaccaaccgtttttttgtatgcgaggcgcagagtcaaataggaagagaactatatctattcataaacaatttttagctatgacttaacactagccgggatagatacacgtctcatagcctcaatatcggcacctttcctggactttccaaatcatttttggggatatacaattaacttttcttttaaaagatgtcattggctgactttggattcacggtggctcagcatcttcatcggaacatctttaaattttgcagtggtctatggcgctgggcctatgattccctttggatctgatgcatgtatggtc

SEQ ID NO: 6909 - DNA, 571 bp, Glycine max
  Clone ID: jC-gmle01810022e06a1
ctctggaggctgactgatgaggattatgaggaattgaagcagcaaggagattgatgtgcttgttgagaagactcaacagcgtattggtgaactacttgaccttgagccctgaggaagcccatgatgacgatggggatcaagttgatagaatatacaaagcttcatgagaaagagtgtttgacctcttgatgtttcaagagaggaggaagaaactcttaagagtgaacaacatccaaaatctgaaacaccaacgggttgcataactaatggttcagagtattatcggatattggtagatttcaatgcactaactggtgatagccatcgagacaaatggttggagaggttgcttcaacgcattcagtacatgtgtgattctaatgattgcaaagaaagggacaaaggattatggaatgccaattctgatgaaatcaacaatggaagcaagcatagaagttcagaatcagcaactgactgtcaagataaggttctgaagagtttcaagtctttttactgcgcagatgttgctgtttaaccatggatgctttagaaaaacctctcatgatgctct

SEQ ID NO: 6910 - DNA, 384 bp, Glycine max
  Clone ID: jC-gmle01810022e06d1
ggaactagtgttttcttttttttgcttattaatgattcgaacaagttaatactacaaaatcaaagtcaaactatgaaatttaatgctatggctaatacaacctttatgatgtatgaggtaaaaccagctagttcatgtgaagtattacacaaaaccaaccgtttttttgtatgcgatgcgcatagtcaaataggaagagaactatatctattcataaacaatttttagctatgacttaacactagccgggatagatacacgtctcatagcctcaatatcgtcacctttcctggactttccaaatcatttctggggatatacaattaacttttcttttaaaagatgtcattggctgactttggattcacgggggctcactttctt

SEQ ID NO: 6911 - DNA, 538 bp, Glycine max
  Clone ID: jC-gmle01810022e07a1
tcgccaaccagatggatcctattcaagtgatttgttggagagcccaaagggcaatttggatcagaagctagagaaagattaaccatttattagacatattgttcctagcccacaataaatgggttctaggattgctaactatttgcttaggtgatcctaaggtgtacaaagccaattcatgaaaaaaggaaaaaaaaaagttgtataaaaatgaagggagcaacccagttatcagcgggtggagactccaaatatgtcaataatcataaaagatgcagagagcagtttgttgatgtgtagagaaacaattgttttacaatcagtggaaaagaataacttggagtgtattgctggatggttggttcctaaagcagcatgcatgccagattgtgcaggattgactctgtctgggatttgttatttttttctttctctgttgaggctgttgtggccatttgcggatatgaaactattgtgtatatggtgaaaaataatcaatttatggcggaatggttcggatagaatgggaacaaggaac

SEQ ID NO: 6912 - DNA, 512 bp, Glycine max
  Clone ID: jC-gmle01810022e07d1
aagactcagatttataaataggggttgataaaacagtgctttacagtgcatccaatatttaaaatcacaactacaatggcaagaaaccagttcacaacttcacatctttacagacattcacattttttggctacatgataaacaacattgataaataacaggatagttccttgttcccattctatacaaaccattcccccataaattgattttttttccccatatacacaatagtttcatatccgcaaatggccacaacagcctcaacagaggaagaaaaaaataacaaatcccagacagagtcaatcctgcacaatctggcatgcatgctgctttaggaaccaaccatccagcaatacactccaagttattcttttccactgattgtaaaacaattgtttctctacacatcaacaaactgctctctgcatcttttatgattattgacatatttggagtctccacccgctgataactgggttgctcccttcatttttatacaaccttttttt

SEQ ID NO: 6913 - DNA, 506 bp, Glycine max
  Clone ID: jC-gmle01810022e08a1
aaagaaaccaatgcattcttctatcttcattccttccctattactctttctctgctaaattatttaaattttctctctttctctaattaattccctttgttatcaaaatggctgtggctatggctgcttgcagtcttggacttcacttgagtgctgacaacaccttgagaccttttgaaaaaaccactatcttgaaggccctctctatctctgatgctactaaaccatgttacatttctcacaaaacaagattatcatcttcatcttcaggaataacaatgatcccacgagcaacaacagttattggtactgtggaggatggaaatcaaggagaggctgataccattccaactccggtagttattattgatcaagactctgatccagatgcaactgtggtcgagataacctttggtgatcgccttggggctcttcttgacactatgaatgcgttaaaaaacttggggctgaatgttgctaaggcaaatgtctttctagattcttct

SEQ ID NO: 6914 - DNA, 300 bp, Glycine max
  Clone ID: jC-gmle01810022e08d1
aaaaaaaaaccccccggggtaaaaaaaaaaagggggggggggggggtccctcccaggggggggggggggttttaaattttgaggggtcccctgggccgggaaattggggcccccaagggggaaaaaaaaccgggcttttaaaaatcggggggggttaaaaaccaaggggaaaaaggggggggggcccaaaaaaagggggttccccatccccggggcccccaaaaaaaattcttgggggggtaacaaaaccccccgggggggggttggggggggctttttcctggggggggaaagaaaatt

SEQ ID NO: 6915 - DNA, 362 bp, Glycine max
  Clone ID: jC-gmle01810022e09a1
gctcatctgtgcacaggtgctgtattagcagaagcatattgaatattgggttgggttgagaccctgggttgaagcggcgcggacattccggctgttgctagagggcttcgctctctcatgcatgtgaccactgtgcgtctgctgacatgttgcgcaactgccaccaagccttcggcgtacggtgtgcgtctgagcttcgctcctgaagcggcagcctacaaagacttgctctagtcacctggaggtgaacgcggtgacttgtagctgctcgacatctggtcgtcgtgcaacatactgacaggctacatgcgccacaacgtagccgagacgtacactttcttacttcataggatcaccacctc

SEQ ID NO: 6916 - DNA, 553 bp, Glycine max
  unsure at all n locations
  Clone ID: jC-gmle01810022e09d1
actaatatacaaacataacatttattacaaagtgaagccagaaatacaggaagtgaaaactttcatccttaagaactacaactacaaggacaaacagttacctgaatttattatttctcgcagcatgaaagccacgatagacagtcaagtcaagcattatgatacatcagaccccaaaataccaacaacactactcagctgagcagttattatatcgtactttcacatgaaagtgtcataaaggcagataaaagcatatacattcaacacacacgaccataaggctcaagcacaaggcaatagtatgacttaaacggtgacacatttcagcaattattcttaaaacactgcagattttctgaatttgttcaaaatacaagagccttgttactgtagaaccacacattcttgtgaaccagccaccaccaccacagtagggtgttcgcttgtgctgactgcatcaacttcttttttgacactntgaacattgacatcctncaattcaccacagccaatggcttcaaaaacaagatcattgacttcttgaaacctc

SEQ ID NO: 6917 - DNA, 555 bp, Glycine max
  Clone ID: jC-gmle01810022e10a1
aaaaagagtagctagcactagctagctaaacacagtacgagtagtgatcataggcaagcaaaagcatattcataatatggcaaccatggaagacatgaacaacatgagtggtgaaattacacttccaggcttccgattccaccccaactgaagaagagcttcttgaattctacctaaaaacatggttgttggcaagaaacttcgttacgatgtcattggtttcctcaacatctatcagcatgatccatgggacttgcctggtttggcaaaggttggggaaagagagtggtacttcttcgtgccaagggacaaaaagcacggaagcggaggaaggccaaaccgcacaactgaaaaagggttctggaaagccaccggttcagaccggaaaatagtgaccttatctgatccaaagcgcataattgggttaaggaagacactggttttctatcagggaagagctcctaggggatgcaagaccgattgggtcatgaatgagtaccgtttacctgacaattgcatactacctaaggaaatcgtgttatgcaagatatatcg

SEQ ID NO: 6918 - DNA, 433 bp, Glycine max
  Clone ID: jC-gmle01810022e10d1
gccgaattgaatctgctgatgaattttactttttgaacattcattttaagagggaaacatcttcaagggttgacaaaaagttccagttaggctgaacttgattggaaacaccatatttgtgcacgaaaacatgtctagttaattgagctaatataaaaaacgttattaattactaattcactgcatatacattccaaaataaataaataataactgattaagttgcagctgatatggtatttgagtaatgatgcatatagagtggagtcagtagaagtttacaatattggtgggagtaaagttttggagccatggactattcaactgagcccaaaaggtatcttgggtccaatccgacaacatgggaagctgaaagcttggaaacttctccttcccaaagggcatttgtagtgatgggccacaagagcttttg

SEQ ID NO: 6919 - DNA, 633 bp, Glycine max
  Clone ID: jC-gmle01810022e11a1
catctatgatctaggagtgaactatacaatatcaaacttctcacctctgtatcaaacctgagaagaatcacactatagcggatttctgttcctcacttaagggcattgaaaaatcttggaaagatatccctctacatgtgtagtaacataagtcaagcttttggaaatgtaccatcacagttggattcatttcatactatcagatttgaacattgactattgcaaggatatggtgaaattgcctactgggatctgtgatattgtctcactaaagaagctcagtattactaattgacacaagcttagttctctgccccaagaaattggacagttgttgaatttggaactcctgaacataagttcctgtactgatttggaagagataccagattctattgtaaaactttctaagctaagacttcttgacctctcaaactgcataagcctttcaagtttaccagaggacattggtgatctatgtaatctcaggaatctcaatatgacaagctgtgcaaggtgtgaattgccatactcagtaaccaatcttgagaatttcgaggtggtcgtatgtgatgacaaaccagctgttcatgggaagccattcaagctatgctttcaaatctgaagtagagg

SEQ ID NO: 6920 - DNA, 517 bp, Glycine max
  Clone ID: jC-gmle01810022e11d1
gaatattagaaaacatactttataaaaacaaactttttaacttaccatagttcaattattttgtggacatcatcatgctaagatgttcactcatgacaacacatacaacaaataaaatcgccaacttctttcaagtaacatagtactgtttacactaaacatgcaaatactactacagcaacttgaatacacattattatccatattttaaacaagattattacacatgaaacagtcacggccattggtctaacatttatagaaagaggtcataggagcaaattgaacgaaaccagcttcagttaacatcaactcgaggaacctcaaactttagatttggaatcatagtttcaaatgcttcccatgaaccaggtcatgtcttaggagctaatagaatgaagccagtttaagttaacctcgactcgaggaacctctaacttcagatttggaagcatagcttcgaatgcttcccatgaagcagctgtctcttcatcacataccaccaccttcaaattct

SEQ ID NO: 6921 - DNA, 541 bp, Glycine max
  unsure at all n locations
  Clone ID: jC-gmle01810022e12a1
gtgtgaactagacaatttcaaactactcagctctgtatcaaacctgagaagaatcagactagagcggatttctgttcctcacttaggggcattgaaaaatcttggaaagttatccctctacatgtgtagtaacataagtcaggcttttgaaaatggtaccatcacagttttggattcatttccaaaactatcagatttgaacattgactattgcaaggatatggtgaaattgcctactgggatctgtgatattgtctcactaaagaagctcagtattactaattgtcacaagcttagttctctgccccaagaaattggacagttgttgaatttggaactcctgaacataagttcctgtactgatttggaagagataccagattctattgtaaaactttctaagctaagacttcttgacctctcaaactgcataagcctttcaagtttaccagaggacattggtgatctatgtaatctcaggaatctcaatatgacaagcttgtgcaggtgtgaatngccatactcagtaaccaatcttgag

SEQ ID NO: 6922 - DNA, 474 bp, Glycine max
  Clone ID: jC-gmle01810022f01a1
ggctcgagtgagaactcattctcaggaccaatgcctgagagtttttttgagagctgctcttcccttcatcacatttctctagctaggaacatgtttgatggtccagatcctggctcactgtctagatgttcctcattgaagagcattaatctttccaataatcatttctccggtaatgtggactttagtgggatatggtcattgaacaggcttaggactttggatctatctaacaatgccttatcagggtctttacctaatggaatttcatccgtacataacttttaagagatcttattacaaggtaaccagttttcatgtccattatccactgatttttggattctgcctgcatctgtatatgttggatttcagtgataattagttcagtggataactgcctgaatcactagggatgcttagttctttgagctatttcaaggcattaaattatcatttccacagttgattccc

SEQ ID NO: 6923 - DNA, 460 bp, Glycine max
  unsure at all n locations
  Clone ID: jC-gmle01810022f01d1
acataaaccaaatagccaaggaaattaaaaaggatacacaacataaaggaaaaaagaaaagaaaaaaatctcatcagtcacagattttctatatgtcaagctagttcaacagagaagcatatctcatcaaaatacttccatcctttgaggaactggggttttaatgacctgcagtatttgcaccacttcagccatagtaggcctgctagaaggaatttgagaggtgcataccattgctagcttcagaacaggcaatacctcatcttcaggatactcactcatgctttgatccacacactccaacacattcccttgctcaagcagcaccctcacatggtcattcagtatcagcacattgtcttctccatactccactggtctcctacctgtcaccagctcaaggatcatcaccccanaaccatacacatcacatttctcattgacccttaagctcttgcat

SEQ ID NO: 6924 - DNA, 454 bp, Glycine max
  Clone ID: jC-gmle01810022f02a1
taaaaaagtggatctgtttgagaatggaacctctgctgttgtggaggctgtttctcctgagttgggtaatagggtgcagcgagtgcgtgttcaatttcctggacttagccaagagctccttcagaaattcagggaaaagaacattgactttgccgctcataatggtcaagaagagacaggttctccattagctaacctgattgggaacctggcttttcctctgattttgattggaggattgctccttctctcgagacgatcatcatgagggatgggaggtcccggtgggggctttccttttgcttttggtcaatctaaagccaagtttcaaatggagcccaatactggagtgacatttgatgatgttgctggagtggatgaagccaagcaggattttatggaggtggtggaatttcttaagaagcctgagaagttcactgctgttgggctcgca

SEQ ID NO: 6925 - DNA, 512 bp, Glycine max
  Clone ID: jC-gmle01810022f02d1
gtgaagaaacatacattttctgttgccaacacaagaaaaaagaaataaagaagcaagctaggatcttttgtcattactaaaattaagagtcaagggtatattacaaatattttacaattttagaaaaattcagtatgtggagagctacactacattgcagtggcatataggctattcaaacaacaactggtgagggagttgaaggagggacccgattttcagcaggaatttcaacaaactcggacaggagagctcggaattcatctccagacattgtctccttctccaatagaacttccacaattttgtcaattgcctcacggttgctccttatttggctcaatgctatttcatatgcttcatctgagagtctcttgacagcagcatcaatgtcttcagcaagcttttctgacattgagtttcttgccatcattctcatgataacatcactttgagctgatgagtccatgagtgaccaagggaccatatcagacatttcaaatgtggtacca

SEQ ID NO: 6926 - DNA, 505 bp, Glycine max
  Clone ID: jC-gmle01810022f03a1
tccttcaataacttataacttagcattgtattgtgttcaaactttgtttcttccataccctcttcttctttggccttaaccgtcatatttggctttgaaatggagttcgaggaccgcttcagacaccaggttcagagaccaaaatatgattgccttctttttgatttagatgacacttagtatcctcgtaaatctggtctggcaaaatcatgtctccaaaatattaaacactacatggttgagaagcttggcatagaccctagcaaaattgatgacctgtccaacctcctttacaagaattatggaactactatggctggtctaagggcaattggatatgactttgactatgatgaatatcatagctttgttcatgggagattaccttatgagaacctaataccagacccagttctgaggaacctgttgctgagcctaccctatggaaacttatcttcacagacgcagacaaagtccacgcggcttaagcgctaacaggcttgga

SEQ ID NO: 6927 - DNA, 355 bp, Glycine max
  Clone ID: jC-gmle01810022f03d1
ggtggtggggggtgggatttcaaatttggattaaagaaccattttggaggggccttattaattttctgcccctaattattattctaagccggggccgaatgcttccccagttgctttcccagggttgccacctctggatttatttccaccctcccttattcaaggcccagcctccttagggtggggatggcttcccagggcttaatcggttcctttccattttgggagaggcccacccacaccggggggaggcccccccctttttccacctggtttgtgggggttcctgtcttaaaggaccaaagttttttgggggtaaaggtgggttttctgaggggccaatcaatgggctttt

SEQ ID NO: 6928 - DNA, 494 bp, Glycine max
  Clone ID: jC-gmle01810022f04a1
ctcaaccgaacctaaattctctcaccaaatcctcacttatccaaattcgatactccaatccccacccaaattccccgcatcgactcccctccccaaaattcccccatcgccggcgtctcccgcggccgaacgcatcacatcgccgattcggctacggcgctaacagtggctatcgtatgggtaagattctccaagaaaccgcgaagccgtcggcgaattccacatcggcgtacccctctgcggcgcccggcaccacgtcgtcgatgtcggtgacggagacggtgagggggtcgcaccagttcaagattacggggtactcgctctcgaaggggatcgggattgggaagtacatggcctgcgacgtgttttccgtcggagggtacaattgggcgatttatttctaccctgatgggaagagcgtggaggacaatgcgacctacgtgtcgctcttcatcgcgcctgccagcgaaggcaccgacgttagggcacttttc

SEQ ID NO: 6929 - DNA, 492 bp, Glycine max
  Clone ID: jC-gmle01810022f04d1
tgtcgtcctttttttttttttttttttttttttttttttttttttttttttttcccagaaaaaagtaattctgaaaattttgcggaaccctacccgttaaacaaaacagttcccgcaccaccccaaattacttttacattttttacccatgaataacccaaaaaaattaaaaattgcctctgaccctataaaaaattatttttatattccccctctaactaaactctcgcttttttttaaaacggaaagtaaaaaagggttgtccaaaaggctgtgcagtgtttttaacatactaaagcctttgcttcacccccctcccatttatttcactgccatcaaggggggcatcattcctatgatggcacatgaggcctgaatgctcagtaaatctggcaacgaactccaatagctcagtcaaaacagatgggcagctttccttcaagtactcaaaaccgccagtgtgcctcacagctgaagaatcaaaaagaagga

SEQ ID NO: 6930 - DNA, 511 bp, Glycine max
  Clone ID: jC-gmle01810022f05a1
ctctggaggctgactgataaggattatgaggaatttaagcagcaagagattgatgtgcttgttgagaagactcagcaacgtattggtgaactacttgaccttgagcccgaggaagcccctgatgacgatggggatcaattgaaaaataaaaaaagcttcaggagaaagagtgtttcacctcttgatgtttcaaaagaggaggaagaaactcttaagagtgaacaacatccaaaatctgaaacaccaacgggttgcataactaatggttcagagtattatcggatattggtagatttcaatgcactaactggagatagccatcgagacaaatggttggagaggttgctttaacgcattcagtacatgtgtgattctaatgatagcaaagaaagggacaaaggattagggaatgccaattctgatgaaatcaacaatgaaagcaagcatagaagttcagaatcagcaactgactgtcaagataaggttcagaagagtttcaagtcttttaact

SEQ ID NO: 6931 - DNA, 458 bp, Glycine max
  Clone ID: jC-gmle01810022f05d1
ggaactagtgttttcttttttttgcttattaatgatttgaacaagttaatactacaaaatcaaagtcaaactatgaaatttaatgctatggctaatacaacctttatgatgtatgaggtaaaaccagctagttcatgtgaagtattacacaaaaccaaccgtttttttgtatgcgatgcgcagagtcaaataggaagagaactatatctattcataaacaatttttagctatgacttaacactagccgggatagatacacgtctcatagcctcaatatcgtcacctttcctggactttccaaatcatttctggggatatacaattaacttttcttttaaaagatgtcattggctgactttggattcacggcggctcagtatcttcatcggtacatctttaaattttgcagtggcctatggcgctgtgcctatgtttccttttggatctgatgcatcta

SEQ ID NO: 6932 - DNA, 511 bp, Glycine max
  Clone ID: jC-gmle01810022f06a1
ctctggaggctgactgataaggattatgaggaatttaagcagcaagagattgatgtgcttgttgagaagactcagcaacgtattggtgaactacttgaccttgagcccgaggaagcccctgatgacgatggggatcaattgaaaaataaaaaaagcttcaggagaaagagtgtttcacctattgatgtttcaaaagaggaggaagaaactcttaagagtgaacaacatccaaaatctgaaacaccaacgggttgcataactaatggttcagagtattatcggatattggtagatttcaatgcactaactggagatagccatcgagacaaatggttggagaggttgcttcaacgcattcagtacatgtgtgattctaatgattgcaaagaaagggacaaaggattatggaatgccaattctgatgaaatcaacaatgaaagcaagcatagaagttcagaatcagcaactgactgtcaagataagggttcagaagagttccaaggcttttaac

SEQ ID NO: 6933 - DNA, 537 bp, Glycine max
  Clone ID: jC-gmle01810022f06d1
ggaactagtgttttcttttttttgcttattaatgatttgaacaagttaatactacaaaatcaaagtcaaactatgaaatttaatgctatggctaatacaacctttatgatgtatgaggtaaaaccagctagttcatgtgaagtattacacaaaaccaaccgtttttttgtatgcgatgcgcagagtcaaataggaagagaactatatctattcataaacaatttttagctatgacttaacactagccgggatagatacacgtctcatagcctcaatatcgtcacctttcctggactttccaaatcatttctggggatatacaattaacttttcttttaaaagatgtcattggctgactttggattcacgggggctcagtatcttcatcggtacatctttaaattttgcagtggcctatggcgctgtgcctatgtttccctttggatctgatgcatctatggtcggcatagacacctcatcccgggaggcataccaggaatgaccacaggaaacacattccagctgataacgtcatta

SEQ ID NO: 6934 - DNA, 443 bp, Glycine max
  Clone ID: jC-gmle01810022f07a1
ctcaatctttccgaaggatggagtgagcggaaagggcatttgggtcagattgaactgaataataggaaacacacaggtggagtggcgagcggaatttgatatgttataaaaaaatactatcaggaaaggggtgttttcgattcgatcaactcactcacgggcacgcctttcatttcattccgatgcgatgacgacgatgagttccctctccctctctcttgactggcacaatgaatcctaccctgcctatcatgatttctaccttctccccattttcgctctcttcttaccctcccttcgcttctttctcgaccgaatcatattcgagaaagtggctagacgatcgatttttggaaaggggcatgcggcgctggactaccagactgactagagaagaaaatagattagcaaatttaaggaatcagcctgaaaattgtgttatt

SEQ ID NO: 6935 - DNA, 289 bp, Glycine max
  Clone ID: jC-gmle01810022f07d1
ccgactaggccggcggccgccctttttttttttttttttttttttttatttttttttttttttttttttttttttttagggaccaaccgattcttttttttaaaaaataaaaaatcaaaaaatcaaatttgggcaatttaacataacagaagcccacataacctacgacaattttcaccatggtggggggtaaaacaaattggtatcattttagaatcacctttgcctaaaaaaaatattatgcttttgggtccgtcccaaattttcatgttcatgggcaatttcatct

SEQ ID NO: 6936 - DNA, 411 bp, Glycine max
  Clone ID: jC-gmle01810022f08a1
cccttctatgaggggtgaagcagagtatgaattgcatggggattgtagtgaaagtgatatggataatctctacttatcgctcaagcgcatacgatcacaagagcttaaaagcttattatgatgtacactaagaagcttcggatcagatgacagaaaggttatacttgtcatcaggagagaatcgtttaccatgatgaccgctagtgacaacgaacatttgacagggattatcgggtacgatgctcaccgatatgaagatttgaatgagtagagattgcaatcatcggaaggatcatttacgttgcaactgaacatgatgcctatctcgacttgttcatcaaactctataggatgggctccgctatagctatttacttcttgaacagaagagcactcgggatggaaagggag

SEQ ID NO: 6937 - DNA, 468 bp, Glycine max
  Clone ID: jC-gmle01810022f08d1
ccaatacccgttttttacactcatgcttgggataggaattaaaacaagtttcctgaccaagctgaagacttgagtttgaaagcatgcaaagaaagctttcaatctgtatttaatcttaatcaacgggaaagaagagagaaaaaaaaaacttaaaaaatgaaaaaacatgaggaataacaaaatcaaaagacatagactgctgatactagtaacgctttccaagaattatgccaaagacaatggacacatgagctacacccaagatgaacttgaaatttatgacaggagaatcatggccagtttgaacatgagtctcggatgaagatgatgtctgaccacttgttacttctgactttttcttgctctttctttttgatggaatcgagaggcttgaaccaatgtccctggattttacttccaacccttctttctgatcaacactctcattaccctgaaacatcattagaa

SEQ ID NO: 6938 - DNA, 382 bp, Glycine max
  Clone ID: jC-gmle01810022f09a1
aaacaaaccaatgcattcttctatcttcatgccttccctatcactctttctcagctgaaataatgaaatcctctctctttatctaattaatcctcctttgtcatcgaaagtggctgcggctatggctgctagcaatcttggacatcaattgagtgctcacaacaccgtgagaccctttgagaaaaccactctcttgaacgccctctctatatctgatgctactaaaccatggtacatgtctcacattacactgattatcatcttcatcttcaggattaacatggaccccacgagcaacaccagagatcggtactgaggaggacggacatcatggacaggctgataccattccaactccgagggatattatggatcaagactc

SEQ ID NO: 6939 - DNA, 520 bp, Glycine max
  Clone ID: jC-gmle01810022f09d1
atattgtaaaaataagaacaactcttaagatttaaaaaaatatatatcgtaactgcttacaaagttttgttgccatcgcattcacaagaccaatggtttactccgcacactacatcatattacgaaatatcatgtgagtacaagtgctctgataatagactcacattcatttttcttgaagagaaatagatgtcctgcatgaggaagctcatgataacgaatccacggtaatttgtgagagatgtaacggttcagcgtgtagggaatgatcctatcttcaaagccttgccatatgtgaaccgaaccattattatcagggaacggatttgttatgtctgttggtccaaattcccactttccaaaagcactcattatgtctcggtgtaatgattcatattcaccttgctgagttatcctctcctggccagtgttttggagttctgacaagctcttcacgatctctatatcatcaggagacaacaaatttgtcaaagtcaatgaagggaaccatttttgagtc

SEQ ID NO: 6940 - DNA, 602 bp, Glycine max
  Clone ID: jC-gmle01810022f10a1
atcgccaagctcgccgaacaggccgagcgatacgaagagatggtggaatcaatgaagaacgttgcgaatctcgacgttgaactgactgtggaggagcggaatttactttctgttgggtacaagaatgtgattggtgctcggagagcaatctggaggatcctggctttcattgagcaaaaggaagaaacaaaagggaacgagttgaatgcgaagcggattaaggagtacaggcagaaggttgaattggagctttcaaacatctgtaatgatgttatgacagtgattgatgagcaccttatcccttcggctgcagctggtgaatccactgtgttttactataagatgaaaggagattattatcgttatcttgccgaatttaaggcaggcaatgagaagaaggaagctgctgatcagtctatgaaagcatatgagtctgctaccactgcagcagaggctgatttacctccaacacatcccatccgattgcgtctagctttaatttctcaggtttctattacgagatcttgaactcttcagaaagagcctgtcattttgcataacaagcttttgatgaagctatttttgagcttgacaccttgaat

SEQ ID NO: 6941 - DNA, 442 bp, Glycine max
  unsure at all n locations
  Clone ID: jC-gmle01810022f10d1
gcagtaaaggttgtagcatttcattggaaaaggaaatacaccataagcaattctcatcaatcaaatcccccagagactggaggaaaaggattgggaatgaaataggccatttccagacaccacacaaataaaaacataccataaatatagcacaaatggagtatctctttcccctatcgggaagtatggggcaatcaacaagaaacaaagagaaaacaatggaaccctatctctagctaatacacggataagtaacggccctcatgtttcattcccaaacgcatgcatcgaatcctaaggaagatcccatcaacaatcggactcactctgcctcctcacctncaccaagcttggcagtgccattcactttctgggcatcttctccatcttctgggatgtcagaagtccacaaagttaggttgtccctgagaagttgcatgat

SEQ ID NO: 6942 - DNA, 612 bp, Glycine max
  Clone ID: jC-gmle01810022f11a1
gactttattcatactgcgaactatgactacgcatgcacgcgtcctgaatctatagatatagctataggtgagaactaaacaatttcaaacttctcaactctgtatcaaacctgagaagaatcatactagagcggatttctgttcctcacttaggggcattgaaaaatcttggaaagttatccctctacatgtgtagttacataagtcaaggctttgaaaaatggtaccatcacaggtttaggattcattttcccataactataagatttgaacattgactattgcaaggatatggtgaaattgcctactgggatctgtgatattgtctcactaaagaagctcagtattactaattgtcacaagcttagttctctgccccaagaaattggacagttgttgaatttggaactcctgaacataagttcctgtactgatttggaagagataccagattctattgtaaaactttctaagctaagacttcttgacctcttaaactgcataagcctttcaagtttaccagaggacattggtgatctatgtaatctcaggaatctcaatatgacaagctgtgcaaggtgtgaattgccatactcagtaaccaatcttgag

SEQ ID NO: 6943 - DNA, 517 bp, Glycine max
  unsure at all n locations
  Clone ID: jC-gmle01810022f11d1
gaatattagaaaacatactttataaaaacaaactttttaacttaccatagttcaattattttgtggacatcatcatgctaagatgttcactcatgacaacacatacaacaaataaaatcgccaacttctttcaagtaacatagtactgtttacactaaacatgcaaatactactacagcaacttgaatacacattattatccatattttaaacaagattattacacatgaaacagtcacggccattggtctaacatttatagaaagaggtcataggagcaaattgaacgaaaccagcttcagttaacatcaactcgaggaacctcaaactttagatttggaatcatagtttcaaatgcttcccatgaaccaggtcatgtcttaggagctaatagaatgaagccagtttaagttaacctcgactcgaggaacctctaacttcagatttggaagcatagcttcgaatgcttnccatgaagcagctgtctcttcatcacataccaccaccttcaaattct

SEQ ID NO: 6944 - DNA, 509 bp, Glycine max
  Clone ID: jC-gmle01810022f12a1
aggacatcgacgaagtaattcgaaggtcaaacgcaacgcactatggtctagctgcaggagttttcactaagaatgtgcacacagccaacactttgatgcgagcactgagggttggaacagtatggatcaattgctttgatgtttttgatgctgcaattccctttggagggtacaaaatgagcggcattggcagggagaagggtatctacagtctcaacaattacctgcaagtgaaagctgtggtttcaccagtgaagaaacctgcatggttgtgatttgtgaattgctcaaactgctatgaccgaaatcctacgtggctatcatctttttccgctgaggcaatggcatgcaataaataatgtgatgttactaagataaaacctgattaggtacctgaacattataccagttgaatttatgtatttttcacttgttaattgctcaaacacaaacttggatactgtaatgacactgttgctgtaggatataaattttgcaccattcacact

SEQ ID NO: 6945 - DNA, 467 bp, Glycine max
  Clone ID: jC-gmle01810022f12d1
agtgtgaatggtgcaaaatttatatcctacagcaacagtgtcattacagtatccaagtttgtgtttgagcaattaacaagtgaaaaatacataaattcaactggtataatgttcaggtacctaatcaggttttatcttagtaacatcacattatttattgcatgccattgcctcagcggaaaaagatgatagccacgtaggatttcggtcatagcagtttgagcaattcacaaatcacaaccatgcaggtttcttcactggtgaaaccacagctttcacttgcaggtaattgttgagactgtagatacccttctccctgccaatgccgctcattttgtacccttcaaagggaattgcagcatcaaaaacatcaaagcaattgatccatactgttccaacccttagtgctcgcatcaaagtgttggctgtgtgcacattcttagtgaaaactcctgcagctagaccat

SEQ ID NO: 6946 - DNA, 476 bp, Glycine max
  Clone ID: jC-gmle01810022g01a1
ctcataacacaaagcacaaagcaaagctcatccttgagttaaaaaatggcagcagcttcttccatggctctctcatccccatccttggctggcaaggccgtgaagctgggcccatcagccccagaagtgggaagggtgagcatgaggaagaccgtcaccaagcaggtctcctcaggaagcccatggtacggcccagaccgagtcaagtacttgggcccattctctggcgagcccccgtcctacctaaccggtgagttcccaggcgactacggctgggacactgctgggctttccgcagacccagaaaccttcgccaagaaccgtgaactcgaagtgatccactccaagtgggccatgctcggagccttgtgctgcgtcttcccggagttgctgatccgcaacggggtgaagttcggagaaaccgtgttggtcaaggccgggacccatatcgttagcgagggtgggctcgactactt

SEQ ID NO: 6947 - DNA, 429 bp, Glycine max
  Clone ID: jC-gmle01810022g01d1
taattcacattatctgaagtacttcaccaaacacaaatctaaaaactctcaaaagtcatttcgttctttgacgctcactttccggggacgaagttggtggcataggcccaggcgttgttgttgacagggtcagcaaggtgatcggcgaggttctccaatggaccctttccggtgacaatggcctgaacaaagaagccaaacatagagaacatggccaatcgtccgttcttgagttccttcaccttaagctcagcaaaagcctctgggtcatcagcaaggcccaatgggtcgaagctgccacctgggtagattgggtcagtgacctcaccgagggggccaccagcaatacggtaaccttcaacggcacccattaggataacttgtgtggcccagatggcgaagatgctctgggcgtggatcaagcttggg

SEQ ID NO: 6948 - DNA, 421 bp, Glycine max
  Clone ID: jC-gmle01810022g02a1
cgcgtctgggattgacgtttctggcgaggtacatgtacaatgccttcggctactcgcgcatgatgctagcaaagtacctcaccattgcatgtaccgcgtctcgctcgctatgaggcataatgcggatcaaagaactcttgtggaaacatgggggcataatctcgagaaacatgcgccgatactacatttaatcatcatgatggctattggaagaagcagtcaacaacggtggaaatggatgaccaggactcaattggtgcaagatacacataactacgtggaaggctctctaccctgggagaaccttgcagtctgattatcagacaataggactaccgagggttgaaaattggaactgatgggaacttacagggagcggacttgcacagaaatggtgaacctacatcatgacatttcgatg

SEQ ID NO: 6949 - DNA, 458 bp, Glycine max
  Clone ID: jC-gmle01810022g02d1
tttatatacccatgacaactagtgatcccaatgtaacatagtacaaaatgatgaattggctgacacatcagcactaaactaccctttctttcaactgttaaacattgaaaagaaagtgtgatataaggaaattgaatgttcaagaagcagttcccatggactcctccaaatccaactcatgttctgctaccattatgcatgaatctgcttccagagatgagactgaggccttgtctttggttgaatttgaaatatccttggttgaattgagcatttctgttgtgcattgcacatctggtgttatcccaacctgatctatgtcatgaagggctggtgatagatattttgccactgtaacaaagagtgctgacccatcatgaagctgagtgacactctgaatctttcctttaccaaatgttttgtgccccacaagaatagctcgaccgttatcatgtaat

SEQ ID NO: 6950 - DNA, 495 bp, Glycine max
  Clone ID: jC-gmle01810022g03a1
ctcttattcatacttatattctgaataatccagatctctatctgcccttttctccgtcacgcttttcgtgaccggatctgtatggatttgatccagatctacacgccgatggtggttttggccgggtctttcatagatctggtgcgtagaggctcagatctacggtaccgaggtacaacagagaatcgatgacaagaacgcagatccgacggtagatccagccgattccgcttgttcgatcgctacagacccctgtatcggatcattaagcagcgtgtctcgcgcgttctacacgtgttgccgatctcggatgttgtaaaattagtttatgatgtgaagctatggagtggaaaatatgtggatgtaggagatttcgggatgaatggcctcaaaacgctttgtcgtttgtggttattgagttctgagtgatcttgtcatccgacctttgccatgacaggtgcgcttgcatggcaggtcaaaaaatgttaattaaaa

SEQ ID NO: 6951 - DNA, 430 bp, Glycine max
  Clone ID: jC-gmle01810022g03d1
tttctttctttttttttttttttttttttttttttttttttttttgtttttttttgtttgtgttttttttttttcatctaattcttgttttttacttatgaaatttttcaccaggacggggccctacaccgaaagaaaaggaccgcggactgaccaccttctaaaaaaaaaaaaaaccccactttcctttccagaatgccgtcaaaacccaaagaaaggatgttttatgacaaaaaaaatgctgaattccccctaaacagggcccgaaaaaaaagagtcaccccctatagccaaaaaggacgccgactaccgccaaaaaaatcaaaaaaaaatggccgcccgggggaatgaaaaacaaaaaaccctcccactggtaccaactgaccccagaaaaaaaaaaactctttttcgggggtaacaacccccgaac

SEQ ID NO: 6952 - DNA, 424 bp, Glycine max
  Clone ID: jC-gmle01810022g04a1
ctcttattcatccttctcttctgaataatccagatctctttctgcccttttctccgttacgcttttcgtgaccggatctgtatggatttgatccatatctacacgccgatggtggttttggccgggtctttcatagatctggtgcgtagaggctcagatctacggtaccgatgtacaacagagaatcgatgacaagaacgcagatccgacggtagatccagccgattccgattgttcgatcgctacagacccctgtatcggatcattaagcagcgtgtctcgcgcgttctacacgtgttgccgatctcggatgttgtaaaattagtttatgatgtgaagctatggaatggaaaatatgtggatgtaggagatttcgggatgaatggcctcaaaacgctttgtcgtttgtggttattgagtactg

SEQ ID NO: 6953 - DNA, 391 bp, Glycine max
  Clone ID: jC-gmle01810022g04d1
tttcgtcctttttttttttttttttttttttttttgtttttatttgttttttcttgtttgcgcttacattttttcattctattcttgttttttacttatgaaatttttcacctggacggggccctacaccgaatgaaaaggacttcgaactgcccaacgtactttgaaaaataaagcgagactttattttttagaatgttgtcaaatctaaaagattggaggttgtatgagaaaccgattgctgaattcgtcctaaacagtatttgtcaaaaaattgtcaccctctattgcaaaagaggacgcttcctacagcaaaaataatcatttcaaaatggaagctaggcggaatgacaaacagataactctctcacttgtaccaactcaacccgaa

SEQ ID NO: 6954 - DNA, 594 bp, Glycine max
  Clone ID: jC-gmle01810022g05a1
gtcgcgtgagcgaatcgatacaccaccaagctatctctatacatttctagatcggagctccttgtgcagcgcccgacccccatcaccatgtcttacgacaagaacccatcgccggtgccgacgagcacgacgggcgatgaggagaagaaagtcaccggcggcggctacgacgtcggcgtctactctgcccacggacgagtcgaccacaatgcgcgtgcggttgacgggcacgacctcaacgactcgtacgacccgtccaaggagtcgctgctcacgcgattgggtctcaacatcgagagtttcaagcgggcacccggtaccacgcgcggtctcgtcgcccacggtgacatcccacccgagtacctgcaacacgacaacccgctgctgcagcagaagatgaagccgaggcatttgcagatgattgctgtcggtggatctatcggtactggtcttttcgtcggttccggagctttccttggaaacggaggttctgctgcggtgctcatggcctggattatcatgggtgtcatgttgatcatggtcacccaggctctcggtgaaatggctatcatctaccccgtttctggaggttct

SEQ ID NO: 6955 - DNA, 509 bp, Glycine max
  Clone ID: jC-gmle01810022g05d1
gatgactagcaacatgcatgtatcggaagatacaattagatgcgtcgactacaagtgcttcactctcccggcttactcttcttccccaatccctcccgtgagctgatacttttggtgtcgatgacgacaggaaaaggagagacgccacgcgacgcttagctgctggtaaagagcatgcggtatatcctcttccaccacggagccagtcgtcgctcggccttgtactgcctcatctcctcgacggtgagccaagactttcggccggtgtccaggtcgatttcggtcgtctttcggggcagagttcgcttccaggcgtaaccgacaacccagaatgcgagcaggatcgggaaggccaggtacgagaggaagaagctctcagcacgggcgttgccgctctcgacgcctccgagggggaagagaccgatgtagaactgagcgatgaggacgatcacgatgaggatggcaccgagccacgagccccacacgccggcgatggcggtaacggcagc

SEQ ID NO: 6956 - DNA, 615 bp, Glycine max
  Clone ID: jC-gmle01810022g06a1
ctcaaccccaacaaagcaagagaagtagggtttttgtgcttggcaaaagaaagagaagagaagatggtgtcaggttcggggatctgcgcgaagcgcgtggtggtggacgcccggcaccacatgctgggtcggctcgcctcgattgtggcaaaggagctgctgaacggacaaaaagtggtggtcgtgcgatgcgaagagatttgcatctccggtggtctggtgaggcagaaaatgaagtacttgaggttactccgcaaacgcatgaacaccaagccttcccacggtcccatccacttccgcgcaccctccaagatcttctggcgcaccgttcgtggaatgataccacacaagacatagcgtggggaagccgctctcgctcgtttgaaggtttatgagggaattcctccttcatatgacatgataaagagaatggttgtttcagatgctctgaaggtgttgagactttagaaaggacacaagttcttgatactgggcaggttgtcatctgaagttggatggagctactatgataccatcatggagctagataagaagagtaatgataaaggcacaattgtttatgagagaaagaagcagctcaacaaattaatggtg

SEQ ID NO: 6957 - DNA, 406 bp, Glycine max
  Clone ID: jC-gmle01810022g06d1
caaggcaatggaagttttcttgatgaaatgacataaataaaatttctacaaagcccagttaaataaaaatagcttccaaagttatcagatatcaaatctatgatatgatgatccaataacctatgaagcacggacaccccagccctttgtcgtgtccgatgttcgacccacgtccgtgtcagtgtccaacacggacacaacacccatactacgttttatattttggacattacaggggtaaacgtgtccgtgtccggggtccgtatcggtgtcaatacttcatagccaataacaagcaaaactgaagggtagtttcaattgggtataagttgcataaaaaaatttaaaaacatagactactcagtacttgactggagcaagaatatcaagttgggaaccgagcttg

SEQ ID NO: 6958 - DNA, 527 bp, Glycine max
  Clone ID: jC-gmle01810022g07a1
gttgttgttcttgtttctttagtacctttagtagttcctatacctgtcatgttccttggattattcacaagcggtattcaagctctcatttttgctactttagctgcggcttatataggtgaatccatggaaggccatcattgaccagttttctacaaaatagtccttttcgtttagcttgccgcacatatattgcggctcaatataatctacttagtaaacatctatatctatctacctatatctatatagatataggtagatagatatagatagatattcgattagcatatattagcatatattagtatatattggatattcaaaaaaaaaataataaataaaaaaattaagagccataattagaattctgtatgatatttacgtttacggcgtgtggataaaagatactatatagaactaaaggagattcccgtttcagttacattcaattcaacgatggaccaaatgagaattcataatataacatttagatcacccaattccaatatttctatgaaacaata

SEQ ID NO: 6959 - DNA, 475 bp, Glycine max
  Clone ID: jC-gmle01810022g07d1
agtcattgaatattcaattcacaattcgagatgaaacggaaaggctttgttttttaatccctatcgaaatttacagtagtagcggggcaattttagatataaaatattagttattttatataatatatatggatatggttagttcatatataactagttcatatagaatatcctatcacatatacgtgggtttcttctatcctgtaaaccaattcttttgtgttttagattcaatcgaattcgaaaatcattctttgaaacctcaaaagaaagagttgtcttatagtgatccgattatatacacccagtttgaccccccgcacttatactttatttgatatcttgtttttttaagctctcctcccccttttattattaccccatatggatacaatcaatcgaaataaattcgttagatttaattattgtttcatagaaaaattggaatttgggtgatctaaatgttattttttga

SEQ ID NO: 6960 - DNA, 461 bp, Glycine max
  Clone ID: jC-gmle01810022g08a1
gttgttgttcttgtttgtttagtacctctagtagttcctatacctgtcatgttccttgcatgattcacctccttgattcaagctctcattcgtgctactttagctgcggcttatatcggtgaatccatggaaggccatcattgaccagttttctacacaatagcccttttcgtttagcttgccgcacatatatagcggctcaatataatctactttagtaaacatctatctctattctacctatatgtatatagatataggtagatagatatcgatagatattcgattagcatatattagcatatattagtatatattggatattcaaaaaaagaatatatactaaagaaatttagaacccttattagaaatctggatgatatttacgattacagcgtgtgataaaaagattccttttaggacttaaggagattcccggttcaagtacctttcattcaacg

SEQ ID NO: 6961 - DNA, 453 bp, Glycine max
  Clone ID: jC-gmle01810022g08d1
agtcattgaatattcaattcacaattcgagatgaaacggaaaggctttgttttttaatccctatcgaaatttacagtagtagcggggcaattttagatataaaatattagttattttatataatatatatggatatggttagttcatatataactagttcatatagaatatcctatcacatatacgtgggtttcttctatcctgtaaaccaattcttttgtgttttagattcaatcgaattcgaaaatcattctttgaaacctcaaaagaaagagttgtcttatagtgatccgattatatacacccagtttgaccccccgcacttatactttattaggtatcttggttttttaagctctcctcccccttttattattaccccatatggatacaatcaatcgaaataaattcgctagatttaattattgtttcatagaaatattggaatttggg

SEQ ID NO: 6962 - DNA, 453 bp, Glycine max
  Clone ID: jC-gmle01810022g09a1
cagcgctacgccgtgcagtctcgtcgcgatgttttggccctacccatgaaggaatacgcctcgaggagtcagatcaagcacccgctatttaccatgtcggaaggcgacgaggatccgctgaacatcaccgcaagtggtgatctcatcctcgatgtcgcgcacgaagagaatgcacagcgatactcgaatcgcgtggacacaaagacgctacagcataagtcgcggtactttgagaacctgctgatcgatcgttttaatgaggggcaacaactatcgagagacctggaagctatgctgctcatcagctactcacacatagcgcatggatcgtcagaactacttcctcatgtaccgatcgtaaatgtcggcagaatcgggatatccaaaagttctgcgatgcaagctctacttgccgactttcttcgagctctacatggccttgatctaagcgta

SEQ ID NO: 6963 - DNA, 516 bp, Glycine max
  Clone ID: jC-gmle01810022g09d1
gcgttgagatatgtgtgatttctgattgcatagtgtcgctcgaagtcacagcatttgtgactcgacgtgcatcgtagagaccgcggaaagtcgatgagtcccgcggtaccacaaaataaagcaatctcgttggtatgagcagtaccaggtcatacaaactacaaggctctgtataaacattccttccgagcaccaggtagtgttgcctgagcaacgcagccgctgtaaggctgaagcaagcggtcggcaagactggcttagtacagacctgaatgtcgtctatttaagcttaaattgcgacgctgtaagatgctcatcattgatgccttgtaaagcccctcaggcttatctcagagagtatccctcgccgtccaatccttgtccacagccatgaacaggtccctcactgccacatgcctgttgaggcagctgctcggcgtacgctggtggcccttccgattaaaaccgttcgcaagcgtccggtttgccgtgagggaccttggatgcgcccataaa

SEQ ID NO: 6964 - DNA, 545 bp, Glycine max
  Clone ID: jC-gmle01810022g10a1
cggctcgagcggctcgagcggctcgaggggttactgaagagggcggcgcagcgtgtcccctcctcgccggcgttcaagctggccattctccgggcccacgcgtcggaggcgcaggcccagcaggtggagcccaaggcccgcgaaaacccccgaccctcaaaaaccttccaaatctaccggtggaaccccgaaaacccctcaaagcccgagctcaaggactaccagatcaacctaaaggagtgtgggcccatggtcctcgacgcgctcatcaagatcaagaacgagatcgacccgagcctcacgttccgccgctcgtgccgcgaggggatctgcggctcctgcgcaatgaacatcgacggctgcaacggcctggcgtgcctcaccaagatcccctcggaaaaaaactccgtcgccacgacgatcactcctctgccggacatgttcgtgaacaaagacctggtcgtggacatgacgaacttctacaatcagtataagagtttcgagccctggctgaagaagaagaacccaccggtgccgggaaaaga

SEQ ID NO: 6965 - DNA, 409 bp, Glycine max
  Clone ID: jC-gmle01810022g10d1
acaaaaggggctcaggttttattaatcaagaatatagctaaatcatccccaactttgaagaaatacaaagttccaacacaaatgatcaaatgcaaacatcatcatgcctctaaaaatagaattttaagctttaggctgaagtgacttgatatgtgagatttgctttcctgggttcaacccctttgggcaggcacgagcacagttcaatatggtgtggcagcgatagagcttgaattcatcattaatggcatccaatctctccttagtgtactcatcacggctgtcgcttatccacctattagcgtggagcaacgcagcgggaccgagataggactcggggttccaccagtagctggggcaagaggtgctacagcaggcgcagagaatgcactcgtacatcccgtcgagc

SEQ ID NO: 6966 - DNA, 479 bp, Glycine max
  Clone ID: jC-gmle01810022g11a1
gccaatttactcatccttcctgcgcggtatcctacctctcctagcaagatgcagatccacgttatgacccttacccctaagaccatgacccttgacgtgcaaagctctgacaccatcgacaacgtccaggccaatatccaggacaccggatgcattccccccgatcagcaacgtgttatcttcgccagaaaagcagcatcgaggactgtcgtaccctagtcgactacatcctccagaatgagtcaacccttcacgcttgtccttcgtatacgcggtggcatgcaaatcttcgtcaagactctcactggcaaagccataacccttgaagtcgaaagctatgacaccattgacatcgtcgagggctcgatccaggacacggaaggaatccccccagacgcagcaccgattcatcttcgtcggatagcaacttgatgacaggcgcatccttggcgactacaacatcctgattgaatcaaccc

SEQ ID NO: 6967 - DNA, 220 bp, Glycine max
  Clone ID: jC-gmle01810022g11d1
gccaaacaacgggggaaaaataaaaattacttcccctgattggaaacacaccgtaccaacttttgtggggcaaaacagttcaaaaaaacccacccttatttttaaagggcattacattccctttacgaaacactttttttttttaaaggtttggggaaattccacatttaacacatacaccaaaatcatttttgacttgtataccccccccaaaacccaa

SEQ ID NO: 6968 - DNA, 511 bp, Glycine max
  Clone ID: jC-gmle01810022g12a1
gcctcctggaggagcgatccggtgcggcctccttcaactacgacgcacctggagccgcatactctctcaaatggaccttccacaacgacctaggcctcgtctttgtcgccgtctatcaacgcgtcctccacctcttgtacgtcgacgatttgctcgccgccgtcaagcgcgagttctcgcgcctctaccacccccaaaaaaccgcctaccgagattttgacgagatctttcagcagctccagatcgaggccgagtctcgctccgagaatttcaaaaaacccaaccctgtccccgcgctggctcccaataggaaacaaaacggcacgtggcaggggcaggggttagggcaaaacgccggatcagaaaaaaaaagtgatggagatgggaagaaagggcgtaaattggagaatgataatttttctgtagctaattctaattctaatgctaatgttaaccatagtggtggtaagagtagtgtgaataataatattgggaaagagaatgagagttc

SEQ ID NO: 6969 - DNA, 499 bp, Glycine max
  Clone ID: jC-gmle01810022g12d1
gtcgcaataaatatttgaacgattcgcatggattattcacttagtaaggtgaggaaaattaaatgtactacacatgataagagttacaccttacgagttattctcatggtgaacagaggaaagaagcttaccaatataaattaaacaaaccaaattgcgtcaatgttgtcttacgatgtaatggggatctacggggataatcaagttactcatcaaacagaaacattcatgacaggtttatgttgttccctcatttaaggagagtcttcgcaattgacttgacgttgagtttcttgaggtcagtataggactgtccgcagcccacaaacattactggagctccagatacgtaaaccattgagagtgcagctcccaccttatcatcgatagtgtcaaacttcgtgagcaagatcccatcgatcaatctgggtgtgggaagatgtgagaggtcggctaatttctggttgaatttcgaaagctgatcaactggattattacc

SEQ ID NO: 6970 - DNA, 510 bp, Glycine max
  Clone ID: jC-gmle01810022h01a1
attaagtgcgtggatcaacgggacacatgctaatttcaactcaacttaactaccgatgaacttaaatattcagtgtttctaactggcacgaaaagaaaacaaagcacacgttgctgagatgacagagcttcctagtgtgctgcccctccaaataatgttaatccttctgcttatcaaaagtggcagcagcaacaatgagtgtggggaatggtcttgcggctctggccaaccacctatcagatttcccttcaaactcatcaagggaattaaagatgaatgtggttatccggggttttgtctatattgtactcaaaaacatgagactatgcttgctctcttctccgtaaaactccaagtcaggtacataaactacgaaaatcatgaaattgtgttgaatgacccggaaaaatgcctttcggacaagtttctgcaaatcaacgatactcttattcatccttactaattcgacgatgaagcttaaacagttagttgagcttattaactggtctt

SEQ ID NO: 6971 - DNA, 485 bp, Glycine max
  Clone ID: jC-gmle01810022h01d1
atctcccgttgtaaataaatcaataagttaatttctcattcttgaattacttccaattccaaaggtagtcttgccgaagtcaatccactaggaatagtggaagtggatgagtgaaatggattaggaggaacagttaataggtcttcctctttactttccaacatttgtatgacagattttatggatggccggttcaatggctgccactgaatgcaccaaagtccaacaattgctagttttcttgcaattttaacatcaccttcatcctcaacatggatatgtacatctccatgaactaggtcatgcatccaatctgggtacaacacatggaaatcttctgcagaagacgtgtctacattcttccttcctccaaccatttctaacaacaacattccgtaactataaatatcagacttataagacacattcccaaagtttctggagaaaactttaggtgcaatgtatcccagggtcccctagcagct

SEQ ID NO: 6972 - DNA, 446 bp, Glycine max
  Clone ID: jC-gmle01810022h02a1
atcccatctgtgcccttcaggctctcatggaaggccttcaggttctgaccttggaggatgttgtttctgaggctgatatctttgtcaccaccaccggtaacaaggacatcatcatggttgaccacatgaggaaaatgaagaacaatgccattgtttgcaacattggtcactttgacaatgagatcgacatgcttgggctggagaactaccccggcgtgaagcgcattaccatcaagccccaaactgacagatgggtcttccctgaaaccaacaccggtatcattgacttggctgagggtcgattgatgaacttgggatgcgccactggacaccccagttttgtgatgtcctgctccttcaccaaccaggtcattgctcaacttgagttgtggaaagagaagagtaccggctagtacgagaagaaggtttacgttttgcccaagcac

SEQ ID NO: 6973 - DNA, 455 bp, Glycine max
  Clone ID: jC-gmle01810022h02d1
ttttagtatttaataaagcaaaatgcacacatcccccaaacaaaacaagccttattcaacccaaattggtttcatatcacagaaaccaacaggatgccgccttcctccttactggtcccacccactcgaacaaaagttctacagaaataaaaatggctacaattcttctaccacaaatctgaaaagtctaacaccaaaaatcaaaaaaaggaaaattaaacaatcaaatccgattgataaaaccgatttttgtctttccctcactcacttttcagttgatcatctcaatcacttagtacctgtagtgagcaggcttgtatggaccctcaacaggcacactgatgtaatcagcctgggacttgctaagctgggtcagcttagctccaagtttgcccaggtgaagtgcagccaccttctcatcaaggtgctggggcaaaacgtaaacccttcttctc

SEQ ID NO: 6974 - DNA, 467 bp, Glycine max
  unsure at all n locations
  Clone ID: jC-gmle01810022h03a1
cttcacaccattctcacaaaacaactttcaaactctgagaaagaatggctgccaacacattgatgagtactgctatctcagccttcccatctctcctttcttcctcaaaatccagatttgccaccgcagttcctctttctagctttggtgtcaccaatgcctcttcttctcgcttttctatgagtgctgactggatgccaggccagcctagacctccttaccttgatggttcagcacctggtgactttggattcgaccctcttcgtcttggtgaagtaccagagaatcttgagaggttcaaagagtcagaactcattcactgcagatgggccatgcttgctgttccagggattttggttccagaggcattgngcttaggcaactgggtaaaggctcaggaatgggcagcagtttctgggggccaagcaacctacctaggcaatccagtttcatggggcaccctaccc

SEQ ID NO: 6975 - DNA, 455 bp, Glycine max
  Clone ID: jC-gmle01810022h03d1
ctgtcataccaacgagttgccagagtatgagtttgaattcgaagtttaattacaacacagagataccaacgtagcaacccgattcgttacaaaatgttacatggaattatacaggtagctattgaaacaaatatttgattttttttttttcaaggcaaaatcgattgtggaataatgatgtttccaatgttgttgtgccatgggtcagccaagtgagcagccaagttctccaaaggtccagtgccgggataagctgattgttgaacacagaatcccacaaaagccaacaaagcaagacgtccattcttaagttctttgactttgtattcatggaatgttttagggtccttagagtatcccaaaggatcaaaagcaccaccagggtatttcttcttctctgggtccttctccatgctcctttggtgctccacaaaggaaatagcaaggaattcaat

SEQ ID NO: 6976 - DNA, 573 bp, Glycine max
  unsure at all n locations
  Clone ID: jC-gmle01810022h04a1
tgttcgtgattggtatcaatgctgatacaggaactgtccatcaaaccagagattctgacaatcggcttccttttgcaaattctggaaatcctgttatggctttggttgcctttttagcttctgcggatggaccaagagtagctgcttcttgtgctcatgcagcattagcagtattgtcagaggataattctggcagcacgtcacaaatggaagcaccgggacatgataataggacaaattcagaaaacatacattgtcgagatggtggccctcatggagaaacagcagtttcaaataatcataatgaggataaggcaaaggtgcgtggttcatggggtctgaatgagggtaggataaccccactctctgctgagaaagttaaagatgcggctaaagcatgcctttctgctgcagcaatgaaagcaaaattatttgccgatcatgaagaacgtgaaattcagaggttatgtgctaatatagttaatcatcagctgagaagattggaattgaagcttgaacagtttgcagaaattgaaacattgntgatgaaagattgcgaacaactggagagaa

SEQ ID NO: 6977 - DNA, 490 bp, Glycine max
  Clone ID: jC-gmle01810022h04d1
atggaacatcaaatgctacttatttcctttaagcaacagtttcacaatcaactgcaaccaattacaggctctacagactaaataacttcctcggcatatccacctaacttcctcttcacttctgaaatcaattaccaaatacagttacacctttcaagtttcaaaacttaaatctactcccctatttaacctaaaccagagttagttcccgatacagacctcaacaatggatgattggtagtgggctgcacattactaggggcattgaacatggcagttgaagaagctggttgtgattgttgtatcatagataggggcaatctttgccccaacccaaacattgaaggtcgtggggcaaaggacatatgtggatgaactggttggttgttgccataccctgagacgctgggctgtgaagaagaagcagagatcatctgttgcctattgttgccattactagccattgagggaccaacacccgatgcattca

SEQ ID NO: 6978 - DNA, 504 bp, Glycine max
  Clone ID: jC-gmle01810022h05a1
agacagtccaatactgtctggaggaaaacccggccctcataagatccaaggaattggtgctggcttcatccctggtgttctggatgttgatttacttgatgaagttgttcaaatttcaagtgaagaagctattgaaactgcttagcttcttgcattgcaagaaggtttactggtgggaatatcatctggtgctgcttgagctgctgcagttaagatagcgaataggccagaaaatgctggaaaactcattgttgcggtcttaccaagttttggagagcgttatctatcgtctgtgctctttgaatccgtgaagcgagaagcagacagcttggtctttgagccttgaatgtcaagtcatacgagccatttgctgcttctcaagttgcattctgtccttgggttgtgtatatattatttctcttatggatctaaaaaatcaatacgatttctgtttgcttgttaattgactaagattcaataaaaatatagtaggtttgctgaaaa

SEQ ID NO: 6979 - DNA, 499 bp, Glycine max
  Clone ID: jC-gmle01810022h05d1
cagcaaactactatatttttattgaatcttagtcaattaacaagcaaacagaaatcctttttattttttagatccataagagaaaaaatatatacgcaacccaaggacagaatgcaacttgagaagcagcaaagggctcgtatgacttgacattcaaggctcaaagaccaagctctctgcttctcgcttcacggattcaaagagcacagacgatagataacgctctccaaaacttgggaagaccgcaacaatgagttttccagcattttctggcctcttcgctatcttaactgcagcagctgcagcagcaccagatgatattcccaccagtaaaccttctttcaatgcaagaagcttagcagtttcaatagcttcttcacttgaaatttgaacaacttcatcaagtaaatcaacatccagaacaccagggatgaagccagcaccaattccttggatcttatgagggccgggttttcctccagacagtattggactttct

SEQ ID NO: 6980 - DNA, 519 bp, Glycine max
  Clone ID: jC-gmle01810022h06a1
agaaagtccaatactgtctggaggaaaacccggccctcataagatccaaggaattggtgctggcttcatccctggtgttctggatgttgatttacttgatgaagttgttcaaatttcaagtgaagaagctattgaaactgctaagctttcttgcattgaaagaaggtttactggggggaatatcatctggtgctgctgcagctgctgcagttaagatagcgaagaggccagaaaatgctggaaaactcattgttgcggtcttcccaagttttggagagcgttatctatcgtctgtgctctttgaatccgtgaagcgagaagcagagagcttggtctttgagccttgaatgtcaagtcatacgagccatttgctgcttctcaagttgcattctgtccttgcgttgtgtatatattttttctcttatggatctaaaaaataaaaaggatttctgtttgcttgttaattgactaagattcaataaaaatatagtagtttgcttgaaaaaaaaaaaagaaaaa

SEQ ID NO: 6981 - DNA, 462 bp, Glycine max
  Clone ID: jC-gmle01810022h06d1
attaaactactatatttttattgaatcttagtcaattaacaagcaaacagaaatcctttttattttttagatccataagagaaaaaatatatacacaacccaaggacagaatgcaacttgagaagcagcaaatggctcgtatgacttgacattcaaggctcaaagaccaagctctctgcttctcgcttcacggattcaaagagcacagacgattgataacgctctccaaaacttgggaagaccgcaacaatgagttttccagcattttctggcctcttcgctatcttaactgcagcagctgcagcagcaccagatgatattcccaccagtaaaccttctttcaatgcaagaagcttagcagtttcaatagcttcttcacttgaaatttgaacaacttcatcaagtaaatcaacatccagaacaccagggatgaagccagcaccaattccttggatcttatga

SEQ ID NO: 6982 - DNA, 514 bp, Glycine max
  Clone ID: jC-gmle01810022h07a1
cttacaagctccggccatccagcgccttcaattttccttatggactacaaattctggcagctcctgattggaacaacaactactctataaccgctggagctagaggtccaattctgcttgaggattatcatcttgtggagaagcttgcaaactttgacagggaacgtatcccagaacgtgttgtccatgccaggggagctagtgcaaagggtctctttgaggtcacacatgacattactcacctgacatgtgcagatttccttcgagcccctgtagttcatacgcctgtaattgatcgcttctcaactgtcattcatgagcgcgagagccctgaaaccttgaaggaccctgcaggttatgccgtgaagatttacaccacagagggtaactctgaccttgttaggaacaacctttccgtcatctttgtaccggactgcatgaaattaccagatatagttcatgctcttaaacgcaattccaagagccacattccagataaatcggaggatccttg

SEQ ID NO: 6983 - DNA, 424 bp, Glycine max
  Clone ID: jC-gmle01810022h07d1
aatacttactttcttaattaagtggattacaaggaacacatagtccacaacaatagcagcgaaacatgccgaaaaggtatataaatataaatactaacacatacaaacggcatttattgagatagctcagcgagttgcatgcatggagttatgggtacacaactaaaattgcaagaaatggataagacctttcaaattgatcgaaaatcacattcttatcgcactctttgcacgtctgcgactctaacaatcattctggggttggcaacaacattaaatatttggcctcatgctcagacgagatgctatcttttgggctagagaacggtcagcctgagaccagtaagatatccaagacactgcggatttcatgggtgacccgtgggtcagataaagcatcaacccatcggcgattaaatctatc

SEQ ID NO: 6984 - DNA, 513 bp, Glycine max
  Clone ID: jC-gmle01810022h08a1
cttacaagctccggccatccagcgccttcaattctccttctggactacaaattctggggctcctgtatggaacaacaactcctctttaaccgttggagctagaggtccaattctgcttgaggattatcatcttgtggagaagctcgcaaactttgacagggaacgtatcccagaacgcgttgtccatgccaggggagctagtgcatagggtacctttgaggtcacacttgacatctatcacctgacatgtgcagatttgcttagagcccctggagttcagacgcctgtaattgttcgtttctcaactgtcattcatgagcgtggtagccctgaaaccttgagggaccctcgaggatctgccgtgaagttttacaccagagagggtaactttgaccttgttggaaacaaccttcccgtcttcttttacgtgacggcatgaaattcccagatatggatcatgctcttaaacccaattccaagaaccacattcaagagaattggaggatccttgac

SEQ ID NO: 6985 - DNA, 483 bp, Glycine max
  Clone ID: jC-gmle01810022h08d1
cttaattaattggattacaaggaacacatagtccacaacaatagcagcgaaacatgccgaaaaggtatataaatataaatactaacacatacaaacggcatttattgagatagctcaacgagttgcatgcatggagttatgggtacacaactaaaattgcaagaaatggataagttctttcaaattgatcgaaaatcacatccttatcgtactctttgcacgtctgcaactctaacaatcattctggggttggcaacaacattaaatatttggcctcatgctcagacgagatgctatcttttggcctagagaacggtcagcctgagaccagtaagatatccagacactgcggatttcatgggtgacccgtgggtcagataaagcatcaacccatcggcgattaaatctatcttgcctgtcaggtgcccaagatcggtatctctctccgggctgcttaaagttgttctccttctcaattccaca

SEQ ID NO: 6986 - DNA, 443 bp, Glycine max
  Clone ID: jC-gmle01810022h09a1
gttgtactgcttacaacctgggatctggtcgtggaacatctgtgcttgaaatggttgcagcatttgaaaaggcttctggcaagaaaattccagtaaaattatgtccaagaagaccgggagatgcgactgaggtttatgcatctacagagagagctgagaaagaacttggttggaaggcaaactatggtgtggaggagatgtgcatggaccaatggaattgggcaaagaacaatccctggggttacgcggggaagccttgaattagcttgagaaatatactgctcatctacgaatgcttttcacataaataggcatctcttatatagaatactttcatgttggatgatttgtttaggcagttcgttgtataatcttgacaataaaaatttggcagcatttctagaaataatactgtcctattttcttctctcatgaaataaata

SEQ ID NO: 6987 - DNA, 403 bp, Glycine max
  Clone ID: jC-gmle01810022h09d1
cttgaaaggcggccaaatttttattgtcaagattatacaacgaactgcctaaacaaatcatccaacatgaaagttttctatttaagagatgcctatttatgtgaaaagcattcgtagatgagcagtatatttctcaagctaattcaaggcttccccgcgtaaccccagggattggtctttgcccaattccattggtccctgcacatttcctccacaccatagttggccttccaaccaagttctttctcagctctctctgtagatgcataaacctcagtcgcatttcccgggctttttggacataattttactggaattttcttgccagaagccttttcaaatgctgcaaccatttcaagcacagatgttccacgaccagttcccaggttgtaagcagtacaac

SEQ ID NO: 6988 - DNA, 430 bp, Glycine max
  Clone ID: jC-gmle01810022h10a1
taggatgtactgattacaacctgggaactggtcgtggaacatctgcgcttgaaatggttgcagcatttgaaaaggcttctggcgagaaaattccagtcaaattatgtccaagaagaccgggagatgcgactgaggtttatgcatctacagagagagctgagaaagaacttggttggaaggcaaactatggtgtggaggagatgtgcagggaccaatggaattgggcaaagaacaatccctggggttacgcggggaagccttgaattagcttgagaaatatactgctcatctacgaatgcttttcacataaataggcatctcttatatagaatactttcatgttggatgatttgtttaggcagttcgttgtataatcttgacaataaaaatttggcagcatttcaagaaaaaaaaattacagttcatcact

SEQ ID NO: 6989 - DNA, 403 bp, Glycine max
  Clone ID: jC-gmle01810022h10d1
cttgaaatgctgccaaatttttattgtcaagattatacaacgaactgcctaaacaaatcatccaacatgaaagtattctatataagagatgcctatttatgtgaaaagcattcgtagatgagcagtatatttctcaagctaattcaaggcttccccgcgtaaccccagggattgttctttgcccaattccattggtccctgcacatttcctccacaccatagtttgccttccaaccaagttctttctcagctctctctgtagatgcataaacctcagtcgcatctcccggtcttcttggacataattttactggaattttcttgccagaagccttttcaaatgctgcaaccatttcaagcacagatgttccacgaccagttcccaggttgtaagcagtacaac

SEQ ID NO: 6990 - DNA, 576 bp, Glycine max
  Clone ID: jC-gmle01810022h11a1
tcaaattatttcattctatttgctcagtaccctacctctcctttcaagaagcagatcttcgtcaagaccctcaccggaaagaccatcacccttgaggaggaaagctctgacaccatcgacaacgtcaaggccaagatccaagaccaggacggaattcccccggatcatcaacgtctcatcttcgccggaaagcagctcgaggacggccgtaccctcgccgactacaacatccataaggagtcaacccttcaccttgtccttcgtctccgtggtggcatgcagatcttcgtcaagactctcactggcaaaaccataaccctagaggtcgaaagctctgacaccattgacaacgtcaaggccaagatccaggacaaggagggaatccccccagaccagcaacgtctcatcttcgccggaaagcaacttgaggacgggcgcatcctcgccgactacaacatccagaatgaatcaacccttcacctcgtactacgtctccgtggtggcatgcagatcttatgtaagacccttaccggcaagactataaccctagaagtcgagagctccgacaccttcgac

SEQ ID NO: 6991 - DNA, 382 bp, Glycine max
  Clone ID: jC-gmle01810022h11d1
gcccccatacagttgataattttttttcagctccacaaattgataacaaacagtggtaacattaatgggacaatagagttcaacacaaaccaaacttattttcaaagggcattacaaacccattacacatcacatttttttttaaaatggttgggaaaatccaacatcgaacatcacacagaaatcagctccagcttaaaaccccccacgaagacccaacaccaagggcggaggggactccttctggatgttggagtcagcgaggggccttccatcctttatctgtttgccaacaaaaataaacctctgctggtccggggggaatccttccttggcctaaaacttcgccttcacattgggaatgggggcggagctctccccc

SEQ ID NO: 6992 - DNA, 421 bp, Glycine max
  Clone ID: jC-gmle01810022h12a1
ggcctcagccgcatcccccaccactttctctctacttcactccgccaccccttcctcctcctccaccgccacctccgactgcccctccccctcgagcgtgcagagcacctactccctccgcagcccgcccgctgcgcacgcctgggcttggccgaggcggacccgctgctcgcggcgagtagtatcggcgcgcgtggcggcggtgacaggacgacgaaagggcgcgaggggggtggtgtcgatggcgaacaagagcgtgggggacctgagcgcggcggacctgaaagggaagaaagacttcttcatggccgacctcaacgtcccgatcgacgacgaccagaacattaccgacgacaccaggatccgagccgccattgcgacgctctaacatctgatccaaaacggcgcacaagtcattctc

SEQ ID NO: 6993 - DNA, 209 bp, Glycine max
  Clone ID: jC-gmle01810022h12d1
ctctacgcaaattggcaaagacccttgcgaacctataagggaacatattgaagatctggttcccacctcggggacatgggcccccgcaaattctttgcacaccccatttttaccttagcgggtcaaaattcccccagatagaatctaaaggggaccgcaaccaagggccttatccccgaaggccaaaccttgcccctgggggggggaaa

SEQ ID NO: 6994 - DNA, 506 bp, Glycine max
  unsure at all n locations
  Clone ID: jC-gmle01810023a01a1
ctggcaccggcatccacccataccaccagcaatgggctccggcggctgccgctcctcctcctcctccggcagccgcgggcggtcctcctcctcaccctggggaggaggttcgaacgatattcataactggtcttccggaagacgtgaaagagagagagctgcagaatctgctgagatggctgcccggtttcgaagcatctcaactgaatttcaaagctgagaagccaatgggttttgctctcttctccgcaccacaccaagcactcgccgccaaagacattcttcaggacatgctcttcgatccagacaccaagtccgtcctccacactgagatggcaaagaaaaatctattcgtcaaaagaggaatcggagctgctgatgcgggcggtgcttttgatcaaagtaagcgcttaaggacagccggagattatacacacagtggctatacaagtccatctncttttcatcctcccncgcctcccgtgtggngaccacatggatacatg

SEQ ID NO: 6995 - DNA, 513 bp, Glycine max
  unsure at all n locations
  Clone ID: jC-gmle01810023a01d1
aaaagttgtaaaatataggccaaaacctgtttgaataacattcctaatgccaatgtacacaaagtatatgaccataaagcccacaatttaaacaaaacttagacccatgcatcaattctacaggtgataacatacataatctaaacacctacgaaagtaatccaggaaccaacgcatgttgccaagatatgcatgtccgattagtattaacatagccaaatgtatgtatatgatgatgccactgcattcattcacatgagcaaggatgctaatggcgatgacttgatgatcaatggatgcatgtgacagctgcaagatgcatcctattatgtagtaatatttgtcggagcataaagaacagagtacatccccttcaagctactgataagtcattgttggtggagctccattcgcactatgaacagcaataggaagattatctttcctttntccaaatggattttttgaatattggatccgcatgccaatggaaccagaacttgggataacagc

SEQ ID NO: 6996 - DNA, 584 bp, Glycine max
  Clone ID: jC-gmle01810023a02a1
caactcctccgaggctgagcttttccgaagctgaggcactgatactgaaatggaaccctgacacttccgcttacgccaaagtcacttccctcttctacgaggacaaaaccgaagccaaacactacattgactccgttaaccagcttcagaaatccatgcattccttgctctctcagaacccttcctctgagaaactcattctcgctcataacctaatgcagatggctatgaagaggctcaagaaagagttctaccagatcttatccatgaaccgcgcacaccttgatccagaatccgtctccgccagatcctctcgcacctccgacaactccagcgcctccgattacgacgacgacttcgctgctgaggacgacgatatccgcgccgccggcgactctatctccgaagtcgagcaggtttcttccggcgccatggcagatctgaaactaatcgctgactgcatggtatcttccggttatgccaaagaatgcgtcagcgtttacatcttaatacggaaatccataatcgacgaaagaatctaccgcctcggcgtggagaaactgagctcctcgcgcgccaacaag

SEQ ID NO: 6997 - DNA, 382 bp, Glycine max
  Clone ID: jC-gmle01810023a02d1
gaaaaagacgttatcgcttttgttggctatgtcaaaactattactacaaccaagaaaaataacggcgtagaaaactcgccgttcaaactgggcacttagctccaacgccggagaggcgaggacgatacagcactggatgaggttccaaaaaagaagaggttaaccaggtaattttcaatatcctcaggggtaaaggtcacgtactccgtcgccgtcaaatccctcactgttcccaccgtagcaagaacaacattataccactcgcgatatcttggcactatgcttctcgcgatcgaaccttttatttcgtctcgtaattcgcggtcagctacgacgaatgagttctgtttccgatacccttcctcgaatttgcggttgaagc

SEQ ID NO: 6998 - DNA, 108 bp, Glycine max
  Clone ID: jC-gmle01810023a03a1
aaaaaaaaaaaaaaaaaaaaaataaaaaaaaaaaaaaaaaaaaaaaaaaaaaaaaaaggaaaaagggggggcggcctcccctatctggaacttgacccccgagaaatt

SEQ ID NO: 6999 - DNA, 430 bp, Glycine max
  Clone ID: jC-gmle01810023a03d1
agcgtgctataattcccggtcgacgagctacacgccctttttttttttttttttttttttttttttttttttttttttttttttttttttttttttttgttttccggggagcctaacccggacctgaaacccgcaagcagacgaataatgtccgctaaaatggggccactgaatcgcaatttacagggcgttggttaaaaactccccggcgggacccaccttggagtctccgcataaaatccatctagcagaaaatcctcctataagctagggggctattaacgaaggggcctcccaaaagctgccctaacaaaagggcgacgggaaggagggctgtaggggcgccctttgggggggggaattaagggcggcggtaggggggaccccccccctggccatcgtactattgaccgcctcattagcggccgtt

SEQ ID NO: 7000 - DNA, 542 bp, Glycine max
  unsure at all n locations
  Clone ID: jC-gmle01810023a04a1
ctggaccttacagagttcttcttaagcatcatgaatcagataggaaaaatgaaccaacaaattgggaggattcagagacaaccaatgcaacacatgttgatggcaggggacaaccaagaatgactgtttgggagaatgagcagagatcaaattacagaaagaatgaggagagggatttgaggacaagtactcgtggtgaagtttcttctcagtcttcagaaaatcaagtatctagttcttctgtgatgaaggcaaaatttcccgaaagttcaggaaacataaaaaaatctgatgatatttcagcaaggaaattggatggtgttgcctctgatatgctagaaatctactcaaaaccatctgcttcaaaagatgccagcctgattcaaaagatagagggtttgaatgcaaaagccagggataattcatctgctagaattagagaggagcaaaggaataaaattcatgccagtaatgctccgataaaccatgtggaaaatgcagttggtgcggatgtngtgtttccaaccagaacgcatgccacg

SEQ ID NO: 7001 - DNA, 530 bp, Glycine max
  Clone ID: jC-gmle01810023a04d1
ggccgccctttttttttttttttaaattatgcacctgctgctcactctttagaggattaactgcctcaattttacttatctcactcaattcatccacgatctcactcttgctctgaggtttaacaggtgcccacatcacagcatcagtcccatgggatctctctgccggtctattggcctgcatattttttggcatcctacgagaatgctgtgatttccactggctattcattctaccatgggattcctcatttgctaaatatctgtgttgctccgaaaactgatttggatctttagacaagggtgctggctgaagtgggccctgatctaactcaaagtctgaagccttggacttatcactttcaactgagcttttggaaagattggattcttttggtattgccgatggtagtgcagcctgagatgaaccttcttcatgtgtctgcttgtttttgccattcctgatattctactttgtcagatttactgaagactcaaccacagcagctgaattcatggataagtcagag

SEQ ID NO: 7002 - DNA, 608 bp, Glycine max
  unsure at all n locations
  Clone ID: jC-gmle01810023a05a1
ggcaccctaatctgataaagtgccaaagggaaaggactagaaggtttagacaatgggcctttacttctttgggccatgttttgcattttctcaagaccaaaagggttaaagacatcaatgaagaggacataaagtaccttcatggcttgtggaaggaacttgtgaagtcctcagggtttgacctggcttggctggagccatatgttcaattagcattgggttcgagggcatatatggaaagagcaaaccaattgaagaagctgaaggacaaggtggttgctttggagattaagatgaagcggctcaggggggaacttgctgctgctgaaggagagtttgaagtggcaaggagaggcttgtctgaagtaagaagaggcttcaatgagatggatttaaatgctgcaattggttatgctatgttctgatcatccaattattttgatgtatggtcctcaactagttttggtgaaaggtcatgcacatagttntcatttaattcttgacaaattatgctgaaacagtagttaaaatttttttgttaagatagaattaaatgagatgtacattaaattgtctaattgttatataggttngtaactttgtaaatt

SEQ ID NO: 7003 - DNA, 515 bp, Glycine max
  unsure at all n locations
  Clone ID: jC-gmle01810023a06a1
cacgaagaaccagggcttcgagctcactaagcaaagatacggcaaggccaacgttaaatttttacgcgtatatcgtgagggtggaaagcatgaagtcaaggaaatacgtgctcgcgttctcttagaaggtgctttcgagatcagttacacaaacggtgataactctaccatcgtcgcgaccgatacacagaaaaacactctcttcgccctcgccaaacttcatccaattgaacccttagagcaatggtgtctgcaagtagccaatgattttctgtccagacataagcacatctcagctgtcaatctgaaggtagaagagcacccttgggacaggatccaggtggcgggcaaggaacacccccactctttccagaaaggaagcggcggtatccgtattgtgaagcttcgcatgcctcgtaatggcacaccttcactctcctncggcttcagagagttggagatcatgaagaccacccaatctggctttgagggttcatcagagacgactacacaac

SEQ ID NO: 7004 - DNA, 215 bp, Glycine max
  Clone ID: jC-gmle01810023a06d1
tttcccttactactatatacttaataaattgaaacagttaattctatctatatataattgtatttatgtatagatatacataagtcatttaataatatcatgtatttgatgttcggtcgacgagctcaataagctcactaatcagcggccagccctttttttttttttttttttttttttttttttttttttttttttttatttactgtgattta

SEQ ID NO: 7005 - DNA, 369 bp, Glycine max
  Clone ID: jC-gmle01810023a07a1
ctgaaacacatgattttgttatctaataataccgacttggtttctttgatgatctcctctagaactgcatccaccgtcaaacgtggccgtgccggcttggccgctcctttcaccggtcaccaattcctggctgattcaaacacgaggctgacctacactgacatttcctccgtagctactaccgtcggcagagtacaatgctcgccggtgtggccagcggtcgaacgcatgacatccccgactctgctatacttctcacaccgggtttatgccgggttggattctgaaggaaactgccttgtcaggagaggatggctcatttgcgtgccattctggtgggcgcacggccacgtgtaccgtgagcacgac

SEQ ID NO: 7006 - DNA, 442 bp, Glycine max
  Clone ID: jC-gmle01810023a07d1
atatatatatatatgtatctatgtttatataaaaatttgtaatgctcaacactcgcaagacatgtttttccagcaaaaagtaatactgaagatattggggaaacctacacgttaaacagaacagtaacggcaacgacacaaattacatttacatctcttacacatggaataagccacgaaaattaatgaattgcctctgatcctatccaggaggatatatatattctacctctaactaagctctcggtatattttaaaacggacagttgaagagggttgtacagaatgctgtgcagtgttcttcacatactagagcctttgcttcacccgactcccatttatatcactgccatcaagtatggcatcattcctatgattgcacatgatgtctgaatgctcaccagatctggcaacgtactccaatagctcagtcagaacagat

SEQ ID NO: 7007 - DNA, 548 bp, Glycine max
  unsure at all n locations
  Clone ID: jC-gmle01810023a08a1
tatattgcaggttacaaagcctaagcaaaaggttgaagatggtatctttggcacttgtggaggatttggttttactaagcagaacgagctctttgtgggtcgtgttgctatgcttggttttgcagcatcactgttgggtgaaggaataactgggaaaggaattctagcacaattgaatctggaaactggaattcccctttatgaagcggagcctcttcttctgtttttcatcctcttcaccctgctaggagccattggaggtttaggtgaccgtggaaaatttgttgatgacgaacctactactggaggtgttattcctccaggcaaaggctacagggaagctcttggtcttggttcaggtcctttatttggattcacgaaagcacacgagctattcgtgggacgattggctcaattgggtttcgatttctcattgattggagaaattataaccggaaagggagcactagcccaactcaacattgagactggngtaccaatcaacgaaatcgagcccctagtgttgttcaatgttcttttcttcttca

SEQ ID NO: 7008 - DNA, 529 bp, Glycine max
  unsure at all n locations
  Clone ID: jC-gmle01810023a08d1
tgcggtcgtccgtggccgcccttttttttttttttttatgatgaactcaatgcattttatgatagatgagcaaacgagtatttgtttaaacacaaacaaacaaaagggttagtgtctaatcatcctccccctcatctgtaacgaatttgccagttccaggattcaaagcagcaatgaagaagaaaagaacattgaacaacactaggggctcgatttcgttgattggtaccccagtctcaatgttgagttgggctagtgctccctttccggttataatttctccaatcaatgagaaaacgaaacccaattgagccaatcttcccacaaatagctcgtttgctttcgtgaatccaaataaaggacctgaaccaagaccaagagcttccctgaagcctttgcctggaggaataacacctccagtagtaggttcgtcatcaacaaattttccacggtcacctaaacctncaatggctcctagcagggtgaagaggatgaaaaacagaagaagaggctccgcttcataaagggg

SEQ ID NO: 7009 - DNA, 122 bp, Glycine max
  Clone ID: jC-gmle01810023a09a1
cggactatctacgtgcccatggtgttcaaaatactggctccatacatgcgacccgtgggacctagcccgtttggatatctacggagagaaagaatggaactttgatacaccacggcaccgga

SEQ ID NO: 7010 - DNA, 105 bp, Glycine max
  Clone ID: jC-gmle01810023a10a1
cgctacaatctgcacgcacatgattggaaagaagagctctacgaagaccttcactgtgaccaaccgggaatgactttctgcgccaagaatcagaggtgcttcttt

SEQ ID NO: 7011 - DNA, 418 bp, Glycine max
  Clone ID: jC-gmle01810023a11a1
catgactctggagaaccaccacgagcgctagccagatctggcaattatacttggactcgacacctcggtcatttcattctcacaccatcatccatatgcacactcgcagccagcctttgatttactcaacactagccacaatctgactacctgcagcagcgagaatcactggctacacccacttatggagctctaaatacaccaccgatggcaccatcgaggagggttccgagaaatgctacctgaacctctcagacgaggagctcatgcgggagtgcgaaatggacacgtttaaggcctcggcaccaggtggtcagcaccgtaacaagcgtgagtgcgtagtgcgcctcacacacctacccacacgaatcattgctcatgcttcagaagagcgctcgcagcacaagaaccgcgcttc

SEQ ID NO: 7012 - DNA, 577 bp, Glycine max
  unsure at all n locations
  Clone ID: jC-gmle01810023a12a1
nganaanannnnnnnnnngtccntgtgtatatcatatcagtagcattatccgccctgctcgcctacgtattctggtaattgagctcgccgctctgggtaaaagaataaaatatctgatgagggcgcctgattcacttcatcacgaagagagaagtctttcgactgcaaagaaatttctctttaatgtggaatcattagagaaggagtcggatcaattggaagaagatgtcatgctgcttcgggagatgtattcacattgggaaaaggctgctacaacatggccactcacagatgtagggcatactggccaaattttccttgtgcattttacggatcatcgctgatgaggcatgggttgctcatatcatgatctatctactaatggagcctcctctttctcctttcttgaatgaagtgatcatcacactggatgatatgtggagtcttctgggtacagctgcatgcgcattgatctgctactaccctcttcttgctgtgattgtcggagccatgatgctggtgctcaaactacttntcattactatacattccatgaagtggggagcgacgctcatga

SEQ ID NO: 7013 - DNA, 530 bp, Glycine max
  unsure at all n locations
  Clone ID: jC-gmle01810023b01a1
caactcctccgaggctgagcttttccgaagctgaggcactgatactgaaatggaaccctgacacttccgcttacgccaaagtcacttccctcttctacgaggacaaaaccgaagccaaacactacattgactccgttaaccagcttcagaaatccatgcattccttgctctctcagaacccttcctctgagaaactcattctcgctcataacctaatgcagatggctatgaagaggctcaagaaagagttctaccagatcttatccatgaaccgcgcacaccttgatccagaatccgtctccgccagatcctctcgcacctccgccaactccagcgcctccgattacgacgacgacttcgctgctgaggacgacgatatccgcgccgccggcgactctatctccgaagtcgagcaggtttcttccggcgccatggcagatctgaaactaatcgctgactgcatggtatctntccgttatgccaaagaatgcgtcagcgtttacatcttaatacggaaatccataatcgac

SEQ ID NO: 7014 - DNA, 318 bp, Glycine max
  Clone ID: jC-gmle01810023b01d1
gaaaaagacgttatcgcttttgttggctatgtcaaaactattactacaaccaagaaaaataacggggaagaaaactcgccgttcaaactgggcacttagctccaacgccggagaggcatggacgattcagcactgggtgaggtttccaaaatgaagaggttaaccaggttatttgcaatatcctcaggggtaaaggtcacgttctccgtcgccggctaatcccttactgttcccaccgtagcatgaacaacattataccactcgcgatatcttggcactatgcttctggagatcgaaccttctatttcgtctcgaaat

SEQ ID NO: 7015 - DNA, 542 bp, Glycine max
  unsure at all n locations
  Clone ID: jC-gmle01810023b02a1
atcaagtgtagtatctgttcttatcagtttaatatctgatatgtgggccattggtccacacgatattaaattacttttttaatggggagagaccaacacagtagcttgctattgggtctctcgcgtgtcgtccatgcgttgcactatagcttgggcctggcacaccctacgtttagtcaaactttttcagttagtttgggttttctaatctcgtatgtggtgggagtgccacggtatgggttgctataggcagaaactgattatggtcaggtttagatctctactttagctaataatagtgagattatttgcttctcttcgtgacgtattttcatatgacaatctccttcagcttgttttatgtattattcattgagattatcagcattattattgcagtcagttataccgttattgatttacttggttagtaaccagttttacagctgcatttatgtaaaaaccgaagttgcattaaattatatttttacgtagttgatctgannaaaaataattataaaaattaataaaatattaataat

SEQ ID NO: 7016 - DNA, 224 bp, Glycine max
  Clone ID: jC-gmle01810023b02d1
aaaaacttattctaataaaattattttaatgaaatttaattttttacttaaatgtatcatattaaactggtttttaacccatattatttattatctgtgttaaattgatatgctattattaattgatgataatttaaaattatattacaataaaacaatgttttaagaatatggtattaaaaaaaactattaaaaaaaaagtaaaaatctaattttttatataa

SEQ ID NO: 7017 - DNA, 498 bp, Glycine max
  Clone ID: jC-gmle01810023b03a1
ctggaccttacagagttcttcttaagcatcatgaatcagataggaaaaatgaaccaacaaattgggaggattcagagacaaccaatgcaacacatgttgatggcaggggacaaccaagaatgactgtttgggagaatgagcagagatcaaattacagaaagaatgaggagagggatttgaggacaagtactcgtggtgaagattcttctcagtcttcagaaaatcaagtatctagttcttctgtgatgaaggcaaaattttccgaaagttcatgaaacataaaaaaatctgatgatatttcagcaaggaaattggatggtgttgcctctgatatgctagaaatctgctcaaaaccatctgcttcaaaagatgccagcctgattcaaaagatagagggtttaaatgcaaaagccaacgataattcatctgctataattagagaggagcaaaggaataaaattcatgccagtaatgctccgatgaaccatgtgggaaatg

SEQ ID NO: 7018 - DNA, 430 bp, Glycine max
  Clone ID: jC-gmle01810023b03d1
ccttgttttttttttttaaattatgcacctgctgctcactctttagaggattaactgcctcaattttacttatctcactcaattcatccacgatctcactcttgctctgaggtttaacaggtgcccacatcacagcatcagtcccatgggatttctctgccggtctattggcctgcatatttgatggcatcctacgagaatgctgagatttccactggctattcattctaccatgggattcctcatttgctaaatatctgtgttgctccgaaaactgatttggatctttagacaagggtgctggctgaagtgggccctgatctaactcaaagtctgaagccttggacttatcactttcaactgagcttttggaaagattggattctcttgggattgccgatggtagtgcagcctgagatgaaccttcttc

SEQ ID NO: 7019 - DNA, 369 bp, Glycine max
  Clone ID: jC-gmle01810023b04a1
gtcaacctttcctatctaccattctgcctcaccattcgtacttgatcatccaacgatacctctgtgaacatgataggacggacaaagccccaacctatcccaccaggtggcacataccctgcgactagatcattagaatgagctgaggatcgtgtgacacttactatattgcccatgttatgagggcatgtgctttctggggagatggtattgataatatagaaagaaaggaacctgttgttcatgtgatgaaggcagaagactgataacttggatgagacctacttaagggtgtatgtggaactgctatgtgctcggaaacttaaccctgtggtatgagctcaatgtactgggatcgtacgaccattg

SEQ ID NO: 7020 - DNA, 234 bp, Glycine max
  Clone ID: jC-gmle01810023b04d1
tcgttctttttattttgtccccctagtgactactatataacaggattaccagatttaatcttgctacaactcattaggcaattctgcaaagctcaatagttgatgagactagcaatcaccaagatcgaatttaaatcttcatatgagctgagtgctctatcctagaacagatattgatgaagagtatacaatgtgactagcatgcctctgatatcccaagactcagtgtgaaga

SEQ ID NO: 7021 - DNA, 516 bp, Glycine max
  unsure at all n locations
  Clone ID: jC-gmle01810023b05a1
cacgaagaaccagggcttcgagctcactaagcaaagatacggcaaggccaacgttaaatttttacgcgtatatcgtgagggtggaaagcatgaagtcaaggaaatacgtgctcgcgttctcttagaaggtgctttcgagatcagttacacaaacggtgataactctaccatcgtcgcgaccgatacacagaaaaacactctcttcgccctcgccaaacttcatccaattgaacccttagagcaatggtgtctgcaagtagccaatgattttctgtccagacataagcacatctcagctgtcaatctgaaggtagaagagcacccttgggacaggatccaggtggcgggcaaggaacacccccactctttccagaaaggaagcggcggtatccgtattgtgaagcttcgcatgcctcgtaatggcacaccttcactctcctncggcttcagagagttggagatcatgaagaccacccaatctggctttgaagggttcatcagagacgactacacaac

SEQ ID NO: 7022 - DNA, 222 bp, Glycine max
  Clone ID: jC-gmle01810023b05d1
ccgcggggtccgaaaattcaccccgtcgtcccggtacaaaaagggggccccgtcttgcctccaaggggcccggtccaccccgcagggccccttgtgggggggaaaccccccggttcacaggggcgaggggctcctggaccccttaaaagcccccaaaaaattggggggtttcggcaaaaagaaagaataccgcccccccctagggaggggggccaaaaccct

SEQ ID NO: 7023 - DNA, 535 bp, Glycine max
  unsure at all n locations
  Clone ID: jC-gmle01810023b06a1
tccaaggccaggtatgatgaaattgtgaaggaagtctcttcctacttgaagaaagtaggatacaaccctgacaagattccttttgttcctatctctggttttgagggagacaacatgattgagaggtccacaaaccttgactggtacaagggtccaactctgcttgatgcacttgaccagattagtgagcccaagaggccctctgacaagcccctcaggcttccccttcaggatgtgtacaagattggaggtattggaactgtgccagtgggacgtgttgagaccggtgtcttgaagcctggaatggtggtgacttttgcaccaactggactgacaactgaagtcaagtctgtggagatgcaccatgaatttcttacagaggcacatcctggtgacaatgtgggattcaatgttaagaatgttgctgttaaggatttgaagcgtggttatgttgcctcaaactcaaaggatgaccctgcanaggaggctgctaacttcacagcccaagtcatcatcatgaaccaccctggtcaga

SEQ ID NO: 7024 - DNA, 292 bp, Glycine max
  Clone ID: jC-gmle01810023b06d1
gggaacactccaaaaagaaggttgacatttaataatccaaagctacacatcgcagcagagtcctgaaactcgctgggcttaacaaaagtggaatcaggggttccgacaaacacaacactttaaaacccaattgtataaaagctatttggcccccgtcgttcaagaacccaggtctgggaaccacagttgcaaaatgatggggggaactgcaaactttggccgataaacaagttcccttaaaaagaataccctgggggtctggaaagaatccaacgtttattggacccaaaat

SEQ ID NO: 7025 - DNA, 523 bp, Glycine max
  Clone ID: jC-gmle01810023b07a1
tatattgcaggttacaaagccaaagcaaaaggttgaagatggtatctttggcacttctggaggatttggttttactaagcagaacgagctctttgtgggtcgtgttgctatgcttggttttgcagcatcactgttgggtgaaggaataactgggaaaggaattctagcacaattgaatctggaaactggaattcccctttatgaagcggagcctcttcttctgtttttcatcctcttcaccctgctaggagccattggaggtttaggtgaccgtggaaaatttgttgatgacgaacctactactggaggtgttattcctccaggcaaaggcttcagggaagctcttggtcttggttcacgtcctttatttggattcacgacagcaaacgagctatttgtgggaagattggctcaattgggtttcgttttctcattgattggagaaattataaccggaaagggagcactagcccaactcaacattgagactggtgtaccaatcaacgaaatcgagcccctagtg

SEQ ID NO: 7026 - DNA, 407 bp, Glycine max
  Clone ID: jC-gmle01810023b07d1
ttgccgcccttttttttttttttttatgatgaactcaatgcattttatgatagatgagcaaacgagtatttgtttaaacacaaacaaacaaaagggttagtgtctaatcatcctccccctcatctgtaacgaatttgccagttccaggattcaaagcagcaatgaagaagaaaagaacattgaacaacactaggggctcgatttcgatgattggtaccccagtctcaatgttgagttgggctagtgctccctttccggttataatttctccaatcaatgagaaaacgaaacccaattgagccaatcttcccacaaatagctcgttagctttcgtgaatccaaataaaggacctgaaccaagaccaaaagcttccctgaagcctttgcctggaggaataacacctcca

SEQ ID NO: 7027 - DNA, 513 bp, Glycine max
  Clone ID: jC-gmle01810023b08a1
tatattgcaggttacaaagccaaagcaaaaggttgaagatggtatctttggcacttctggaggatttggttttactaagcagaacgagctctttgtgggtcgtgttgctatgcttggttttgcagcatcactgttgggtgaaggaataactgggaaaggaattctagcacaattgaatctggaaactggaattcccctttatgaagcggagcctcttcttctgtttttcatcctcttcaccctgctaggagccattggaggtttaggtgaccgtggaaaatttgttgatgacgaacctactactggaggtgttattcctccaggcaaaggcttcagggaagctcttggtcttggttcaggtcctttatttggattcacgaaagcaaacgagctatttgtgggaagattggctcaattgggtttcgttttctcattgattggagaaattataaccggaaagggagcactagcccaactcaacattgagactggggtaccaatcaacgaaatcga

SEQ ID NO: 7028 - DNA, 491 bp, Glycine max
  unsure at all n locations
  Clone ID: jC-gmle01810023b08d1
atgatgaactcaatgcattttatgatagatgagcaaacgagtatttgtttaaacacaaacaaacaaaagggttagtgtctaatcatcctccccctcatctgtaacgaatttgccagttccaggattcaaagcagcaatgaagaagaaaagaacattgaacaacactaggggctcgatttcgttgattggtaccccagtctcaatgttgagttgggctagtgctccctttccggttataatttctccaatcaatgagaaaacgaaacccaattgagccaatcttcccacaaatagctcgtttgctttcgtgaatccaaataaaggacctgaaccaagaccaagagcttccctgaagcctttgcctggaggaataacacctccagtagtaggttcgtcatcaacaaattttccacggtcacctaaacctncaatggctcctagcagggtgaagagggatgaaaacagaagaagaggctccgcttcataaaggg

SEQ ID NO: 7029 - DNA, 463 bp, Glycine max
  Clone ID: jC-gmle01810023b09a1
tgccccctaggatcgattccatcatgacccgacgcacgctacaatgctctaagtgcatatccatacgctctgccaccaggtgaatggaaggaactggcggacgcggagctgcaccgtgtgcaccggcgaagcaatatttgcacgatcacttgaagctgtaacagtgctatctggataaatacactacacattacacacacagatggattggtactttcgagatagcatacatatacgtagagcgcgtagtttataggcagggcatttacactgtatattatggactcggaatctaccttcagaatctcttgactggcattctctcccctaaggaagataactggctcgatccctactactgagctttgcttccaaccaaatgctacgatgagttgaaacccttgattcgccgccttccggagatcaagttctggtattctttcaccaaggctctctgcatagc

SEQ ID NO: 7030 - DNA, 509 bp, Glycine max
  Clone ID: jC-gmle01810023b11a1
tggaatcaaccgaactgggtaaaaaagcaaaagaactgaacaaagcagctgagtcacttcatcaggaagaaagaagtggttcgaagggaaggaaatttcctaaaaatgtgacatcagtagagaaggatttgtttcaatcggaagaagatgtcacgcttcttgaggagatgtatccacaatgggaaaaggctgatacaacatgggcactaacagttctagggtatctggcaaaatttgttctgggcattttagggtttatcgtttatgtggcatgggtcgctcatatcatcatctatctattgattgatcctgctctttctcctttcttgaatgaagttttcatcaagctggatgatgtctggggtcttctgggtacagctgcatttgcatttttctgcttctaccttctccttgctgagattgccggagccatgatgcttgggctgagactagttttcattactatacatcccatgaagtggggagcgacgctcatgaactcttttctg

SEQ ID NO: 7031 - DNA, 571 bp, Glycine max
  unsure at all n locations
  Clone ID: jC-gmle01810023c01a1
attgtatgcccatttttggaaaatttacacttgcagtgaaagttgttgagtgagatgattacattcatggacacaaaggagaaatcaaaagaggtggagagttgtttggatcctcagctatggcatgcatgtgcaggtggtattgtacaaatgccagcagtgaactctaaggtttattacttccctcagggtcatgctgagcatgcatgtggaccagttaacttcaggacttgtcctaaggttccaccttttgttccatgtagagtgactgctgtcaaatacagggctgatcctgagaccgatgaagtctatgccaaactcaagctcattcctctgaatgccaatgatgttgattatgatcgtgatgttgttggtggggctgaaactcaagacaagcctgcttcatttgcaaaaaccttgacccaatctgatgccaacaatggtgggggattntctgttcctaggtattgtgcagagacaattttccctcgtttggactactcagttgaccctcccgttcaaaacatccttgccaagggatgtcatggagaaaacatggaattcagacaca

SEQ ID NO: 7032 - DNA, 546 bp, Glycine max
  Clone ID: jC-gmle01810023c02a1
ctcagtagggtttgcggtttcagagtttgtgacgcacgcatccatggccaccaccaccaacgccgccgcagccccgccgcgccagctctcccagaaggaagccgacatccagatgatgttagccgccgacgtccacctcggcaccaaaaactgcgacttccaaatggaacgttacatcttcaagcgccgcaacgacgggatttacattattaaccttgggaagacatgggagaagcttcagttagcagctagggttattgttgcaattgagaaccctcaggatatcattgttcaatccgcaaggccttatggtcaaagagcggttctgaagtttgctcagtacactggtgctcatgctattgctggaaggcacactcccggtaccttcaccaatcagcttcagacttcgttcagtgagcctcgtctccttatcctcactgatccaagaacagatcaccagcctattaaggaagctgctcttgggaatattcccaccattgctttctgtgacactgattcgcctatgaggtatgtggacattggaat

SEQ ID NO: 7033 - DNA, 300 bp, Glycine max
  Clone ID: jC-gmle01810023c02d1
ttttttttttttttttttttttttttttttttttttttttttttttttttcttctttttttgttttttttttttttcttttattttcttttcttcgttttttttgccttttctttgggggaaaaaaaaggggggccccaaattaactacccccaactttgctaaactacacctcaatccaaaaagatataacctcgccactcatcccgaggcaaaaaaatcatgcgcccccacctataacacctaaaaaaaaaatccccccgggtctctcactaaaaaaaacccacccactttctaccct

SEQ ID NO: 7034 - DNA, 539 bp, Glycine max
  Clone ID: jC-gmle01810023c03a1
gtggaaatgccagagcattgaggaggttgagaacagcatgtgagagggccaagaggactctctcttccactgctcaaaccaccattgagattgattccttgtatgagggtattgacttctacacaaccatcacccgtgcccgtttcgaagagcttaacatggacctattcaggaagtgcatggagcccgtggagaagtgtttgcgggatgctaagatggacaagagcaccgtccatgatgttgttcttgtcggtggttctactaggattcccaaggttcaacagttgttgcaggacttcttcaacggaaaggagctttgcaagagcattaacccagatgaagctgttgcctatggtgtagcagtgcaggctgccattctcagtggcgagggtaatgagaaagtgcaggatcttctgttgttggatgttactcctctctcccttgggttggagaccgcgggaagagtcatgactgtgttgattcccagaaacacaaccattcccaccaagaaggagcaggtattttcgacctattccgac

SEQ ID NO: 7035 - DNA, 489 bp, Glycine max
  Clone ID: jC-gmle01810023c03d1
ctcccttttttttttttttttttttttttttttttgaccatatgcaacttatatcattggtaaggggaaacgtgcagattgacatcttatatatcaaaattattgttcactgcacctgaaccatgtgacaatactggttattatctaaacttcaaaagggtcttcacaaaatcaagaacaacccatgacaattggtctgcttaatcgacttcctcaattttgggtccagcaccgtttccactgccagcagcaggaccatcctcatccatggtttcacccgcatcaccaccagctccttggtacatctttgctatgatggggttacaaatgctctccaactccttcatcttgtccttgaattcgtcagcttcagcaagttggtttccatcgagccattggatagcctgctcaattgcatcctcaatattcttcttatcatcagcagacagctcggaagcaatcttatcatctttaattgccgtcctcatg

SEQ ID NO: 7036 - DNA, 520 bp, Glycine max
  Clone ID: jC-gmle01810023c04a1
cactgatcccgccaagggtatgaaaggagctgttcagaaggcagaagagataagggataagactcccaattcttatatgcttcagcaatttgaaaatcctgccaacccaaaggtccattatgaaaccactggaccagagatctggaagggctctagtgggaaggttgatgctcttgtctctgggattgggactggaggtacagtaacaggtgctggaaaatatctgaaagagcagaatcctgatataaagctatatggcattgaaccagtagaaagtccaatactgtctggaggaaaacccggccctcataagatccaaggaattggtgctggcttcatccctggtgttctggatgttgatttacttgatgaagttgttcaaatttcaagtgaagaagctattgaaactgctaagcttcttgcattgaaagaaggtttactggtgggaatatcatctggtgctgctgcagctgctgcagttaagatagcgaagaggccagaaaatgctggaaaactcatt

SEQ ID NO: 7037 - DNA, 472 bp, Glycine max
  Clone ID: jC-gmle01810023c04d1
tggtcgtttttttttcagcaaactactatatttttattgaatcttagtcaattaacaagcaaacagaaatcctttttattttttagatccataagagaaaaaatatatacacaacccaaggacagaatgcaacttgagaagcagcaaatggctcgtatgacttgacattcaaggctcaaagaccaagctctctgcttctcgcttcacggattcaaagagcacagacgatagataacgctctccaaaacttgggaagaccgcaacaatgagttttccagcattttctggcctcttcgctatcttaactgcagcagctgcagcagcaccagatgatattcccaccagtaaaccttctttcaatgcaagaagcttagcagtttcaatagcttcttcacttgaaatttgaacaacttcatcaagtaaatcaacattcagaacaccagggatgaagcccgcaccaattccttggatc

SEQ ID NO: 7038 - DNA, 340 bp, Glycine max
  Clone ID: jC-gmle01810023c05a1
ctattcatactggaacgaatggttatcttgattcattagaaattggacaggtaaggaaatttcttgttgagttacgtgcttacttaaacacgaataaacctcaattcaaagaaatcatatcttctaccaagacattcactggggaagcagaagtccttttgaaggaagctattcaagaacagatggaactctttttactacaggaacaggtagaaaaaaattgattaatcatttaataactttataatttcactttcaaattcttataattagtatcttttaatatctttttatttcatttgaatataatattaatatataaataaaatgaattcgaatg

SEQ ID NO: 7039 - DNA, 340 bp, Glycine max
  Clone ID: jC-gmle01810023c05d1
cattcgaattcattttatttatatattaatattatattcaaatgaaataaaaagatattaaaagatactaattataagaatttgaaagtgaaattataaagttattaaatgattaatcaatttttttctacctgttcctgtagtaaaaagagttccatctgttcttgaatagcttccttcaaaaggacttctgcttccccagtgaatgtcttggtagaagatatgatttctttgaattgaggtttattcgtgtttaagtaagcacgtaactcaacaagaaatttccttacctgtccaatttctaatgaatcaagataaccattcgttccagtatgaatag

SEQ ID NO: 7040 - DNA, 340 bp, Glycine max
  Clone ID: jC-gmle01810023c06a1
ctattcatactggaacgaatggttatcttgattcattagaaattggacaggtaaggaaatttcttgttgagttacgtgcttacttagacacgaataaacctcgattcaaagaaatcatatcttctaccaagacattcactggggaagcagaagtccttttgaaggaagctattcaagaacagatggaactctttgtactacaggaacaggtagaaaaaaattgattaatcattgaataactttataatttcactttcaaattcttataattagtatcttttaatatctttttatttcatttgaatataatattaatatataaataaaatgaattcgaatg

SEQ ID NO: 7041 - DNA, 256 bp, Glycine max
  Clone ID: jC-gmle01810023c06d1
ctattatcattcgaattcatttcatttatatatgaatattatattcaaatgatataataagatattccgagattctatttataatacttcgaacgtgaaattcttaaggtattaagtgatcaatcaagtgtgttctacctgtccctgtagaaaaaagagttccttctgctcttgaatagcttccttcaaaaggacttctggttccccagtgaatgtcttggtagaagatatgacttctttgaactgaggtttattc

SEQ ID NO: 7042 - DNA, 546 bp, Glycine max
  Clone ID: jC-gmle01810023c07a1
cattagaagtggtacacaaacatgggccatgctcccaactgaataatcatgatggcaaagcaaagtctaaaacaccacacagtgagattctgaaccaagacaaagaaagggttaagtacattaactcaaggatctcaaagaacttgggccaagatagtagtgtgagtgaattggactcagttacactaccagccaagtctggtagccttattgggtctgggaattactttgtggttgttggtcttggaacacccaagagggacttgtcactcatctttgacactggcagtgatctcacttggactcagtgtgaaccatgtgctcgttcttgctacaagcaacaagatgctatctttgatccatcaaagtctacatcatattccaatattacatgcacatctacgctttgcacccagctctctactgctacaggtaaatattaatttgattctcaacatttcaagattattattatatgtgctggaaacttaattagccacagaatgatggttatatgttgtttacatatagaagaaacattttgac

SEQ ID NO: 7043 - DNA, 494 bp, Glycine max
  Clone ID: jC-gmle01810023c07d1
gtttttcgtcctttttttttttttttttttttttttttttttgaaagaaaaatgtattgcttttctatcaactcaagtagcccaaacgaccaaacattaattaaatatttagtgtatatttggatttctaaattttagaatcatcattgttttctatctaaacatataattcaatggtatcaaagacgcaagtcccttggcaatcttgagtcaaaatgtttcttctatatgtaaaacacatttaaccatcattttgtggctaattaagtttccagcacatataataataatcttgaaatgttgagaatcaaattaatatttacctgtagcagtagagagctgggtgcaaagcgtagatgtgcatgttatattggaatatgatgtagactttgatggatcaaagatagcatcttgttgctttgagcaagaacgagcacatggttcacactgagttcaagtgagatcactggcagtgtcaaagatgagtgacaagt

SEQ ID NO: 7044 - DNA, 521 bp, Glycine max
  unsure at all n locations
  Clone ID: jC-gmle01810023c08a1
gagaaggaatctggtgtaggagaaggtcgagggaacgagttttcttggtaccatgttgaactaccgaaaggaaatcaaaagttgtcacaatctgcacaggacctgattggtgttttctgcccacctttgaaactccaagacattctttcacttgttagcaatggacccttttgtgcacatgtagatggggcacttgtcttccgtgttaattcgcccggtcctccctccagcgacttcacgtttaggattgctgctagagttacggagcattcagtaattactgtgtccttgggacgtgttcccaggttaggcttctcccgtgtgggtgaatctctactttccgagattcctagtgttgagagtttctctcctttaagaggtcagcagcaggaaaggacagtgatcaaggagcatgttcttgaattcttattgactatgaatcactctgaggaagctgacaaccctgtgcctagatctgtctcanatcttgtagtacacataattgacacacatgtagatca

SEQ ID NO: 7045 - DNA, 449 bp, Glycine max
  Clone ID: jC-gmle01810023c08d1
ttgtcgccctttttttttttttttttttttttttttttttttttttttttttatcagtgacaataaataatataagaaatcaaaaaatctgccgttaacaaaaaaagacaaatacactgtacaagtttgaaatgtaccaatagttgccaaaaagaaagggatagatccatatattctctcctataggggggaaaaacaatgaaagaataagcaataaagcttgccttgatcacaaactccattttactggaccagagaatttgggcttcatgagaattccatttaggcttcagatgattggtttactgaccactaattgccagtttattacgtttcttatgtgcgtgcgagccattgaaaagcagctgataaaatagcttgcaagtgaggcattcttcaaaacagaaggaagtaattattgacttaaatgttcgttgatagaatgaaat

SEQ ID NO: 7046 - DNA, 268 bp, Glycine max
  Clone ID: jC-gmle01810023c09a1
gcgacaaatggaggtgtaatggcgcgtctccgtctggaccaaccttacggcaaggcgctctgcggtttatgggctgcccatatcctatactacaacccaggtaggccagataaacctgattacgacgagggacgacccgagaggaccgggacgcagcatttcgtggccacacacagagagggggacactgtagagttgatagtatggggctgtaaacaacacagtatcagagggggctcgaggtgatcccttcctagactatcacctc

SEQ ID NO: 7047 - DNA, 464 bp, Glycine max
  unsure at all n locations
  Clone ID: jC-gmle01810023c10a1
ttgtcgctnnnnncgatggaatgcgtatatcaacgatgctatgactgtgcgcatcgcaacgcgtagcgtatagctctgaatgcttgctcgagcctcttatttagtgttgcggataattttagaactagtgcacgggaaaaagggattcagattcgtgactttgtatacagtccataaacacctgagaaccggatgcgggagttagattgaatgtggcacgcatcagagagattgagggctaatgtgtagcgatggtgctataccagctatggagaggtttacagatcctggatgcactttagcgctgtgcgtttattggctgagagcattctgagatatggtctgacaccatctttcttggcatgatgaatagctccttctgtacaatgcgagaagaaagtacgttctatacttgaagggttgactgatatcacagacaagtgcattactggatgaccgaggat

SEQ ID NO: 7048 - DNA, 458 bp, Glycine max
  Clone ID: jC-gmle01810023c11a1
gaatcgaggacttgtgatgttcttaactctgttggaatccagatacttcaaaaaatgatgtcacttgagcgaaatgaacctggtttgactctggatggaagccttgtcagttaaattgaaggagaaagcgctgtcgacaggctaaaaagacacgctgaccatgacaggagacttatgaatgctttgtataaagagctgcaggaagaaagaaatgcttctgcagttgctgcaactgaagcattagccatgatcacaaggctgcaagaagaaaaggcaacattacatatggaagccttgccgtacttaagaatgatggatgaggagtctgagtactaaacagaagctctgcagaaagctaatgaccttcttgttgagaaggagatagacatcgaatagttggaagctgagctcgagttctatacgacgacgttccctgatgaatctgtgctggacaacat

SEQ ID NO: 7049 - DNA, 485 bp, Glycine max
  Clone ID: jC-gmle01810023c12a1
ctcaggagcttaaatattaatctttcacttctacgctaatctctagattactgacattcattccattttgattcattaatcaaccaaataaaaagcgatgagcacttctcatcaacgacggtatctgcttttggattgcactacgtcaatagctctcttcagctacaacgctacaccagaatgagctcgtttggacctcaacgtttacttcatcccagggtggaacacataccacgcgccacctgctatcgcgtggaacgcgaatggcaatttcactggctgccgcccgggaaaaacatataacggtctttcgaatgtgaaaaactactgttattattatggctacatgtgcaacgtgtactcgaagtcgtggaattatagcgacgatttctatgatgcgttggaagcagtcgttagagcctaccacaataacttgaacctgaacatgacaggggagctcgacgaccccacgatgaaccaaatcg

SEQ ID NO: 7050 - DNA, 545 bp, Glycine max
  Clone ID: jC-gmle01810023d01a1
ctcagtagggtttgcggtttcagagtttgtgacgcacgcatccatggccaccaccaccaacgccgccgcagccccgccgcgccagctctcccagaaggaagccgacatccagatgatgttagccgccgacgtccacctcggcaccaaaaactgcgacttccaaatggaacgttacatcttcaagcgccgcaacgacgggatttacattattaaccttgggaagacatgggagaagcttcagttagcagctagggttattgttgcaattgagaaccctcaggatatcattgttcaatccgcaaggccttatggtcaaagagcggttctgaagtttgctcagtacactggtgctcatgctattgctggaaggcacactcccggtaccttcaccaatcagcttcagacttcgttcagtgagcctcgtctccttatcctcactgatccaagaacagatcaccagcctattaaggaagctgctctggggaatattcccaccattgctttctgtgacactgattcgcctatgaggtatgtggacatggaat

SEQ ID NO: 7051 - DNA, 503 bp, Glycine max
  Clone ID: jC-gmle01810023d02a1
caaaggttgctgtaggagataagattgcagtagtgctaagtgctaacacctgcagtgaacaatggcctctgcatcagcatctctgctcaagtcttcacttgttcttgacaagtctgagtgggtgaagggacaaacccttcgccaaccttctgcatcagttgtgagatgcaaccccaccaccccatcaggcctcaccatcagagctggttcctatgctgatgagctcgttaagaccgcgaaaacagtggcttcaccagggaggggtattttggccatggatgagtccaatgctacctgtgggaagcgtttggcttcaattgggctagagaacactgaagctaaccgccaggcataccgtaccctcctcgtgacagttccaggccttggtcagtacatctctggtgccattctctttgaggaaacactctaccaatccacaactgatggcaggaagattgttgacgtgctgcttgagcaaaacattgttcctggtattaaagtcg

SEQ ID NO: 7052 - DNA, 425 bp, Glycine max
  Clone ID: jC-gmle01810023d02d1
cattgattgccgagcttaaaccattttgttatatattgagacataatcaagtacacaactcatagcaaaaggtttattaagctgtaaaggtgcatttaaccataaacaaaaatagtctccaagactataaaaacattacattttagacaaattagtcttccacttcatcgtccgtcaacacctactgtaactgctggtgttgctgcctaacaagtatcatattcactgcaaacatcttagtaggagtagcttttgacgaacaactccttcttggcttcctcggattcaccctcaccagtgtacttcccaagctgagcgagtgagttggacttggcacggaatgcgagtgcatcttgtgctgacttcacgttctctgggcggacttcccatgtcttcaaggcagtgttttggagggctctggcata

SEQ ID NO: 7053 - DNA, 557 bp, Glycine max
  Clone ID: jC-gmle01810023d03a1
cactgatcccgccaagggtatgaaaggagctgttcagaaggcagaagagataagggataagactcccaattcttatatgcttcagcaatttgaaaatcctgccaacccaaaggtccattatgaaaccactggaccagagatctggaagggctctagtgggaaggttgatgctcttgtctctgggattgggactggaggtacagtaacaggtgctggaaaatatctgaaagagcagaatcctgatataaagctatatggcattgaaccagtagaaagtccaatactgtctggaggaaaacccggccctcataagatccaaggaattggtgctggcttcatccctggtgttctggatgttgatttacttgatgaagttgttcaaatttcaagtgaagaagctattgaaactgctaagcttcttgcattgaaagaaggtttactggtgggaatatcatctggtgctgctgcagctgctgcagttaagatagcgaagaggccagaaaatgctggaaaactcattggtgcggtcttcccaagtttggagagcgttatctatc

SEQ ID NO: 7054 - DNA, 511 bp, Glycine max
  Clone ID: jC-gmle01810023d04a1
ctgaagcgtaccggatttcattgtgatatcatttgtgtcactggatggactgccactccaatgcaggatgttcaggttacaattgattggtttatttcctctcaggaatgtgttcccaggacttattgtgttttaaatccacaaaatccttttgtgttgaataggtggatggggaaactgactttcccccagggcacttcccgaagtgttaagagaatgcctctttctatagggggaggagctggtgcaaagaatgctattctcatgaatatgccaaatgctgttctttcaatgtggagatattttgttggagatctcgtctttgaagtttctaagatgacttctccctacattaaatgtacagtctctttcttcatagcatttggaaatttggctgatcacaccatcaattttgaggcttttccccacaagctggtgcagtttggagagattcaggaaaaagttgtattgaaattttcacaagaggaatttcttacagcttggtcaactc

SEQ ID NO: 7055 - DNA, 396 bp, Glycine max
  Clone ID: jC-gmle01810023d04d1
aaaataacacacacttcacacatcattacgacaattaaaagaggtgtggaaattttcaaatagacagagcatactcaacaagagggtcatgactaatttcctttattgaattaaacaaacgaacaaacgatagaaaacacatattccagatcatgcagaggattccgcatttacagaagaactggctagaatcctggggaacagaaaaagctggcataagagtatgaccagcaatttcaaaaacttgagaaattcccaggagaatatcaaaaactggaaactgtttgggattgtcaataaggaaactcaagtgccatgaagtttgatttggccactcagaactcccatttcaaaaccattattaggaccacatacctttatttgggaaagatcaat

SEQ ID NO: 7056 - DNA, 311 bp, Glycine max
  Clone ID: jC-gmle01810023d05a1
ctatccatactggaacgaatggttgtggtgactcatgagaaactggaccggtactgaaatgctttgcagagacaccagcttactcagacactaatatacctggatcaaaagaaatcatatgtgctaccaagacatggagtggggaagcagaagtcctttggaaggaagctatgcaagagcacacggaactttctgtactacatgaacacgtagaaaaaaatcgactgatcattgagtgtctgtatgataacactttaaaatactaatcacaagtatcttttaagatctgtatatgccatttgcatataata

SEQ ID NO: 7057 - DNA, 328 bp, Glycine max
  Clone ID: jC-gmle01810023d05d1
ctatgaacattcgaatacatttcattaatatatgaattcgttattcaaatgatataataagatattccgagcttctatttatgagactgcgaacgtgatcttcttctgttctgatgtgagcaaacagatgtgtcttacctgcccctgtaataagaagagcgccttctgctattgcattgcttgcgtctacaggacttttggctccccagcgaatggcttgtgagaaagtaagacggccttgaactggggtttattcctggttcagcatgcacgttactaaccaagagatttgcttacctgttcaatctctagtgaatcatgataacca

SEQ ID NO: 7058 - DNA, 340 bp, Glycine max; identical to SEQ ID NO: 7038
  Clone ID: jC-gmle01810023d06a1

SEQ ID NO: 7059 - DNA, 340 bp, Glycine max
  Clone ID: jC-gmle01810023d06d1
cattcgaattcattttatttatatattaatattatattcaaatgaaataaaaagatattaaaagatactaattataagaatttgaaagtgaaattataaagttattaaatgattaatcaatttttttctacctgttcctgtagtaaaaagagttccatctgttcttgaatagcttccttcaaaaggacttctgcttccccagtgaatgtcttggtagaagatatgattactttgaatcgaggtttatgcgtgtttaagtaagcacgtgactaaccatgaaatttgcttacctgtccaatatctaatgaatcatgataaccattcgttccagtatgaatag

SEQ ID NO: 7060 - DNA, 527 bp, Glycine max
  Clone ID: jC-gmle01810023d07a1
gagaaggaatctggtgtaggagaaggtcgagggaacgagttttcttggtaccatgttgaactaccgaaaggaaatcaaaagttgtcacaatctgcacaggacctgattggtgttttctgcccacctttgaaactccaagacattctttcacttgttagcaatggacccttttgtgcacatgtagatggggcacttgtcttccgtgttaattcgcccggtcctccctccagcgacttcacgtttaggattgctgctagagttacggagcattcagtaattactgtgtccttgggacgtgttcccaggttaggcttctcccgtgtgggtgaatctctactttccgagattcctagtgttgagagtttctctcctttaagaggtcagcagcaggaaaggacagtgatcaaggagcatgttcttgaattcttattgactatgaatcactctgaggaagctgacaaccctgtgcctagatctgtctcaaatcttgtagtacacataattgacacacatgtagatcagattca

SEQ ID NO: 7061 - DNA, 421 bp, Glycine max
  Clone ID: jC-gmle01810023d07d1
tttttcgtcctttttttttttttttttttttttttttttttttttttttttttatcagtgacaataaataatataagaaatcaaaaaatctgccgctaacaaaaaaagacaaatacactgtacaagtttgaaatgtaccaatagttgccaaaaagaaagtgatagatccatatattctctcctataggggggaaaaacaatgaaagaataagcaataaagcttgccttgatcacaaactccattttactgtaccagagaatctgggcttcatgagaattccatttaggcttcaaatgattgttttactgaccactaattgccagtttattacgtttcttatgggcgtgcgagccattgaaaagctgctgataaaatagcttgcaagtgagggattcttgaaaacagaaggaagtgataatt

SEQ ID NO: 7062 - DNA, 535 bp, Glycine max
  Clone ID: jC-gmle01810023d08a1
ccttgactaattaattatccctcacaactaccaatggccgaagagaaacaccacaagcaccgcctcttccaccaccacaaggacgaggataataagccagtagaaaccgatactggttacgacaacacatcatattccaagccttctgatgactatgactctggtttcaacaagccatcgtatgagtcttctggcggtggctatgaaggtggttacaacaaaacatcttattctagtgatgagccagcttctggtggtggctatgaaggtgggtacaagaaaacaggttattctggtggcattgatgagacttctggtggctatggcgctggtggtggtggatactctgacgtcactgatggtggctacggcaaaccaagtggtggctatggcgccgctggtggtggtggtgtgtaccctgacactaccactgatggtgggtacagcaaaacaagtggtggtgggtatgatgatgaggttgactataagaaggaagagaagcaccacatgcatcttgagcaccttggtgagttag

SEQ ID NO: 7063 - DNA, 487 bp, Glycine max
  Clone ID: jC-gmle01810023d08d1
tacgcccgtggccgcccttttttttttttttttttttttaatctcaaaccatttgagtatatattattttatgtacttaacacttaacacagtacacatgcatatatagagcaacacatttcaaggaaacattctccaaaccatactgatctcccaaaataaactggaagatgattaacttaaagacacacatatatatataagccaaaagcatatatatatataagacaagtagaaggaatatgctcataattggttgcttatgcttcagccaaagagatggtggtgcttctttccatgagcttcctcatcttgctcctttgcttcctttttctcatgatgttcatggaaggcaaacccaccagatcccactgcagctgctgctgcaacctcctcttctatcttgtgcctgtgagcatgctctgggtctttctctgccttgtgcttctcatgcaaggcgtaagcagcagcagatgcagcacctaac

SEQ ID NO: 7064 - DNA, 323 bp, Glycine max
  Clone ID: jC-gmle01810023d09a1
cttctaatgccatctatctatgtcgtgttttgattttgtaagaatgatttggcattggctagttagctagctgaaatcatcgcgagtttattaattacttttgtcatgtttgtggaaacaagtgaaattgttgcactttaattaattagtttggttatgcttactgtggatgcgcaagagagcacttaggtgtgaaaaaggctttggtgtactacaaaagagggccgccgccgggtattgagatcaattgccccatacttgattatggatcggttcctgccagcatacccattttgattatagacagctgcatgagggctggg

SEQ ID NO: 7065 - DNA, 285 bp, Glycine max
  unsure at all n locations
  Clone ID: jC-gmle01810023d10a1
ggggntaaaaagtcctnnnnggacgatagattctcgatcatactggcgtacgcacgcttccaatatctcgtaatgcttgctaaggcgcatgtatctatgtcgagttttgatttggtacaaacgaacaggcattggctcgttggctcgctgaaatcatagatagatcattaacaacttttgtcatgtttgtggaaacaagtgaaaatggtgcactagaaagaataggttgggaaaagctcactgccgatgcacaaaaaagcacaaattggggaatatagattttgt

SEQ ID NO: 7066 - DNA, 392 bp, Glycine max
  Clone ID: jC-gmle01810023d11a1
ctgaacagcggcgactctctctcaccacaacaaacttctgtgcaagcgcccgctcaagtattcacgctcgattgagccaccacgcagcagcgaagggatttggaccacacctgtgggacggctcgggctactggtgcgagaccgggcggtcacgagcgaccacgacagcgggcacgagaaagaggatgcgtacggcggcagcgttgctgcagaggagaaaccgacgaattcggcgacggatacggaaaagctgaaaaaggccttggtggattcagtgtgtggcacccatcgtggactgagagctgcgcgcctgactagagcggcgactggagtgctcatcgcagagttcgcggcgaagaaccctaaccctggaaccaccgacgccatgactc

SEQ ID NO: 7067 - DNA, 542 bp, Glycine max
  Clone ID: jC-gmle01810023d12a1
gctgggtcgagctctggagcttaaatcttaatctttcacttcttcgctaatctctagagtactccacatgcattccattttgtttcatgaactaaccaaataaaaaacgatgagcacttctcatggacaacgctatctcctcttggctttcactacgtagataggtctctgtagctacaacactacaccagttgcggctcgtatgctgcccaacgtgttctccatcccaaggtggaacacatcccacgcgccacctgatagcgcgtggaacgcgtatcgcaatttcactgggtgccgcccggggaaaacatataacggtctttcgaatctgaaaaactactttcattattttggctacatctccaacgtgtactcgaagtcgtcgaataatagcgacgatttcgatgatgcgttggaggcagccgttagagcctaccagatgaacttcaaccgtaacatgacaggggagctcgacgaccccacgatgaaccaaatcgtcaagccacgcttgggcgtggatgacatgatcaacgggaccacaa

SEQ ID NO: 7068 - DNA, 530 bp, Glycine max
  Clone ID: jC-gmle01810023e01a1
actactccttaatttctctcttcacttatcatcatacttatatattatataacccaataattaaattaaatacatgttagcactttaacattcctttctctaacctcgttcccactctcatattttcccttctgctgatattcagctaaactaagtcaataagatgactcagggaaagatagttgaagctgcagaagctcataaaacacttgaggatttcgatcctccaaagaagcgcaaaaggaacaagtatgcttttgcttgtgctgtgctggcctccatgacttccatcttgcttggctacgatattggtgtgatgagtggagcagccttgtacataaaaagggacctgaaagtgtcggatgtgcaaatcgagatcctgctcggaatcatcaacctctactctctgataggctcatgcctcgccggcagaacctccgactggataggtcggcgttacacgattgttttcgccggcgccatcttctttgtcggagcacttctcatgggtttctcccccaactattcct

SEQ ID NO: 7069 - DNA, 511 bp, Glycine max
  Clone ID: jC-gmle01810023e01d1
cgcaccctgcgcccgcagcctcaacgggaagatctcagaactataaacccacgtgatgggacccgcaccaatggagaacgtggccacgtaagccaacaccatggctatgctcaatgcaacggcccacattagtttcctctcggagtgaccaatgatcgtgaggctgatagcgagcgtgaggagagagagcaccatgcccccgacactagacaacaacaacggacgacgacccacgcggtccaacgtaaaagtagccgccaagatgaaaacggttttgacgaatccaacggccacggttgcaagaagtttatgcgtgtcgtctttgatcccagccttctcgaagatcctggggctgtacaaaacgacggcgtctacgcccgacgcttgttggaagaagtgaatcccaagggcagcgattacgatgtgacgaattgtgggcgttggatagaggaagagttctttccatacgccttcacctgtgcttcgtttggttacctgaacgacttcgtcg

SEQ ID NO: 7070 - DNA, 533 bp, Glycine max
  Clone ID: jC-gmle01810023e02a1
gtgggaagagtgaaagaagaagcgcagttaatgaaggtataagactgcagaaactgagagagaaagagatctggaagagatgagtgaagcgcagaagcaggtttggaaaggggccattcctctccagattcacctccacgaatccgaagtcaccactctccctcctcctccacccgctctcgtgttggcacctcggatagggtacttacctttgctgatttcgctcttgaagcctcagttcagcaccacgcttccccctggagtcgacaccatttggtttgagtacaaaggcctccctctcaagtggtatatacctactggagttctttttgatcttttgtgcgtggagccagagaggccgtggaatttaactgtacactttagaggatatcctagtattgtattgcttccctgtgaaggtgaagacagtgtaaagtggagctttattaactcactgaaagaggctgcatatgtaataaatgggaatagcaaagatgtgatgaacatgtctcaaactgatcaggtggagctct

SEQ ID NO: 7071 - DNA, 163 bp, Glycine max
  Clone ID: jC-gmle01810023e02d1
actcataactctcgactaagaatgcgttgtatgttctcatctctatgtatcactcttgagtacacttgtgtcaatcatatgttatatatattaatatattatatacacttcttctcttggacgtagaaacattctattcgtattttgcttgatgtgttcgacc

SEQ ID NO: 7072 - DNA, 551 bp, Glycine max
  Clone ID: jC-gmle01810023e03a1
tacaattttaaaatattggatttttcgttatttaaatcgcgtatctccatcacttgtagtgatttatcattcaatgaatgattgactgacaaaatgattcacttatcaaattttaatttaaagttttttagctaaaaagaaaataactttgctttttcccttctttttaacccccttaaatgaaaaaaggggttccccgacttggatagggaactatgcgagtgacctacctaatcttattgtagaaattttcaggatcaatgattagaccatgcaaactagaaatgctttttcttgtataaaggaagggattactcgatccatttccatatcgatcatgatatatataataattcgagcacccatttcaaacgcatatccaatttttgcacagcagggttatgaaaatccccgagaagcaaccggtcgtattgtctgtgccaattgccatttagctaataagcccgtggatattgaggttccacaagcggtacttcctgatactgtatttgaagcagttgttcgaattccttatgatatgcaagtgaaac

SEQ ID NO: 7073 - DNA, 441 bp, Glycine max
  Clone ID: jC-gmle01810023e03d1
acaagttaattgaagaaattcaatttgtttaatcaaattccccaaccccctctctttttatttgttcactacgtattatatgcaataaaatattatatggcagaaatattctaagttggaaaaaatagaaactaagatataggatttttcaggaaggggttaaaaaagattattttattgatatttttagaatatttctatttcgacacaaacaagaaggaataggaatcggactctaggaaaagacaaaaaatcccccctagagtaccttttccatattttaattgattttgtttcaaattatctatctatatagatatctattttatgtttagtatcgaatccaattttattgtattttacaatcgaaatttctataatagaactctctattatagaaaaatgaaatctgaaaaaaacagtgtcataaccataatattc

SEQ ID NO: 7074 - DNA, 151 bp, Glycine max
  Clone ID: jC-gmle01810023e04d1
taggtagaagatagattgcatgactatatgtgttgtctatatggtaaatgtgtgatctatatgatttagaagtattagatatagtatgatgtatagttgtatgatgcgaatgtatagagtttatgctctgcgcgtacggtcacgagctcgt

SEQ ID NO: 7075 - DNA, 581 bp, Glycine max
  unsure at all n locations
  Clone ID: jC-gmle01810023e05a1
aattgaggatgcatcatattcgtggggtttgtctgtgagctttctcagcataatcttgctaccaatagttggaaatgcagctgaacatgcaggagcaatcatatttgctttcaagaacaagctggacatttcattgggtgttgcattgggttcagcaactcagattgccatgtttgtggtcccattatgtgtaatcgttgcttggataatgggtatcgatatggacctgaacttcaacctcctagagacaggttcccttgcgttggcaataatagtcacaggcttcactttacaggatgggacttctcactacatgaaaggccttgttctcctgctgtgctacattgttattggggcatgcttcttcgtacaaagaacaccctttaataatcaagctgatgttactaacatcacacttaaaccaaccactaatggcagtttaagcgcttaattagtaggctttggcctatttgttgtcccttcctaagatgaagaatggtggcatcgatccaaaccaaaaatcagattcaaattcaatggatggatatngttcatgatctgacactttgcatatccataaa

SEQ ID NO: 7076 - DNA, 445 bp, Glycine max
  unsure at all n locations
  Clone ID: jC-gmle01810023e06a1
gtgtgctatagcttataattaataatcccattattccatccactttgtcattttcaacagctgataataattttggttcagctagtttaaataataggtgaattacagttgcttataagcagataaatcaactaaaaggtattgtagtctaaatttacaaatttggtgaattgttgaatttttaatgtcagtcttaaaaattcggtttatcctttaagggaatcatgtgctatgttgataaaccatggcaggattggcaaagtgtataattatatcattgtacttcagattggatgttgaatgtatggaactagaagctatcattggtgtttggcgcatttacaattgtaattgttactctgaacacaaattctttgaaaaaagacatgcatgcatgcatgatttcctacattctntttttactatcctatgtgacattgattct

SEQ ID NO: 7077 - DNA, 460 bp, Glycine max
  Clone ID: jC-gmle01810023e07a1
ggaagacagtgatggtgtagttgttgcacagggtgagagtcctgatctgcagactcttttcagaaggttctggaaggtggcagctccttactggacttcagatgacaagggaccggcaaggttgcagcttgctggtgtttttgctctcactttggccaccactggaatcagtgttggcttcaatttcttggggagagacttcttcaattcacttgctaacaaggatcaagagcaattcacgaagcaactactttactacttgggtgcctttgctggaggaatcccgatttttgtgttgagagattatgcaagagaaactctgtctttgagatggagatcttggatgacaagatattacattgatcgctatctgaagaatcaaactttctataaaattcagtcacaatcaatcattgataatccagaccaacgaagtggtgatgatctaagttctttcact

SEQ ID NO: 7078 - DNA, 512 bp, Glycine max
  Clone ID: jC-gmle01810023e07d1
tttgtcgccctttttttttttttttgattctaataaaatattatagcagcaagttgcaagggaaaatgtacagattgacatcttatatatcaaaattattgttcaatgcaattgaaccatgtgtgtctcatgagatggtaagcagcaaagcattgctagctcaaagatttgtaaattttaaagaggactcgggtctagtgggttcaatgggttcaatgcaccaatttagctgttcactgtcagaattaaatgtggatatgcttaagatcttgtcgtggtaagcacataaggatgaccgatggccaatgctgacatatgttatgttagctgctccaatcttttggtacaaatgtacctcattgacttcatcaagtgcacttgtagactcatccagtaaagccaattgaggctttgaaagcaaaagacgagcaaatgcaaggcgttgctgctctcccagagaaagaacactagaccattcatgtattgaatccaaactgaaacgagccaataaa

SEQ ID NO: 7079 - DNA, 332 bp, Glycine max
  Clone ID: jC-gmle01810023e08a1
gaaaaacggtaatcttcaaagttacgtccatggtccgaaatctgatcatattgctgtgcgaggactgaaccaagtctatgctgctcactgctgtactccctagaaaacctgagcgtctaggttagcatattgatgccactaataatcacccttggagctcgatggatactttgcctgcatcagctcatgtgataaactctcttttgatgctgttgattaccaagatgaccattgatgcaggaatgaacaatggttataccgttgtcgtcaccgtactaagacatcctaatgatgcgaagagagcttccatagatattactctgaaatcgtat

SEQ ID NO: 7080 - DNA, 314 bp, Glycine max
  Clone ID: jC-gmle01810023e08d1
ctactcggcggccgccctttttttttttttttgataggaacacaatatgctaggatcatgcaggtggggactatgaacacatagacttcgaatgtataacattaacagataagtgcagttgcaccatgactgatataggacacgtccagtacggaagtatgagtagcttcaagacgagaatcgtttgtgaaggactcgggtaaagcagttgcaacgggcctaacggacctatcgagcggtggaacgtcggatttaagcgtggatacgcgtacaacctagagtgtgtaggcatacacaagctgaccgatggtcat

SEQ ID NO: 7081 - DNA, 268 bp, Glycine max
  Clone ID: jC-gmle01810023e09a1
gaatgcttgattgttaaatagctcacttcttggacttggacctcatcaggcacatacgagcgcccccgataggtgcatcgagatgagactatttatcgatctcttgacaccaaacggagcgagcacgttagaaaaggaactacacgtgctacggttgggcacacacggtctcttattgccttacttattgttgtgactggtgtaatatcacacagacttggcatgtgaaagaagaagggggaacaagcacacttggagagcgcagggc

SEQ ID NO: 7082 - DNA, 467 bp, Glycine max
  Clone ID: jC-gmle01810023e10a1
gacattgatcataactgcaattggtcctcgcgttgtacttactttaaaggaaagtgtgagaatacgatcgcttctatcccaaggaggcaaatgtggatatgtagctatctctttaccaaataggctgggagcgcgttctataaggatcacagactgcttatggttgtgcgcagatggtcaatggcagccaccccatttctgaatgaagcatggagaagggctgctcgcttcatggaaaacaaaaatgatgcacaaaatcaacagaatgcttctgagacggtgaacttcaatggcagcgaacctgaaggtatacttggatccggacaaaggggccagcttcaagatgagatagtgatgaagtaggatggccttatgtggcatacggcttgcccctagtaaaaacgcagatagaacaattggctttcctgtactatatggggatggatcacgcccagatgttcttcact

SEQ ID NO: 7083 - DNA, 443 bp, Glycine max
  unsure at all n locations
  Clone ID: jC-gmle01810023e12a1
nnnnnnaatggggtgctggtgctcagagttatgagcacgcgtgcacgcgctcgtaatttgggtagtggaactatgaggctcaccagggagggtcgacgttctgatctctggccatgcgagccacaagaacgaggaacctccgttgattagatggtgttgagacagagctacatacttgctagagaagcatgcgtatccaacgccgctggcgacaaggtggacgaacacaccactttcagaggaacttgagagagaacagttcttatgttatgttgatgaacgctctaaaagttgctggagaacatattctcaggacaaaaccctgtgtgcgatgagtatttgccatcattataaggtatctgaattccatggggcatgccatcaccttgatcataaaatggttcgtcatggatgggaagagggtgactcttccgcgctgatct

SEQ ID NO: 7084 - DNA, 533 bp, Glycine max
  Clone ID: jC-gmle01810023f01a1
gtgggaagagtgaaagaagaagcgcagttaatgaaggtataagactgcagaaactgagagagaaagagatctggaagagatgagtgaagcgcagaagcaggtttggaaaggggccattcctctccagattcacctccacgaatccgaagtcaccactctccctcctcctccacccgctctcgtgttggcacctcggatagggtacttacctttgctgatttcgctcttgaagcctcagttcagcaccacgcttccccctggagtcgacaccatttggtttgagtacaaaggcctccctctcaagtggtatatacctactggagttctttttgatcttttgtgcgtggagccagagaggccgtggaatttaactgtacactttagaggatatcctagtattgtattgcttccctgtgaaggtgaagacagtgtaaagtggagctttattaactcactgaaagaggctgcatatgtaataaatgggaatagcaaaaatgtgatgaacatgtctcaaactgatcaggtggagctct

SEQ ID NO: 7085 - DNA, 512 bp, Glycine max
  Clone ID: jC-gmle01810023f02a1
caagagagagaaagatacaactctcgctttcgctattactattatttcctccctcaaaaaaccgccatggacagtgcagacgcgtggcgcgtggccgcgtgtggcaactccaacgtcaacaaaataatgctccgcttccgcccgatcgcgccgaagccggtcaccggaatttccgccgccgaagctggctccgccgtcggagaagttactcagaacaaccacgtgtcagtcctggggaagagaccgaagaggaagtacgttaggattcggaggaacagtggatacgtgagaaagaataacggagacagtaacggaaaaagtaacggtaacggtaacgatgagtcttccgacgtggcggttgtgacgttgcagttgatgcctgagaaggacgcgccgggaggagacgtcacgctcgccggagattcgtggtgtaagaacgttgatcttgacctaaccgtggagaagattcagatcgtggagaatcggagtgctccaccgccgcgcgcggcggc

SEQ ID NO: 7086 - DNA, 504 bp, Glycine max
  Clone ID: jC-gmle01810023f02d1
ggtcgtccttttttttttttttttttttttttcagagacccaaactgagcgcagctttcacgtctagcctccatgcaaacccgccacagtccaatctccaaacatcacacggcaccatcttcgtgcacttctcgttccgccacgtgtactgcagcctcacaccgcaggtgaacgccgggtgagagtagcaccaccacgaagcgatggcactatccttcactttcaaccacaccacgatattctcaccctcaccctcacgcccctccagcatcatcctcttgtacgcgtcattcacccaccgtaccctaaggcttccgtcacagacaaaagcaggacacgtgtcagcttctaggctcttcaccttctccgcgtccgtacaatctaataacccttgccctccctctccgtctccctcccccatgcacgtgcctgtcacgctctccactgtcacccaagactccgtcacctttgccgtcgaacaagatctgaacgcttacctccctc

SEQ ID NO: 7087 - DNA, 528 bp, Glycine max
  Clone ID: jC-gmle01810023f03d1
tcgtcggcggccgccctttttttttttttttttttttctattttcattcgaattcattttatttatatattaatattatattcaaatgaaataaaaagatattaaaagatactaattataagaatttgaaagtgaaattataaagttattaaatgattaatcaatttttttctacctgttcctgtagtaaaaagagttccatctgttcttgaatagcttccttcaaaaggacttctgcttccccagtgaatgtcttggtagaagatatgatttctttgaattgaggtttattcgtgtttaagtaagcacgtaactcaacaagaaatttccttacctgtccaatttctaatgaatcaagataaccattcgttccagtataaatagttattatctgttcttccacggtaagaggagctgattgggattgtttaagcaactcgcgcaatcgttgacctcttgctaattgattttgagtagctttatcgagatcagaagcgaattgggcaaaagcttctaattctgcgaatt

SEQ ID NO: 7088 - DNA, 471 bp, Glycine max
  Clone ID: jC-gmle01810023f05a1
gtgtgctatagcttataattaataatcccattattccatccactttgtcattttcaacagctgataataattttggttcagctagtttaaataataggtgaattacagttgcttataagcagataaatcaactaaaaggtattgtagtctaaatttacaaatttggtgaattgttgaatttttaatgtcagtcttaaaaattcggtttatcctttaagggaatcatgtgctatgttgataaaccatggcaggattggcaaagtgtataattatatcattgtacttcagattggatgttgaatgtatggaactagaagctatcattgttgtttggtgtatttacaattgtaattgttactctgaacacaaattctttgaaaaaagacatgcatgcatgcatgatttcctacattctttttttactatcctatgtgacattgattctgtccagaatgaaatacagacacacac

SEQ ID NO: 7089 - DNA, 461 bp, Glycine max
  Clone ID: jC-gmle01810023f05d1
ggttgaaaaccaacttggaggagtatgttcatattcataattccgagtgcttcaatacattaaacctgtttgacagttaagaccaaaccgtttacaaagcactcagcaatccctagtaacaaggctcccataagaaacagtaacctaaattacatcctgtgaagcttcatattaccagaacttcaacttcagaaggtgtgaagtcagttttacaatatacaaaaacttcatatagcacaacaaaaattccataatcatcaaatactataaaatatctcgtacaccaaaagatactcagatccatgtgcacggcagagggtaaaaaaaggcatccgacttaataagaaatttacattttgaaaagaaaaaaaatatgaacggcatctaatcttccacagagggaggagtatatgacattgctaagtagacagtgctgtaacatgcagacagcaactaatggg

SEQ ID NO: 7090 - DNA, 270 bp, Glycine max
  Clone ID: jC-gmle01810023f06a1
ggcattgctgctggacccaggggtgatcctaaaacaacagcgtgcttggacattgcggccaatggtatgttgaatggatctggcgactataaatccactggccagataaataaaatcactatcaccaatgacaggggcagattgacaaaggaagatattgataagatggttctcgaggcctgcaactacaggcctgaggacgaagagcactcgcacagagttcgggccagaagcgctgtggaaagctatgcctacaacatgaggaacacc

SEQ ID NO: 7091 - DNA, 404 bp, Glycine max
  Clone ID: jC-gmle01810023f06d1
aaaattattggactttttatttacaatgaaagctatgcataaaaggtttttattagacaagtcacggagacaatgttgaaaatccgacaaaaaatttgataaaacctacatataatacatgttagagtaacatatgaagctaaactgtgttcattaaatggagaatactctatcctcaaggaacttgtaaaaatgatgggtggggataacaatactaaagatgcatcatatatctggtttgtaatacgcgattgggcaattacaaaatatataaaattcagacacaaaaaacttgggcccgtaaaggatattaccatactgagcgcccatagcacaaacaagcggggtaaaggttctttgaccatttggcctaaacatgtgtgctttgatattgagatgaacgc

SEQ ID NO: 7092 - DNA, 529 bp, Glycine max
  Clone ID: jC-gmle01810023f07a1
ggaagacagtgatggtgtagttgttgcacagggtgagagtcctgatctgcagactcttttcagaaggttctggaaggtggcagctccttactggacttcagatgacaagggaccggcaaggttgcagcttgctggtgtttttgctctcactttggccaccactggaatcagtgttggcttcaatttcttggggagagacttcttcaattcacttgctaacaaggatcaagagcaattcacgaagcaactactttactacttgggtgcctttgctggaggaatcccgatttttgtgttgagagattatgcaagagaaactctttctttgagatggagatcttggatgacaagatattacattgatcgctatctgaagaatcaaactttctataaaattcagtcacaatcaatcattgataatccagaccaacgaattggtgatgatctaagttctttcactgggacatcccttgctttctccctgactctctttaatgctgctgtagacttaatctcatttagtaatatc

SEQ ID NO: 7093 - DNA, 439 bp, Glycine max
  unsure at all n locations
  Clone ID: jC-gmle01810023f07d1
cctttccttttttttttgattctaataaaatattatagcagcaagttgcaagggaaaatgtacagattgacatcttatatatcaaaattattgttcaatgcaattgaaccatgtgtgtctcatgagatggtaagcagcaaagcattgctagctcaaagatttgtaaattttaaagaggactcgggtctagtgggttcaatgggttcaatgcaccaatttagctgttcactgtcagaattaaatgtggatatgcttaagatcttgtcgtggtaagcacataaggatgaccgatggccaatgctgacatatgttatgttagctgctccaatcttttggtacaaatgtacctcattgacttcatcaagtgcacttgtagactcatccagtaaagccaattgaggctttgaaagcanaggacgagcaaatgcaaggcgttgct

SEQ ID NO: 7094 - DNA, 542 bp, Glycine max
  unsure at all n locations
  Clone ID: jC-gmle01810023f08a1
ggaagacagtgatggtgtagttgttgcacagggtgagagtcctgatctgcagactcttttcagaaggttctggaaggtggcagctccttactggacttcagatgacaagggaccggcaaggttgcagcttgctggtgtttttgctctcactttggccaccactggaatcagtgttggcttcaatttcttggggagagacttcttcaattcacttgctaacaaggatcaagagcaattcacgaagcaactactttactacttgggtgcctttgctggaggaatcccgatttttgtgttgagagattatgcaagagaaactctttctttgagatggagatcttggatgacaagatattacattgatcgctatctgaagaatcaaactttctataaaattcagtcacaatcaatcattgataatccagaccaacgaattgttgatgatctaagttctttcactgggacatccnttgctttctccctgactctctttaatgctgctgtagacttaatctcattaagaatatcttggatggatctat

SEQ ID NO: 7095 - DNA, 338 bp, Glycine max
  Clone ID: jC-gmle01810023f08d1
tttgtcgccctttttttttttttttgattctaataaaatattatagcagcaagttgcaagggaaaatgtacagattgacatcttatatatcaaaattattgttcaatgcaattgaaccatgtgtgtctcatgagatggtaagcagcaaagcattgctagctcaaagatttgtaaattttaaagaggactcgggtctagtgggttcaatgggttcaatgcaccaatttagctgttcactgtcagaattaaatgtggatatgcttaagatcttgtcgtggtaagcacataaggatgaccgatggccaatgctgacatatgttatgttagctgctccaatc

SEQ ID NO: 7096 - DNA, 570 bp, Glycine max
  unsure at all n locations
  Clone ID: jC-gmle01810023f09a1
tggaangggganagatgcagnnnnnggcgtccgatatcacatctattactcgcgcacgcacgcttacaattgctctggaggacattgatgcgtaactgcaattggtcctcgtgttggacttactttaaaggaacgtgtaagagtaggattgcttttatcccaaggaggcgacgctggatttgttgttgatactctttcgcatatatgcttggggtgctctctctcgagctcaacacgctgctcattattgcggatgcattgggaatggccttaaccccatttctcaatgaagctggatgaagggctgctagctatattgaagacaaagttgatgctgacaataaacagaatgctgctgagactgctaacttcactgttactgaaccttgccttatccttggatttggacaaatgggccatcttcaggaggagatagtgatgaagcatgatggcctaatgtggcatttgatcttgacccctcagtggtgaatgcagctagaaaaataggctttcctgtactctatggtgatggatcacgcacagacgttcctcactctgacggtgtctcta

SEQ ID NO: 7097 - DNA, 539 bp, Glycine max
  unsure at all n locations
  Clone ID: jC-gmle01810023f10a1
gggattaataccannnngggcgtaatacacatcaagactcccacgcacgctccataatctctgcagtacattgatgcattagggtcattgttcctcgtgttggacttactgtaaaggaaagtgtaagaatacgattgcttgcttcccaaggaggcaaacttgtatatgctgttatctctttaacaaataggcttggggtgctttctcatgagctcaacaagctgatcataattgtggttgtattgtcaatggcatgcaccccgtttctgaatgaagctggaataagggctgctagctctattgaagacaaatttgatgctgagaataaacagaatgcttctgagacggttaacttcaatgttagcgaacctgtcgttatcattggatatggacaaatgggccagcttcaagaggagatagtgatgaagtatgacggccttatgtggcatttgatcttgacccctcagtagtaaaggcagctagaaaaattggctttcctgtactctatggggatggatcacgcccagatgttcttcact

SEQ ID NO: 7098 - DNA, 235 bp, Glycine max
  unsure at all n locations
  Clone ID: jC-gmle01810023f11a1
nggggaannnnnnnnnnnnnttggggnttgctgtgtgctacgactgttgatgctcgcgtgcgcacgctcgtaatctggctcgtgcgctgcgaggggggacccgcttgtagcttcagtgtacattgactcttggggcctaaccttgaaaaatgtgtgcctataacagtctttgtcgcattcttgaatccatcgcaacacccagattgccctgaccagcaggggattggatttccac

SEQ ID NO: 7099 - DNA, 380 bp, Glycine max
  Clone ID: jC-gmle01810023f12a1
tgggtagtgaagctcgaggggagacgaaaattaagcagcgagaaacgttgacttttggtgtataacttttaaacttattggccactgcttcttcttcttcttcttaagaactcatggctactatgatattattctagtgcacaaaaggatgggagttccagagagagaccctgctgcacaagcgagtcaggctaccgggtgtaggtcttaccccacagatgatgagcgtttggttcaggtcctttgccgcaaggctgctggccatcatttatctgttgcagtcgttgctgacgatgacctgtacaagtatgatccatgggctctttcaggataggcagtgtttggagagaaggagtggttctttcttagaccaggagaca

SEQ ID NO: 7100 - DNA, 520 bp, Glycine max
  Clone ID: jC-gmle01810023g01a1
attttattcagaaagtacaagggcaatgctttgtttagtaagaattgaaacagatccagcagacagaacccagctgcgaatgacggttgcttcaggggacccaacactaacatttgagatgaaggagttcatcaaggaccaattagtcagcattcccgccatagcaacccgtgtaccaacacaaccagctccgacatctccaccactggcccaaccaggcagtgctcctgcagcattgacggatcctggggcaatgctggctgctcttttatgacaatatagaggtgttcattaattattacacatttgtaaacctgatctacacagcctaacccatgtctccctcaaagctagtgaggtgaatagacaaaatcatgatgcaagggctggcggaattaagagtgagcttgtttaccagctgagtgtttgagcagggatttctgggttggtgggcatttttgagattctttctgcacaaagtgattgtcctttaagcaagattttatatcagttggggcga

SEQ ID NO: 7101 - DNA, 553 bp, Glycine max
  Clone ID: jC-gmle01810023g02a1
ccacgacaacgtatcacaagctcccaatatagcaagcagcaaacatgatttcttccgtgtcctttccagcgtctcttcccgccgttaacttctccggcaacgccatggcttcgccgtcgtgccgcgtcaaatcccggccaatagtcgccttcgccaccgccactgccaccgctgaagctcgctcttcctggacggagcaaccgagaccttcctatctgaactcctcttgctcttcgctttacgatatcctcggcatccccgctggcgcctctaaccaagaaatcaaggccgcgtaccggcgactagccagagtctgccaccccgacgtggcggccatcgaccggaaaaattcgtccgctgacgaattcatgaagatccacgccgcgtactctactctttctgatcccgacaagcgcgctaactacgatcggagcctattccggcgacaacggccgttgtcgacggcggcggtgttctcccgttacacgcgtcggaactgggaaacggatcagtgctggtagtgagtcactgagtcgactcgctcgagtgaatg

SEQ ID NO: 7102 - DNA, 321 bp, Glycine max
  Clone ID: jC-gmle01810023g02d1
cgctccctgttcttctatcttaaacgccatatgagcggctatctctgtcgcttactattcttctacagcgttggtgatataattgacactgtttgattggtgtcatatacgattagattcttacttcgtccgcggttcgaggtcgatgtttaattccaggctcactcgacggcggccgccctttttcgttcttttttttttttttttttgttgatctttttttttttttatgttttttgatttgggcaatcagggaattatcactttcgaactttttggttcgtgtctaatcctcctacttctcgtctgaaacgaattatt

SEQ ID NO: 7103 - DNA, 495 bp, Glycine max
  Clone ID: jC-gmle01810023g03a1
gagaaaatgtctctaatcccaaatttcttcggtggcagaaggagcaacgttttcgatcctttttccctcgacgtctgggaccccttcaaggatttttctttcccaaacactctttcttcagcttcctttcctgaattttctcgggaaaattctgcattcgtgagcactcgtgtggattggaaggagaccccagaagcacacgtattcaaggctgatattccagggctgaagaaggaggaagtgaaggttcagattgaagatgataaggttcttcagataagcggagagaggaacgttgagaaggaagataggaataacacgtggcatcgcgtggagcgtagcagcggcaagttcatgaggaggttcagattgccggagaatgcaaaagtggataaagtgaaggcttctatggaaaatggggttctcactgtcactgttcccaaggaagaggttaagaaggctgatgtgaagaacattcaaatctctggttaagca

SEQ ID NO: 7104 - DNA, 495 bp, Glycine max
  Clone ID: jC-gmle01810023g03d1
tcaccaactgcaactattttatttctttatacaatcacacctcctacgatacattctcccaagcatatcactcacaatagaacatagaaaatcacacaatttctcaaacaacaaagataaacacaaaagaccaacaacaatttgcttttgcttaaccagagatttgaatgttcttcacatcagccttcttaacctcttccttgggaacagtgacagtgagaaccccattttccatagaagccttcactttatccactttggcattctccggcaatctgaacctcctcatgaacttgccgctgctacgctccacgcgatgccacgtgttattcctatcttccttctcaacgttcctctctccgcttatctgaagaaccttatcatcttcaatctgaaccttcacttcctccttcttcagccctggaatatcagccttgaatacgtgtgcttctggggtctccttccaatccacacgagtgctcacgaatgcagaat

SEQ ID NO: 7105 - DNA, 495 bp, Glycine max
  Clone ID: jC-gmle01810023g04a1
gtacacttctggatcaacgggcacgccaaagggtgtgctgatcaagcaccgcaatatcgttgcagccatcgctggtgtcgatgtcattgtcggcaagtacctcggacccggtgacgttctcctcgcctacctccccgctgcccacatcctcgaattcgtcttcgaaaacgcgaccctgttctggggtggcacgctcggctacggcaccatccgcaccctctccgatgcctccgtccgcaactgcgctggtgacattcgcgagctgaagccaactgtccttgttggtgtgccgcaggtgtgggagactgtgaagaagggcatcatgtccaaggtccaggctggcggcgccgtcaagagcaacatgttctggggcgcattcgcagccaagaacttcttgctaggctctggcctgcccggcagcggtatcctcgatgccattgtcttcaacaaggtcaaggaagccacgggcggtaagctgagaaatctgcttgagcg

SEQ ID NO: 7106 - DNA, 561 bp, Glycine max
  Clone ID: jC-gmle01810023g05a1
attatcatgtttatacaaatgcgaatgacatgttttctagagctaatgcatttgatcatacatctcgaaatggtccaaaggcttttgtaagtgagtatgctgtgactggaaaagatgctgggacaggaagcctcttggcagccctagctgaagctgggttccttattggactggaaaagaacagtgatgttatccaaatggccagctatgctccactttttgttaatgccaatgataggaggtggaacccagatgcaattgtattcaactcctttcagctctatggaactcctagctattgggtgcaagtatttttctcagagtcgagtggagcaacacttctaagtacatcacttcaagcaccttcctcaaattcacttgttgcatcagcaattacatttcaaaattctgtagataagaaaaattacatacgaataaaggttgtgaacttcggtaccactgccgtgaaccttataatctctcttgacggactagaaccaaactcattgcagttatctgggtcaacaaagactgtgcttacatctgcaaatgtaatggatg

SEQ ID NO: 7107 - DNA, 546 bp, Glycine max
  Clone ID: jC-gmle01810023g05d1
aaattaaaccacataaatgttatttacagcacaacattgtttaattacatggcaaagtagaccaaggtgtcaaacttattatatagttaattgcagctattgcatataacccattccttcccctttatttctttttctgcttttggtataattattcataacgttaaatagaagacctcgtggaagaatcgctccctgccatcttcagagtactggactgtttcaccaaatcaaatgatgtgaacgaacgtggtgggactgtaacattcatgtcctttccaacattctgaagtagactttggattggcaccaccttctttggctgtgagaaggagttctcatccattacatttgcagatgtaagcacagtctttgttgacccagataactgcaatgagtttggttctagtccgtcaagagagattttgaggttcacggcagtggtaccgaagttcacaacctttattcgtatgtaatttttcttatctacagaattttgaaatggaattgctgatgcaacaagtgaattttgaagaaagtgcttga

SEQ ID NO: 7108 - DNA, 464 bp, Glycine max
  Clone ID: jC-gmle01810023g06a1
cagtgaatacatgaaaataattatagaattggaaaggcagcatgagatatgtctcaaggatcttgaggacaagcaattaacaacaaggctgacattccaagagatttcagcacctgatgaattgataaacccagttacttcaaacaaatctgggactaaggttgaccagacttgtgatcaagcccagcattctaatgctccgaaagaccttgtgtctgatcatgttgtcgaaggagagggtttcaatgatatagtggaaatcatgacaaggactggaactgggattggattatctgaagctcctgatgccaatgcctctgtagttgtaccatgcagtagcacagttgaactgcaaactcctctggtcaaacatgcttatgctaatgagatggacatagtggcttcaaaagatggaccagtatctggaaataagtgctataatgttgctgaaaatgaatatgata

SEQ ID NO: 7109 - DNA, 479 bp, Glycine max
  Clone ID: jC-gmle01810023g06d1
gaagaaatataccttgctgcattcttgatgcaccagatactttaagatccatggatttagccctgaaagcctcagccaatatcttatttacaaaaactattatatttcgtgtatccaggttcttccttatattctgaaattcaacctcaatctccttacgtttaatgtcatacttcctgtaaagttcctcgagttccttctcaaaatcacatttcaactgccatttcttgttctcatagtctttcatattttggtctgtcagtatacgcagtctttctaattcattggttagtggatcaaggcacaaatgtcgaataatcctggaagctgattggctagcaagttgtacaggatggctattattctctgtgagagctgacaaatctcttgtgtctgaagactagccgctgaatccaccaggaagaagtgaatcaggaccatatctgaggctggatgtacaacttgacgagaacatgagc

SEQ ID NO: 7110 - DNA, 601 bp, Glycine max
  unsure at all n locations
  Clone ID: jC-gmle01810023g07a1
aaaagatggtgtatgcaaattctcagctgaaaatgttgccgttcaagtcattgactcggtcaatatcaccttgggtgctgagaatgaattaaaacatgcagttgcattgttcggccggttagtgtggcctttcaggtggtgaatgggttccatttctacgagaatggagtttacactagtgacatttgcggtagcacttcccaggatgtgaaccatgccgtccttgctgtggggtatggagttgaaaatggcgtcccatattggctcataaaaaattcatggggagaaagttggggtgagaatggctacttcaaaatggaattggggaagaacatgtgtggtgttgcaacttgtgcgtcttatccagttgtggcataaattgcataagaatatggtccctggtgactaccaccttgtcatgcttcagagtttaaagataagtgtcattgtataatgaanattgctcctagttgggttggtatgatggtattaaataagttagaaagtgctgtaaatcacgtaagaatatcatgggctgaattgtgtgtatcacagacatanatacgatcatatattgatagtcatagtacatattggattg

SEQ ID NO: 7111 - DNA, 469 bp, Glycine max
  Clone ID: jC-gmle01810023g07d1
atcttaattcttataactgataattaaagcggggcgcatcaatacaatacaatacaatatgtaactatgaactatcaatatatgatcgttatttatgtctgtgatacacacaattcaggccatgatattcttacgtgatttacagcaacttctaacttatttaatacatcataccaacccaactaggagcaattttcattatacaatgacacttatctttaaactctgaagcatgacaaggtggtagtcaccagggaccatattcttatgcaatttatgccacaactggataagacgcacaagttgcaacaccacacatgttcttccccaattccattttgaagtagccattctcaccccaactttctccccatgaattttttatgagccaatatgggacgccattttcaactccataccccacatgaaggacggcatggttcacatcctgggaagtgctaccgcaaat

SEQ ID NO: 7112 - DNA, 117 bp, Glycine max
  Clone ID: jC-gmle01810023g08a1
atgagacggtgtgtgcacattatcagattgacatggcggcgttcaggtcaactactggggctgtatgcccatgtgtgctgagaatgaacagatacaagcaggtgcattgatcggcca

SEQ ID NO: 7113 - DNA, 304 bp, Glycine max
  Clone ID: jC-gmle01810023g09a1
atagctactggcagtgatacatatagctcttgcaacattatggtgaatgaagattactgcgctgtgccttataacatatcaggctagaagggctgctacgtcgactcgtgatctcgtgacaccttacatatgggtcgcagcggaggatgaaggcatacactctccaactatgatgaggaagatgaaacgttcgagtagtgatacaaccatttgttaacacgcgggtgtagtgaacacataacaatttctcgcacagtactagccggatgcatagaggtagatatctggggcgcttaatgaggga

SEQ ID NO: 7114 - DNA, 232 bp, Glycine max
  Clone ID: jC-gmle01810023g10a1
ctgattgcctccgaaactacttaccttagctcaacaccatattgtgctgtacagagttcttcacctggctcacgaaacctcaacgctatagggagttactggagctgctcgtcagaaacccattcacagaggtgacaccgtgctggaacatactattctcttaccaagactgaagaaccatagggttctctccctatgggagactactattggttcgcgcccaaccgggact

SEQ ID NO: 7115 - DNA, 461 bp, Glycine max
  Clone ID: jC-gmle01810023g11a1
gtctagcttatagatatggtagagggataaatttgactttgttgcttgcatgggagcattttttggggttgtctttgcctcggttgagataggacttataattgcagactctatctcctatgcggagattctattacaggtcgcagggccacgaactgcacttttggggaaaatccttatgactactgtctacacactcatccaacagttccctgaagccacaagggtgcctggagtacctattataagagttcacactctgctatactgatacaactccaactatgttcaagaaaggatattcacacagctggtgtatgaggaacacctagtgaacggttactaccatacaagaatccaatttgtgatgggcgagatgtcaatcgttaccgacatcgataccagcggtatacataccctcgaagagttatctagaagtcttcagaagagaaacgttcagc

SEQ ID NO: 7116 - DNA, 121 bp, Glycine max
  Clone ID: jC-gmle01810023g12a1
atgatgcagctaattaagactggtcttactacttaattcgcgtgtgtaaatcaatgtagcttaatcggacatgtatccaagagggggaaagattggagataatacaaaaacaaaaacaacc

SEQ ID NO: 7117 - DNA, 607 bp, Glycine max
  unsure at all n locations
  Clone ID: jC-gmle01810023h01a1
ccacgacaacgtatcacaagctcccaatatagcaagcagcaaacatgatttcttccgtgtcctttccagcgtctcttcccgccgttaacttctccggcaacgccatggcttcgccgtcgtgccgcgtcaaatcccggccaatagtcgccttcgccaccgccactgccaccgctgaagctcgctcttcctggacggagcaaccgagaccttcctatctgaactcctcttgctcttcgctttacgatatcctcggcatccccgctggcgcctctaaccaagaaatcaaggccgcgtaccggcgactagccagagtctgccaccccgacgtggcggccatcgaccggaaaaattcgtccgctgacgaattcatgaagatccacgccgcgtactctactctttctgatcccgacaagcgcgctaactacgatcggagcctattccggcgacaacggccgttgtcgacggcggcggtgttctccggttacacgcgtcggaactgggaaacggatcagtgctggtagtgagtcactgagtcgactcgctcgagtgaatgagagaagaacgcgttatngaagcgcctttctttgcatataagtaataaatcact

SEQ ID NO: 7118 - DNA, 504 bp, Glycine max
  unsure at all n locations
  Clone ID: jC-gmle01810023h02a1
caacgaactactccgaagccgctcacgttatccacacaacaacactccttaaaccctaaccaaccatggcttcttccaccttcaccgcaatgtccgcttgcaagctttcctcctccgccgccatctcctccttccccacccaccgncgcaccaacgccgtccttctgtccagacgcagccgcgccgccagggtctccgccatggccaaggagttgcacttcaacaaagacggcaccgcaattaggaagctccagagcggtgtgaacaagctcgcggatctggttggggtcacgcttggtcccaagggaaggaatgttgttctcgaaagcaagtacggctcgccgaaaatcgttaacgacggtgtcaccgtcgccaaagaggttgagttggaggatccggttgagaatattggcgccaagttggtgagacaagcagctgccaagacaaacgacttggctggtgatggaaccacgacttcggttgttctagctcaaggtcttattg

SEQ ID NO: 7119 - DNA, 573 bp, Glycine max
  Clone ID: jC-gmle01810023h02d1
tgcaaaaaaattattattaacttaaaaaaaataagggaggagaggatgcatcactatctagttcaccacacttcaatacatttcgactcttgctatatggctataccaaattttgcatttcatccgatgagaaaaaaaatactcttctcactgaagcagccgttgctctagataccatatcctgaattgtccatggggtttccagcaggtacaggctcaggttcctttatctcgacaaccacacaatctgacattaagaaggttttggctacagaggctgcatgttccaggcaacatctgaccacctttgttggatcaatgatcccagcagacatcaaatcttcatattttccggtggcagcattatatccatatcttggattgtcgctggacaataccttctcactgacaacactaccattgacaccagcgtttttggcaattaaatttcaaagggtaactaagagctctcttcacaatatcagctccaacttttacttcatcattatcaaagctatccttgattagtgccacctttgatgcaagtctcagatgagtgcaaccatcacccac

SEQ ID NO: 7120 - DNA, 546 bp, Glycine max
  unsure at all n locations
  Clone ID: jC-gmle01810023h03a1
ggctggttttgaagcctatgaaaagaaggcaaagaagtcttgcatggattatggtttccatatggctattaccaaatgggatgaaactgtgtcaagagaaatggagctcatggtcaaggagaaaggtcatgatttatttccttgataatttggctgattatgtggcaataaccctttggttttgagtttatgtggaatttatttcagctattgcatctatgttttgtaattgcaggcatcaactcttttaagtttttcatggcatacaaaggagctcttatgatcaatgatgagcttcttctggaaggatttaaaaagtgcaagtctcttggtgccttagctatggtccatgcagaaaatggagatgctgtgtacgaaggtcaggaaaaaatgatagaacttggaataactggtcctgagggacatgctctttcacggcctgcagtgttggaaggagaggcaactgcccgtgctattcgtttagctgattntgtgaacactcctttatatgtggttcatgntatgagcattgatgcaatggaagaa

SEQ ID NO: 7121 - DNA, 514 bp, Glycine max
  Clone ID: jC-gmle01810023h03d1
cttctgaatgtgctacatactgtagtgtacagtatcttattaaagctactgtgacttctctaacagatttagactgtaactaatgaacattacatgagtggaaaaggtaacacgaagcatacctattatctattgtaatatacatatgtgtgtgtatatatatatatatactattttatttaagcaaaaaactggattaacacacatctttgtctcccccgctccttaaaatgttgaactttgaccaaaggatatcagaaacttttaagtgttagatttggctcgctttactggggcttggagggaatttagataaaaggcatcctttttgtcaattccgttaaacagataactaaagggtggcatttttatatatctgccagtaccaggagcaaccttcagttcattattttcccaaacaactcttcctcctgcaatagtcacttcgaattttccctttccactccttccctcatagacatttgtgtccagtttggagtggtgggactttgca

SEQ ID NO: 7122 - DNA, 497 bp, Glycine max
  Clone ID: jC-gmle01810023h04a1
caccagccctcaattggagggacagtttcatgtgttacctggctcctaatcctcccaaacctgaagacttgccagtagtatgcagggatatacctttggaatatgggacatatgtaatgaagcttggaattgctctatttgaattattatcagaagctcttgggctgcacccagaccatttaaaagacttgggttgtgctgagggacttatttcactttgccattactaccctgcatgccctgaaccagatttaactttgggaaccacaaagcattctgataattgtttcctcacagtgcttctacaggatcatattggtggcctgcaggttctttaccagaacatgtggattgatataaccccagaacctggggctcttgttgttaacattggtgatcttctacagcttataacaaatgacagattcaagagcgtagaacatagagtacaggcaaatctcataggtccaagaatatctgttgcatgctttttcagc

SEQ ID NO: 7123 - DNA, 472 bp, Glycine max
  Clone ID: jC-gmle01810023h05a1
agctcacgtatggtgtttttggcttaggtaaccggcaatatgaacattttaataagataggtaaaatagttgatgaagaacttagtgagcaaggtgcaaagcgtcttgttccattgggactaggtgatgacgatcaatccattgaggatgattttgttgcttggaaggaatctctatggtctgagttggatcagttgctccgggatgaggatgatgtaaatactgtatctactccttataaggctgctattcctgaatatcgagtggttattcatgattccaccgtcacatcttgcaatgataatcacttaaatgtggcaaatggtaatgctgtgtttgatattcaccatccttgcagggttaatattgccgctcaaagagaacttcacaaacctgagtctgatcgttcttgcatacatttggagtttgacatatccgggactggcataatatatgaaactggtgaccatgt

SEQ ID NO: 7124 - DNA, 386 bp, Glycine max
  Clone ID: jC-gmle01810023h05d1
catcaactagaagaattatttcattaatcgagtgcttattcattgccaattcctacaatttgatacatggccattggaaataaactagtgcgacctatacgtattaaatcatctatgaagctatctatcagtccccctaaaaataatcctagttcaaatatcatgacaagagagaatatcaaggcggcgaaaaatataagaaaaccacacaaatgtccacgaaaacgatttgctttctcaaggaaatttcagcctccatcattggtgtcccaaaactccgtgatagaagagtatcaaatatccttcaaccaatctggaacttaacagaccaaatagcatggaaggcacaacccagaaagatgaataatcagaatatttaccagaca

SEQ ID NO: 7125 - DNA, 554 bp, Glycine max
  Clone ID: jC-gmle01810023h06a1
ctcttattgttttcttaaaatttcttccttgccactgccagtgtgtcaccaccatggccaccgtcacaacccaagcctccgccgcgattttccggccatgtgcctcgaaatcgaggtttctgaccggctcttccggtaaactcaaccgggaagtgactatgaggccaatggggtgccctccttctgcctctttcaaggttgaagccaagaagggagagtggttacctggcttggcctccccaacttacctcaatggcactcttcctggtgacaatggatttgaccctctgggactagctgaggacccagagaacttgaggtggtacgttcaagccgagcttgtgaatggacgttgggccatgtcgggtgttgcaggaatgctacttcctgaggttttcaccaagattggaatcatcaatgcccctcaatggtatgatgctgggaaatcggagtactttgcttcatcgtcgaccctctttgtgatcgagttcatcttgttccactacgtcgagatcctgagatggcaggacatcaagaacccctgctctgtcaac

SEQ ID NO: 7126 - DNA, 299 bp, Glycine max
  Clone ID: jC-gmle01810023h06d1
aacaatggaaaaccatatacattccttgggacgtaaaaattaggggttctaaacaattatgcccaaataacttttaaaagtcttccatttcgggttaccccatagggacccagggttatcctttttattggaaaaaaactttgtagcctcaaattgattggagaaaggaactgggccacgggtcatatagggggtcgaatagggggtaaaatgggcctttgcctgtgacgcagtgtagaactatgaatcccaagattgccaacagagccaatctcccattggcaaggacctttttcatg

SEQ ID NO: 7127 - DNA, 510 bp, Glycine max
  unsure at all n locations
  Clone ID: jC-gmle01810023h07a1
ctgccactttctgagtacaatacaacactgccatggctgcctcagtctccactattggagctgtcaacagagctccactgagcttgaacagctctgaagctggagattcggttcccagttcagccttctttggcacaagcttgaagaaggttactgcctcaagggtccctaacgtcaagatttcttctggaagtttcaaaatcgttgcggcggagaaagagattgatgagcaacaacagacaaacaaggacagatggaaaggtcttgcctatgatatttcagatgaccagcaagacatcacaagaggaaagggtatggttgattccctcttccaagctccacaggagactggaactcactatgcagtcatgagctcttttgagtaccttagcactggacttaaacagtataacttggataacaacatggacggtttttacattgctcctgcttttatggacaagcttgtngttcacatcaccaagaacttcatgaccctgcctaacatca

SEQ ID NO: 7128 - DNA, 303 bp, Glycine max
  Clone ID: jC-gmle01810023h07d1
aggaaaacaccttttattatttgaagccccaaagttcagcagaaccccaatgaaccccaggaaattttaattgattatctcaagggttttttttagtagggagacaatggaactcaaaattttaaagggtaacaatccaatttgaacaagataaattatttgattatttcaaggcatagcttcttttcaaggggaaaatgcttagggtctcagggggggtataagcaggttccattatcactttttgcagttgggtccaagtttgaggcatttggatcagtacaacctttaggaacgggaatt

SEQ ID NO: 7129 - DNA, 562 bp, Glycine max
  unsure at all n locations
  Clone ID: jC-gmle01810023h08a1
ttccaaannntcggattctgctntcacgtgctatgctctcgcatgcacgcttgcgatagctctggagacgggatggggtctgcaaattctcacctgataatgttgccgttcaagtcattgactcggtcaatagtcaccttgggtgctgagaatgaattacaacatgcagttgctttgttcggccggttagtgtggcctttcacgtggcgagtgggcttcatttctacgagaggtgggggtacactagtgacatttgcggttgcactgcccaggatgtgaaccatgccgtacttgctgaggggtatggagatgaaaacggcgtcccatattcgctcataaaaaattcatggggagaaaggtggggtgagaatggctacttcaaaatggacttggggaagaacatgtgtggtgttgcaacttgtgcgtcttatccacctgtggcataaattgcataagaatatggtccctggtgactaccaccttgtcatgcttgagagtttgaagagtagtgtcattgtataatgaaaattgctcctagttgggttggtgtgatgtattaaat

SEQ ID NO: 7130 - DNA, 315 bp, Glycine max
  Clone ID: jC-gmle01810023h11a1
gatgctctagcagattagaggaggcatggacattatgtgggctagcgtacattacttatccacagtgcgatctctcaaaaccaatgggggtttattcgaagaacaacaatggatcctattcaacggctgtgctctactagtgaccacagttcaactctactgctactactgcccgaactctgctgcagtggacgaatcaaccaaacagaggagtatctatgactctcatccgtgttgataaaagagtcttctggtctaaatatggagctaactactttgcagcacaacatgcgggacagaagcataatgagtact

SEQ ID NO: 7131 - DNA, 149 bp, Glycine max
  Clone ID: jC-gmle01810023h12a1
cagattgacagaagcaaaaacatcatgattgctggcctacatgagacagcgacagggggtttgcctacccccatgccgttatcgttagaagacaccaatggatcctgttccacagatgggctctgacagtaacaactggcaaattcttc

SEQ ID NO: 7132 - DNA, 130 bp, Glycine max
  Clone ID: jC-gmle01810024a01a1
gatgggaaaggagggatgaagtgaatcgcgagggcgcgagataagcgaggccgcgaacggcgtaaactatgggctataatcggtaacatgaacagcgctgttttcatgataaaatggtgcagagactatg

SEQ ID NO: 7133 - DNA, 445 bp, Glycine max
  Clone ID: jC-gmle01810024a02a1
gtgacttgagaatggccttgccagtggtcgtcgacgcatagtaccttaaagaggtcgacacggctctgccgcgatctccgcgcactcatcgctaacaggaactgcgctcctctcatgcttcgattggtctgacacgatgccggaacttactatgctaagaccaagactggtggacctaacggttctatccgtaacgaggaagagtattctcacggcgccaacaatggcttgaagaatgctattgatttctgtgaggaagtgaatgaaaaacatcctaaaattacatatgcagatctctaccagctcgcgggtgttgttgcagttgaggataccgggggtcccacaatggataacgctcctggtcgaaggaattcaaaaatctctactaatgaagggcggctacctgatgctaaaaaaggtgtttcacatctccatgatatctttt

SEQ ID NO: 7134 - DNA, 521 bp, Glycine max
  unsure at all n locations
  Clone ID: jC-gmle01810024a03a1
cactcgtgcgttaggagtcattgtacctggtgttgtacttactgtaaaggaaagtgtcagaataggattgcttgtatcccaaggatgcgagtttggatatgttgttttctctttagcaaatacgcttggggtgcttcctcttgagctcaacaagctgctcataattgtggttgtattgtcaatggcattaaccccatttctgaatgaagctggaagaagggctgctagctttattgaagacaaatttgatgctgagaataaacagaatgcttctgagaccgttaacttcaatgttagtgaacctgctgttatccttggatttggacaaatgggccagcttcaggaggagatagtgatgaagtatgatggccttatgtggcatttgatcttgacccctcagtagtaaaggcagctagaaaaataggctttcctgtactctatggngatggatcacgcccagatgttcttcactctgccggtgtctctattccaagagctttcatgattatgtacactgggaa

SEQ ID NO: 7135 - DNA, 121 bp, Glycine max
  Clone ID: jC-gmle01810024a04a1
atatacgagattgatacagttggtacttactatttaatttgcctgtgtgaatcaatgctacttaaatgggcatgtatacaagagggggagaaattgaagattataaaaacacaaatatagc

SEQ ID NO: 7136 - DNA, 322 bp, Glycine max
  unsure at all n locations
  Clone ID: jC-gmle01810024a05a1
agganaannnnnnnnnnnnnttcnnnttgctaatcgctctgactgttgatgtcacgcgatgcatcacgctacgtaatgctggcgtcgttgaagaatgcgtagcggggagaccgcagatttctagctgcagagatacagtaaactcttggggcctaactttgaaacttatgtgcctataacttcttcttctaccttcttaagtatcatcggcatctccgatatcaccctgacgagcaaaggatgcgagttccacagagcgaccctaccgcgcggtggagcatggcttctgagtctacgacataccacagagcacatgatcttt

SEQ ID NO: 7137 - DNA, 558 bp, Glycine max
  unsure at all n locations
  Clone ID: jC-gmle01810024a06a1
ctcacaagtcacttcgaggaccacgtggagctatgatattctacagaaaaggggttaaagaaattaacaaacaaggaaaagaggtattgtatgactacgaagacaaaatcaaccaagctgtgttccctggactgcaaggtggtcctcacaaccacactattactggtttagctgatgcgttgaagcaggccactactcccgaatatagagcatatcaagagcaagttctcagcaacagctttaaatttgcacaggctctgagtgagagaagctatgagcttgtctctggtggaaccgagaatcacctggttttggtgaatctgaagaataagggtattgatggctccagagttgacaaggtgttggaagcagttcatattgcagctaataaaaacactgttcctggagatgtgtctgccatggttcctggtggcatcacgatgggaacccctgctcttacttctagaggatntgttgaagaggattttgtcaaggtagcagagtattttgatgcagcagtgaagatagctgtgaagattaatggagagagcaaaggaa

SEQ ID NO: 7138 - DNA, 475 bp, Glycine max
  Clone ID: jC-gmle01810024a06d1
attacatatgcatctatacatttcaacatatcgatcaagattttctggattcttacatataaaggcttttgacattgtttttaaaatatgttgacgtcctctaccatggatcaggaaaactgatcttgctgaattgcttgccagtaagaccatgggatgacctaatggaaaattttcttttctcaattcttgtgcttcatggttgctttatcaaaaccaatggttggaaattgttttgcatactcctcaacatcaaggcggagctttgctatctccgattgaaaggtagaagatgactcaattgtggccaagaagtccttcagctttgttcctttgctctctcccttaatcttcacagctatcttcactgctgcatcaaaaaactctgctaccttgacaaaatccttctcaacatatcctctagaagtaagagcaggggttcccatcctgatgccaccaggaaccatggcagaca

SEQ ID NO: 7139 - DNA, 544 bp, Glycine max
  unsure at all n locations
  Clone ID: jC-gmle01810024a07a1
tgcttgccaaagctattgctaaggagtctggagcagttttcattaatgtcaggatatcaaacctgatgagcaagtggtttggagatgcccagaaactcgtgactgccatatttagcctagctcataagctccagcctgccatcatattcattgatgaagttgacagctttttgggtcagcgtcgtacaacagatcatgaggctttgttaaacatgaaaactgaattcatggctttatgggatggctttactactgatcagaatgctcaagttatggtccttgctgcaactaatcgtccttcagaacttgatgaagcaatacttcgacgtcttcctcaagcatttgaaattggtattccagaccaaagagagagggctgacatattgaaggttatcttgaagggtgagagggttgaagaaaacattgactttgaccatatagcttacttatgtgaaggttacactggttcggatctatntgacctctgcaagaaaagctgcctatttccaattagagaactgctggacgaagagaagaaagggag

SEQ ID NO: 7140 - DNA, 521 bp, Glycine max
  Clone ID: jC-gmle01810024a07d1
aaaatatgatgcttcataacaaatgttgtagcattagtatacaagtgtataactatgagatcggtgcctttacaagacggactaagctagacgactgtaaaagaatggtctaaagaaactatgaaagatagcattttaaagatctttggcatctggctggcggttaatcatgtgagaaaccacaaacttgagttcatttattgcagcttgaacctgataatcatcttgttccccctgccctgaccatcttagagcatctgcactcaatccattgtattcaaatgcagcaacggtagtcttccgggaagtggcaaggaccttctccaagtctaactgggacaatggtctgggagcagaaaaacttctccctttcttctcttcgtccagcagttctctaattggaaaataggcagctttcttgcagaggtcaaatagatccgaaccagtgtaaccttcacataagtaagctatatggtcaaagtcaatgttttcttcaaccctctcacccttcaagataacct

SEQ ID NO: 7141 - DNA, 541 bp, Glycine max
  unsure at all n locations
  Clone ID: jC-gmle01810024a08a1
taattggagagttgctagttcatccatgtgatcaacctcgcacggccatgttgatgttaccaatgcaatgtgcttcgctgttcatctctcccatcacgattgacaaaccctaaccctaaccctaatcacccgaccagcatggtgaagaataaggtccccgattggctcaacagctctaataggtccctcatcatcgccgtcgtcctctccctcctccgccgtcgccagccccttcgaacagccaccgcgtcctccgtctcccgccgtcgtgaccccctttgaaccaccgcctccgcgtcctccgtcgcctccctccgtccacgatcctccgccgacgcagagaatcgatgattcgccgcgggaagatcacggcgacggctttcgttccgcgcacgatgtgtctcgccaggcgcaattgctggccgagttgtcgaagaaggtggtggatatgagcgagttgcggagcctcgcgtgtcaaggtattcctgatgctgctgggatacgttctactgtgtggaagcctntgcttggatatcttcca

SEQ ID NO: 7142 - DNA, 403 bp, Glycine max
  Clone ID: jC-gmle01810024a08d1
gtacaacccaggggggaaacaataatgggccccccccccacaaaaaaaaaacccccaaaaaaaaaagaaaaaaaagaaaaaaaaccccggaacagggagggcaccaccgaaaaagagaaacccggggcactaaatagaaaaaaaaacaaaaaaaagaaaagaaaaaaccagaaaaaagggggggggacaaaaaaagggggggcaggaaaaaaaaaaaaaaaaaatggggggggggagaaaaaattccccaaccggggaaaaaaaaggggaaaccccccggggggggggctcaaaaaaaaaaaccctatggggacggcccccccaaaaaaaaacttccgggggaacctcgggcgattataaaaaaaagcgcccacagggagggggcgccaaaaaataaaccccc

SEQ ID NO: 7143 - DNA, 537 bp, Glycine max
  Clone ID: jC-gmle01810024a09a1
ttcctctccttcttttctcttctttcttcttcttccatctctttttttctgcttaaggtctacaaaagttctcttcttcttctcctcctattgaactttggtcatcacacgagaaaacccacgtctggatcttctggtgtaaaggccattagaagccttttagaaattttcaaagtgaggttggtgaatactgttgaagggggtgaaattgggagcccagattgctacttcattagaaaggtcatagctcgaaccctctttttctggagatttacctgggaaaagatgatgatgtttgaagatatgggattctgtggcgatttggatatgatatgtgggtctcttggggatggcgatattgctgtgagacaaactgaaccggatcctgtagctgaggatgactacagtgatgaagaaattgatgtggatgaactcgagatgaggatgtagacggacaaaatgcgtgtcaagcgattgcaagaactaaccaagttcaaggaagggactgatgcagcatagcttaggcagtcccaagag

SEQ ID NO: 7144 - DNA, 476 bp, Glycine max
  Clone ID: jC-gmle01810024a09d1
aagagaataaaaatcttttatttatatcacagtcgtacatatgatataagtaacatagggctaacacataaagagacacataaaaagggttacattatgggaacacccatgatttattaacccataatataatgccaccagaccagaccagaccttccaaagcataaaatatctaagacctaaactattacatgggaagaaaaatgcattaactgctttttgagtcaagggactttcacatgaccctctttaatgacacaataaaagtccgtgatacacgaatttccctcttcgcattttcactggtaccaaattgaaacctcttgctgtttttgaagagaatgcattcctactccttgtatatcctacttgaaatcaaaggatgacaaatcacaaggggaattaaacatcaaatggatattatcgctgttgcggttggtatcaaaaggagtgttcatgttcatgttcatgtacat

SEQ ID NO: 7145 - DNA, 508 bp, Glycine max
  Clone ID: jC-gmle01810024a10a1
ttcctctccttcttttctcttctttcttcttcttccatctctttatttctgcttaaggtctacaaaagttctcttcttcttctcctcctattgaactttggtcatcacacgagaaaacccacgtctggatcttctggtgtaaaggccattagaagccttttagaaattttcaaattgaagttgtgtatagtgtcgaagggggtgaaatttggagcccagtttgttacttcatttgaaaggtcatagtttgaaccctctttttctggagatttacctgggaaaagatgatgatgtttgaagatatgggattctgtggcgatttggatatgttatgtggttctcttggggatggggatattgctgtgagacaaactgaaccggatcctgtagttgaggatgactacagtgatgaagaaattgatgtggatgaactcgagaagaggatgtggagggacaaaatgcgtctcaagcgattgaaagaacaaccaagttcaagggagggactgat

SEQ ID NO: 7146 - DNA, 476 bp, Glycine max
  Clone ID: jC-gmle01810024a10d1
aagagaataaaaatcttttatttatatcacagtcgtacatatgatataagtaacatagggctaacacataaagagacacataaaaagggttacattatgggaacacccatgatttattaacccataatataatgccaccagaccagaccagacctcccaaagcataaaatatctaagacctaaactattacatgggaagaaaaatgcattaactgctttttgagtcaagggactttcacatgaccctctttaatgacacaataaaagtccgtgatacacgagtttccctcttcgcattttcactggtaccaaattgaaacctcttgctgtttttgaagagaatccattcctactccttgtatatcctccttgaaatcaaaggatgacaaatcacaaggggaattaaacatcaaatggatattattgttgttgtggttggtatcaaaaggagtgttcatgttcatgttcatgttcat

SEQ ID NO: 7147 - DNA, 501 bp, Glycine max
  Clone ID: jC-gmle01810024a11a1
gaagagtgggtgttggtggttgtcctcctccctcctcatgggtatggcaaccctctcctcctctcttcctcttttccatcgctaccctaaccctaaccctaatccttcgctctttcgcccctccctttccctctccttctccttctctcgcactaaaccccgtcgtgccccctttctcgttctcgcttcctcttcccacgatttcacctccaactccaagaaatcagtgctcactgagttgatacaagagatagaacctctggatgttagccacatccagaaagatgttccgccaactacaacagatgccatgaaaaggactatatctggtatgctgggcttgcttccatctgatcagtttcacgttgtcattgaggccttgtgggaacccctttccaagttactaatttcttcaatgatgactgggtatacgctgcacaatgttgaatatagactttgtcttgagaaaaaccttgatatgtttgaaggagatatagagaa

SEQ ID NO: 7148 - DNA, 529 bp, Glycine max
  Clone ID: jC-gmle01810024a11d1
cacctaactaaattgttttatttaaatagaactggtactgcagagttcgtcacaacatttccatattctattaagatattatcacccagccaaaacaaatggctacatgccaaccatcttcgatcctaccgacgctctaacactggaagagaccgagaattggtacatggcaggaatgcaatattcttcagtaagcaaagataactccttagcagaagtgattggtacttgagtctgtatcgcaaaaatcaggttgaaacaacacgtctatatacatattgaaccaccgaactttgatcttcattctcaggatcacttgccaagcaaagcaaatctgtcaaatccaatcgacactcaaggcctctaagatagcgtcccaaaagcatgcacattcaagtaatcggttgaatgccagaagcatcattctcaggatcacttgtcaaggaaagcaaatctgtcaaatccaatcgacactcaaggcctcaaaagagcaggcgagcaagatagtcccgagttaatgaaacaacag

SEQ ID NO: 7149 - DNA, 289 bp, Glycine max
  Clone ID: jC-gmle01810024a12a1
ctgaaatggaaggctttaaacttgctcagggctgctcccaagataacatgctatcagatgcaattaacacccatcgtatactgtccagaacagatgagaagcggggagtactgaaaagaccgacttgtaatgacagaacggaaagaataccacttttgaggagggatatcatactgagcgaggaatagttgcctgaaagatatggacgccgatgttagggcaagggattcttgacctcgcgaccagctatgcgagtgatcggtgctgatgcatttggcttggagtatgt

SEQ ID NO: 7150 - DNA, 550 bp, Glycine max
  unsure at all n locations
  Clone ID: jC-gmle01810024a12d1
agagagaactctggcataaaaacccaattgtaataatataatgataacaggaattacaaactttaactataatgatcagactcgttgcagtcacatcacagcacctgtaactgcaagtccctctggacatccgataaaattggtaatgcacaaattagcaaccttggattaagcttccaatgtaataaactatctaattatccccataacaccattttatttagtgttacaacaaatatgtaccaactagaagacaaatgcaaaaaatactaatagttaaacaagcaccttctaaccgatactgctaactcactaaccctaccaggatgaaggacggcaacacataccccaagacaaaagcaaccgaaacaatcacaaaaatagctggtcgagaggtcaagaatcccctgcccaaacatcgacgcccatatctttcaggcaactcttccacgctcattataatatccctcttcaaaagtggtattctttccgtttngcattagaagttgacttttagtactcccaactctcatctgtctcgacaggatcc

SEQ ID NO: 7151 - DNA, 314 bp, Glycine max
  Clone ID: jC-gmle01810024b01a1
gctctgaatgcggctcgagggaacagctagcagtagaaacaactttacaagtcaagttaattaagaagatcattaatggcttttcttgcaaccttagctgctgatcaaccagctgcgctcaatggccttgctggaactaccctacttggaactaacgctctctatcaagccctctggccacactgacaaatacaaaaactgtatgagtggtgcacgggtagcaaagaatgggacaagagtgtgacttgatttgaggatctgtgcaacactactgtgcagtgagacttgtattgatcaaatgcacctttacccta

SEQ ID NO: 7152 - DNA, 447 bp, Glycine max
  Clone ID: jC-gmle01810024b03a1
attgggactgggactaataacaatagctctacaccatttggtggtggacagagactatgccctggctatagaactctcaaggctagagctctctattttccttcatcatcttgttacaacttacagatgggttgctgaggaggatgaaattatttactttccaacagtgaagatgaagaggaaactcccaattagtgtaacaaccattaattaacacctgattggattgaagaatcaacaaattcttgtacagtactagtagtatagatagatgtagatatttggttcactctacatgggaaaaaatttaaggggataagaggggtgtgtgtattctttcttttcggtagctataccgtcacatctattttcagaggagaaaggtgcctttgggccctactattatactgagaaattgactcgaatgcaattattgatgctaactct

SEQ ID NO: 7153 - DNA, 327 bp, Glycine max
  Clone ID: jC-gmle01810024b04a1
tagcgaaaaatgacaatcaagaacacattcattccccttctatatcttacatcgatagtcggttcgccctgccgcatgcctttcacatttaagaaaagtctcgaatcttggttcatagatgggcggaacactaagcaatccgaaattctctcgactgatattaaagaaaagagtcttctaagaaaatgcatgcaatctgaagaactgatattcttagatgacacgttaaaggaatgtccggaaacacatctgcagaacctgcgtactggaatctataaaaacaccttccagttgatctatacgcacaactgctatcgcatgaacacg

SEQ ID NO: 7154 - DNA, 346 bp, Glycine max
  unsure at all n locations
  Clone ID: jC-gmle01810024b05a1
nggggaanannnnnnnnntccccatctcaattccagagctattagcaccgcatcctcacctacggaattctgctcgtgtaggcaggcatacatgatattgaagagaccacgtgatgctcttgtttcatgcaagggagctttttatgacattaacacacaatggggagaggattggacttactactgaaacaaatataaccggcgtgcagattctagactgctaggcgaccctaacaaccacactattactgaaccagctggtgcgtccatgctccccactactcccgcatttacagcatgtcaagagcatgttctcagcatcagctttaaatatgcacaggctctg

SEQ ID NO: 7155 - DNA, 547 bp, Glycine max
  Clone ID: jC-gmle01810024b06a1
ccggaattgaatagaaatagaatcgtcgattttctctttctctgactctagggtttcattattttcttctgtagatccatctatctagcttcggagctgcaaatggacgtcgcagtcactgccttccggtcaccgctgatcatcctccgaagaccggtcaacgagtctgcctcagctcggttcggttccacttttgggttttccagaaagcaacggttcagttcagtatgtatccccaaacacaagcacaagcaaggtcgtagaagagggtttgtagttagagcttctgcatcctcatctccggagtcggatgatgccaagattgctcctcttcagtttgaatcctcaattgggcagttcctttctcagattttgaaagatcatccgcatcttgtgcctgctgccgttgaccagcagctccagcaactccaaactgaccgcgatgctcatcaacaaaacgaacaaccttctgcttcaaccactgatttagttttgtacaggagaattgctgaggtgaaggctaatgaaaggaggaaagctctggaag

SEQ ID NO: 7156 - DNA, 530 bp, Glycine max
  Clone ID: jC-gmle01810024b06d1
aacaccgaagttacattcaaatttactccatcagtcagtaccaacacactataaactatgccttgtgatgtatgagagcaaacagaactcaaaaggacaactgaatgcacgaggttccctcccacctggtgggatctaaaaaggatacacatataaagatttactcagttcaacacaaaatggtaccttgagtccacatagctctcaacatcccagagaaaagaaccaaatgtcacagcctctaaaacaagcttctttaaaccaccaaagctaattttgatgttttcatccttagagactgccccctcaggtgttacaacaatttcaggtcttccaaacaatgcttctgtgtgcttctcgatgatgctgacagcctctttggatctaattgttgcatatctttgtagtgtatcaccatcaaaggacatcacgtagttacgcaacctggttgcctttacaccatagccaaatccaccgggacggacatcaccaccaggccaggtagatacttcaggatgagacatcacttg

SEQ ID NO: 7157 - DNA, 482 bp, Glycine max
  Clone ID: jC-gmle01810024b07a1
tggcttctcctcttcttactccttacaagatgggcaaattcaatctgtcccatagagttgttttggcaccgctgaccagacagaggtcttacgacaacgtcccacaaccccatgccatcctctactactcccagagaacttccaacggaggccttctcattactgaagccactggcgtctctgacacggctcaaggctatccgcaaacccctggcatatggactaaagaccatgttcaagcttggaaacccattgtcgatgccgtccacgccaaaggcggtgttttcttctgtcagatttggcacgttggaagagtttcagattcagtttatcagccaaatggacaagcacccatatcttctacggacaagccactcacaccccaaattcgaagtaatggcattgatcaagtacaatttacccctccaaggagattaaggactgatgaaattccgcatattggaaatgacttcagacttgct

SEQ ID NO: 7158 - DNA, 562 bp, Glycine max
  unsure at all n locations
  Clone ID: jC-gmle01810024b07d1
agcccaacacttattaggatccagtgatattaatacaacaataatagttctacatattacactcccttacaatttagaaaatgtgtaagggggatccaaaaccatagcaggagaagcatgtaaagaacacgcgaatgaaaatccgaccaaccaaattgcaaatatgaatttgcaggggaagataaggttattaaaaatggaggttctaccctaggatgctacggcattggattcttcatcatcaagaaaggggtagtcagtataaccaagaaccggatcagaagtgtagaatgtctcccggtgatacttgttgagaggggcattgagagcaaatctttttggcaaatctggattagccaagaaccaacggccataagcaacaagatcagccctgttttcagctacagcgttgatcccatcttggcggtcataacctcctgcggctataaaagtgccattgaaggcctttctcataggcaccaggctatgagggcattcagttttttctccaacagtcttcattcttgggtccaccatgtgacagntaagaataccatactta

SEQ ID NO: 7159 - DNA, 579 bp, Glycine max
  unsure at all n locations
  Clone ID: jC-gmle01810024b08a1
gccaagggacaattagatttgaattgtcaacctgatcgagaagatgtgcaagcttggccgaacaatttgagcatgacgagtcttcttgaagaagcaaatctcccgctggaaacctacctaaagcgaaatggccttagtagcttgatatcagagcagcaaacaaattcagcttcaaatgtgcaagcacagacaaccaatgatagtgagggaaaacacaatgaggattgtggaaccgctttggttattcatgagagggaaagcagtcctgaagagaacagtgggcaagacagagagcaaaacaattcactctcatgaaatcttgccagttatattataattattttttccttttttttaactcaaaaatcattttacaagaatccttgcataaattataaaattataggaggttcatttgtatgtctatatttttttttcttgttattggtgtctgtgtcttatggttgtgaaatttccccccaaaactcaataacctatatacgccaaagcngtgtgtttagggttgtaaactagtgagaggcaaggagtngaaggaaagcacaccacctgttttttttt

SEQ ID NO: 7160 - DNA, 572 bp, Glycine max
  Clone ID: jC-gmle01810024b08d1
gaagaaatcacataactattacatacatcaaccagtcacattagttctgtacaacatcagtgaaatgtttttcatgcaaaagagcattttcctattaaaaaggcaagccaaataatggcttttcaaactaaacacacgcactaagaaacgaaattaggtgaaatctccctttctccatataacaaaaaagaagaaaaacaatgcttattcagactcaccacacacacacaccaaagaaaaaaaaaccaggtggtgtgctttccttcaactccttgcctctcactagtttacaaccctaaaacacacgctttggcgtatataggttattgagttttggggggaaatttcacaaccataagacacagacaacaataacaagaaaaaaaaatatagacatacaaatgaacctcctataattctataatttatgcaaggattcttgtaaaatgatctttgagttaaaaaaaaggaaaataaaattataatataactggcaagatttcatgagagtgaattgtttgctctctgtcttgcccactgttctcttaggactggtttcctctcatgaatac

SEQ ID NO: 7161 - DNA, 519 bp, Glycine max
  unsure at all n locations
  Clone ID: jC-gmle01810024b09a1
gggaagtctttatgtgacctgggtggaatgattctgtgtctgcatgtgtgaattctggcaagggaactagggatctgaagataagatatgcaatctaaatctgaaactgcaaatcaactgaggtctgatccacattcctttacacctaacaatgcttattctgaaccctggtggcgaagtattcagtacaatcctgtcccccaagcaatgttaggagtgaatgcatctaattcatcttcacttgaacgccctaatggtgattcggaatccagtgaagaggatgatgatgccactaaagaatcacaacccactgctcctaatcaatcaggaaattatggacaggaccaccaagcgatgcaacattcttcatcatctgcacctttgggatacactccttttataggaatgccccatgccagaatggctntgccccttgagatggctcaagagcctgtttatgtgaatgccaaacaataccaaggaattctgagacgaagacaggctcgtgctaaagcagag

SEQ ID NO: 7162 - DNA, 557 bp, Glycine max
  unsure at all n locations
  Clone ID: jC-gmle01810024b09d1
caagacccacaaataatgaggatcatctgcaatgtctgctgaaggtatccactgctgaaatgaatgagctcaacactcctacttcctcggttcttccactctcaatgttgttgaccttttacttcagtaactttgctgcaacccgatcttcgctttggataggattccctattgtaaaaaaatacagtatttaatgtagtaaatctatttacatccatgtctctgcatttccattcagggcataacaaaattggagaatttaaagaaacatgaagcattcgtgttttgattacccaactgttactgcaagttttgtaacgatataagatcaaacactcaaacttcagttgaactaatgacctgatggcacacaaaagaaaggtaaaatgtcgaagaggatgtgaatacaatcatgcagcaaatctctcatatgatgtctcatattaagcattaataaccggtgagtaacatanaataaagccgccagaggaaagtgagtcagtagtttgtttcatcaagtcttctaatccgttggcttgactttgctaactactatc

SEQ ID NO: 7163 - DNA, 572 bp, Glycine max
  Clone ID: jC-gmle01810024b10a1
agagcatcaatgttagtgggcacaagtatggtttggtctatgctggaatcggttgggttatctggagaagcaagcaggacttgcctgaggaactcatctttcacatcaactatcttggggctgatcaacccaccttcacccttaacttctccaaaggttctagccaagtcattgctcaatactaccaactgattcgccttggttttgagggatatagaaacgtgatggaaaactgcagggacaacatgctggtgctgaaagagggactcgagaaaacagggcgattttcaattgtgtccaaagacaatggtgtgcctttggtggctttcacactgaaagaccacacccactttgacgaattccaaatctcagactttttaaggcgctatgggtggatagtgccagcatacaccatgcccccagatgctcaacatgtcacagtgcttcgtgttgtcatcagggaagacttctcaaggaccctcgctgagcgtctcgtgtccgatgtggagaaggtgctgcatgagcttgattcacttccttgcagggtcatcagcagcaccactgtgacactc

SEQ ID NO: 7164 - DNA, 514 bp, Glycine max
  Clone ID: jC-gmle01810024b10d1
gaacatatcataggggagataaatataattcatgattgagagaaaatagtcaaaatacagtgaatcatacttgtacaaacgaaaacacaatttaatatttgcctctcatcaataaacaactgaaacagataaatagcttgactcaatcaaaagtacttactgcccaaattatatatataataaagaagtacaataaggcagaggcataggcacaacacccccttgaagctaacactaacaaacaccattcatcttgtcattgttcttcttcctctccaacacaaacttcttccaaatggcagtgatttccctctgagtctccataggattcttcttagcaaccactaccttgccattttcttctgcactgagtgtcacagtggtgctgctgatgacccttgcaggaagtgaatcaagctcatgcagcaccttctccacatcggacacgagacgctccgcgagggtccttgagaagtcctccctgatgacaacacgaagcactgtgacatgttga

SEQ ID NO: 7165 - DNA, 439 bp, Glycine max
  Clone ID: jC-gmle01810024b11a1
gaacacttcctcaagctccatttggtatgagttggcttacattgaagccaaagggaggatcaagaagggtaacaggatttggcaaattgcgtttggaagtggtttcaagtgtaacagtgcggtttggcaggctctgaggaatgtgaggccttctcctaatggaccatgggaagattgcattcataagtatcctgtggaaatagtcacatagtgatcatagttcagttcagttctcagtcacatactctggctgctacaacttaattcagggtacccttcattagtttccagatccattgtctctctctctgttgtagatttcattgcgtaattcactgcctcttttgtgtttgatgattgtggattttcattgggttaaattcatgtatctggagtaatatgatatggggaattcctgaattctttttcttcctagaag

SEQ ID NO: 7166 - DNA, 434 bp, Glycine max
  Clone ID: jC-gmle01810024b11d1
aggaagaaaaaaaattcaggaattccccatatcatattactccagatacatgaatttaacccaatgaaaatccacaatcatcaaacacaaaagaggcagtgaattacacaatgaaatctacaacagagagagagacaatggatctggaaactaatgaagggtaccctgaattaagttgtagcagccagagtatgtgactgagaactgaactgaactatgatcactatgtgactatttccacaggatacttatgaatgcaatcttcccatggtccattaggagaaggcctcacattcctcagagcctgccaaaccgcactgttacacttgaaaccacttccaaacgcaatttgccaaatcctgttacccttcttgatcctccctttggcttcaatgtaagccaactcataccaaatggagcttgaggaagtgttc

SEQ ID NO: 7167 - DNA, 498 bp, Glycine max
  Clone ID: jC-gmle01810024b12a1
ctttaatattagagttctttctctttcattcatccttggtaatggcttgtgcattgcaagcaaccttagcagccaacacctatgccttttcttccaggagattctccttgaagcaccaaaagaacagtaagagaaggttttctttgttcactgttagagctgattctgatgactctgactgcaatgaggaagagtgtgccccggataaggaagtagggaaggtcagtgtggaatggttagctggggagaagacaaaagtagtgggcacattcccacctcgtcgtaagccgggttggactggctatgttgagaaggacactgctgggcagacaaacatatattcagttgagccagcagtttatgtggcagaaagtgctataagttcaggaactgctggctcttcttctgatggagctgagaacacagcagcaattgttgcaggccttgctctgatatcgattgcagcagcatcgtcgatactgctacaagttggtaaga

SEQ ID NO: 7168 - DNA, 330 bp, Glycine max
  Clone ID: jC-gmle01810024b12d1
atatattacatactaggccacaaaagcaaaaggacactaatcaaccaaaaatatgagactcttacagttctcaggaagtcgcgtcagcatcagggtcaggggcggtagaactcagaaaaagaatccaaaccccaagcagacatagcacactcgaacatggacaacgtcaaaaactagacgaaaaacaataaacttacctaacccaagcgctgggcgaacccattgggagatatctgacgagcgatagggaacggcagaactaatccaagcagcggggggaaaaccaccacgggcactagcacatgtaacatatacaacgacgggttctga

SEQ ID NO: 7169 - DNA, 287 bp, Glycine max
  Clone ID: jC-gmle01810024c01a1
caacaataagaggtgctttgtcaagcttgattctggttgtaatggcgtagtatttgtccaaatgcggaagaaagatggagaccgaaaccccaaggatatagttcatcggatagtgacatcatctgcagtaacagggaaacatatgtcaaggattattgtgagaattttgccaatcgaaatcggctgttatgcttaaaaggaggaaaattcaagagcaattaagcctcttgtggaacagaactgtcctgtggaaactcaaaatccacacaagtttgctgaactgtatg

SEQ ID NO: 7170 - DNA, 284 bp, Glycine max
  Clone ID: jC-gmle01810024c02a1
gtctctcgtcgctctcatgctcgtggaagacgaccggttcaattacgacctctgggacctacccggtgcggctacctaccgacagaaagcgtggtccttgtttccaccacgggaccggccatacccgagcgggagcgggctgatcctgtcgaggggaaccgggatctgcaaggcaaccggggcggataatcccatcgatcaccccataccggatggtgataaaaaaggctcaggtgttgtacggcgggaaagctccgtaaggggacaagagacattcgatcatg

SEQ ID NO: 7171 - DNA, 290 bp, Glycine max
  Clone ID: jC-gmle01810024c03a1
cgataactaggagagacacctcgaaggatcaacagagatggagactatgactgaagagggcggtcggccatatcatttatcacgacgatgataacattgcaactctccaagacgacgacagtgatgtgatgttacatagctaacaacaatcgtgacaacatgctgctgcgtgcagcactagctaatgcctcatatgctagcatagcaacaccactgattgcctcaaccatggaggctactgagaatgcctcgtcaggatacatgacgaggagcacatgcagtgccgcgaa

SEQ ID NO: 7172 - DNA, 334 bp, Glycine max
  Clone ID: jC-gmle01810024c04a1
atctagtggaagagagggggaaaggatataatatggagggagttgtatatgttagagagggaacaacccccacaataaactagaatccgtgcgatcaaccaagcatttgccataacgacttagtacagaaacgatggaccaaacttaaagatgaaggtcaggtatgtgggaacaaacgagaatagacaaagagagaagtgagaatggcatcccatattccattacgattttatggctgttgttgttggtataaaaaagaaaagaaaagcggcgcacgggtgattagggaatagaagcataataataaccctgtttgttgcctacgttcccgtta

SEQ ID NO: 7173 - DNA, 352 bp, Glycine max
  Clone ID: jC-gmle01810024c05a1
cagatttcaggaggcaaaaacatgatgagggctggcatacatgacataacaacagggagtctctcataacccatgacgacttatttagaagacaccaatggatcctattcaccacatgtgctctgacagtaacaacagccaaattctacttctactacaccacgaactctgtgtcagtggagtaatcaatctaacacaggagtagctatgactctcaaccctgctcatgaaagagtcttcatgtgtcatgatggggctaactcctgtggggataaaattgaaggacagaatcttaatgagtgttcttacttgcgacctcggacacagaacatggtattacacatgcagcagt

SEQ ID NO: 7174 - DNA, 505 bp, Glycine max
  Clone ID: jC-gmle01810024c06a1
caagtatccatttgtgtaaatgtgactaggaaactgttgctgattactgcatttcgtttttagtttcctttgttaagagcatgattctttttctttttttcttttttgttgagagcatgctatacaggtgctaatcactttttagtttttggcatttctttatttttcagattccattctagatccttgtgctaactatttttggccattggcatcttggacttcttggctctttgtaattgaaaatacctgtcagaaaaatgacttcatttcttctatttccttaatatgtttaaataatcattggctaaaagaatattgatatagatcttgatggggatcctgtatcttttttagtctagtaattctgtttatgtataacagaatgattttagactctgaagttattcgtgaatcaaaggaatcaaattctgtagatgatgttggaatatctgatgatgaggctgaaacagagcaattactagattgtctaatttattcaaag

SEQ ID NO: 7175 - DNA, 495 bp, Glycine max
  Clone ID: jC-gmle01810024c06d1
ctgagaaactaaaagtgatttgaaagtaaaggtaattagcatgtatctctgcttaggtgtgctatatacagaagtaatggatcagacatcagagaaaaccactagtcacttggaatacgatatttgaaagagacttgcatgctccagcttcaccagtgcttcagttcaaaagcctacatttgtacatgctatatacatttcttgttcagctttctttggttcacattttaagaaaaccagcacctgaaagtattacctaagcatggaaaataggagacattgatgcttgccacagaagaaatgtcaaatggtgatcccatttaagctttataccccattaatcattgaagcctgaataaagaactggtctgcgagtttgtctcaaataaaatgcacgcttagtcttctgagaggtatactaaatcaaaatattatcaagtcaggaaataaatagcttttcaggcttcaatgttaaccaaatattttctcatttct

SEQ ID NO: 7176 - DNA, 517 bp, Glycine max
  unsure at all n locations
  Clone ID: jC-gmle01810024c07a1
tcgcaacactgcaagtgtgaactagtaacaaaagcaaaagaaagattttctccgatggcgacatattttcatagtaactcggaaattcaagctggtgctgacggccttcaaaccctcgtactaatgaaccccgggtatgtccaatactctgacacgccgccaccaccgcacggcggaaacctcgtattcctcaactccgccgccggaaacgcctccctacaaagtctcccccacgcgccgcccccccacacgcagcaatttgtcggtgtcccactctcggccgccgcgcatgagccgccggcgtccatgcaccacgacgtctccgccctgcatggcttcctgccgcgcatgcagtataacctctggaacacaattgagcacaacgcggcggcgcgtgaagccccacgcgccacccaggggctgtcgctgagtctgcacggngaccacatgcgcgcgtcaccgtcctcggcttccgggcctncaacggcggcggcgtggcggngattcagagcgtgct

SEQ ID NO: 7177 - DNA, 424 bp, Glycine max
  Clone ID: jC-gmle01810024c07d1
cctcccttctctttttatttttttctcctttgggaaaaaaaacccagggcaaaccccccacacaagaaaaaaacgggcgccctcccccagggaaactctcgccccccccccccccccccccccttcaaaaaagccccaaaaaaaaacccccccccaaaaaccccaaccccccacaaaacaagagcccacaaaaaaacaaaagggggcccagggcggggaaaacccccccccaaggaaaaaacccccttctttaccccccaaaagtttcccccccccccccaaaaaacccccccggggataaaaaaaaaatgggggccccccatcaccccggggcccccaccgtaaacccccccccgccaaaggcgtttaccgcccccaaaaggggggccccaggggccgcaaaccaccccgggggcgccccggg

SEQ ID NO: 7178 - DNA, 586 bp, Glycine max
  unsure at all n locations
  Clone ID: jC-gmle01810024c08a1
ctcgagccgctcgagccgaatcggctcgagcttttttttacttgaattttcttcatccttctctgttctcctagaacttgattacttgaacattccctatgacagatgaggtggttcttctggatttctggccaagtccatttgggatgagggtcaggattgcacttgctgaaaagggtaatcgaattttgagtacaaagaagaggacttgaggaacaagagtcctcttctcttacaaatgaacccggttcacaagaagattccggttctcatccacaatggcaaacccatttccgaatccctcattgctgttcagtacattgaggaggtttggaatgacagaaatcccttgttgccttcagacccttaccagagagctcaggctagattctgggctgattatttgacattaagatacatgatcttggaaagaagatttggacatcaaagggagaagaaaaagaagctgtcaagaaggagttcatagaggcccttaaattggtggaggaacagctgggagatangacttattntggaggagactatattggtttgttgatatagcacttgttccattctacacttg

SEQ ID NO: 7179 - DNA, 498 bp, Glycine max
  Clone ID: jC-gmle01810024c08d1
aatacggaaaatactctattgcaaaaccaacaaacacatgaaagatacatcagaaaaattttaaaacctacacaatccaacagaaagcatgaagtttggcacatccaaatgcctttttattacacaaatattatttagttgaaaggtcaagaacgaccaatacttcactatggctattaagatccaacatgaaacctactcgatgactaacttctttcttatctccacaacgaactcatagaccttgtgctgatcaggaagagactttgcaacactctctttctgtaggcacctcttggcccaagcaacaaacctggggcactcattctcaatgttgaggctgccaaaagtctcatagactttgaaccaagtgtagaatggaacaagtgctatatccacaaaaccaatattgtctcctccaaaataagtcttatctcccagctgttcctccaacaatttaagggcctctatgaactccttcttggcagcttctttttc

SEQ ID NO: 7180 - DNA, 544 bp, Glycine max
  unsure at all n locations
  Clone ID: jC-gmle01810024c09a1
gtaaggtttgtttcatcaaaaagatggtggcacccattgctgtttcttctccaaagtccacacttttgcagaaccccatctgttttggtgactcaagttcaagttttgttggggggtctttgaagggtctttgcttcaatctgaaacgaaggcaacaaagaagagaattgacccatttggttgttgctttatccacctcaagtgttacaaatagcaatgctagtggcaggttttacttcaacatcactggttttcctttcccacttggtccttttctcaacaggcgcactattaggactgaggctgtgaaggattgtatatggctattcgaacaagagcaggcattaggcttcagcagtgtttccacaaacattagaatgacagttatcaaactcaaatctgggggcttatggatccatgcacccattgctccaactgatgagtgtattcagcttattaaagaattgnggcttcagttgaatatattgttctccctacttttgcttatgagcacaaagtatttggttgtccattttctagaaaa

SEQ ID NO: 7181 - DNA, 520 bp, Glycine max
  Clone ID: jC-gmle01810024c09d1
ccatgtaaaacatttccttgtttcctcaacatgtatatgtagtccaatgtcaaacaacatttacattttccttaagaatcgagctcctaatgtaacaaaattatacttattttacatttgaaaagttaacaagtattggcaaggccaagttgtgatgcacctctcatctcaccttttcctgcctgaaacagtttttttcacagcaccaacagacaccaaaaactggtcaagggatgatagggtcctcatgtcatccggaggaaaatagctggctgcctttcccatgattgatgagaagagaagggaaagtgaaggccatgcagcattactttcccccaaaaactcatccaaaaatgcaaatgcagccctgaaatcagacctacttgcacttattggagcagcaaagtgagcagggattattctcttgaacctccaatctcgcgaaatgctatcaacccactctctaaccttctcaggaactttactgaagaccagagtcttcacaataggtgaaacaatc

SEQ ID NO: 7182 - DNA, 537 bp, Glycine max
  unsure at all n locations
  Clone ID: jC-gmle01810024c10a1
cttcgaatggaatccgcagctctgtcgcgcataggcctggcgggcctggccgtgatgggccaaaacctagccctgaacatcgcggaaaaggggtttcctatctccgtctacaaccgcacagcctcgaaagtggacgagaccgtagatcgggcccgcaacgagggctccctacctctcacgggccaatacacccctcgcgacttcgttctctccctccagcgccctagatccgtcatcatcctcgtcaaggccggcgcccccgtcgaccaaaccatcgccgccctctccgaccacctcgaccccggcgactgcatcatcgacggcggcaacgagtggtacgagaacaccgagcgccgcatgagcctcgtcgccgacaaaggcctcctctacctcggcatgggcgtctcctgcggcgaagacggcgcacgccacggcccctccctcatgcccggtgggtcccaccaggcctactccacgtccaggacatcctacacagaatcgccgnccaagtcgaggacagcccctgcgtcacttaca

SEQ ID NO: 7183 - DNA, 456 bp, Glycine max
  Clone ID: jC-gmle01810024c10d1
ggaagccaaatgacacgcctttgttttattaagattaaaaacagttatagcaagaaaacaatagctgctctctgcctaccaaagatcctcaaaagaaacaaacaattacaactcaaatgctgcactgcacgacaatcaagcaaacaaccaaaacccatcatcaatcaattgagtgcaccaactccagtcccactcttgcgggcgagcttcgtccactcggtatgaaaagccccggggcgatcaaccctctcataagtatgcgccccaaacaagtccctctgagcctgaacaaggtttgccggcagccttgccctccgataggtatcaaagtaagcaagactggcacacattccgggagtactaatcccagctgaaaccgccaaccccacaaccctcctccacgcagcctgcctatgcaccatttccctggcgaactgcgggtccactatcaagcta

SEQ ID NO: 7184 - DNA, 496 bp, Glycine max
  unsure at all n locations
  Clone ID: jC-gmle01810024c11a1
attgaatctcagaattctctaaaagagatctttttctgctctttgaagaaagaagggtctttgcttgattttggagatgtctctgctctcagatctcatcaaccttaacctctccgataccaccgagaaggtgatcgcagagtacatatggatcggtggatcaggaatggacctgacgagcanagcaaggactctcccaggaccagttagcgacccttcagagcttcccaagtggaactatgatggttccagcacaggtcaagctcctggtgaagacagtgaagtgattttatacccacaagccattttcagggatccattcagaaggggtaacaatatcttggttatctgtgatgcctacactcctgctggagaacctattcccactaacaagaggcacgctgctgccaaggttttcagccatcctgatgttgttgctgaagtgccatggtacggtattgaacaagaatacacctttgtgcagaaagatatccaa

SEQ ID NO: 7185 - DNA, 455 bp, Glycine max
  Clone ID: jC-gmle01810024c11d1
gaacatgacaatttcatatattattattatacttcacaatcagcatttctttgttcaagactgataataaccattaaattattgtcattgtaacaatcggaaaacgagggaaaggaatagaagaaaacaatgaacaacccttgccagttagttgcaccaaccaacaaggcaccaaccatagtaccaatcaaaaggtaaaaagagagagagaccaaatcctactaagaaaagcataactgttcctttccatccaaagggagaaaacatgcaggttttgctcatggcttccacagaatggttgtgtctgcaatcatggaagtaaccacgtatgggtccatgttggaagctggccttctgtcctcaaaatatcccttccctgctttctctgtgtctctcccaaccctaacagaagctccacggtttgcaactccccataagaaggtgttgatgtcagc

SEQ ID NO: 7186 - DNA, 546 bp, Glycine max
  Clone ID: jC-gmle01810024c12a1
ctgctgcggctgcaaaagcagttgcggaggcagagactgcaattgcacaggctgaggcagcagctagggaggcagaggctgcagaagctgaggctgaggctgctcaagtgtttgcaaaagcagcaatgaaggcgctaaaatgcaaaatgcttcatatttggtagtttcctcaccaagaaatctaatttgattcctgtggatgaaaatatgagatggtcataactttatctaaattttattttcctgtttagaatgcttatcacatcataattattccgatagtatgctggttctctgcactcttcagtagtcactcctttagaatcttctcatccttatttattttgccttttgttcttggttactggattagaggctgatctgtctgtggttagacttttctccaagtggataatttgctcagaacatcttatagcacagttttttaccaaactgatcatgaatttctaacagtctctactatggaattcaatttccacaaatgaaatctaacactacaatagtagtgaacattataaagaaaac

SEQ ID NO: 7187 - DNA, 539 bp, Glycine max
  Clone ID: jC-gmle01810024c12d1
caatcattccattacagcaaaacatggctatttccactcttccgttactgctttgtagctttcccctcattgtctttataagaaaaaggtaaaataaaaataaaaaataaaaaaggctgttattgattcctgacaaaatgtttcatgaatcatcctgcatattccagatttacaagccgaaaattatgtacagttacgaaaaaaactggccggaagcatagccagcagcagaactatcatctcaaagctaagtctgctgatgatgaacatgagtaagtccacactatctgagaagaattcacaaatattaaacagggttaactaaaagaactaatggaaattaccatgcagcattagcagattattgcttagaaagaactaagaactaacagaaattccatctatataggcatcagaaccatggggcaatgattataggtttaaaactaaaccgacagataacagatactactttacaaattacagacatcagaataatgctcatcactaattaaagcttaaaaaaatgcagtaactaa

SEQ ID NO: 7188 - DNA, 423 bp, Glycine max
  Clone ID: jC-gmle01810024d01a1
ctcaatcttgagactttggctgctgcaagaatgtcgactgcatttggtcctgggggacataaccattgtggtgatttaccaaccaataatttagcctttggcacccattcagctgatgcccagctaaagcaagagctggctgctatattaaagaagatcggggagaagcaaacttgcacaattggtctatatgaactatactcgcattaccgaattgtacccaaaggtcgacatatttgctacagttcaaaacgctagtgaggcatttcgcacctacattaaagatcgtcttgctcatatggagaataatgctgcagctggaagaacttcttcaagtttaccgatgcctacccctgcaccggcatatataaatatatattgtccggaatttgcacctctctcacctgtaaacacaaattcact

SEQ ID NO: 7189 - DNA, 293 bp, Glycine max
  Clone ID: jC-gmle01810024d02a1
gcctatcgccgttcccatcatcgccgaaatcgacctctacaaatacgacccctgggacctacccggattggcttcctacggagagaaagagtggtacttcttttcaccacgggaccggaaatacccgaacggatccaggccgaaccgggcggcgggaaccggttactggaaggcaaccggggcggataagcccattggccaccccacaccggttgggataaaaaaagctttggtgttatacgcagggaaagctccgaaaggtgacatgagcaattggatcatgcacgagtatc

SEQ ID NO: 7190 - DNA, 307 bp, Glycine max
  Clone ID: jC-gmle01810024d03a1
ggtaatggggatagagcatgactctgggaaaccaccacgatcttttgcctggtctcgtacttatactcagactcgacacctcagtcatttcattctcgcatcatggaccatatgcatgggatggggaggccacatattaattcactactgaccaccctgtgcaaaactacaaaggttgatccaatgtcgaaaactacttacgcatcttggatacatccccaatgcaccacacttagacgacaacttagatgacaccctcgtaactgccatcgaagcctaccaagcgaattacaacatcgacgtctcc

SEQ ID NO: 7191 - DNA, 471 bp, Glycine max
  unsure at all n locations
  Clone ID: jC-gmle01810024d05a1
ngaannannnnnnnnnnnttccccttgtatactgataccaggtgcattgctgcgcgttcctcacctacgtatgctggtaattgggctcgcggctggggaagaagggataaagtgtctggtatgggcgcgtgatgacctaggtcacgaaaggaggaaactatcggctgcagagagtattttgtttagccgtgtttttatcaaaaaatggtgcagagactatgtatgatggtttcacactgataccctccaggtcttgacttgcacccacaggtgctgcgcttgccctgctctcccatgaagggctaccggacattctttccttctgcattatcagaagcatacctgatgagatatcagttgtctatgtcttgagccatgtacatgtgaggagtcaatgaaatcttaaaatgaatggagtgattatcacacttgatgatatgtcgggttctcaggagacaggtccatgcttat

SEQ ID NO: 7192 - DNA, 52 bp, Glycine max
  Clone ID: jC-gmle01810024d06a1
ctttccaggctgagttggtatgaatgggataaatgtctctgaaaagtgtcat

SEQ ID NO: 7193 - DNA, 493 bp, Glycine max
  unsure at all n locations
  Clone ID: jC-gmle01810024d06d1
ggtctatatctgtttcacacttaatactccaacaaaaatcacgataacgaaggacaaacaaatgtgcaaatatctaattttaagatatcctctcaatagtgaaaaccaattctaatgtcactgatcaaacaggtgaaaaatatttgtactttcagtccgtacagactttgccttggggtgcatgggagtgagcagggctcagttcaggacaaaatggtaccttgagtcgacgtagctctcaacatcccagagaaaagaaccaaaagtaatagcttctaaaacaagtctcttcaaaccaccaaagctaattttgatgttatcatctgtggaagaatcaattaccccctgcggtgttacaacaatttcaggtcttccaaacaatgcttcggtgtgcttctcaatgatgctgagagcctctntggatcttattgctgcatatctctgtaaagtctcgctatcaaaggacatcacataggtacgcaacctggacact

SEQ ID NO: 7194 - DNA, 564 bp, Glycine max
  unsure at all n locations
  Clone ID: jC-gmle01810024d07a1
ctcgagccgctcgagccgaatcggctcgagcttttttttacttgaattttcttcatccttctctgttctcctagaacttgattacttgaacattccctatgacagatgaggtggttcttctggatttctggccaagtccatttgggatgagggtcaggattgcacttgctgaaaagggtatcgaatatgagtacaaagaagaggacttgaggaacaagagtcctcttctcttacaaatgaacccggttcacaagaagattccggttctcatccacaatggcaaacccatttccgaatccctcattgctgttcagtacattgaggaggtttggaatgacagaaatcccttgttgccttcagacccttaccagagagctcaggctagattctgggctgattatttgacattaagatacatgatcttggaaagaagatttggacatcaaagggagaagaaaaagaagctgccaagaaggagttcatagaggcccttaaattgttggaggaacagctgggagaatagactctatttggaggagacaatattggtntgtggatatagca

SEQ ID NO: 7195 - DNA, 578 bp, Glycine max
  Clone ID: jC-gmle01810024d07d1
aatacggaaaatactctattgcaaaaccaacaaacacatgaaagatacatcagaaaaattttaaaacctacacaatccaacagaaagcatgaagtttggcacatccaaatgcctttttattacacaaatattatttagttgaaaggtcaagaacgaccaatacttcactatggctattaagatccaacatgaaacctactcgatgactaacttctttcttatctccacaacgaactcatagaccttgtgctgatcaggaagagactttgcaacactctctttctgtaggcacctcttggcccaagcaacaaacctggggcactcattctcaatgttgaggctgccaaaagtctcatagactttgaaccaagtgtagaatggaacaagtgctatatccacaaaaccaatattgtctcctccaaaataagtcttatctcccagctgttcctccaacaatttaagggcctctatgaactccttcttggcagcttctttttcttctccctttgatgtccaaatcttctttccaagatcatgtatcttaatgtcaaataatcagcccagaatctagcctgagc

SEQ ID NO: 7196 - DNA, 546 bp, Glycine max
  Clone ID: jC-gmle01810024d08a1
ctcgagccgctcgagccgaatcggctcgagcttttttttacttgaattttcttcatccttctctgttctcctagaacttgattacttgaacattccctatgacagatgaggtggttcttctggatttctggccaagtccatttgggatgagggtcaggattgcacttgctgaaaagggtattcgaatatgagtaccaagaagaggacttgaggaacaagagtcctcttctcttacaaatgaacccggttcacaagaagattccggttctcatccacaatggcaaacccatttccgaatccctcattgctgatcagtacattgaggaggtttggaatgacagaaatcccttgttgccttcagacccttaccagagagctcaggctagattctgggctgattatttgacattaagatacatgatcttggaaagaagatttggacatcaaagggagaagaaaaagaagctgccaagaaggagttcatagaggcccttaaattgttggaggaacagctgggagataagacttattttggaggagacaata

SEQ ID NO: 7197 - DNA, 562 bp, Glycine max
  Clone ID: jC-gmle01810024d08d1
aatacggaaaatactctattgcaaaaccaacaaacacatgaaagatacatcagaaaaattttaaaacctacacaatccaacagaaagcatgaagtttggcacatccaaatgcctttttattacacaaatattatttagttgaaaggtcaagaacgaccaatacttcactatggctattaagatccaacatgaaacctactcgatgactaacttctttcttatctccacaacgaactcatagaccttgtgctgatcaggaagagactttgcaacactctctttctgtaggcacctcttggcccaagcaacaaacctggggcactcattctcaatgttgaggctgccaaaagtctcatagactttgaaccaagtgtagaatggaacaagtgctatatccacaaaaccaatattgtctcctccaaaataagtcttatctcccagctgttcctccaacaatttaagggcctctatgaactccttcttggcagcttctttttcttctccctttgatgtccaaatcttctttccaagatcatgtatcttaatgtcaaataatcaggcc

SEQ ID NO: 7198 - DNA, 544 bp, Glycine max
  unsure at all n locations
  Clone ID: jC-gmle01810024d09a1
cttcgaatggaatccgcagctctgtcgcgcataggcctggcgggcctggccgtgatgggccaaaacctagccctgaacatcgcggaaaaggggtttcctatctccgtctacaaccgcacagcctcgaaagtggacgagaccgtagatcgggcccgcaacgagggctcccttccttttaccgggccaatacacccctcgcgacttcgttctctccctccagcgccctagatccgtcatcatcctcgtcaaggccggcgcccccgtcgaccaaaccatcgccgccctctccgaccacctcgaccccggcgactgcatcatcgacggcggcaacgagtggtacgagaacaccgagcgccgcatgagcctcgtcgccgacaaaggcctactctacctcggcatgggcgtctccggcggcgaagacggcgcacgccacggccccttcctcatgcccggtgggtcccaccaggcctactccaacgtccaggacatcctncacanaatcgccgnccaggtcgaggacggcccctgcgtcacttacatcggc

SEQ ID NO: 7199 - DNA, 465 bp, Glycine max
  unsure at all n locations
  Clone ID: jC-gmle01810024d09d1
ggaagccaaatgacacgcctttgttttattaagattaaaaacagttatagcaagaaaacaatagctgctctctgcctaccaaagatcctcaaaagaaacaaacaattacaactcaaatgctgcactgcacgacaatcaagcaaacaaccaaaacccatcatcaatcaattgagtgcaccaactccagtcccactcttgcgggcgagcttcgtccactcggtatgaaaagccccggggcgatcaaccctctcataagtatgcgccccaaacaagtccctctgagcctgaacaaggtttgccggcagccttgccctccgataggtatcaaagtaagcaagactggcacacattccgggagtactaatcccagctgaaaccgtcaaccccacaacccttctncacgcagcctgcctctgcaccatttccctggcgaactccgggtccactatcaagctagccaaatta

SEQ ID NO: 7200 - DNA, 477 bp, Glycine max
  Clone ID: jC-gmle01810024d10a1
cgcagccttcacgcggatcaacttgatccgcaggaaactacgcggccaaaaacgcatgcggatctacttttccctactgtggatcatctacctcctaagttgactctactgcggataaccttaagcaatcaacaatggaagcaatggaagaaggaaccttacctcaatgaagaacgaaaagaatggagctcgctgaataagaagagacactcgtaagaagatagaggaagaagaaatggctagcgggagagcaccaacagcagccttgcgagggagaagaaccagcaacagctcgcacgaaagaagggagaagaacagtgctcgcggaagatggtactcacggcagaaggaaatgaagaacgaagcggaatggctgggtgcacaagtttttttaaaatataagaagagcattcacgactctgctctgtaagtgatgggtgcaccaaccaaaatgctaggtgcacctaggagcaccct

SEQ ID NO: 7201 - DNA, 495 bp, Glycine max
  Clone ID: jC-gmle01810024d10d1
ggctcatatgattgcagaggagtatccttggttggtcacaaaatttttattctcatccgagaaatctgctagccgtcataagtgaattgtttcctcccaacatgaatttctctaaacacatcaattagaatttgaactctggctacaagcttaagggacctgaacatggtgccactcagatcaaccacttgttcagcaataagtgaagtgttatccacatagcagtgaaaataaaaaaagtcaacctgaatttaattgaggggcccgaagaatgaggcaatttcctctcccagaaaaaaaggaagaaaggaaaaataacacagaatgagacaggttcacttgtatgttgtggacccataggttcgacatacttaagagctaaattgtctttcaaagacatattagtccagaaaatggatcatgtttcccgcataatagtactccgatcgagaaagaaaaaagtaaggctcgaacatcgctataaatgacgatgga

SEQ ID NO: 7202 - DNA, 505 bp, Glycine max
  unsure at all n locations
  Clone ID: jC-gmle01810024d11a1
gaggtcctggggtgctcgggatgcctgctggtccttacttatacgcggatgatctgattgaagtcttgaagaaaaagcatgcttctggaacatataaaaacctagtattttatctggaggcatgtgaatctgggagtatctttgaaggtcttcttcctgaagatatcaatatttatgcaaccactgcttccaatgcagaagaaagtagttggggaacatattgccccggggagtatcctagtcctcccccagaatatacaacctgtttgggtgacttgtacagtgttgcttggatggaagacagtgacagacacaatttgcgaacagaaactctgcaccaacaatataaattggttaaagagaggactatatctggagattcatactatggctctcacgtgatgcagtatggtgatgtagggcttagcagagatgttctcttccattanttgggtacagatcctgctaatgataatttcactttggtggatgaaaacttcttatg

SEQ ID NO: 7203 - DNA, 517 bp, Glycine max
  Clone ID: jC-gmle01810024d11d1
acaaaaataaatacaagttgtcattaatattaaacaataattttggcatcataaattcttccggaataattatacaaaagtgaccagggaaaacccgatctgccagttgcccactgaataaaaacacacatcatattactatgtgttgtcatacatgcattgtaatgagtggatattccaaagcaattggtccctttatccctccttaatccttatgccgtaaatggcaccatcccttgtaaattgtaattgcttcttcagaaatagaattatacaaaggtagttgcaatatctatttgccaaactataaatgtaaagacccttcttcccaatcctagtagtgtcccaattgtatttacaaaggtgggacaagatatgtatatacaagtacaaccatgtaacataatgtaacaataatcatactttggtctttactagtgcacattacagggagttattatgcactgaaacccctttgcagagaactccagggattggaaggaatactgacacaagc

SEQ ID NO: 7204 - DNA, 550 bp, Glycine max
  unsure at all n locations
  Clone ID: jC-gmle01810024d12a1
gatatgcagaccgagttaaaagtctatccaagagtggaaatcctagaaaggaccaggccccaaatcctataccaccaccagcaattaaagaggtttcatccacatcttcacttccaggtagtgttggtgcagaggattttaataatggtcaacgtcaagaggtaaaaacaatggacatgaacaagaaagttgtcgaaaaggaaagttctttgtacagctccgctgctgatgttgacaaacaatcaagtttttcttctagttgtcaattcaatgggcgagaggaaaaaagctcagcttctgccccaatggacagggaaaagtttgaagtaaagaattcttacggtggtgattctaccagtcagaagatgaactcttattccctaaatgttacagatgagaaagtgcanagggtgtctcctccacgcagaatagggactaacgaggagaaatctgaaagatctgtaaattgggtaaaactggatgtcgatggttatgatcattccaccacaagcttcaaacagcagagcacagggaattataccattaccac

SEQ ID NO: 7205 - DNA, 511 bp, Glycine max
  Clone ID: jC-gmle01810024d12d1
aaaaataatttacacataaatccaatttgcaaaggcaataataaggtgggcataataatatcacagaagggacaaatatacatttgagtaaatttaatttgaatacccaacaaaagatccatttttttttataaaatgaacaaaaacctttaaaactatatcgctaacaaacactgagaaatgacatcaagaacatacacgtcatcactgaacaagagaaaccgagtctcttaacggggcactctttttctacttagtatctcttgttcttttagtcgatgttggaatcttgcaaggcgtgcttggagactgacgagactagctgctttgcgagaaagcacgaaactcaactgggtcacgtagttgtcaataagacttcccggctggtccacttctgccagtagtttcatttcttcacgaacaatctccattgtgtcttcaatttccttcctatgagcagcaattagtgcttcttcctcctcaagtattgcgctgatattcacattagaag

SEQ ID NO: 7206 - DNA, 372 bp, Glycine max
  Clone ID: jC-gmle01810024e01a1
ctctgcagtcgtgttgcggataattttagaactagtgcacgtgaaaaagggttccagattcgtgactttgaatacagtccagaaacacatgagaaccgaaagcaggagttagataaattggtacaagatcaggaaagattgagggcttctgtgttgcgatggtgctataccagctatggagaggttttcagatcctggatgcacttttgtgctgtgcgtttatttgctgagagcattctgagatatggtctgccaccatctttcttggcatgtgttttagctgcttctgtaaaatccgagaagaaagtacgttctatacttgaagggttgactgatagcacagacagtgcatactggaagaccgaggatgaa

SEQ ID NO: 7207 - DNA, 305 bp, Glycine max
  Clone ID: jC-gmle01810024e02a1
cgggacgtaaggatagtgagtttacatctggaccaaccttacagcaatgagttctttggttcaagtgcagaacatattcaaaaatacgaacctagttagataagttagccttttttctcaagactgaagtcaagagagactcgtttattagtatttcttggccaaaacacacaaaagtagaaagtgcggaatttagagttagtggctgtgagctgaagattataagcgcggcagcaaggtacacattcccttgactatcattccttttcaaaaaaataaaaatagggcggacccctactattgag

SEQ ID NO: 7208 - DNA, 351 bp, Glycine max
  Clone ID: jC-gmle01810024e03a1
tgggtataggtctcgagccaacacaatactcttaatcattaactcataccccattatgcacgaacataagttgtgttctaacacatatatatacgctttcttattgatctaaatatggcacctcatggagagtctatctttatgaaaagcaacatgtcaaagccacacaagctctcatgtgagaaccttgaacgaacggtctcagacatctgtttctagctgaccaaggaagagatcgaagatttgaagctgccaacaatatctgaggatgagaatgcaaagtgtgagtgctgccgcatgtgcaaagagtgcacaccgcagtacatagaccgtgtgcgtgagaagttcaac

SEQ ID NO: 7209 - DNA, 398 bp, Glycine max
  unsure at all n locations
  Clone ID: jC-gmle01810024e04a1
natccgntgtggattcgctcgacgttacaagcacgcatgccacacgctacggaattctcggtcgtggaatcaaccgaactgggtaaaaaagcaaaagaactgaataaagcacttgagtcacttgataaggaggaacgaggcggtctgaagggaagcgaaatgacctaaaaacgtgacatcatttggacactgatgtgtctgaaccgtgagatgatgtctcgcttctagccgtgatgtgtacacaacgggaaaaggctgatacaacatgggcactaacagcactagggtatctggcaaaatttgatatgggcattgtagggttaatcgaagatgtggcatggaccgctcatatcatcatctatctattgaacgagcctcctctatctcctttcttgaat

SEQ ID NO: 7210 - DNA, 584 bp, Glycine max
  unsure at all n locations
  Clone ID: jC-gmle01810024e05a1
catgagcattccaactgtgctagctttaccatattcagctcaagggcatgtcaatcccttgatgaccctctcagaaaagttggttgagcatggttgcaaagtcatttttgtgaacacggacttcgaccacaagcgagtggtaggttccatgggcgagcaacaagatagccttgacgaatcacttctaaagttggtttctattcccgatggtttaagaccttgtgatgaccganacgatgcgggcaagttatgtgatgctatgcaaaacaccatgccaactatgcttgagaagctcatagaggatgttcatttgaatggtgacaacagaatcagcttaattgttgcagatttctgcatgggatgggctttggatgttgggagtaaactgggaatcaaaggagccctgttgtgggcttcaccagcagctttatttggccttctatacaacatcctcaagcttatcgatgatgggatcatagattctgatggtggactaacactaaccacgaaaaagacaattcacatatcacagggatacctgagatggacccacgagactttttttggttgaatatgggcgacac

SEQ ID NO: 7211 - DNA, 443 bp, Glycine max
  unsure at all n locations
  Clone ID: jC-gmle01810024e05d1
aaagaaaagatacgagattatattatttgtcttggtcgtacaccaagctgacgattgaaacaaagaaaaccttgtgaacatttcaatcattcgaaaaacatactaattgttgcttgagtttcatgaccatcttaagtttaatttggtcaccttgttcgtatgttattttatcaactttggactaatatatttcttccagctaacataatcaatatgcataaagtgtcaatccttattctttaagccagttgacaagcctattaagattctctaatgatcgacctccattggttatgtttttcataactttgtccttcaattccagagaccttgaatttatgttctcatcattaaaagagtggtctacttttcttttaactccatgcgtgacacgagtccatttntatctttgtcaactcccagcccgaccttcaactcatcac

SEQ ID NO: 7212 - DNA, 500 bp, Glycine max
  Clone ID: jC-gmle01810024e06a1
tgagttttttaatctgaaaattgaagttaatatttaacattgctataattcctcgggataatattgtgggcagggcaatgctagagctgaaccagattctacgggcaagtgaaatcaactttgcaggtctgactgctttacctgcattcttgctctctctattactcaagactgtagtgctggcgatggttctaaacaggagaccaaagctgacggaagagggagaattgctcggattcagacgaggctgcttgttatagaggataagagaaggattatgcagtgccaaaattatgttgatcaagggttggagagagatgcacaatgtatgtgtggattggcactctataggctggatcggctgtatcaatctgtcaagtggcacgcagaagctactggagagtgggaacagttgcgtgaggatatgattgatttgggtcagcctagactactaacttgccacactgaatctgtgatatcacacatggttacatgtgaat

SEQ ID NO: 7213 - DNA, 472 bp, Glycine max
  Clone ID: jC-gmle01810024e06d1
acgaggaataaatgcctacattcacgactaaattggatttccgagtatccagacaaacatcattgaaaagaatttagaatggtaagctaaaatatgctactggcggatccgacttgtaagcaagcattcaaatgtaaccatgtgtgatatcacagattccttgtgcgcagcttgtagtctaggcttagccagatctattatatcctgacgcaaacgtttccactcttcgatagcttatgcgtgccacttgacagactgatacaggcgatccaggctatagagtgccaatgcaaacatatattgtgcatctctctccaacccttgatcaacataattttggtactgcataatcctattcttaacctctattacatgtagcctcctctgaatccgagcgatcctacctctgccctcaactctggcatcctgcttgaaccatgcacgttctaacatcatgagtaagcgagagaga

SEQ ID NO: 7214 - DNA, 541 bp, Glycine max
  unsure at all n locations
  Clone ID: jC-gmle01810024e07a1
accttcaccactccatttcctattttcccaattgctttttttattattttcagattcgaacaatagtaaacattttctgcaagcaaaccaaagcaaagcaaagcaacttttcccagtcaatataaggaagcgaacatggaagaagagaaaaaagtcatatcagaagtttcagtgaacaaatgttgttgaggaggcggatcataagaatgaaagcattaaggagacaaatggagacctgccaagtgaagtaaagaaagaagaggaagagaatgcctttgatggagaattcattaaggttgagaaagaagagaattccattgatgataagtcccacaaaactgaaagaagctcagattctcctagcagagaatttctagaagcccaagagaagatacaggaactcgaggttgaactccaaagactaacagaatctntgaagacctctgagcatgaaaatgatcagctgaagggagagatctcagttacaaaggagaaatnggaagaaagtggcaagacatatgaagagctggatctgagtcac

SEQ ID NO: 7215 - DNA, 550 bp, Glycine max
  unsure at all n locations
  Clone ID: jC-gmle01810024e07d1
aaaattccaaacttagaataataaaataaaacattaaccaaaacccgtttcttacacgcaggcaagggataggaattaaaacaagttccctgaccaagctgaagacttgagtttgaaagcatgcaaagaaagctttcaatctgtatttaatcttaatcaacgggaaagaagagagaaaaaaaaaacataaaaaatgaaaaaacatgaagaataacaaaatcaaaagacatagactgctgatactagtaacgctttccaagaattatgccaaagacaatggacacaagagctacacccaagatgaacttgaaatttatgacaggagaatcatggccagtttgaacatgagtctcggatgaagatgatgtctgaccacttgttacttctgactttttcttgctctttctttttgatggaatcgagaggcttgaaccaatgtccctggattttacttccaacccttctttctgatcaacactctcatcaccctgaaacatcattagaaaatagaaacaagtcatctaaatagaanatagtagagaagaagtca

SEQ ID NO: 7216 - DNA, 559 bp, Glycine max
  unsure at all n locations
  Clone ID: jC-gmle01810024e08a1
cgtacaacaaggttgtttttgttttgttttgtgttttctctctaatcattcgaatggccaaagaaggacctaactgggacgggttgctgaaatggagcattgctcactccgatgggactagccctactcgcaatttaagtgaggaggatcgaaaatggtttatggaagcgatgcaagcaccgcaccattgatggtgtaaacgtatgaaagagatcacacttgtgatgcaaactccagaacaagtattgaaagaccaaggagttacccctgcagacattgaagatatgttggaagagttgcaagagcatgttgagtcgattgacatggccaatgatctccactcaattggtggtttggttcctcttcttggttacctaaagaattctcatgccaatattcgagcaatggctgctgatgttgtgaccacaatagtccagaataatcctcgaagtcagcaacttgttatggaagcaaatggctttgaacctcttatttctaattntagttcggatcctgacgtgactgttagaactaaagcactgggtgcaatatcttcact

SEQ ID NO: 7217 - DNA, 277 bp, Glycine max
  Clone ID: jC-gmle01810024e08d1
ttctgtcttttttttttttttttttttttttttttatctttattttctttttttatgggccctgggtattagttatctattaattctcatttattcttatgatgagtcaggggcccacttaagaagagcgataccaaacaacccacagcgccttaatccgaaacaaacctcagaaaaaccctacaatgggccaaaaaaacgggccaaaaaccttccctatgggcctaaacaccacaagaacctatataaaaagagcgaaaaaagctaggcccaaaaa

SEQ ID NO: 7218 - DNA, 556 bp, Glycine max
  Clone ID: jC-gmle01810024e09a1
tggctccaaaaagctggaaggaggatatttttgctgcaatcgatttagaaattcttttgcaggtgctgaaatcaggtaacctggacattgattaccttgcaaaaattctcgagttttcactcgtcagtttgcagaagctctcagctccagcgaatgaggagatgatgaaagccggtcacaagaaactatttcatgatttgagtgaaaattggcattcaagggatgagtcaaacaattcatgtgttgtagccttggtgaagggcttgcaatttgtcttcggacagattcagattcttaagaaagagataagcaaagcacgaataagattaatggagtctttggtgaaggggtctgctggtctggactaccttaggaatgcctttgctaacaaatatggatctccatctgatgccaatacctctctgccttcaacattgagatggatttcatctgtttggaattgcaaagatcaggaatgggaagaacatgtgagttcctcatcagcattggcttctaattcatcccaagaatggcttccttcaactactctcagaac

SEQ ID NO: 7219 - DNA, 464 bp, Glycine max
  Clone ID: jC-gmle01810024e09d1
gcaaaatgaaaagttccaagatccaatcatatattaacaattcaatgttaaggtttaggcacctatatacatttctgtttgttacatcaaaagaattctacaaacaatgtcacttttttacaaacctaagatacacagcttacaattttacacactcctatgtacaaatgtgtgaattaattattattattattattattattacgcatgtacgtagcaaatatatcacaggttatcagacaaatgtttataccaaggtccatgaacactaactgaaatagaggctgccacaatcaaaacaccagcagtttccactaccttatcagtcataataccagtccaaactttcatgaaagccatttctgctaatttcctaccacggatcccactttcaccaagcacaacgccgcgcaaagctgaatagacagcattaaacaccctttcgaaaacaacatccccagctt

SEQ ID NO: 7220 - DNA, 389 bp, Glycine max
  Clone ID: jC-gmle01810024e10a1
ctcctccctcactcactcatcaatggcatcaacaatatcagcaatggccatgatcaacgccaaatgcgtcaacccaaagttccccaaccccaccaagctcgtaccatcaaaaccttcccttcaggtcaaccttccaaagggcctaatagcctcacccgaaaacaccaaactttccactgcgacagcaatcgcaggagcaatattcacaaccctcggaacctgcgacgccgctttcgccgttcaacaaatagccgacatagcagaaggcgacaaccgcggtctggcactgatgctgcccataattcctgcaatagggtgggttctgttcaacattctgcagccggcgctgaaccaactgaaccgcatgcgcagcaccaaaggcgtgatca

SEQ ID NO: 7221 - DNA, 509 bp, Glycine max
  Clone ID: jC-gmle01810024e10d1
aataaaagaaaagcggatatagcattagatacaagttgcaggaagcaagttacatgaaaactattagtatgatcatatgatgataattgatatcccacagcatttaattaagccccttccctatttaaatttcacaaacattaaatcactgggatctcatcctgttgagctggttaagagcaggctgcaagatgttgtaaagaacccaagcaatagccggcgtaaccacaaacagcagaagctgtcccctgttgtcgttcgaggcagcttcagccatcgccgccacttcagaagccgccgccgccgatgcatgcggcgcagccaccaagccagccaagccgccaagccccaacccaatgatcacgcctttggtgctgcgcatgcggttcagttggttcagcgccggctgcagaatgttgaacagaacccaccctattgcaggaattatgggcagcaacagtgccagaccgcggttgtcgccttctgctatgtcggctatttgttgaacg

SEQ ID NO: 7222 - DNA, 328 bp, Glycine max
  Clone ID: jC-gmle01810024e11a1
aggacatcgacgaagtaattcgaaggtcaaacgcaacgcactatggtctagctgcaggagttttcactaagaatgtgcacacagccaacactttgatgccagcactgagggttggaacagtatggatcaattgctttgatgttgaagatgctgtaatgacctttggagggtacaaaatgagcggcattggcagggagaagggtatctacagtctcaacaattacctgcaagtgaaagctgtggtttcaccagtgaagaaacctgcatggctgagatctgtgaattgctcaaactgctatgacgcgaaatcctacgtggctatcatctg

SEQ ID NO: 7223 - DNA, 509 bp, Glycine max
  Clone ID: jC-gmle01810024e11d1
agtgtgaatggtgcaaaatttatatcctacagcaacagtgtcattacagtatccaagtttgtgtttgagcaattaacaagtgaaaaatacataaattcaactggtataatgttcaggtacctaatcaggttttatcttagtaacatcacattatttattgcatgccattgcctcagcggaaaaagatgatagccacgtaggatttcggtcatagcagtttgagcaattcacaaatcacaaccatgcaggtttcttcactggtgaaaccacagctttcacttgcaggtaattgttgagactgtagatacccttctccctgccaatgccgctcattttgtaccctccaaagggaattgcagcatcaaaaacatcaaagcaattgatccatactgttccaaccctcagtgctcgcatcaaagtgttggctgtgtgcacattcttagtgaaaactcctgcagctagaccatagtgcgttgcgtttgaccttcgaattacttcgtcgatgtcct

SEQ ID NO: 7224 - DNA, 473 bp, Glycine max
  Clone ID: jC-gmle01810024e12a1
aggacatcgacgaagtaattcgaaggtcaaacgcaacgcactatggtctagctgcaggagttttcactaagaatgtgcacacagccaacactttgatgcgagcactgagggttggaacagtatggatcaattgctttgatgtttttgatgctgcaattccctttggagggtacaaaatgagctgcattggcagggagaagggtatctacagtctcaacaattacctgcaagtgaaagctgtggtttcaccagtgaagaaacctgcatggttgtgatttgtgaattgctcaaactgctatgaccgaaatcctacgtggctatcatctttttccgctgaggcaatggcatgcaataaataatgtgatgttactaagataaaacctgattaggtacctgaacattataccagttgaatttatgtatttttcacttgttaattgctcaaacacaaacttggatactgtaatgacact

SEQ ID NO: 7225 - DNA, 477 bp, Glycine max
  Clone ID: jC-gmle01810024e12d1
agtgtgaatggtgcaaaatttatatcctacagcaacagtgtcattacagtatccaagtttgtgtttgagcaattaacaagtgaaaaatacataaattcaactggtataatgttcaggtacctaatcaggttttatcttagtaacatcacattatttattgcatgccattgccttagcggaaaaagatgatagccacgtaggatttcggtcatagcagtttgagcaattcacaaatcacaaccatgcaggtttcttcactggtgaaaccacagctttcacttgcaggtaattgttgagactgtagatacccttctccctgccaatgccgctcattttgtaccctccaaagggaattgcagcatcaaaaacatcaaagcaattgatccatactgttccaaccctcagtgctcgcatcaaagtgttggctgtgtgcacattcttagtgaaaactcctgcagctagaccatagtgcgttgc

SEQ ID NO: 7226 - DNA, 267 bp, Glycine max
  Clone ID: jC-gmle01810024f01a1
ggaggtaagtatagtgagttatccatctggaccaaccttacagcaatgagttctttggttcaagtgcagaacatattcaaaaatagaacctagttaggtaagttagtcttttttctcaagattgaagtcaagagagactagtttattagtatttcttggccaaaacacagaaaagtagaaattgtggaatttagagtttgtggctgtgagcttcagagtataagtgtggtagcaaggttaacatttccttgactatcatttcttttc

SEQ ID NO: 7227 - DNA, 257 bp, Glycine max
  unsure at all n locations
  Clone ID: jC-gmle01810024f02a1
tggccgtnnntgaccagcaatatatcagatgctatgatcgcgcacgcacgcctccaatagctgctaatgcgactcgagggaggtagcgatggcgcgattccatctcgaccaaccttactgcaatgcggtcttcggtttcttggctgcacataccctctactacaacctaattacgccagttcaaccttataacgacgaggaccgacccagagacacgtggacgcagctctctcgggctacacacaaagaagtggata

SEQ ID NO: 7228 - DNA, 382 bp, Glycine max
  Clone ID: jC-gmle01810024f03a1
ggcgcatcgagaatttaagttattagtatcttttacatcttctgtcacataccttcgacttacattcacctacacaggactggaacaccaaagtgtgcatgcacagagccatgactcccaccgctgctctctccttatggactaccgagacatccttgtgcgtttcacgatatgatacgcctgttgatcacaacactgctccgcaagccgctctgatggtgcgcacagaaatctctatgtgcgaggtgatacacatcaactgcgcatcctgatatgtccaagacgccgcatgactataacactgtctgccggccggggaaatcatctaacgggcttttaaggctgataaactaacattattattctggctacatgtgcaacg

SEQ ID NO: 7229 - DNA, 170 bp, Glycine max
  Clone ID: jC-gmle01810024f04a1
tgagctctcgagacataaagttatagttcttttaaacttctgtcgctatatttgcttagattactgaacaggatagttccactcatagtgtccatgaaacttaagcatgacatgccggatgagcacttccatggctacgggagatccttctgcattctactatataaata

SEQ ID NO: 7230 - DNA, 580 bp, Glycine max
  unsure at all n locations
  Clone ID: jC-gmle01810024f05a1
cagcggtttctcttcaaactcaggacttatacatgacaccaccaatcacagaagggtcaatagaagcatgaaattcagagtttcagcaaaacaagagaagcaagaagagaagaaaaagcaatctttgttcagcagtgtgactgaagctcttgatttttctcaagtgagatccgctgatgatgctcagcttatagaagaggctagagaagccacaaaatcaggagaaagaatgagtagggaacagtatggagctcttagaaggaaaattggtggtacatacaaggattttttcaaatcttacgttgaagtggacggggcatatgttgaagagggctgggttgacaaaacatgcaaggtgtgcaagaaggacactaagggagaggcaaggcaagtggacaagtttggaagatatgttcatgtagcatgtctagagaaggccaacacagggaacttctttacaagactgttttctagataaagagcagcattccagagtcatggcatgaaatggttgggggaaaactcantttctcatatagtctntatacccaatgattctattagtcatccattatcacat

SEQ ID NO: 7231 - DNA, 514 bp, Glycine max
  Clone ID: jC-gmle01810024f05d1
gaccaacgtggaaactataattaattctcactcttgtatacaagaatacacacaagctgaatatctaatgtgataattggatgactaaatagaatcattgggtataaagactatatgagaaaatgagttttccccccaccatttcatgccatgactctggaatgctgctctttatctagaaaacagtcttgtaaagaagttccctgtgttggccttctctagacatgctacatgaacatatcttccaaacttgtccacttgccttgcctctcccttagtgtccttcttgcacaccttgcatgttttgtcaacccagccctcttcaacatatgccccgtccacttcaacgtaagatttgaaaaaatccttgtatgtaccaccaattttccttctaagagctccatactgttccctactcattctttctcctgattttgtggcttctctagcctcttctataagctgagcatcctcagcggatctcacttgagaaaatcaagagcttcagtcacac

SEQ ID NO: 7232 - DNA, 534 bp, Glycine max
  Clone ID: jC-gmle01810024f06a1
cacactatggatgtttggtcatggatatgtgagctccccaactcggtggaggggaccgagtcccactcgccacccatgaagttcgaaatcgcgagtgagaagaacgacgacaagctggacaactcaactcgttccattcacctgaaagctgagcgaacctccggctcagacttcgaagctgccgggatcttcaccgtatgcttgcaaggctttcacccacacaacgctcacaagcctctatgggtctccgaaaagtgccacctctcatcagaaaagccgttcctccctctcctgctccaactcctccaggaaatcatatcccactcccccacggcgcacgatagcacctgcccccgttcccagctccagaaactaaaacccgaccccatcgcatggatcatggactcgcacacacccgagtccctctccaccttcttcaacctcgtcttcaccatgcgcctcttctggctctgcgccttccacgctccccccgaagccggctccctctacttccactccctcctcgcccccgtt

SEQ ID NO: 7233 - DNA, 521 bp, Glycine max
  unsure at all n locations
  Clone ID: jC-gmle01810024f06d1
aaacaagagttatatattattgctttattcatttatttgacattttataacttgggaattgtatatgaaaccagacactacagataaagcatttgcttagtaatggctattgtacatatattgatatatagcacttaaactgcagtgccatatatatgtatatatactaaccagctagtggctaagtttagtactagatgcatttttacacaaacttgtgcgtcctcttttggtggttataattaggtgagaagggtttaaagtttgatatgattgcgtggttgcttaggttgtttttccatgaataagaggcaagtcaacttcatcacaccactcgatgtacctagtttcaaaataagaaccctttgcttggttgggcaaatagctaacccaaaactctgcccctattctccacttcagcacactcccttccatctctttgctaaacctccaccctacttccttccacatattcatacncagcaataaccaccgatccgcttttattaaacgctctattt

SEQ ID NO: 7234 - DNA, 524 bp, Glycine max
  unsure at all n locations
  Clone ID: jC-gmle01810024f07a1
gtttaaatatgatattgctctttctctgtactctattttctcccaccgtcacacatggctacggctgcgtaggataacatctaacaaacctagcgcacgatagtcttccttcacccatgcttggagtactctgcgccactcgccccaaaccttggcttctctccctcgtccacgttcacgcttccctgcctcgcctacctcattcccctctatcaccttcagcctcgccgccgccccgtcgccgccattccaccgcctgcaaactttttctctccggcggcgctgccgcctccatatggcacgctatcatgccccgaggtgatgacggattacggcgcggcgttgatgccgtccatgacttgaagggagagggatcgtggaatgtcgcttgggacgcgcggccggcacggtggctccacccgcccgactccgcgtggctcctctttggtgtctgtgcttgtctggcgccgncgacgggttgcgtggatgctgacactaattctgctggaatcgctgtggatgaa

SEQ ID NO: 7235 - DNA, 570 bp, Glycine max
  Clone ID: jC-gmle01810024f07d1
aagtaaaatcaacacttcacttgctaatgccaatcccaaatcccaaattattgaagcaaattattatcattttcttcctatgataattgtggtataacgacatcttaacatcagatgaaaacaaacaaactacaaaaattccaccagcagcatcttgcgtaaattgaattgcaactgaactacagttgcaaaaagttactaaattcactgaaacactcccaaaatgacccctcaaaaagctctttacgcgagaagtcttaaattgcaccatcaaggcaagtgagttttgtgctgtactaagtgtttattttcatttttcaggtaattatggtcgtaaggtctctagtatgtcatagtgaccatacccatgaaatagcacattgatggaaatgtccttatcgttcctgtattcttcaccatattttgctatgtttaccaattcaaccgagcctgtgtctctcatgaaaacagaaattggtgtcttcaaaacatgagaagccatcaatagctctggttctccaccccatacataaggcttgtgaattctctgcagatatgtatcgaaatccc

SEQ ID NO: 7236 - DNA, 693 bp, Glycine max
  Clone ID: jC-gmle01810024f08a1
gttgttatttatgatctatgactgtcatgactgttgttgcacacttacctaagctgctcgagctcccattgtcgaatctaaagcgtgcgggtttggttaagaatcggctaattgctcgttgcacttctaagtccgatgaatttggttctgttaatcggtgttgcatattcacgcgccaatacagcatttttggtggaggacagctagttggggactgaatatcggggaagtgctctgaggactcagattggcaatattggagcctttttaacaagctcgatgtggactaatctgaatgacaaaattgcaagatggacctgttgatcgcatacactatgctatgaaaccagatgaagcttatggactgatcttctcttgcgacaatgtggcggctggtacaccagctctaaagaggaccgcatgggagcagctggcctttgaagatggaaaggatattccggatgaaggtgatatgcacaaattactgttttatgcatgtgctgattatgtgttgcataagtttttttctctcagataaagcggaaaatgagctgaataggcttaagttaacgttttctcagatatattatgataatcttgtcagacttgaaaaaccaatggatggcctcaatgactggttggaagcaagttatacagcttcgcatcctctgtgctgtgggttcaagtcttgat

SEQ ID NO: 7237 - DNA, 482 bp, Glycine max
  Clone ID: jC-gmle01810024f08d1
gatatcaacttattggtcctctgtatgaagaggttgcgaatacttgtcctacaggaattcacttttaaaacttagaaagtcaaatgaagtgccagtgacttcattctagtggaccttcactatagtctatacacatatttttagacatgaagaaatatggaaaacacatttcagcggaaggcatgctcatagtcatgataacggaagtttttgtatatgaagtgagctaaccaccgtgacagtgcaaatgatagcactgctaaggcaaccattgaatttctttttgccactgacattgtaccatgcttcatgacggcaacaatcccaattgaagcaacagatatgatctgcagcattacttcaaccgcattgaggctcttattaagcagaattgcaacttttgcaattcaccacatgggaccagtacctgtccaaagctgttctctcggaggtgttggaggaagagctgcactatattatcc

SEQ ID NO: 7238 - DNA, 439 bp, Glycine max
  Clone ID: jC-gmle01810024f09a1
gagaaagtagagagagagacacacacaactcccataattgctttgcctaaccttaatttcaggacacttcgaagctaccaggaccaattgttgttgttcttccctttttgtgctttttgattcagagatttttggttttcgattttttttttcacatggagaaagttcggtgtctttaaaatggaattatctagttgggacatatttgaattggcgccttgtcttttggtgctggcctcatgggaaacagtgatgaagagaaatctgttaaaactggaagtccttcttcttcacctgcaacaactgagcagaccaaccaacctaatattcacgtctatcctgattgggctgccatgcaatattatgggccatgagtcaacattccaccatactttaactcagctgtggcttctggtcatgctccacacccatacatgtt

SEQ ID NO: 7239 - DNA, 564 bp, Glycine max
  Clone ID: jC-gmle01810024f09d1
aattccccgatcgacctgctcctaggccgcggtcgtcctttttttttttttttgatatcaacttatttgtcctctgtatgaagaggttgggaatagttgtcatagaggaattaacttttaaaatttaaaaagtcaaatgaagtgccagtgacttcattctagtggaccttcactatagtctatacacatatttttagacatgaagaaatatggaaaacacatttcagcggaaggcatgctcatagtcatgataacggaagttttcgtatatgaagtgagctaaccaccgtgacagtgcaaatgatagcactgctaaggcaaccattgaatttctttttgccactgacattgtaccatgcttcatgacggcaacaatcccaattgaagcaacagatatgatctgcagcattacttcaaccgcattgaggctcttataagcagaattgcaactcttgcaattcaccacatgggaccagtacctgtccaaaagctgttctctcggatgtgttggaggaagagctccactatattttcctgtccaatcaacctgaccacctgcatact

SEQ ID NO: 7240 - DNA, 189 bp, Glycine max
  Clone ID: jC-gmle01810024f10a1
tatagagggtgcagtagtgtgtttgtatttttcttgttcctggtcttgtatatatgatggagccctcggaactggaggtaggtgagactttaattctgaccagccaaattcgggaatgtctatggatgatgaacttaaatctcaatttcaaataaattgctacaaacaataattaagccttggggtcac

SEQ ID NO: 7241 - DNA, 149 bp, Glycine max
  Clone ID: jC-gmle01810024f10d1
gaaattgggatttaagttcatcaaccatagacattcccggatttggctggtcagaattaaagtctcacctacctacagttccgagggctccatcaaatattcaagaccagaaacaagaaaaattcaaacacactactgcaccctctata

SEQ ID NO: 7242 - DNA, 471 bp, Glycine max
  Clone ID: jC-gmle01810024f11d1
aataaggaaaatatggaataaagtgcagctgggatatagatagcatgcatataacagaaccagttgcatataacttgcatgaaacaagaagctagaagaagagtgaaaaagagagagagaaaatgaaaagcattggagcatgcatgatttaagttctcttaaccggatcaaagttggaaaccccaataacgggtccaaatatggctgctagaacaaccccaccagcaaagatgctgagtagaaagttctttagggaaggggagaactcatatccagcagcatgagccacctccggaaccaccatatatgctgtcacaaaagctgctgtgagtccggcaactgccttttcctttaaagatgcattgatttgaggcttggagtttgacactgccttcgaggagaaaagggtcctctttggtaggcgtaagggtagagggctgaaaaggctcccgtatgaagcttgttgttgct

SEQ ID NO: 7243 - DNA, 546 bp, Glycine max
  Clone ID: jC-gmle01810024f12a1
aacaaacacaacaacactctctcttctcgctcttggcttttcgctcttcactcactctcattcattcatttccaccgttcatggatccagtaagcgtgtggggtaacacgcccttggcgacggtggatcccgagatccatgacctcatcgagaaggagaagcgccgacaattgccggggaatcaagcttatcgcctccgagaacttcacctgcttcgccgtcatcgaggccctcggcagcgctctcacgaacaaatactccgagggcatgccgggcaaccgctactacggcggcaatgaatacatcgaccagatcgaaaacctctgccgctcacgcgcccttcaagccttccacctcgacgcccaatcctggggcgtcaacgtccagccctactccggctccccggccaacttcgccgactacacacgacgtcttaacccccacgaccgcatcatggggctagatcttccctccggtggacacctaaccacggctactacaccttctgcggaagaagatcttcgcaccttcatttacttcgagagt

SEQ ID NO: 7244 - DNA, 417 bp, Glycine max
  Clone ID: jC-gmle01810024f12d1
tgcatatgttcaattcgtaatttgaatttatttcggcatggacgatgctactagtccgcggtcgccctttttttttttatactttaaattttctattgtaaaaccaacatactcatgaggagaggcatcatataagtattaatacactcgcaaaataacaaaaaatatgtaagattggcacatccaaatgcctttttattacacaaatattattaagttgattggtacttatcgaccgaaacttcactgtggcaatccctatccatcctgaaaactgatgaatgatctactccttttttatcttcacgaccaatgtgtagaacttgagctgcacaagatgagactatgcggcactgtataacctgatgcttctactgtatttagcatcccacctggggcaccatttctaaaagggga

SEQ ID NO: 7245 - DNA, 366 bp, Glycine max
  Clone ID: jC-gmle01810024g01a1
tctcatctgcttggcatctatctatggggcgatgtgatgtgcttaatatgatgggtcatgtgctaatcggctcgcttgtatcatacggggggaattaataacttgtgtctatgatcgttggaacatgggaaagtggtgcactttaatgaactaaactggctatgcatactggtggtgcaatagacaatggcaacagccccataactctatgtggcttgacaagagtgggctcgcgctatagatgacgattttgatgctgagaattgacggacagcttctttgacaggaaacgtcgatgtccataaacccggcgttattcatggttctggacatcagggccaactatatgtggagatagtcatgaaa

SEQ ID NO: 7246 - DNA, 432 bp, Glycine max
  unsure at all n locations
  Clone ID: jC-gmle01810024g02a1
ggggtgtattgtcccccnggcgatgtaaccgactatactggcgtacgcacgctacaaatctctaatctgctaggcgcattatctatgtcgtgctttgattggagaaaaatgatttctcattggctacttggcaccctgaaatcatagatgagtcattgacaaccttgtgacatgtttgaggaaacaggagagacagatgcactgaaaagaacaaattggcatatgctgactgaggatgcgttagagagcactttggtgtgaagaaggctttggtgttctacaaaggaagacccccaaagggtgtcaagaccaattgcatcatgcatgaatatcgctttgttgacaccaatagacccattttgatcaaagacacctacatgaggctggatgactggattctatgccggatatacaggaagaccaaacatgctg

SEQ ID NO: 7247 - DNA, 389 bp, Glycine max
  unsure at all n locations
  Clone ID: jC-gmle01810024g03a1
nnnnttgctccngtgcagaatgcacgaatttataagcacgcatgcacgcgctcgtaatctgggtagtgggatacagactgagtcacgcagggtccatgctccaatccaacggaccatgacctccatcataatgattgagcgttccaacatgagctgatggcccagaacactctgccacattagcattaggaccttgtggcccaagctggccttgcaccagcatgggagggagactcctgatgctgtcaccttgagagagaaccggctgcattgaatgctgctgtaccagatatacatagatgctggaggcatggatgggacgataacatcacagctattgaaatttgttgctatcatgagaactaatgagactgaacttggccgtctta

SEQ ID NO: 7248 - DNA, 474 bp, Glycine max
  Clone ID: jC-gmle01810024g04a1
ctcaggagctgaaatgctaatcttgcacttcttagctaagcgctagagtacgcccatgcattcgacttcggtggaggcaccaaccacattagcaacgatgagcacttctcatggcaacgctatctgctcttggcttgcactacgatgatagatttcttgagctacaacactacaccagttgcagatcggtagctgcccaacgtgttctccatcgcaaggtggaacacatcccacgcgccacctgatagcgcgcggaacgcgtatcgcaatttcactgggtgccgcccggggaaaacatataaccgtcttccgaatctgaacaactacttgcattgttttggcgacatctgcaacgagtactcgaagtcgtcgaattacagcgacgatgtcgatgatgacatggaggcagccgttagagcctaccagaagaacttcaaactgaacatgacaggggagctcgacgaccccacgatg

SEQ ID NO: 7249 - DNA, 513 bp, Glycine max
  Clone ID: jC-gmle01810024g05a1
aaacactcataacacaaagcacaaagcaaagctcatccttgagttaaaaaatggcagcagcttctgccatggctctctcatccccatccttggctggcaaggccgagaagctgggcccatcagccccagaagtgggaagggtgagcatgaggaagaccgtcaccaagcaggtcttcctaagaagcccatggtacggtccagaccgagtcaagtacttgggcccattctctggcgagcccccgtcctacctaaccggtgagttcccaggcgactacggctgggacactgctgggctttctgcacacccagaaaccttcgccaagaaccgtgaactcgaagtgatccactccaggtgggccatgctcggagccttgggctgcgtcttcccggagttgctgtcccgcaacggggtgaagttcggagaagccgtgtggttcaaggccgggtcccagatcttcagcgagggtgggctcgactacttgggcaacccaagcctgaaccacgcccagagca

SEQ ID NO: 7250 - DNA, 455 bp, Glycine max
  Clone ID: jC-gmle01810024g05d1
gtaaaaagcaagtaacattaagttggattcggatacacaagatgattcgcattatctgaagtacttcaccaaacacaaatctaaaaactctcaaaagtcattccgttctttgacgcttactttccggggacgaagttggtggcataggcccaggcgttgatgttgactgggtcagcatggtgatcggcgaggttctccaatggaccctttccggtgacaatggcctgaacaaagaagccatacatagagaacatggccaatcgtacgttcttgagtgccttcaccttaagctcagcaaaagcctctgggtcatcagcaaggcccaatgggtctaagctgccacctgagtagattgtgtcagtgacctgaccgacggggccaccagcaatacgggtaccttgaacggcacccattaggataacttgcgtggcccagatggccaggatgctctgggc

SEQ ID NO: 7251 - DNA, 539 bp, Glycine max
  unsure at all n locations
  Clone ID: jC-gmle01810024g06a1
caatgaagctgaatgcaacaactgaaatgatgcctgtgacatggcccagctttagtgatattcacccttttgcaccagttgaccaggctcaaggttatcaggaaatgttcaacaatttgggtgaactgttgtgcaccatcactgggttcgactccttctctttgcaaccaaatgcctggtgctgctggagaatatgctggacttatggttattcgtgcatatcatttggcaaggggagaccaccaccgcaatgtttgcattatacctgtctcagcacacggaacaaatcctgctagtgcagctatgtgtggaatgaaaattgtctctgttggaactgatgccaagggaaacattaatatagaagagctgaagaaggctgctgaaacacacaaggataacttatctgcacttatggtaacatatccttcaacccacggtgtttatgaggaaggtattgacgaaatttgcaatattattcatgataatggaggccaagtatatatggatggtgccaacatgaatgctcangtgggactcac

SEQ ID NO: 7252 - DNA, 551 bp, Glycine max
  Clone ID: jC-gmle01810024g06d1
acatgaatcaaatccattttttcacattactgtaacagataggcctaaaatacattcctaaaatccaatagcagcagcaattatacgaattactttttttttttttcctgtgattggatgaaacttaagagcagtggattatcatcattgtcacatatgatgaagcaatattcaacaagtgcaagaactgtatgaataggaataagagtttatgtacaacgggaaatgaaaatagttgtcatttgaacacattatgctgtggcagctgcttgttcttcaacagcctgtgatgctgggagaagggtgcaaatgaggttgcggtcaccgtacacattatcaacacgtcctgtggtaggccagaactttgcagtacggagccaaggagctgggaaggctgcatattccctggagtatggttttgtccatgcatcagccatgagcagtgatggtggatgaggggcgcccttaagtacattggtgttaatggcaacctttcctttgtcaatctcagcaatttcttggctaatgggatatagagcatcacagaacct

SEQ ID NO: 7253 - DNA, 563 bp, Glycine max
  Clone ID: jC-gmle01810024g07a1
tgtgaagctttaatgctgcttcagaagaatggtttacgaaagaagaatccttcaatttctgttgttgctacactgtttggagatggggaagatgttgcatggcttgagaaaaatcatttggctgactgggcagaagaaaaattggatggaagattaggaaatgaaacctttgatgattctcaagtgagagcaattgcaatgggtttgaataaaaagaggcctgtattggttatccaaggccctcctggtacaggcaagactggtttgctcaagcaacttatagcatgtgctgttcagcaaggtgaaagggttcttgttacagcacctactaatgcagctgttgataacatggtagaaaagctttcaaatgttggattaaatatagtgcgggttggaaatccagctcgtatatcaaaaacagtgggatcaaagtctttggaagaaattgtaaatgctaagcttgcaagttttcgagaagagtatgagaggaagaagtcagatctaagaaatgatctaagacattgtttaagggatgattcactagcttcaggcatacgccaact

SEQ ID NO: 7254 - DNA, 401 bp, Glycine max
  Clone ID: jC-gmle01810024g07d1
gggactggaaatcttttgggaaaccaaacatgctttaaaagcatcacggcatataccaatcttggggtttaaaagaacttttgggtacgaacttgataccctacccaatttggaaattttgaattgctttacaacttttcaaggttaaagaaaaaacctatccatcccaagtccctatcctccaagggattttggattaaaatggaacttggttcaggctactggtggacactcattaagggaagggaatattggattcatcccaattccaaattcctcaaaactacctggttctggaagcttcacccttcccaaggggctaatctgacgcaaaagccttgataaaaaggtattgtggcatataagagagcttgggcaaaccaaagcttaacgtttgcccg

SEQ ID NO: 7255 - DNA, 165 bp, Glycine max
  Clone ID: jC-gmle01810024g08a1
tcaagctcgtgccgtgccggatgacacgcgtggctgacaagatgcttgccagagagatcaatgagggcgactctgatatagtggatgttgattctgatggtcctgtgattgtgctcaatggtagcagccgagcccgagaatatttgtcagagacgctgcctgttt

SEQ ID NO: 7256 - DNA, 470 bp, Glycine max
  Clone ID: jC-gmle01810024g08d1
aattccagcatcgtccatctccgtaggtcgcgcgtcgccctttttttttttttttatttctgaaagtatagtgtttgttcatcttcattggagggtaaaatagggcaatatatatcttactgaattatcgaccgagcagaaataaggaagttaagacaagaatgacttgtgactcaaatcctgtaagggatcataggaatagtgtccttgaagtatgcactggcagtagcaacttcacttccaagctttacaggatagcccacatctttcagtatcatcttcacaccagctagacatcccaacagttgcaactcattcaagttgccaggatgtccaattctgaaaaccttaccagcaactttgttcagtccatgacctaagctcagattgtatctcttccatgcccttctaactatttcagtactatcaatgtaagcaggaacaagaacagcagtcacagtgttactgta

SEQ ID NO: 7257 - DNA, 530 bp, Glycine max
  Clone ID: jC-gmle01810024g09a1
agagaaactaagacagaaagagagagaaagagtggttgaaagcgtccattgaaggtatagagagagaggttttgtgaattggtgctgcttcgtgtctgtttatttcctcgcgaggtttgaattccggaacagttaagagaaacggaggttccgatcctgcgatgtgatatatgagagatctgtgaaggaaattgaactggaaaaaaaaaatggcgacgtcggaggtatccatcaagggaaattcggtgaacggaaaaggagataatagttctggtggctacaccaacgatgttaggaacggttctggtggaggcgaggctcggaattcttcttcttcgtcttcatccgcgagagacgcggaagctgcgctttacagggagctgtggcacgcgtgtgcaggtcctctggtgacggtgcccagagaaggagagcgcgtgttctactttcctcaaggacacatcgagcaggttgaagcgtccacatatcatgtagcggaacagcatatgccggtttacgatctaccacccaag

SEQ ID NO: 7258 - DNA, 421 bp, Glycine max
  Clone ID: jC-gmle01810024g09d1
aagagacaatcatatttaaaatcagataaaccgcccttgtatatgacacttaattacattaacgagtttgggtactaaggatgcgagtaaaactatgtacaaggtaggattgttgaaaaatgcaaggccgatacaccggctatcaccttgcacaaggcacaataacatactactatattaggagtgtataacagggaaggcatatatatatactactactactactactaattccacgacacggtccaaaattggatggatactcattcatgccatccatattcagattccaaacacaagcagtcacttgataaagcagtcagattcagaattagaattttcttcatcaggtgatattctacaactggatggctctatgacagtcacctactttccaatccagtccggaatctggagctat

SEQ ID NO: 7259 - DNA, 449 bp, Glycine max
  unsure at all n locations
  Clone ID: jC-gmle01810024g10a1
ctaggacgcagagaagctgatatcaagaacagattcacattgccgccatttttgacattgaagaactttgaaggattggaccttggaaagatggacaaagctgatgactctggacttgcttcatatgtttctggtcaaattgatcgtactttaagctggaaggatgtgaagtggcttcaaacaatcaccaaactgccaattctggtgaagggtgtgctgactgctgaggacacaaggatagctatacaaagtggtgcagctggaattatagtgtccaatcatggagctagacaacttgactatgttccagccaccatatcagccttagaagaggttgtcaaagctgctgaaagtcgccttcctgtatttctggatggtggtgttcgccgtggaactgatgtcttcaaggcattagcactaggtgcctatggcatnattattggacgccc

SEQ ID NO: 7260 - DNA, 455 bp, Glycine max
  Clone ID: jC-gmle01810024g10d1
agagaaagttaataaatggctcaaaattaagaatatacaatgagtgaattaatgcagcagcagcagtagtcacacaagtatcatcatataatgcttaaaagaaattaagcatagagttttccaaatacaaccttaaatgagttctccaaaaaggaaaagaaaggaggttcatgaaacacatatagaactgtttcctccattggtctgcaccacattatacaaacttggctcaaatgaggagcaaatttttcataatcttggcaatgcgcggggaagaatgcgaggttggtcccaatcagtgacaatgtgatcacgagtgatatccttgagtgaggtgcaaccactcaaggccatggttagctcaaactcctcacgtagcatccgcagcacgtttcttacaccagcctctccttcagcagccaaggagaacaccacagggcgtccaataaatatgc

SEQ ID NO: 7261 - DNA, 365 bp, Glycine max
  Clone ID: jC-gmle01810024g11a1
attgaattagggttgttgagtgcatgagaggtggaattgtgttgttgtgatggatgtggaggaaactgagaagttggtgtctttggacccatatttgttgctgcttccggaggtgtctccttttgcactgaaatcgagtaccttacgttgtagaggagctattcacacaggggcctttcgtttccagatacttgtcgcctgtttaagtcattgcttgctgatgcataggcaggagctcgtttgagtgcacttgagaactcaacatatacaaatgctctgtcaatcaactctctaccttccttgtttcctgctgggagtacaccaccactttcaccacgcagctgatgtggttccacacgtaccac

SEQ ID NO: 7262 - DNA, 470 bp, Glycine max
  Clone ID: jC-gmle01810024g11d1
gatgtgacaatttcttttttttgtataacaaaaaaaaacgttgaaagtttaatacaattgaccatgataaaatttgtaaggaaaaaaaaataacaaacatgaaacaaagaagaagaaaaactccacaattttttttacagaaatttaatttgatacggacaattttaagaaatgggtttttgaacaataacaaataaatttgcacctgctcgtaccctgtccaagggactagctattcttagtatactaaacattttcgaggggaacctttttagagcacactattagtagacacttaacgggaacatagccttttcaaatattatactggttgcatattcaggggctggaatccatagcctttgattcatctgcagttatgatgatatccatttaggccttaacctcagaaaggggcctcaagtgattcttcccagacatcttcactggcatttgacatatcttcacca

SEQ ID NO: 7263 - DNA, 580 bp, Glycine max
  unsure at all n locations
  Clone ID: jC-gmle01810024g12a1
ttcagagagaaaattaatgaatgaacatggctcgcaatgcagaatcctaaggtgatgtcatgtcaaaatgaagctcattaatcttgggcatgcacaaactacagaaacaagaaagaagattggtgttggagtgagaaggctatgggaaaagaggcgtggaaagaaaatggtgcaggaatcttgctgcactgagtggcagaatttaattgcagaagcttctaggcaaggctatgttggtcaggaagagctgcagtggaattcttatgaaactgtgaatgaacagctgaagcatgactggttgatgagtgttgaacagaggaaacaaatggcaaggacaccatctagcaaaagagcacccaagtcccctgaacagagaaggaaaattgcagaagccattgctgccaaatgggctgatcctgaataccgcgaaagagtttggtctgcattggccaagtatcatggcagtgaagttagagctganaggaaacctagtagaaggccaagtgatggtacccaacctaccaagaagaaacctgcatnaaaaagagatattgatactagcgctcatgttaagaatgac

SEQ ID NO: 7264 - DNA, 495 bp, Glycine max
  Clone ID: jC-gmle01810024g12d1
aatgtaacaataattatacgattaactcagtttaatgtaacatgactaaaacaagtacaagtatccagtgaaccacccctctttccttagtgatagctatctattttagtcttcctccatctgtctactacacgtagttggctgttgcagggctgatacaactcacctcttgatttcaaggagtgaatgggtgagcaagcaatgatcacactattaaagcagaaaatattcgggcatttatgatctttataacgcaacaaacaatatgacattgctttgtattaatgtttgaaaactgagctaagcttttttacccattttattgcttctcttcagccacttcaacgagccttacacgaacccactgtttagttactacagacattgtctgattttcaagggagtgaattccatcactgttggagaaggatcttgttcgtattcacttctctgatcctgttctgcttccctttgttgatttgatggactagattc

SEQ ID NO: 7265 - DNA, 54 bp, Glycine max
  unsure at all n locations
  Clone ID: jC-gmle01810024h01a1
ggggtaatatattgatccannnnnngggccctaacttccagatctatgactgtg

SEQ ID NO: 7266 - DNA, 178 bp, Glycine max
  Clone ID: jC-gmle01810024h04a1
ggggaatggtggggttgcgatgtgctcagagttataagtcacgcatgcacacgctcgtaatgtctggtagtggaacacgaggcacaccagaggggctccaaagaactgattacggaccaggcgagcgacgagaacgagtaacattccattgaaaagatggaattgggacacggtcact

SEQ ID NO: 7267 - DNA, 501 bp, Glycine max
  unsure at all n locations
  Clone ID: jC-gmle01810024h05a1
cgaacaacgcttgatgatgaaaaaaccttcaatcgccgattaactgcaatgcaccactcatcatcaactcatcatccatggctttctccgcttcaattcgccctacctcttctcactctcagttgttttgctctgttaggttcaataggaggcaccatagcagtagccgaataggtttctcgtcgaacggcggaagaagatgtcgtcgtttacggaacagtgttaggtcggtgttgaacgacaaccggcctagcgcaagcgtgaacgacgattacggagcggcggagtctgctagggttttgttcgagagactgttcacggagaaccggataaccggagatgaaccggatcttcggattcttgaatcggatctcgaagcggcgctggcggcgctgaagatgaaggaggatcacttgatggaagcggagaggacggtgttgttggagaatagtaagttgaagctcacgaaggaggagctggagcggncagagagtgaaattg

SEQ ID NO: 7268 - DNA, 505 bp, Glycine max
  Clone ID: jC-gmle01810024h05d1
atatataataaatatattattcataatgtacataatgaaaaattcactacatattataataataataataaagaggaggagagataatcctttaagagtaacactaaaatagtaactcctcatgtaatgattgtacgtacatatcttgtagtagagtaccaaaaacagatgtgatcactatctgtacattgtacatatcttgcaaactaagggaagattttatgatctaccaagggacaagttagccttgcaatggctttgggagcaaaaagatatcaaaatacaataccccccaacacacacacaactttcttcattacctctctctcttagtttgcaggaacaatacccgcctgcatcacaagctgctcagacaaagatgagaggcgagcaactcttgcttttacctcttcgaaacattcagggttattggtgtcggggaatcaaatcggggctttattaccatcagggacactgatgtagttatcagcttcaacactcatga

SEQ ID NO: 7269 - DNA, 548 bp, Glycine max
  Clone ID: jC-gmle01810024h06a1
ttccattccaattatcgctacctcctccttcttcttcttcaaatattaaatttcacagaggatgggtggtgaggaattgagtttgatggagaacgaaaggaaagggaggaggctgtggaagaaggtgaagtaccagctggtggagtaccactccttgcccggttatttgagagacaacgagtacattctcgctcactatcgatccgaatggccaatcaagcaggttttgttgagcgctttcaccatccacaacgaaaccctcaacgtttggacgcatttgatcgggttcttcatatttctggcattgaccatatacactgccatgaaaattccgaaggttgtagatcttaattcgctacagcattttcctgacatgctcaagaaggccgacctgcacaaattacaatcagaaatcttgacgtgtctcccttccatgcctgatttgcacagactcagggatgaaatctcaagttggcatattaaagaatatctgtacaattgtttgccagtaagattttccagtagcaatcatactgatgcatgtgttc

SEQ ID NO: 7270 - DNA, 539 bp, Glycine max
  unsure at all n locations
  Clone ID: jC-gmle01810024h06d1
agaccaaatgaaatttttattgctgactagtgatttgtgctaagggttctaagtgtgtacataatccctatggctgcagaaacatcccctgctggaatcacaaattcacaccagttagaggagtgtatactaacacatactagttacataacagcagagtattcaaccactgtttgctcatagatgcatattaaatcaacaaccttgaaggtcacgccacctgagataaactaaccctgcccgataatgagcgtatgcccccgccaccaccaatatatgaaacaattggtgactgtgtccggcaatgtcaaatttcccgggcatccatcgttctggaatcctagtggcataaaccaatgctccaattccatagagaacacccatcagaatctcgtaagcagttgtgtgaaacacttctggctggccccagaatagataaagcttgtgcagaataggtgctgcaccagacaaacccattccaaagaagagagatgctcngatggtgcggaattctggattttggaacactgngagaagag

SEQ ID NO: 7271 - DNA, 552 bp, Glycine max
  Clone ID: jC-gmle01810024h07a1
ccataaacaagtcaatttttttggagcaggaagagatttttttttcttttcaatttgaattatttattatctatgaaaagcccttgactgatgcgtcccaaatccaaaattgctatattttctgttcagttctggctagtggctacaaaatctttgtacaaatttctgaacagtttctaggtattgaaactcttcatatgggtcagcaccatgctgccaagttgtgaactcaaagtggaaattagttgaaaagagtttgagttcacgtcaatcaagagtttcctctataggaaaacttggagtttattacacaggtactatttctgcatgtgcgcctgtgagattttatgagatgggtactagggtgcagctaagaagctcaaaaagattcaatttcaaggtttgtagtggaagttatgatgatggttatgtgattggtgaagaggaagctagggatatttcagggttagaggagcctgtaacaaccaaggttctgattccaggtctgcctgatgattcacaaggtgaatctggtgctccaataagtagttg

SEQ ID NO: 7272 - DNA, 529 bp, Glycine max
  Clone ID: jC-gmle01810024h07d1
ggtgagtaattataggtatattatatatacaagattttacctatgattctaaagcatttgtgtttgttttctctttatacaaactatgaaagagaagacagtatacaaagttgatttatatttgaagatgccatatgattcaccctgtcattgaggtttggctgccagaatattactgaacttggattgagatctgatgaaagatcttatcctgtcccaaagtgagaaattggaagcgaaatatctgaccatcactgacttttttgaaccttctctgggaaattctaattccctgtcaataatagagtgcttcatactgtctagatcttcaagcaatggtaatgacacagaaccctgagactctaggtttctgatccacccgcgaagtaagaaatttatgatctcaggaacttcatcatgagggcagtgaccagcagggctgatttgataatatggagcttcaggcacctgccttttaacctggagaccccaaattggccccacccagggatcttctcttccatacatg

SEQ ID NO: 7273 - DNA, 421 bp, Glycine max
  Clone ID: jC-gmle01810024h09a1
atcgattggaagacgaggattgttgtttacgaggtcgcgttgttcggaccggttgtcgaaccgagccagatggttcggctctttggtgttaacattttgaaactacccggttcagattctatcgccaataacaataatgcaagtgggtgctgcaatggctagagaagagaaatgggactcttttcattagagtgttgcaagaaacctaagattattggtgctttgtagcgttacgttactttttttgagcctttttttttttgagttttgtgactgatgaaagatagaaggtacatgaagaacggctgtgtaatggcatagcggcatagtaagttgctgcataaggtgaatagcatattactcaatattagatgctgaaatattaggtgtaatgtaacaaaaaactgtacaaggagaagaa

SEQ ID NO: 7274 - DNA, 323 bp, Glycine max
  Clone ID: jC-gmle01810024h09d1
agttacattacacctaatatttgggcatctaatattaagtaatatacaattcaccttttgcagcaacttgcgatgccactatgccactacaccgtcgttcttcttgtaccttctttctttcatcagtcacaaaactcaaaaaaaaaaaaaactcaaaaaaagtaacgtatcgctacaaagcaccaataatcttaggtttcttgctacactctaatgaaaagagttccatttctcttctctggccattgcagcacccacttgcatattggtattggccatagaatttgaaccggtgttgtttcaaaatgttaacaccaaatagc

SEQ ID NO: 7275 - DNA, 442 bp, Glycine max
  Clone ID: jC-gmle01810024h10a1
ggaatccagttctgcttgatggtctgtggcgcctccggcacgggcaggaccacctttgtcaacactttgtgcggcaaacaggtcttgcagccaatggacgccgatgacccgaccaccgcacacattgaggagggtgtcaagatcaagcctgtcactgtggaactggagcttgacgaaggaagcactcgcgtgtcgctgacaattgtcgacacccctggctttggcgatagcatcgacaacgaagctgccttccacgagatagtagacttcttggagaggcagtacgatgacatcctggctgaggagagcagaatcaagcgtaacccaaggttccgcgacaatagaatccacgtgctgctctacttcatccagccaactggtcacggtctccgcgagctcgacatcgagcttatgcgccgcttgagtcttcgtgtcaacgtca

SEQ ID NO: 7276 - DNA, 373 bp, Glycine max
  Clone ID: jC-gmle01810024h10d1
gaattaaaaaattcccgtttgaattactttttggaacggggaacttgctaaggggatgcccgtcgggggattgctgcctttcacatccggtgttcgaacttaccccttttccaaacacacttttaaacttacattcaaacgaaacaaagccctcgggaggggggggctttcatgggctggatcccggttgactcgaagctttcgctggaggggatttggtcgggtcccgttcgactcttttaagggctggccattaagccaggcttcaacccgcaaaactgtgacggagctttgcaaaggcttgcaccatgtgtccaggcttctagggctgggccccgggatccggcttgttatccctgggcacgctgggctg

SEQ ID NO: 7277 - DNA, 430 bp, Glycine max
  Clone ID: jC-gmle01810024h11a1
ttgaagttaaaagccttagccttccctacaactccaaacacaaagacatcatcatccatggctgcctccgtctccactgtcggagctgtcaacagagctcttttgaacctgaatggttctggagctggagcttcagctcccagttcagccttctttgggaccagcttgaaaaaggttattggcctcaagggtccccaacagcaaggtttccggtggaagcttcaagattgttgctgtagaagagaagaaagagagtgaagagacccagcagaccgacaaggacagatggaagggtcttgcctatgatatctcagacgaccaacaagacatcacacgaggatagggtttaggtgactcccttttccagctgcacaggatgctggaactcactatgcagtcatgagctcctacgagtacctcagcactggac

SEQ ID NO: 7278 - DNA, 449 bp, Glycine max
  Clone ID: jC-gmle01810024h11d1
ggacaaaaggaaaaggccccaaattcaatttaaggggacactgtaactcaaaatttttgaggaagacggtccaatttgaaaaatatagtaagatcatctcaaacttagcattttctttttgcacctaagacattgagaatgctaaaaatgttacacgcaagttccattacaacttttagcacttggattagtacaacaacctttacgaacagaaatttttacttgccaagtttgctttgcctccaattcaagactggaaaaaagttcccctttgaatagcatcctcgttagcatttccaagagcagcctcgttcaagtacttgtcagccaattggactcttttgacattctcttggtcttggacaagcatgttaccatacagcaagagcttctccagagtcatcttgggctgctcaaaagttggaggtccatcttttgagttcacaagc

SEQ ID NO: 7279 - DNA, 588 bp, Glycine max
  unsure at all n locations
  Clone ID: jC-gmle01810024h12a1
tgttttcctatatattcgatgacgtcgcatgcattcgatgcacgcgttcagtaatgctgtgaacttcggattgagggcggctcgtgagagactaagggcataaataaacccttagagaggaaacgtggaaaaactgagaaatgtattaggcttgaagacttgcaacggtattgtgctgggagtctaaaagatgctgcaaagagcctgggtgtttgccctaccacagtgaagcgcatctgcatgcagcatgggatatcccgttgccatctagagagatcaacagggttaaccgttccctgtctaagctcaagcgtgatattgaatctgtccaaggtgctgaaggagcatttggtttgaattctctgagcaaaagtccacttcccattgctgttggatcctttcctgagccttctactccaaacaagttcagcctgccagcctcattaagtattaatccatcagagcctcagatcagagagaatgaattgaatgcctncaaagcattagaaacaaacagtcgggctgtaatggaagatgatcgattgctaggaggcatgacaccacatcttgagaaagtattaacgataa

SEQ ID NO: 7280 - DNA, 409 bp, Glycine max
  Clone ID: jC-gmle01810024h12d1
gaatgccaacacgattttatttcaaaagctgaccacgttatgtgtcaccaaagaatcctcgcttttcctcatgatgagtcaggaacttacttttgttgagtgataccaaagattcaaactccttttatctgatctaaacctctcaagtttcttacaatttgagcagatcaccaaacctattttccttccctattgtcctaaacaccacaagaacctatataattagagtagagactcaacctatatacagccagttctcactcccccgagctctcgcatgagcttccaagatttgaagttatgtcatgcaccaaaaccctgattattttgcttcctgatgatcttgaaacatccatgcactcctgtaggtctgcatcacaggctatcaaaacccattcgtgatcatcat

SEQ ID NO: 7281 - DNA, 418 bp, Glycine max
  Clone ID: jC-gmle01810025a01a1
ttgttcctttaggatgcctaaaggaacattgaatctgggtgagcttattctgtatggcacactatcacatcctaacagcacatgaaacatcaaactctctttaggaagattcatattacttgagcaaccaagtggcttcaccagtttcattggttgttctcaggggcagctcaaaaagtcaagctgtaaatggccttgtcaccccactccattgacagaatccagtaaccaacctgaggctgagccagaatttgaaagtcatgcagagaaatatgactggtactctcagaggtaccctttgatgccaattagtgaccttgacaagaggaagccacatgggaagagggtgttgggaattgatgtggttgagtggtgggatatgaataacgggtccttgtcaagaacatgatgatgcttg

SEQ ID NO: 7282 - DNA, 365 bp, Glycine max
  Clone ID: jC-gmle01810025a01d1
gatatcaacttatttgtcctctgtatgaagaggttgcgaatacttgtcatagaggaattaacttttaaaatttaaaaagtcaaatgaagtgccagtgacttcattctagtggaccttcactatagtctatacacatatttttagacatgaagaaatatggaaaacacatttcagcggaaggcatgctcatagtcatgataacggaagtttttgtatatgaagtgagctaaccaccgtgacagtgcaaatgatagcactgcttaggcaaccattgaatttctttttgccactgacattgtaccatgcttcatgacggcaacaatcccaattgaagcaacagatatgatctgcagcattactttaac

SEQ ID NO: 7283 - DNA, 539 bp, Glycine max
  unsure at all n locations
  Clone ID: jC-gmle01810025a02a1
ttgttccttttggttgcagaaaggaacatggaagctgtgtgtgctttttctgttggcacacttcacatcccaacagcacatgaaacatcaaactcctttaggaaatccatattcttgagcaaccaagtggcttcaccagtttcattggtttttctcaggggcagttcaaaatccaagcttttaacctgcctttgccaccccctccattgacagaatccagtaaccaacctgaggctgagccagaatttgaaagtcatgcagagaaatttgactggtactctcagtggtaccctntgatgccaatttgtgaccttgacaagaggaagccacatgggaagagggtgttgggaattgatgtggttgtgtggtgggataggaataganggttgcttggcaggttcatgatgaagcttgtcctcatagattagcaccctggtctgatggaaggattgatcaatggggcatgtngcagtgtgtgtaccatggttggtgtctcatggcaaacgagaatgccagttaatcctcaggcactcctgatg

SEQ ID NO: 7284 - DNA, 479 bp, Glycine max
  Clone ID: jC-gmle01810025a02d1
gatatcaacttatttgtcctctgtatgaagaggttgcgaatacttgtcatagaggaattaacttttaaaatttaaaaagtcaaatgaagtgccagtgacttcattctagtggaccttcactatagtctatacacatatttttagacatgaagaaatatggaaaacacatttcagcggaaggcatgctcatagtcatgataacggaagtttttgtatatgaagtgagctaaccaccgtgacagtgcaaatgatagcactgctaaggcaaccattgaatttctttttgccactgacattgtaccatgcttcatgacggcaacaatcccaattgaagcaacagatatgatctgcagcattacttcaaccgcattgaggctcttataagcagaattgcaactcttgcaattcaccacatgggaccagtacctgtccaaaagctgttctctcggaggtgttggaggaagagctccactatattt

SEQ ID NO: 7285 - DNA, 520 bp, Glycine max
  Clone ID: jC-gmle01810025a03a1
gttattttcagaatacagcaagaaggagcatcagattcaagcatttccttgcttcagaggtcaatttccgaaagaagtattgcccattatattcttcactatcaagggtcaagcaagtaagtaggagactactttgttcagttgccacagaggattcaccaaagcaagttgaagaatccaaaatggagacaccaagggaaatattcttaaaggattacaagatgcctgattactactttgacactgtagatctgaaatttaccttgggagaggagaagaccatagttagttctaaaattgctgtgtatcctcgcattgaaggttctactcccccactagttttagatggacaggacttatctttagtttcaattcacctgaatggcaaggctttgaaggaagaagattatcatttggatgcacgccatctcacaatccaatcacctcctagtggtaaatatgatcttgaaattgttacagatatttgtccacagaacaacacatcattagagggacttta

SEQ ID NO: 7286 - DNA, 508 bp, Glycine max
  unsure at all n locations
  Clone ID: jC-gmle01810025a03d1
aacaaacgaatatccactgaatcacattttaaagttacgtagataaactagttcagcttttattgcataacgccctacacatccttgggaaaaagataaagaaatcaccccgagttaagacatggatgcaaaaagagagctacccattgtggcgccaaagctttgcaaaagatattgggatcgttgctgcaattgctttcgccactaacacatcatggcagtttttcatacgccattaacacttttaggcagctaagcttttcgaagctatctcaaacacattctccgatagtccattagtagacatgatcctctccaactgcgcctttgcaagcttttgtctgtcttcatcataacgcctgcatcttgagaaggctgacaccattctcgaggctacctgaggatttagcttgtcaagttgcagcacaatctctcccaaaacttgtagcctgacccatcctttgcatganagttcaccggagacccacagaaacctncaatgagagag

SEQ ID NO: 7287 - DNA, 494 bp, Glycine max
  unsure at all n locations
  Clone ID: jC-gmle01810025a04a1
gcgttgccattctcatcctcctctgtctctctctctccaccattgccatggatccttacaagctccggccatccagcgccttcaattctcccttctggactacaaattctggtgctcctgtttggaacaacaactcctctttaaccgttggagctagaggtccaattctgcttgaggattatcatcttgtggagaagcttgcaaactttgacagggaacgtatcccagaacgtgttgtccatgccaggggagctagtgcaaagggtttctttgaggtcacacatgacatttctcacctgacatgtgcagatttccttcgagcccctggagttcagacgcctgtaattgttcgtttctcaactgtcattcatgagcgtggtagccctgaaaccttgatggaccctcgaggttttgccgtgaagttntacaccagagagggtaactttgaccttgttggaaacaacctttccgtcttctttgtacgtgacggcatg

SEQ ID NO: 7288 - DNA, 567 bp, Glycine max
  unsure at all n locations
  Clone ID: jC-gmle01810025a04d1
cttaattaattggattacaaggaacacatagtccacaacaatagcagcgaaacatgccgaaaaggtatataaatataaatactaacacatacaaacggcatttattgagatagctcaacgagttgcatgcatggagttatgggtacacaactaaaattgcaagaaatggataagttctttcaaattgatcgaaaatcacatccttatcgtactctttgcacgtctgcaactctaacaatcattctggggttggcaacaacattaaatatttggcctcatgctcagacgagatgctatcttttggcctagagaacggtcagcctgagaccagtaagatatccagacactgcggatttcatgggtgacccgtgggtcagataaagcatcaggtgcccaagatcggtatctctctccgggctgcttaaagttgttctccttctcaattccacacttttcacgccttccactgcagatagcaggaggtatggngaacgtttctgcatgacgaacaggatcatacctttgaaggaagtaatttaacctctcatccctgtgaatgaaattcat

SEQ ID NO: 7289 - DNA, 468 bp, Glycine max
  Clone ID: jC-gmle01810025a05a1
acttgctccctcagaagcgaataagaagccacagagaactagtctcctactctgacccgcaagaaaaaaatggcatctcacatcgacggatacccccgtatgggtcccaagagagagctcaagttcgctctagagtctttctgggatggcaagagcaccgccgctgatttgcagacggtgtcttctgatctcacggcatccatctggaagcagatggctgatgctgggatcaagttcatccccagcaacactttctgtcactatgaccaggttctcgacgccaccgacaccctcggtggcgttccaccaaggtacggctggaccggcggcgagattgggttcgatacctacttctgcatggccagaggtaatgctaccgtgccagctatggagatgaccaagctggttcgacaccaactaccactttattgtccctgaattgggccctgatgtgaacttcacctatgc

SEQ ID NO: 7290 - DNA, 601 bp, Glycine max
  Clone ID: jC-gmle01810025a05d1
gcacaaaactggtaaaattccagatcaataaggattgcggcgaagccgcaaagatacaacattcattagggaaaacaggagtggggaaaaataaggggggaggggttgaggaagaatcaattgctcacagagcatgctaagacacctaaatattccacacacagttattgaaacaacccaatatagagaaaatttttctttggtgtattataatataaagcagaaccaaatgacttggaagattctactttcttataccattcacttggcaagttcgttgcggatgagttttgctgcggcaaccatgtttgtgagggctggcttcacctcagtgtacttacgggtcttgagcccacagtcagggttcacccacaagatgttcttctcgagcactgccagcatcttgttgattctgtcagcaatttcttcagttggtggtattcttggggagtggatgtcatagacaccagggccaattccagcaccatacttcacaccttcgcggaagactgacagaagcttctcgtcggagcgagagttctcaatggtgataacatcggcgtccatgtcgatgatggagggatgatgtcgtgaagtcgag

SEQ ID NO: 7291 - DNA, 491 bp, Glycine max
  Clone ID: jC-gmle01810025a06a1
cttcaaagggaatcactaagactaaaagaagagaattgcaaactgagaactatgttggaccaaatcaccaaaaactacaaccagttacaattgttcattgctttgcagaagcagaagcagtggcagaagatggagacaaatttaaatgggatgatgtttggtcaacattgattggacccacgaggaccattcaccaaattagacgctcaaggtgcaccatttgcagatgataaatctggtcaacggggtcatcctgagactgatcctgtagaagatgttcttgaacaatcaacctcacagagttggggctcatacaagagtcccaagtttgaagagtccaactgtagtgagcttcctttaaaaaaaaccagggtttgcgtgcgtgcaagatcagaagctcctctgattagcgatggatgtcaatggaggaaatatggacaaaaaatagccaagggtaatcctggtccccgtgcctattatcgttgcactat

SEQ ID NO: 7292 - DNA, 348 bp, Glycine max
  Clone ID: jC-gmle01810025a06d1
aagggaatatcacaaaaaaggctacaaaaaaacaacaggaaacaaagacctgaaccaaacccaagaagaaatggaccaccacaaacacaacgaagcgaaacaacagaaagaaggcaagaaaccccagggaaacgaaaaaccacgcgagcaaccgcaaggcgcgcagaagcaccaccgacagagccgcacaagacaacacgcaagaaaagggggcgagcgaaacgggaacgaaaaaaaaaaggtcgccaaaaaccgagaagacaagaagccagaaaagcaacatgcgcaacgaaaccgccaggggcaaaaaaaaaaagaagggagcccaagcagaagcgggaacacaga

SEQ ID NO: 7293 - DNA, 390 bp, Glycine max
  Clone ID: jC-gmle01810025a07a1
ggaagctctcacggtcaatccttgcacttcagatggcagtggaagccgaaaataaggattatcggctgggacacaacagcttgggtgcttgtgcaactatcaaccatcttcacttgcaggcttattatttggctctgcccttcccaattgagaaggcccccactaagagaattgcaagtgtaaatggtggggcgaacatatctgaactgttgaagtatccggttagaggctttagctttgagggcggcgaaatgctggaagaactatccaacgttgttttaaatgcctgtttatgtcttcagaacaacaacatacctttcaatgtccttatctctgactgtggaaagcaagtgtttctgttaccaccgtgttttgcagagaaaccagctc

SEQ ID NO: 7294 - DNA, 576 bp, Glycine max
  Clone ID: jC-gmle01810025a07d1
acaaggacaaacagttacctgaatttattatttctcgcagcatgaaagccacgatagacagtcaagtcaagcattatgatacatcagaccccaaaataccaacaacactactcagctgagcagttattatatcgtactttcacatgaaagtgtcataaaggcagataaaagcatatacattcaacacacacgaccataaggctcaagcacaaggcaatagtatgacttaaacggtgacacatttcagcaattattcttaaaacactgcagattttctgaatttgttcaaaatacaagagccttgttactgtagaaccacacattcttgtgaaccagccaccaccaccacagtagggtgttcgcttgtgctgactgcatcaacttcttttttgacactttgaacattgacatcctccaattcaccacagccaatggcttcaaaaacaagatcattgacttcttgaaacctctcttgagaaagggacacctcagcaagaagcctccaagcattgccttcagacgcctcatcataatccttccttctctttaaaacatgtgtccactaatttccacaca

SEQ ID NO: 7295 - DNA, 531 bp, Glycine max
  Clone ID: jC-gmle01810025a08a1
aaaaaatctcaaaataaaacaaccaaaccacacacttcacaccctcttcaacatcctcagcaagtacaagaacaagaagaaacaatgtcttgctccaatctcacaatgttggtgtcctcaaaaccttccctttccgatccctccaatctctccttccgctctgtcctcaacccttttcagctcccttcacaaaacccaacttcatgcactccttcacgctcctcaaccacccaaattcagtgtggtctgagagaactcagaacccgcattgattccgtgaagaacactcagaaaatcaccgaggctatgaagcttgtggctgcagccaaagtgagaagagctcaagaagctgttgtcaacggaagacccttctcagagaccctcgttgaagtcctctacaacatcaacgagcagctcctaactgaggacgtagacatccctctcacaaaggttaggcctgtcaagaaagttgcacttgttgtggtcacccgcgaccgtggtctctgcggcgtttcaacaacgcaatcataa

SEQ ID NO: 7296 - DNA, 533 bp, Glycine max
  Clone ID: jC-gmle01810025a08d1
cctattgcacaaagcctgcgcatttcattcaagtttcaacagaagcgtaaaaattgcacaagtgtcttagataaccacattagaaaatgaaaagggcaaccaccacccatcattataataagtaaacaatacctacaaattgcactattgcaaggcattggcaccagccacaatttccagaatttcaccagtgatcttagcctggcgctccctattgtacacaatggacaagttcttcttcaactcaatagcattatctgtggcattgctcatggcactcattctggcggcgagttcactcgccaaggactcctgcaatgccctcagaacctggctgttcaaatacagtggcagcagtgcatcaaggatctgaacggggtcttgttcaaactgcaaaattggcgaaaaatccgcggttttagtcctcacaacatctctctccacagtcaactttccttccttggtagtcaacctgaagaactcatcctcagcagcatcaacacacacaccattcacatcacaaatctctccct

SEQ ID NO: 7297 - DNA, 420 bp, Glycine max
  Clone ID: jC-gmle01810025a09a1
gagaaatatgagaattccaagcaattgcgagttcacacgaatcacgccctctgctttcagctaccaccgtctcaaatcctacgtttccgactgcagagccgtgcttctcccctcattcggcggcccgcacgtgctccagcttcgctcgcacgtgccagtccctccgctcaagcctcacgatgtcctcgttcgtgcgcgcgccgtctccgtcaaccccttggacacccgaatgcgtgctggctacgggcgttccatcttcgagccgctgttgcctctcattttggggcgcgacgtcagcggcgaggtttcggcggtcggagataaggtgaggtcggtgagtgtgggagaacaggttttcggggcactgcatcccactgccgtgagaggcacttactcggattacgcgattctctccgaaga

SEQ ID NO: 7298 - DNA, 486 bp, Glycine max
  Clone ID: jC-gmle01810025a09d1
aaagaaaggacatgtgtcacacaaacttctcaatcaatttacagatgttcttattctggatcaaaatttacaacaagttccacttcctatcaaagagaacccagaaaaaacacctatcaatctcaataaaatgtggaacaatccattgcaaaaaagaaaaaaagaaaaaactagtttaaccaactctgatcagcttcaagacgtcaatcaagttccagtacaactttaccaggaatgagcttcttgtcttttgcctcatgagcttcttttacttgtgttatgggaaacgttttatacacaggtatcttcatcttcccagcttcacatagctttcgaatctcaattaaaccatctaaatcagccctcatatatgtccatgagtattctattccatgagagaatcgatatagaagctgttttttcaataaaacagctgtagctgcaggaagcccaatagtcagtccatatctatcagacaatgatgct

SEQ ID NO: 7299 - DNA, 548 bp, Glycine max
  Clone ID: jC-gmle01810025a10a1
cagagagagagagagagagagagccaccctttcttacaacaaacaacaactcattcttcaaggcttcaacaacagaacctttcatagtttttcactccttctccctgtgtcggtgtactcttcttctgggggcattcgttttttgcttcttcagctccaacttcaaacgcgcttttggtagaagaagcttcaccgggatcactggggtgtgtgtgagagagagggattacggattagtgagttttttgtcactaagttagagctacgtcgtttcatgattgtgggctggtagcagtttggtattgagattgaaagtggtggggctttatttggattctgtgcttgttgaaggagctgggaattgtagtagctgttgcctcagaatgcagcaagatcaaagaaaaaagggttcaatggagatggaatttttctccgattatggtgatgtcagcaggtacaaaattcaagaggtcattggaaaaggaagctatggtgttgtttgttcagctattgacagtcatactggcgaaaaagtgcaattaaaaaga

SEQ ID NO: 7300 - DNA, 531 bp, Glycine max
  unsure at all n locations
  Clone ID: jC-gmle01810025a10d1
ataaaataaaataaaaaaatcccgaggaaaggaatgtgtggattgaattacaaagataggactcaaattcggttgtacagtttattgataactgaaaccaatgtttacaaggtttgaccagagaaagctagctctatctgtggaagcactaactcatgtcatcatcttacacaaagcaccaccagagacaactacttctccactatgaagaacctttttcttattctccacaaggaacgctccacctggccaaactattcacaagacaacattcttctacaacaaccttgtcataccatactgaacaggtccaacctttctatgagcagtggtactaatcccaccatattgatgagcctttgactgcagcaactttgtctctatggctattcggtcatcctgctctatcttgttgattcctgctcgtgtcatgaaaaaagggttggtgtcaatatttatagctatctctggtgctatnttgacattcacaccacattgcttagcaagttttgattgtaaagacacaccctt

SEQ ID NO: 7301 - DNA, 463 bp, Glycine max
  Clone ID: jC-gmle01810025a11a1
ggaaagtggaggtgcaggagagctagccaatctgatcaggcagagataccgggaagctgcagacatgatcaatatgggaaagatgtgcgctctcttcatcaccgatcttgatgcaagagctggtcgtctaggtggaaccacacagtacactgagaacaaccagacggagaatgtcactctcatgaacattgctgataaccccaccaatgtgcagcttacaggtatgtacaacaaggaagagaacccacacgttcccatcattgtcaccggttacgagttctcaacactctatgcacctctcatccgcgatgggcgtatggagaagttctactgggcaccaacaagggaagatccgattggcgtttgcaccggaatgttccgcactgatggtatgcctgaacaggacattgaccagcttgttgacacctttcctggcaatgcatcgattactgtggtgcactga

SEQ ID NO: 7302 - DNA, 219 bp, Glycine max
  Clone ID: jC-gmle01810025a11d1
attgtcaaatgggccctgtgcctcaaaattttataggaggacgggccaatactaaaaatattctttgagattgttaaatttacttggtcctctttgcacctacaaactcttgaatgttaaaattgatccacgcactgaccatctctacttttcggttttggcttcaaccatcagcctgggggggcctaactgtttacttgccctggttggtttgcctcc

SEQ ID NO: 7303 - DNA, 641 bp, Glycine max
  Clone ID: jC-gmle01810025a12a1
ggaaagtggaaatgcaggagagctagcaaaactgatcaggcagagataccgtgaagctgcagacatgatcaagaagggaaagatgtgcgctctcttcatcaacgatcttgatgcaggagctggtcgtcttggtggaaccacacaatacactgtgaacaaccagatggtgaatgtcactctcatgaacattgctgataaccccaccaatgtgcagcttccaggtatgtacaacaaggaagagaacccccgtgttcccatcattgtcaccggtaacgatttctcaacactctatgcacctctcatccgtgatgggcgtatggagaagttctactgggcaccaacaagggaagaccgcattggtgtttgcaccggaattttccgcactgatggtattcctgaacaggacattgtcaagcttgttgacaccttccctggccaatccattgatttctttggtgcactgagggccagagtatatgatgatgaagtgaggaagtggatttctggtgttggtgttgacagtgttgggaagaagctttgtgactcaaagatggaccttcacctttgagcagccaagatgactctggagaagctcttgctgatggtaacatgcttgccaagaacagagattgtcagagagt

SEQ ID NO: 7304 - DNA, 317 bp, Glycine max
  Clone ID: jC-gmle01810025a12d1
aaggggaccctggaactcaaaattatagaggaagacggtccaatatgaaaaatattgtaagatcattttaaacttagcattttttttttgcacctaaaacattgagaatgctaagaatgttacacccaagttccatcacaacttttagcacttgggttagtacaacaaccttcacgaacagaaatatttacttgcccagtttggtttgcctccaattcaagactggaagaaaggtcccctctgaatagcatcctcgttagcatttccaaaagcagcctcgttcaagtacttgtcagccaattggactctcttgacat

SEQ ID NO: 7305 - DNA, 506 bp, Glycine max
  Clone ID: jC-gmle01810025b01a1
tctctctcccttagtcaaagggattatcgtcttcttccaggtattaaaagcaaatggtgaagattgtgatgtctggattggggggtcctactatggagcattgcactaagtgcccatccttgaagcgctgtgtgaatctctaaatccgattgcacctgtgacagcgaccagcttcctatctatgaacctggccttgatggtgttgtgaagcaatgccgtggcaagaacctcttcttcagcactgatgttgaaaagcatgtctttgaggctgacatagtgtttgtctctgtcaacaccccaaccaaaactcagggtcttggagctggcaaagcagcagatttgacatattgggagagtgcagctcgcatgattgctgatgtctcgaagtctgacaagatcgtggtggagaaatccacagtccctgtcaaaactgctgaagccatagagaagattctgacccactatagccagggaatcaaattccagattctatcaaacccttgatt

SEQ ID NO: 7306 - DNA, 482 bp, Glycine max
  Clone ID: jC-gmle01810025b01d1
aaacaaaacaagtttccccagtacatgcataaaagattggagtacaaaacaacatagaacataaaccctccccagttcccacaatttataccccaattatgtcaactattatgagaacgttaaagaggaaaagaaaaactcttacaaaaaataataaagaatcaaactgactgcctcaacacttgactgatattgcattgtacttgatcaatgatctattttatgccacagcaggcatgtctttgagccatgggtccagtggcttaccaattgagtaaactatgaagccaatctcacgcaacttatcagcatccacaatgtttctgccatcaaaaacaaatgctggtttttgcatgttgtcaaatatcttctggtaatcaagagtcttgaactcatcccactcggttagaatgcaaaggccatgtgcatcctttgttggcttataggcatcccaaacaacactgaccttcttcacagtagta

SEQ ID NO: 7307 - DNA, 445 bp, Glycine max
  Clone ID: jC-gmle01810025b02a1
tgccacattacacaagaactctccaaggatcctccttcccacgaaattcatttggtgggaaaatccaagaagagggtggaatttcaagccagggaagatggattatttcaatgcaccaggaagaaaccatctctttgttccggggccggttaacatcccggaccagatcattcgggccatgaacagaaacaatgaggactaccgttctccagcaattccagctatgaccaaaacactgcttgaggatgtcaagaagattttcaagaccataactggaatcccatttctcatccctacaactggtactggtgcttgggagagtgctctcacaaacacactgtctcctggggatcgaattggatctttcctgattggccaattcagcttgctttggattgatcagcagcaacgcctggaatcaatgttgatgttgtagagagtgaat

SEQ ID NO: 7308 - DNA, 333 bp, Glycine max
  Clone ID: jC-gmle01810025b02d1
aaagctgaaagtagagtgtatgttcatcttcaaaggagggcactagagggcaatatctattttacagactttccgaacgagcagaactatggacgtagagacaagaatgacttgtgactcagatgctgcaagggatcataggaatagtgtgctgcaagtatgcactggctgcagcaactccacttccaagctttacaggatagcccacatctttcagtatcatcttcacaccagctagacatcccaacagttgcaactcattcatgccgtccatatgtccatttctgacaaccttacgagctactttgatcagtccaagacctaagctcaaat

SEQ ID NO: 7309 - DNA, 446 bp, Glycine max
  Clone ID: jC-gmle01810025b03a1
taagtgagatacacagtagttaggtagcaagcataagtgtctaaccttagaaacatatctgctacatatcgtgtgcattttggaattgtgccactaaaattctattcatctatggctgcctcatcttatgctatgcaatcaatccttgcaaaccctatgatccgcatttccagcgggtctagggagaaccattttggtgttcctgcttatcacatgagaaggaatgttggcctgagagttaggtccatggctgaggaagagcaaccaagtcagcctgcgaccccagttacaccaccaccagcagaacccaaaccacagcctgtctctactccttcaccaaaggtgagcaccaagttttctgatgtgttggcgttcagtgggccagcacctgagaggatcaatggaaggttggccatgattgggtttgtgggtgcaatggcagtgga

SEQ ID NO: 7310 - DNA, 522 bp, Glycine max
  Clone ID: jC-gmle01810025b03d1
gataaaaaaaaatgataattttatatgctgattaaataaaggcaccaagtacaaaaagagattggtctttctaaccacgaatgacttaagaccattttggtgtgcattcatgactgaattacaccaaggtaccacccttaacatactcagtaaaagccagagcaaccaaacccaacatagcaaatctcccattccacagttctgcatctgaggacatgaaccctttggacttagactccacgctgatcccttggaagagtggaatcaaggaagcaagggtaaggaccacacttgttcccaagaaccatgggataccaccattggatatttgttcaaacacaccttgccctttggctacttccactgccattgcacccacaaacccaatcatggccaaccttccattgatcctctcaggtgctggcccactgaacgccaacacatcagaaaacttggtgctcacctttggtgaaggagtagagactggctgtggtttgggttctgctggtggtggtgtaactg

SEQ ID NO: 7311 - DNA, 485 bp, Glycine max
  Clone ID: jC-gmle01810025b04a1
caggcttaaagaagatgcactggatggcagcctatcttttccgtaccatacagaagttccaagaatcttactgtttggattcctcgggttcacttgtgctattctggcacccctaatgttgcccttcttgttggtctactttttcattgcttaccttgtttatcgaaaccagattatcaacgtatacattacaaaatacgatagtgggggacagttctggcccattgttcacaacacaacggttttttcgttgctattttctcaacttatcgcactaggggtgtttggactcaaacgctcatcagttgcatctggattcaccattcctctgctgattggtacgcttctatttcaccagtattgtaggcaacggtttctcccagtatttaggagcaattcagcacagattcttattgacttggatcggagagatgggcacagtggaaggatggaagaaatttatgaacatttgcgttcagcctaca

SEQ ID NO: 7312 - DNA, 536 bp, Glycine max
  Clone ID: jC-gmle01810025b04d1
aatcattaaaaaaggattcagagatcaatataacttaagatgcaatattacaacgttgtttgatttatgtaaatgacctcatttactgcaaaattacttggatggcattgttatccttacatgtctattcacatttaattgaaaatcatttgaaaaactatttacaactaaaaaaatttaatgaacaatatatcaagagactttcatctccatctataatggatcaattgttcatgcaccggcacctttagtgcacgtcatgatattcttattcttattacaatgtacaattctgagtattcattgctttacaccaagtacggatttatctgaactcatactcaatgtgcgttgaatgggccgtggtctatctttttgactaatttcattttcattgcctgtctccatatcttctgatgaagatggaccactatccttgtcctcgtgaagactgacacattcgggttggcttgtggtatgtggcattaaactggactggttgtaggctgaacgcaaatgttcataaatttcttcca

SEQ ID NO: 7313 - DNA, 382 bp, Glycine max
  Clone ID: jC-gmle01810025b05a1
ctacctgctaccctacgcaagtcccggagaacacacaggttgctggcaacctaacagaatagcagatcatctccttttccccgacttgcaactatggaaaccgaagccaccgaacgggcagaggttccggacagggtagtgtacgacgtagctggtcgccctatcacggtagccggctacaaggaaccggtgcggagcacgggaggcgctcaaaatcgagacagcgccggcggatttctatgggtgcgcaacaccggcgaaagagacgaggtgttctactccttcttgagtgccgaccgaccagctgtcaccaccatgtccctctcaaacgacgtggggaggatgaactcaactatggaaaggttgatggcacaagtggagg

SEQ ID NO: 7314 - DNA, 380 bp, Glycine max
  Clone ID: jC-gmle01810025b05d1
agccgggaagggggaaaaaaaataaaaacctcaagggacccgcccttgggaaaaccctgaacgatgtgcacaaaaacccttacgtataccaaactcgataacctggttcctaattggcgggtgggtccccgttaaactggtcatcccttggagcaacgtctggggaataaaccccccgaacccgaagggctcgctgcttattgatttgggccacctaccactggggcttgggccccaaccccggggttggccccccccaaataacgggtccctttgggaaacagttttaacaggggacgtccctgctcttggccgaatttaccttcatgggaacagtttttaaagcggaattcacgggggcttttccgggaagggacaat

SEQ ID NO: 7315 - DNA, 476 bp, Glycine max
  Clone ID: jC-gmle01810025b06a1
ctcactcctcccaccaccccttccaccaccaccaccaccttagcctgcgactctaatgctcaatacatcggcaccgtcaccgccaccactccctccatcacgtgtccaccgcgttcccctcgacgaactccccttcaacacccccttgctcccccctcacctgctatccctcgaactcacccgccacagcacgcaaaacatcgccgatgcactccaaaccctcgccaaagcttcgaacctcaaagccatcgtcattgacttcatgaacttcaacgaccccaaagccgttactgaatatctcaacagcaacgtccccacttacttctactacacttctggcgcctccactctcgctttactactttactaccccaccattcacccaacccttatagaaaaaaaggatacagaccaacctttgcagatccaaatccctggattatccacacttacagccgatgattgtccaaacgaat

SEQ ID NO: 7316 - DNA, 538 bp, Glycine max
  Clone ID: jC-gmle01810025b06d1
ggtacgacactcggcttaccgagaaattattactacgagcgatttggtacacttgccaaagagctaacaggcatcataaatttttagatgagcaaggatcactaatctgaaacaaattcaacttaaaaaattaagtctacaagtttaaagtttggaaaccaaatggtagaatttttagaggacaagtcaatgtcaaactgagaatcaactctgtttccacagcttagccaacttatccaacgaagcacgtgatgttccgccttcagccattgcttccgcagcactcattttcatcttgaaaatcctctgacgaatctctttccctttgtctgattccatgagttccctaactcggtcccccaactcagtcgaactcacgaacccatccttgttctcgttcaccgtcaaagccaccttcatttccttcaccataaccatcctgttcatcttctgctccgcgtagagaggccacgccaccatcggcaccccttcacacaccgcttccaacaccgagttccaaccgcagtgagtcacgaac

SEQ ID NO: 7317 - DNA, 497 bp, Glycine max
  Clone ID: jC-gmle01810025b07a1
gtcaacttttccgattttttcctcacttgttgtgaataatctggcagaggcggcagcaaataagaatggcttcaaatcccaaacctttgacttttgaggaggtggctaatcacaacaacaaaaaggattgctggattattatcaatggaaaggtgtatgatatcacgccatttctggatgagcatcctggaggagatgaagttttggtaacgtcaacagggaaggatgccaccattgattttgaagatgtgggccacagtgattctgccatagaaatgatggaaaaatacttcgtcgggaaggttgacacttccactcttccagcgaaagttaaccatagtctgccacaacctacacaagcaggtggcgctggcaatcaatcttctggatttgttgtaaagatcttgcaattcctgttgccattcttgatattgggccttgcctttgccctgcagtactatggcaaaaagaagcatgctagcacctcatgaaatatg

SEQ ID NO: 7318 - DNA, 534 bp, Glycine max
  Clone ID: jC-gmle01810025b07d1
agatcattgacccaaaaacatagggatcaatcaattgatttaataaaatccatttcaaaatattcaaacatgagagattaaataaaaaaaaaatcattcatttgtctaaatgaacagctagcatgactgagcaaagacaccacagtgcatcaagggcctgcatggtgaagggtggggtaacgagtttaaatgacagacacacaacattgactaaagtctattaccactttaatactgcattgaagtaggcaatgaattaacaaacctaatgaaacttcggctctagctcaacttcatatttcatgaggtgctagcatgcttctttttgccatagtactgcagggcaaaggcaaggcccaatatcaagaatggcaacaggaattgcaagatctttacaacaaatccagaagattgattgccagcgccacctgcttgtgtaggttgtggcagactatggttaactttcgctggaagagtggaagtgtcaaccctcccgacgaagtatttttccatcatttctatggcaggatcact

SEQ ID NO: 7319 - DNA, 439 bp, Glycine max
  unsure at all n locations
  Clone ID: jC-gmle01810025b08a1
aagctgaatgagagaattgctaaattgtctggtggtgtggctgtgatacaggttggcgcacaaactgagacagagctcaaggaaaagaaattgagagttgaagacgctcttaatgctacaaaggcagctgtagaggaaggtattgttgttggtggtggttgcactcttctgagacttgcatcaaaggtggatgcaatcaaggatagccttgataatgatgaagaaaaagttggagctgatattgtgaaaagagctcttagttaccctttgaaattaattgccaagaatgctggtgtcaatggtagtgttgtcagtgagaaggtattgtccagtgacaatccaagatatggatataatgctgccactggtaaatatgaagatttgatgtctgctgggatcattgatccaacaaaggtggtcagatgttgnctggagcatg

SEQ ID NO: 7320 - DNA, 518 bp, Glycine max
  Clone ID: jC-gmle01810025b08d1
aagcaaaaaaaaattattattaacttgaaaaaaataagggaggaaagggtgcatcactatctagttcaccacactaacaatacatttggactcattgctaaatggccaccaaattttgcatttcatccgagggagaacaaaatactcttctcactgaagcagccgttgctcgttgctctagagtccatatcctgaattgtccatggggtttccagcaggtatggcctcaggttcctttatctcaacaaccacgcaatctgacattaagaaggttttggctacagaggctgcatgctccaggcaacatctgaccacctttgttggatcaatgatcccagcagacatcaaatcttcatatttaccagtggcagcattatatccatatcttggattgtcactggacaataccttctcactgacaacactaccattgacaccagcattcttggcaattaatttcaaagggtaactaagagctcttttcacaatatcagcttcaactttttcttcatcattat

SEQ ID NO: 7321 - DNA, 451 bp, Glycine max
  unsure at all n locations
  Clone ID: jC-gmle01810025b09a1
tctttctatacatagagtggataagccaatgtaagtatgacttaagtacaagagaatactccagaaaagcacaaataactcttgttttgttccaatttttgttcagttttttcttccttttctcttctgttttctcttaaagaatggtgtcattaaagaaattttgggcaaagtgacataagagctggtccatctggaaatggtgttttgttctcaagcaagatggtgaatgtccttaaacgagccatcctgtcctggcccttttgcttctaaaattttgcagaacaaacttaggcctcactaatttcttttagaagattctggaacataaatgttntcattaattatctgatcttggatttgtttgtcaaccaacttcttgagtaattcttcgttagttttgggcttcaacaatagctctcatctaaggatggttttttgaatcatttga

SEQ ID NO: 7322 - DNA, 556 bp, Glycine max
  unsure at all n locations
  Clone ID: jC-gmle01810025b09d1
gatcggaagatgcaataatatattcaagtaacaagaatacaatttggtttacatattttgcctaaaaataagtgcacgagatagatcaaacatatgcaactttacctcagcggagagaacatttctgcaattaaaatttcagcctaccatatcacaaggcaacatcgttgtgccaagacctctaatatgatgaagggccagtaatatgatgttgtacaacatttataacttagatgttccaaaaacggtttccgagctaatcaaaccgctcccattcttgagttacttttgtggaagacgggttatcggatggagcatccaagctttccattccagagtcaaaggtttcccattgggttgttactttgacagcattgctactgttgctaaaagggttggcgttccttgcctttagagaatctaatttatccacaaggttctgcacacgattcacctattcaatggtggaaaagcttgtgtcagtccgtcacagcaataatccatataattgcatttccacaagaaatgagcatttgnngtgtataatttaagagca

SEQ ID NO: 7323 - DNA, 598 bp, Glycine max
  Clone ID: jC-gmle01810025b10d1
gatcggaagatgcaataatatattcaagtaacaagaatacaatttggtttacatattttgcctaaaaataagtgcacgagatagatcaaacatatgcaactttacctcagcggagagaacatttctgcaattaaaatttcagcctaccatatcacaaggcaacatcgttgtgccaagacctctaatatgatgaagggccagtaatatgatgttgtacaacatttataacttagatgttccaaaaacggtttccgagctaatcaaaccgctcccattcttgagttacttttgtggaagacgggttatcggatggagcatccaagctttccattccagagtcaaaggtttcccattgggttgttactttgacagcattgctactgttgctaaaagggttggcgttccttgcctttagagaatctaatttatccacaaggttctgcacacgattcacctattcaatggtggaaaagcttgtgtcagtccgtcacagcaataatccatataattgcatttccacaagaaatgagcatttgtgtgtataatttaaagagcagtttgtgacagatgtgcatttactaccatactaccaaatggg

SEQ ID NO: 7324 - DNA, 550 bp, Glycine max
  unsure at all n locations
  Clone ID: jC-gmle01810025b11a1
ggaaagtggaaatgcaggagagccagcaaaactgatcaggcagagataccgtgaagctgcagacatgatcaagaagggaaagatgtgcgctctcttcatcaacgatcttgatgcaggagctggtcgtcttggtggaaccacacaatacactgtgaacaaccagatggtgaatgtcactctcatgaacattgctgataaccccaccaatgtgcagcttccaggtatgtacaacaaggaagagaacccccgtgttcccatcattgtcaccggtaacgatttctcaacactctatgcacctctcatccgtgatgggcgtatggagaagttctactgggcaccaacaagggaagaccgcattggtgtttgcaccggaattttccgcactgatggtattcctgaacaggacattgtcaagcttgttgacaccttccctggccaatccattgatttctttggtgcactgaaggccagagtatatgatgatgaagtgaggaagtggatttctgggtgtggtgtnacagtgttgggaagagcttgtgactcaaaagat

SEQ ID NO: 7325 - DNA, 331 bp, Glycine max
  Clone ID: jC-gmle01810025b11d1
aaaggggaccctggaactcaaaattatagaggaagacggcccaatttgaaaaatattggaagatcatctcaaacttagcattttttttttgcacctaaaacattgggaatgctaaaaatgttacccccaagttccatcacaacttttagcacttggattagtacaacaaccttcacgaacagaaatatttacttgccaagtttgctttgcctccaattcaagactggaagaaaggtcccctctgaatagcatcctcgttagcatttccaagagcagccttgttcaagtacttgtcagccaattggactcttttggcattcttttgtttttg

SEQ ID NO: 7326 - DNA, 499 bp, Glycine max
  Clone ID: jC-gmle01810025b12a1
tgtgtgtgtatggtgatgataacttaattagtgttcatgaatatgtcaagccttactttagtggttctaaattgaaaagctttctagctggtcataatatcaccattactgatggtattgacaaaactagtgcaactttgcaatttagaaagttagcagattgtgattttctcaagagaaactttaagcagatgtctaatgttttgtgggtggctcctgaggataaggcgagtttatggtcacaacttcattatgtttcgtgtaataatctggaaatgcaagaagcttatcttgtcaatctcgtaaatgtgttacgagaattgtatttgcacagtccagaggaagctcgccaattgagaaggaaagctctctctcgtattgaatggctgcaaaaagctgatgtgcctaccatagcacagattgaagagttccattcgatgcagaggatgatgaatgctcctgattcaaatgataatattgatctactgttgagcattga

SEQ ID NO: 7327 - DNA, 538 bp, Glycine max
  unsure at all n locations
  Clone ID: jC-gmle01810025b12d1
ngattatgggtacgtccggaattaataataattcccgggtgcgacgatgctccgcggccgccctttttttttttttttatatttaaacacactcattgcacatagtaatgcgctttatttaagtgaataaaatattacatactagttcacaaatgcaaaaggacactcatcaaccagatatttgagactcttacagttctcaagaagtcgcgtcagcatagggttagtggcgttagaactcagaatttcattcttaacgccaaaaagaacagccagtaaagctactggaaaaggatcaactctagtaagaaaaacaattttcttacctctcccaagtgctgtgcgaatccttttgttgatatatgaggagcgattgttaactgcagaactaatccaagcagtggtgggtaaaccaccacgtccactaccacatgtaacatttacaacgacagctgttgaaggtaattgacttacaggataaagacaattcacaaaaattggtaaccaagaatccactggaaaatttccatcaaagaat

SEQ ID NO: 7328 - DNA, 518 bp, Glycine max
  Clone ID: jC-gmle01810025c01a1
atacttaatcgatcatcacttcactttactaatacatcatggcagacgagacccagaacaagtatgagagctctgaggttgatgtccaggatcgtggtgtttttgactttctcggtaagaaaaaggatgaagaagacaagcctcatcctcaggaggaggtcatcggcactcgagtttcaaacagtcactgtctcagaccaaggagagaacaagcacagcctcttagaaaagcttcaccgatctgacagcagctctagctcttcaagtgaggaggaaggagaagatggagagaaaaggaagaagaagaagaatgaatagaaagggctgaaagagaagatcgaggagaaaatagagggtgatcatcatcatcacatggatgaggacacaagtgtcccttgtgagaaagttgaggttgttgaaacagcacatgctgaggaaaagaatgggttcctcgacaagattaaggagaagctaccaatgcacaagatgacagaggaggccacagctactactccttc

SEQ ID NO: 7329 - DNA, 546 bp, Glycine max
  Clone ID: jC-gmle01810025c01d1
cagtacatatttaatttctttttacttcaaagaaggaaacctacacaaacttttttttttgtaaatggaagagataaatacacaataataaagtaaattaagtatgcatcaagaaacaccaaagaaacccacaaggctgtcatatgatgaaatgaaaacaaagcacaccacaatcatgcatctccaaccaacaaaaaagccttgtctcaatcttaaatatcaatgagcaccactctccttttccttttccttttcctcctctgtcttggagtgataaccaggaagcttctcttttatcttttctaatatacctttcttctccttggcctctccttcatgatgagcaccttcaccatgctccaatgatgcaacaggtggtggtggaggaggagtagtagctgtggcctgctctgtattcttgtgccctggtagcttctccttaatcttgtcgaggaaccccttcttttcctcagcatgtgctggttcaacaaccttaactttctcacagggacacttgagtcctgatccttgtgatgatgatgatca

SEQ ID NO: 7330 - DNA, 508 bp, Glycine max
  Clone ID: jC-gmle01810025c02a1
gaacaagtagttgagaactaagaaggagaagcaaatggcttcctcaatgatctcttccccagctgttaccactgtcaaccgtgccggtgccggcatggttgctccattcactggcctcaagtccatggctggcttccccaccaggaagaccaacaatgacattacctccattgctagcaacggtggaagagtgcaatgcatgcaggtgtggccaccagttggcaagaagaagtttgagactctttcctacctgccagaccttgatgatgcacaattggcaaaggaagtagaataccttcttaggaagggatggattccttgcttggaattcgagttggagcacggtttcgtgtaccgtgagcacaacaggtcaccaggatactacgatggacgctactggaccatgtggaagctgcctatgtttggttgcactgatgcttctcaggtgttgaaggagcttcaagaggctaagactgcataccccaacggcttcatccgtatcatcgga

SEQ ID NO: 7331 - DNA, 393 bp, Glycine max
  Clone ID: jC-gmle01810025c02d1
attcattagttctcatccattaatttccattgaagtccgaaaacagaaaccaaaaatacaggatgatgaaatctcaaaaagcaaaaacaaatgggaatgtagtttaagtacaaacaaacaaagtggggtggcggctacaaatgctttgcaaatttttcacacttaaaagcctgggggcttgtaggcgatgaagctgatgcactgcacttggcgaacgttgtcgaatccgatgatacggatgaagccgttggggtatgcagtcttagcctcttgaagctcctttaacacctgagaagcattagtgcaaccaaacataggcagcttccacatggtccagtagcgtccatcgtagtatcctggtgacctgttgtgctcacggtacacgaaaccgtg

SEQ ID NO: 7332 - DNA, 588 bp, Glycine max
  unsure at all n locations
  Clone ID: jC-gmle01810025c03a1
ctctctctcaccaaagccttcctagaacgaaaaaaaaaagaagagcaattttccctcaccaaagaagaagaagcaaacaatggccgatcaacttaccgatgaacagatctccgagttcaaggaagccttcagcttgttcgacaaggacggcgatggtttgttctctctctctctctctcaagttttgtgtatttgatttgatttgatttatgcgtttgtggtttttgtagatcggtgttccttttcgtgataatggattaggaaaattagatgaattctgattctattttagaatcctttttttgttgttgttaatttggtagagttagatcttggataagctgaactttgtagaaagggtaagagataaagtgttaacgttagttttttttctggcgattattttcttgtctctgtttggnggacgaggagagagagaaggacgaattaaactgttgaagggaatttgtttgtttcattttttggttctttgcatatgtgaatggcatgtttggtttggtttatattttttaagggaaaaaaaggttatgtggagttctctggttttttttttaattaatatttctt

SEQ ID NO: 7333 - DNA, 569 bp, Glycine max
  Clone ID: jC-gmle01810025c03d1
ggcagaaagtgaagagacattaacattacaaccctttttttggataaaattacaagacaaactaagaaggttcagttccactacagcctagtagcaggacttgccactaattgacattttaaggttggattcaaaaaccatcaaataaaaatgtaggaagaagaaaggtcaaggactactacatcactgttataccacccaaacccttggccttcctcctacccctttttttgtcgtttccttttaatcaacatttcttcatttaggtttttgtggccataatgtgatgatcacttggccatcatcaccttaacgaactcctcgtagtttatttggccatcgccatcaacatcggcctcgcgaatcatctcatcaacctcttcatcggtgagcttctccccgaggttggtcatcacatggcggagctcagcagcagagatgaacccattctggtccttgtcgaaaacccggaatgcctctttcagctcctcctcagaatcagtgtccttcatcttcctggccatgagatttaggaactcaggaagtcaatggtaccattcccatcagca

SEQ ID NO: 7334 - DNA, 587 bp, Glycine max
  unsure at all n locations
  Clone ID: jC-gmle01810025c04a1
ctctctctcaccaaagccttcctagaacgaaaaaaaaaagaagagcaattttccctcaccaaagaagaagaagcaaacaatggccgatcaacttaccgatgaacagatctccgagttcaaggaagccttcagcttgttcgacaaggacggcgatggtttgttctctctctctctctctcaagttttgtgtatttgatttgatttgatttatgcgtttgtggtttttgtagatcggtgttccttttcgtgataatggattaggaaaattagatgaattctgattctattttagaatcctttttttgttgttgttaatttggtagagttagatcttggataagctgaactttgtagaaagggtaagagataaagtgttaacgttagttttttttctggcgattattttcttgtctctgtttggtggacgaggagagagagaaggacnaattaaactgttgaaggaattgtttggttccattttttgtttctttgcatatgtgaattgcatgtttgtttggtttatattttttaggaaacaaaggtatgttggagtttctgttttttttttaataaatattcttcctgaa

SEQ ID NO: 7335 - DNA, 570 bp, Glycine max
  unsure at all n locations
  Clone ID: jC-gmle01810025c04d1
ggcagaaagtgaagagacattaacattacaaccctttttttggataaaattacaagacaaactaagaaggttcagttccactacagcctagtagcaggacttgccactaattgacattttaaggttggattcaaaaaccatcaaataaaaatgtaggaagaagaaaggtcaaggactactacatcactgttataccacccaaacccttggccttcctcctacccctttttttgtcgtttccttttaatcaacatttcttcatttaggtttttgtggccataatgtgatgatcacttggccatcatcaccttaacgaactcctcgtagtttatttggccatcgccatcaacatcggcctcgcgaatcatctcatcaacctcttcatcggtgagcttctccccgaggttggtcatcacatggcggagctcagcagcagagatgaacccattctggtccttgtcgaanacccggaatgcctctttcagctcctcctcagaatcagtgtccttcatcttcctggccatgagaattaggaactcacggaagtcaatggtaccattcccatcagca

SEQ ID NO: 7336 - DNA, 432 bp, Glycine max
  Clone ID: jC-gmle01810025c05a1
tccacttcatgtgtcacatatgctaacagtgctagagaatcttccttttttgatcttgtagcttcccaactcactcccaagaccaatggatcaactcctgtgaggggagagacagtggccaagttgaaggtggcaatcaatggtttcggacgcattggtagaaacttccttcgctgctggcacggccgaaaagactcaccccttgaagtcgttgttgtcaacgacagtggtggtgtcaagaatgcttcgcacctgctgaaatatgattctatgctgggaacctttaaggcagatgtgaaaatactagacaatgaaaccatcactgttgatggtaagtccatcaaggttgtttcaagcagggaccctcttaagcttccatgggctgagcttggaattgacattgttattgagggaacgggagtgtttgtggat

SEQ ID NO: 7337 - DNA, 562 bp, Glycine max
  Clone ID: jC-gmle01810025c05d1
gattaaaagattcgaagaattgcaaatcagttacaagaattcagaaattcaatatcaatcaatatatgggtgatattcattcagtcacgccaaaacttattattggctgcaaataaatataaactttgaaaatctctcctcagatagactgtctgaacaatttccttctttttcacatgatacgttagaaaaggagctctcctctattcataaactttgcattcctcatcagcagggtttgtctcgcagaaatcctccaatgggtctccactccccgctttaggtgcccctggccacttgcttgctactagatgtgccaaatcgaccactctttggctgtaaccccattcattgtcataccaagcaaccactttaaccatatcatctcccatgaccatagtcaaggaggagtcaatagtagaggaaacatcagagcagcggaagtcgatagacacaagtggaacatcacacacgtccaatacacctttgagcggccctcagctgcctttctgaatgctgcattcacatcttcagcagtaagacccttcttctaacattcaca

SEQ ID NO: 7338 - DNA, 430 bp, Glycine max
  Clone ID: jC-gmle01810025c06a1
gaggttccagaaatggaaggcaagaccgaaagtcatgtgacatcggcagaagcctttgtggaagggggggttcaagaagcttgtgatgatgcttgcagcatatgccttgaggatttttgcaaaagtgatcctgccactgtcactaattgcaagcatgagttccacctgcagtgcattcttgaatggtgtcagagaagctcccaatgtcctatgtgttggcaacctatcagcttgagggatactacaagtcaagaactgcttgaggcagtagagctggaaaggagcttgagggatacctcatctagaaatgctgcgattgttcatcatccagcacttggtgattttgaattgcagcatttacccatggctatgaatgaggctgatattgaagagcgaaataattcaacatttgactgctgcagcagcaatg

SEQ ID NO: 7339 - DNA, 580 bp, Glycine max
  Clone ID: jC-gmle01810025c06d1
caaaacaaagttttagcgtaatgatagttttagcagaaacaccaagaactacagttgccaccttgatctatatttccattgactccaaaaagtaaatcacagggacagattatggacacaagtctgatggaatttcacaacactttctcccttggattactccttaaatactccctacggttctcggcttatataatatatacacaaaagaaaaagtttttagctctaggacacaggtgtctcagattcttttttttatttattggaatccaacaactgcctcgagcatatattcctcatcatgtcatgcctgagcaaacagttagccttcaagcatgatatgctgagcaaagatgcattcacagaagcaaactggaactcattttgaatctgagctagcagaaaatgtagttggagtactattgtcacgcaaagagttctctccacgagcttccacattgctttggttgcttgtctctgcaatggaacagttcaccaaatgatttggatctgataaagaagttcctgcagccctattattttctcttgtggttcaggcgctcatcaatcgtacacgcta

SEQ ID NO: 7340 - DNA, 526 bp, Glycine max
  unsure at all n locations
  Clone ID: jC-gmle01810025c07a1
gagagtgagagagcacacttcaactattgagaaccgttgacctccatggctgtgacagtaggtggactcgcaagttctcaactttggtgtcacaatttgagaatcagacacagtgctcttacactgagttggggaaaaaaagcagctgacgagagcacagaaatgtggtggggacgagaatccatggaaggcagtgaagatagtgatgcgtgtggttgatcatcctcaaatggatgattatgtctcccgtggagtgcataaggattcggtctcccttccaaagccattatccatatctgatattgtggctgctttggatgatggtgctaaagtacagatatcatataaggggataccaggatcatacagcgaggatgctgcactcaaagcttaccctaattgtgaaacagtttcatgcaatgactttgaagaagcttttaaggcagttgagatatggtgggctgancaagttatccttccaatagaaaatacatctgggggaagcatttcacggactatgatttac

SEQ ID NO: 7341 - DNA, 561 bp, Glycine max
  Clone ID: jC-gmle01810025c07d1
gaagagaggataaagttctgaatattgattgaatgaaaaattacaatacaagtctctatttaaattcttattaagacaggtagtatagcacacgtgtcaatctataaaactgactaacaaaatgaataaaaggctaactaactattgtgtaatgtaaattacattttttaccatacccgaagaaatgtggcaaattcctgtagggacataaaatggtttttggtatgtggctagatactcatgacatgaaagttgaagggttaattaattatattattacagctgcccaaaaaggaaaaagttactgcaccgcacagaaaatttgaggaagaaagtttcctagagctatatgcattttagattaggatttgttgtagtaatgaaaaatattgagttaaatagtgattggaccctaatagaacagcaccattggagacaaacctcagaaacttttggaacagcaccattcatggctcgcaggaagtgcttctgccaattgtcattgctatgtttgtatgcaaatatgtcccatattatcatatgctataccaacaatgatgt

SEQ ID NO: 7342 - DNA, 475 bp, Glycine max
  Clone ID: jC-gmle01810025c08a1
ttgcaattgaagttgaagtcttgcccttctctcttcaactccaaacacaagacatcatcatccatggctgcctccgtctccactgtcggagctgtcaacagagctcttttgaacctgaatgggtctggacctggggtttcagctcccagttcatccttctttgggagcagcttgaagaaggttattggctcaagggtccccaacacaaagatttcctctggaagcttcaagattgttgctgtagaagagaagaaagagattgaagagacccagcagaccgacaaggacagatggaagggtcttgcctatgatatctcagacgaccaacaggacatcacaagaggaaagggtttggttgactcccttttccaagctccacaggatgctggaactcactatgctgtcatgagctcctacgagtaccttagcactggacttcgccagtacttggacaacaacatggatggattttaca

SEQ ID NO: 7343 - DNA, 281 bp, Glycine max
  Clone ID: jC-gmle01810025c08d1
aaaaagggaaaacccccccaataaaaaaaaatagaaaaaaccccccaaaccgggcattttcctttggcccccaaaacatggaaaattccaaaaagggcccccccaagccccaacaaaccttctacccccgggaccaccccacccctcgggacccaaaaattttcccccccaagttggcttcccccccaaatcaaaatgggaaaaaagcccccccgaaaaaaccccccccgggagccttcccaagggcccccccgtaaaaaacctgggcacccaaagggccc

SEQ ID NO: 7344 - DNA, 426 bp, Glycine max
  Clone ID: jC-gmle01810025c09a1
cgaggatgtggaggaggtggttgaggaggaggtggaggatagggaaactcatgagctaaactcttcaaccaataccaatagatcattgctttgcaaaaacagaaacagcctcaagagatcgaaacacaattatatgggatgatgttaggtcaacagttattgtacccacgaggaccattcaccaaattacacactgaagttgcaccatttgacagatgataaatattggtcaacggggtcatcctgaaactgatcctgtacaagatgatcttgaacaatcaacctcacagagttgtggctcatacaagagtcctacggttgaagagtctcactttggtgagcttgcttataaaaaataccaggctttacgtgcgtgcaagaacagaagctcctctgattagcgattgctgtccacggaggaaatat

SEQ ID NO: 7345 - DNA, 551 bp, Glycine max
  unsure at all n locations
  Clone ID: jC-gmle01810025c09d1
gttcgtgagagaataagcagtaaggactctccttagtaattacaatcacactctaattaagtaaacttcactataaatactttccataaactacttctaatttatacataaactaattttaataagaaatggtttaacttcttcaaaaactaatctaaactcgtaaaaaaagccatttttttctttgaaaataaaagattacacaagcaagtgctaggtgcatagatgcacctttgacagtggtgcatattagatcaatcaaacacacaggccaagtttaaaatagaatgaaataaaaaatgttttttaaaaattgagtttttaagaagccagatttgcttcttaaaaaactaatctgtttttttttattaaaaaaaaaaaacaaatacagtttgaactttgaacagagatactaaaaggcaggaaactgcttattttattaaaaaaaaatcttgacaaacaaatttaaacacccaatatctcanaatattaaaaggaaaatttagaatcattcaatctctattactaaatcatccaatctctattactat

SEQ ID NO: 7346 - DNA, 488 bp, Glycine max
  Clone ID: jC-gmle01810025c10a1
cttagctttgattctctgttttctgttttgttctgtttcgcgtattgtcttcatacaggaacttgaacaatgaacaatgcaaagggcaagggagcagcaagggcctcaaaagaatcactgaagcccgttgatgaccgaaaggttggaaagcggaaggcttccggtaagcctgggagaagtagtgcaccaaagaaggagaagaaggccaagaaagaccccaacaagcctaaaagaccacccagtgctttctttgtgttccttgaggagttcaggaagacctttaaggctgagaatcctaatgtgaaggctgtatcagttgttgggaaagctggaggagagaaatggaaatccttgtccagtgctgagaaagctccatatgaagccaatgctgcgaaaaggaaagctgagtatgaaaacttatcaaagttatgataaaagcagcaagctcgcagatgatgaagatcaacaagtccaatctgagtgatgat

SEQ ID NO: 7347 - DNA, 524 bp, Glycine max
  Clone ID: jC-gmle01810025c10d1
gatcagaaagaaattatattacttaaagcaacccatgtaaggctacaatgcacaaagagtgattcaggtacgatagctaagtgagggaagctcaagtagttggtagagtatatcatgccaacaaaagaagaaattcttttctaccagcacaaatataaaaaagtagcctagtatgcacaatcagaatatataatagcctccttcacaaacaaaacatcataaccaaggttttggacatcaatctcagtcatcatcttcatcgtcctcttcctcctcatcatcctcttcctcctcctctccactggcatcatcttcatcattcacttcagatttggacttgtctgattcttcatcatctgcggagcttgcctgctttttatcataagctttgataagtttttcatactcagctttccttttcgcagccttggcttcatatggagctttctcagcactggacaaggatttccatttctctcctacagctttcccaacaactgatacagccttcacattaggattct

SEQ ID NO: 7348 - DNA, 545 bp, Glycine max
  unsure at all n locations
  Clone ID: jC-gmle01810025c11a1
aaaattttgttgaacatatcctcaaaggaccagaattctgatactactcaggcttatcatattgactgcctctctgaggaaacataattgcatctaccagtgactcaggtataacccaagtgcccaattcaatgtggaactaccaggagcaagagtttccatttcattgttgtatgtatgttccccttttcctgtcatgtacaggttggaaggtaaggggttggagaagcaatttggttatctttggtctatattttccatctcttagattggaattggatcttcaggaaattgacgagtgcctggcttgttttgtaagcctcatgaaagtggctgccatctgttctaaagatttctcagatattcattgagaagttctcacgtataattgccactagaccaaaaagtacatgataggaacattatgacctgcgtatgctaaatgaaagtgccagctgactgtaacttttgaaatttatcagcatgtgaatacattataatgacccgtctgcatattcttatnttaaaatgatgctgactacaat

SEQ ID NO: 7349 - DNA, 411 bp, Glycine max
  Clone ID: jC-gmle01810025c11d1
gtagtgattatataataaccattatacggagaaggtagttgtgtactacattgtagtcagcatcattttaaaataagaaatattgcagacggtcattataatgtattcacatgctgataaatttcaaaaattacagtcagctggcactttcatttagcatacgcaggtcataatgttcctatcttgtactttttggtctagtggcaattatacgtgagaacttctcaatgaatatctgagaaatctttagaacagatggcagccactttcatgaggcttacaaaacaagccaggcactcgtcaatttcctgaagatccaattccaatctaagagatggaaaatatagaccaaagataaccaaattgcttctcaaccccttaccttccaacctgtacatgacaggaaaaggg

SEQ ID NO: 7350 - DNA, 508 bp, Glycine max
  Clone ID: jC-gmle01810025c12a1
gttggtggttccaaagtctcatctaaaattggagtgattgagtcacttttagaaaaagttgacatccttcttcttggtggaggaatgatcttcacattttacaaggcacaaggtctttcagtgggttcatcccttgtagaagaagataagttggatcttgctacatcactacttgcaaaagccaaggaaaagggggtgtctctcttgttaccaagtgatgtggtgattgcagacaaatttgctcctgatgctaatagcaaggtcgtgccagcatctgccatccctgatggctggatgggattggatattggtccagattctgttaaatcattcagtgaagcattggatactacccaaaccatcatatggaatggaccaatgggagtgtttgagtttgacaagtttgctgttggtacagaggctattgcaaagaagctggctgacctcagtggaaagggggtgaccacaattattggaggaggagaatctgttgcagctgtggagaaag

SEQ ID NO: 7351 - DNA, 395 bp, Glycine max
  Clone ID: jC-gmle01810025c12d1
gcaaaaagcttctgccagcaactaaaagatttatttgaatttatggctctcagccagggtttacagttacacgcaatttatgtgtgaagccaataataactcaagcaagataaaatttacactaacagacttcgaagggtcctacaacatatgctcttttacaagattgacaacactgacacctgaggatgggaaaattttccaagatgaaaagtgtcttacacagcgactgggacggcttcatcaagagcaaggactcctggaagctctttgccttccaataactccaaactggcaccaccaccagtagatatgtggctcatgacactagcaactcctactttctccacagctgcaacagaatctcctcctccaataattgtggtcaccccctt

SEQ ID NO: 7352 - DNA, 428 bp, Glycine max
  Clone ID: jC-gmle01810025d01d1
gagatgacaagtctagtaggtaaggattcgtagcatggagcctaatacaatagcacgcgatactgcttcgtgaaacgatcggccagcgcgcaaccgagtcctcccttcaggccggcttcccagtcatcgtcatcagtttccgctcttgcccgagatgtcgatttccaagatattctttccccctttgatctcggtaaatgacggcatctgtttcagcctcaatagttccgcatccttcgaaacgtacgggtcactcttgaccgatgcgatcgcgacaatttcattggcttcggcgtgatacccaatgaactttatctaatgctttgtcaagtctccatcgatgtggacattctcgaaaccggttgcggcactgacgtggcgcagtccacctactggcgatgaccagaagatggggaccttggagaacg

SEQ ID NO: 7353 - DNA, 622 bp, Glycine max
  Clone ID: jC-gmle01810025d02a1
ataaaattgcatcattgagttcactgtcttgtacacttttgcttctgcatctacaattggcctgaaagccttctcacttactagtacatctataattgggccttcttttgctgacattttatccacattgtgtgcaggggacctgtgcaatatgcctttatacaatgaaaccagggcagggccatgccatttttactgcagaatgttctcactctttccatttccattgcatcacttctaatgtgaaacatgggaaccagatttgtcctgtctgcagagcaaaatggaaagaagttccttttcagaatcctgcttcaaatatgccccatgatcaactcaaccaagtttctcctcaaggtgatgctactcggcagatttcatcactttatcatgttaccgagccagctatttttgatgatgatgaagccctggatcaacaaacttcagttgcccatccaaaaaatgaggctgatcatgatgtaataaatactgtggagatcaaaacatatcccgaggtttcagctgttccaaaatctgcttctcatgatgcctttgcttgattaattcatctcaaaagctcacattcagggagaaaaacaaataatgatgcaacagtactgat

SEQ ID NO: 7354 - DNA, 550 bp, Glycine max
  Clone ID: jC-gmle01810025d02d1
agaagcaaatatattataccatatgtatataatcaagcgatgatgaaattcacccgcacaattcaagcgaaaacaataggttatgtacatcactcagaatcacactgaaatattcaacctgttccttttcgccattcattctctgcaccagcccatttacactttttatatttttggcaaaatcaggaattttgtcctcctaaaattccttcctttccattataccccaccttgacaaaaaccaaaaacaaaagggtaaaataagataagaaacttgaaggtttccccacaagtatatgtataggccaagtagaattttccaaactcatttttattgtcttctctgcctctccggaaatgatttagcaggcctgaggacacgtttattttgcggcaccggcgctccaaaaaccatagtttgggaacgtgtcaccatgtcaaccatggaaggtgtttggtatgcttgcacaaggctggtgctgtctgtggaatcgccgcgtgctgttgccctttgccatgaatgtgaactcaatcctgacagaacataagc

SEQ ID NO: 7355 - DNA, 444 bp, Glycine max
  Clone ID: jC-gmle01810025d03a1
atttttgagtctgcttactgaaaatgggaacaccaaggatgacctcaagcttcccactgatgagagtctgctcactcagataaaggatggatttgctgagggcaaggatcttgttgtgtctgtcatgtctgctatgggtgaggaacagatttgcgccctgaaggatattgggccaaagaactagcttttggtgctggcagcctgttgtttctatttaagcaaagatccttttgtaagcctttatattggtttgttcaagacctggcttatggcttatagattctagtcagactagtcttaacaatggtgtttatggatgtggtcacagaaactatatcacattttttctggttttctatgctgtcctatgactttgttataaaggaggagtcaaatgtgggaaggtttttttttggtatgatatgatgagatcttcattgcctg

SEQ ID NO: 7356 - DNA, 444 bp, Glycine max
  Clone ID: jC-gmle01810025d03d1
caggcaatgaaaatctcatcatatcataccaaaaaaaaaccttcccacatttgactcctcctttataacaaagtcataggacagcatagaaaaccagaaaaaatgtgatatagtttctgtgaccacatccataaacaccattgttaagactagtctgactagaatctataagccataagccaggtcttgaacaaaccaatataaaggcttacaaaaggatctttgcttaaatagaaacaacaggctgccagcaccaaaagctagttctttggcccaatatccttcagggcgcaaatctgttcctcacccatagcagacatgacagacacaacaagatccttgccctcagcaaatccatcctttatctgagtgagcagactctcatcagtgggaagcttgaggtcatccttggtgttcccattttcagtaagcagactcaaaaat

SEQ ID NO: 7357 - DNA, 475 bp, Glycine max
  Clone ID: jC-gmle01810025d04a1
gaatctcagaattctctaaaagagatctttttctgctctttgaagaaagaagggtctttgcttgattttggagatgtctctgctctcagatctcatcaaccttaacctctccgataccaccgagaaggtgatcgcagagtacatatggatcggtggatcaggaatggacctgaggagcaaagcaaggactctcccaggaccagttagcgacccttcagagcttcccaagtggaactatgatggttccagcacaggtcaagctcctggtgaagacagtgaagtgattttatacccacaagccattttcagggatccattcagaaggggtaacaatatcttggttatctgtgatgcctacactcctgctggagaacctattcccactaacaagaggcacgctgctgccaaggttttcagccatcctgatgttgttgctgaagtgccatggtacggtattgaacaagaatacaccttg

SEQ ID NO: 7358 - DNA, 487 bp, Glycine max
  Clone ID: jC-gmle01810025d04d1
ccaatgaacatgacaatttcatatattattattatacttcacaatcagcatttctttgttcaagactgataataaccattaaattattggcattgtaacaatcggaaaacgagggaaaggaatagaagaaaacaatgaacaacccttgccagttagttgcaccaaccaacagggcaccaaccatagtaccaatcaaaaggtaaaaagagagagagaccaaatcctactaagaaaagcataactgttcctttccatccaaagggagaaaacatgcaggttttgctcatggcttccacagaatggttgggtctgcaatcatggaagtaaccacgtatgggtccatgttggaagctggccttctgtcctcaaaatatcccttccctgctttctctgtgtctctcccaaccctaacagaagctccacggtttgcaactccccataagaaggtgttgatgtcagcggtttcgtggcgtcctgtcaaacgacg

SEQ ID NO: 7359 - DNA, 366 bp, Glycine max
  Clone ID: jC-gmle01810025d05a1
cgaaactttatagttcaatgagaggaagacatagcatgaagttcacagactcgccggcgatctagcttgcggtgaacgacgccgttctgtctcttcagccagacaacggtgacatgcgcgtgggaatcatcgggttgggcatgctcctctgtactcgtcaaattcggggagcggtggggcccaccctctgacaacaacccctacgctcgcgtgctctacttccaaggatagcggtcccgtgagctcggcacgggctgtcgcgaggcgggaatgggcctttaactgttggggctgacggacctgttcctaaccgacatcgcacccgtcatgccggccctgaagcgcaacctgaaggtaaacagcccc

SEQ ID NO: 7360 - DNA, 555 bp, Glycine max
  Clone ID: jC-gmle01810025d05d1
aaaaaagaaatttctgaagtgaataaaaatggccgtatctaagaaaattccagatacatagtttgtcatcactctaaagcgtaaaaacagcctgtttccaaccaagttaccatgtctctaggtatgcaggcatagaactaacaatttctaagccaagtacaagggactgctctttccagcaatcattcaaaaagcaaatgaagcatataaagttagctacattcattgcccatgtcacttggaagtctcttcatcttttgtcgccttaggatgtattcccttcaacttaagaaattgttacaaagaacagaaaccaaattaaagaaaaatcacgatccaattagatcaggtgtttcagcctcaatggacagcaatgcagtgtgaacttttccagtccaactgtccagtcgatcccgtaaggatttgatctgttgaatacccagaactcttggctgcacccaggaaacatgcactgtgccctcaacttgatcaattataccctcaattagatgaacagataggcttttcataaggagatgctccacattctctata

SEQ ID NO: 7361 - DNA, 470 bp, Glycine max
  Clone ID: jC-gmle01810025d06a1
caaaagggtggttgaagttgaagcagagataagtgtctcaacaagtgatatgcaaagcatgtctctctgtgcttcactctcctccacagcttcacacctcacttcccttgcctccgtctcttcttccacctctccactttcccgcaaattttctctcactttccgggaaaaaaacagaaccccaattgcaccacctcacaagctccccttcttctcagcaaggcctgcccccaccagagtagtgttggtgaagtctcaggccacagcacctgcttcttctgaggctgtgaaggtgacaccggtgccttctgagatgaaggcatgggtgtatggagaatatgggggtggggattgttctgaagctggactccaatgttgctgtgcctgatgtgaaggaagatcaggtgttaatcaaagttgttgctgctgctcttaacccctgtgatgccaagaggaggcatggaaaagtt

SEQ ID NO: 7362 - DNA, 548 bp, Glycine max
  Clone ID: jC-gmle01810025d06d1
aaaaatgaagttctttatttttgttttttagctttaatctaaactctgatttacatagaatatgaagtttactagacagacacggcaaaattgcctatcccttttacttgattcaagggatgggatgtataacaacctttccagttgctcggtttgtttcaaggtaagagaaggcttcagcaagcttatcaaaggggaatggacctttggggtcaacaattggcttcaccttcccactttctaagtaagggtttagtttcctcagaacttctccattggaagtaactacaaatctgaagccaggtggtgtaacagcacctgtgagtgccaccacactgccatcttctttcacagccttcactgccctgtcacattgcccaatggcatcataaactacatcaaatttttcgggcaaatcttcaaagttctcttttgtgtagtcaatggccaaatcagctcccaagcttttcagtaggtccaaatttctagtgcttgaagtggcagcaactcttgaagctccataaacttgcttagctagctgaatcact

SEQ ID NO: 7363 - DNA, 433 bp, Glycine max
  Clone ID: jC-gmle01810025d07a1
cctgagagttaggtccatggctgaggaagagcaaccaagtcagcctgcgaccccagttacaccaccaccagcagaacccaaaccacagccagtctctactccttcaccaaaggtgagcaccaagttttctgatgtgttggcgttcagtgggccagcacctgagaggatcaatggaaggttggccatgattgggtttgtgggtgcaatggcagtggaagtagccaaagggcaaggtgtgtttgaacaaatatccaatggtggtatcccatgggtcttgggaacaagtgtggtccttacccttgcttgcttgattccactcttacaagggatcagcgtggagtataagtccaaagggttcatgtccctaaatgcagaactgtggaatgggagatatgctatgttgggtttggttgctctggcttttactgagtat

SEQ ID NO: 7364 - DNA, 506 bp, Glycine max
  Clone ID: jC-gmle01810025d07d1
gataaaaaaaaatgataattttatatgctgattaaataaaggcaccaagtacaaaaagagattggtctttctaaccacgaatgacttaagaccattttggtgtgcattcatgactgaattacaccaaggtaccacccttaacatactcagtaaaagccagagcaaccaaacccaacatagcaaatctcccattccacagttctgcatctgaggacatgaaccctttggacttagactccacgctgatcccttggaagagtggaatcaaggaagcaagggtaaggaccacacttgttcccaagaaccatgggataccaccattggatatttgttcaaacacaccttgccctttggctacttccactgccattgcacccacaaacccaatcatggccaaccttccattgatcctctcaggtgctggcccactgaacgccaacacatcagaaaacttggtgctcacctttggtgaaggagtagagactggcttgggtttgggttctgct

SEQ ID NO: 7365 - DNA, 369 bp, Glycine max
  Clone ID: jC-gmle01810025d08a1
acacaacaacactctctcttctcgctcttggcttttcgctcttcactcactctcattcattcatttccaccgttcatggatccagtaagcgtgtggggtaacacgcccttggcgacggtggatcccgagatccatgacctgatcgagaaggagaagcgccgtcaatgccgcggaatcgagctcatcgcctccgagaacttgacctccttcggcgtcatcgaggccctcggcagcgctctcacgaacaaatactgcgagggcatgccaggcaaccgctactacagcggcaatgaatacatcgaccagatggaaaacctctgccgatcacgcgcactgcaagcctttcacctcgacgcccaatcctggggc

SEQ ID NO: 7366 - DNA, 554 bp, Glycine max
  Clone ID: jC-gmle01810025d08d1
tcctttttttttttttataaataagaaataacatatgatatcaatcaggctaacaggattaaacatgaaatcaaagacagagaaacttcaaacttttgaattgaaacaccatggcgattaaccctatcactcccaagaaaggaagacacatatttcctttgtctgcatttctgcactttgtgtcaaacttgagtgacacaatttagtagaaagtggtatggttgaacctaatccttgtacttcatttcagataccaggaatccaggcatgtcaaacaaggcagagaacttctcaacattagctttgagatcttcaatagccttgtagtcgacgagaccctcgttgaaatccttgagaagtttgccatgctccttctggatcttcagtgtgagagtcacagcacggtgaaggaactcaccaatctgctgaaagtctttgtaaaccaacccctaaagtcatggcaggggcactcaatagcactccaccagtggccattgcactgctatcaccaaaacagcggtcttgttaactggaatgttaccgagatcacagag

SEQ ID NO: 7367 - DNA, 348 bp, Glycine max
  Clone ID: jC-gmle01810025d09a1
cttagctttgattctctgttctctgttttgttctgtttcgcgtattgtcttcatacaggaacttgaacaatgaagaatgcaaagggcaagggagcagcaagggcctcaaaagaatcactgaagcccgttgatgaccgaaaggttggaaagcggaaggcttacggtaagcctgggagaagtagtgcaccaaagaaggagaagaaggccaagaaagaccccaacaagcctaaaagaccacccagtgctttctttgagttccttgaggagttcacgaagacctttaatgctgagaatcctaatgtgaaggctgtatcacatgttgggaaagctggacgagacaaatggaaa

SEQ ID NO: 7368 - DNA, 524 bp, Glycine max
  Clone ID: jC-gmle01810025d09d1
tcctttttttttttttttctgatcagaaagaaattatattacttaaagattgccatgtaaggctacaatgcccaaatagtgtttgaagtacaatagctaagtgaggtaagctcaaatagttggtagagtatatcatgcgctccaaagaataaattcttttctaccagctcaaatctcaaaaagtagcctagtatgctcaatcagaatatataatagcctgcttcacaatctaaacatcataaccaaggttttggacatcaatctcagtcatcatattcattggcctcttcctcctcatcatactcttgctgctgctatccactggcatcatgttcatcattcacttcagatttggacttgtctgattcttcatgatctgcggagcttgcctgatttttatcataagctctgataagtttttgatactcaggtatccttttcgcagacttggctgtatatggagctttctcagcactggacaaggatttccatttctgtactacagctttcccaacaactgatac

SEQ ID NO: 7369 - DNA, 458 bp, Glycine max
  Clone ID: jC-gmle01810025d10a1
ctgagatatccatcttatccagaaagcaatggaacatggaggtttcctggaattggagaatttcagtgctatgacaagtatatgagagcttccttggaagcatcaactgaggccattgggaagaaagagtggggaaaaaatggaccacatgactcatgccaatacaaccaatttcctgaggacactggttttttccagagggaaggaacatggaacacagaatatggacgattcttcctttgactggcactccaccaaacttattgaacacggcgagaagatccttgtatcagccaaaggcattttcaactcatgcggggtgaaactatctgccaaagtagctggtattcattggcactacaaggcaaggtcacacgcggatgaactaactgcaggctactacaacacgcggtttcgcgatggatacctaccaatagcgcaaatgctgtgcaaacatg

SEQ ID NO: 7370 - DNA, 518 bp, Glycine max
  Clone ID: jC-gmle01810025d10d1
ataaaaactatgatgcttttaatttaactacacagtatacacaatgatccctccacatgatgctatatgtgttcacacaagagcaacctcttgagcttgttcttgctgcttctgaattcctgtgatgtgtccaacgtaaagatgagtcccacaagaatcagattctggaagcctttgtctttttccaccttcagacatgcttttcacaaactccacaaagagcctccaattgtctccctcaaacaacctcttattcattctcagataagtgaatgctgccaatccagaaccagagttacttgttgacaaaacttgagaaaaagcacctgcatcatatctctcaagtgcattctccccagcaagttctgcttctgctgttctggctgctatcttcacttgatgaaccaacccctcaggggaacaatgctcaggttgctctctgtccctcatttccatgcaggtgaaattgagcacaactccatgttttgccagcatttgtgctattgtaggtatccatc

SEQ ID NO: 7371 - DNA, 590 bp, Glycine max
  unsure at all n locations
  Clone ID: jC-gmle01810025d11a1
caagccctcaagtttccaccacctcatgtcatcaaagttcgtgagtctgaatggatgactgatgaagaatttggaagagagatgcttgctggtgttaatcctggcatgattcaacgccttcaagagttccctccaaagagcaagctagatcccacagagtttggagatcaaactagtacaataaccaaagaacacttggagatcaaccttggtggactcaccgtagaacaggcactgaaaggtaacaaattgttcatattagatcaccatgatgcattcataccgtttatgaatttgatcaatggcctgcccactgcaaagtcttatgccacaaggaccatccttttcttgcaagacgatggcacattgaagccattagccattgagttaagtttgccacatcctaggggacatgagtttggagccgatagtagagtagtcttgcccncagccgcagtcaacagcgctgaaggcacaatttggttaatggccaaggcttatgttgctgtcaatgacactggctatcaccaactcantagccactggttaaatactcatgccacantngagccattgtcatagcaacaaac

SEQ ID NO: 7372 - DNA, 365 bp, Glycine max
  Clone ID: jC-gmle01810025d11d1
ggaaaatcccaactggtgccatagagaaatttgatttcataatcatagtttgggatatcaatcttacatactacgggtgaacatgatagtaaaaacaaagtaatggtgataccattcttattaaatacgaaaactagataacgtccacatacaacacttaagaatgcataagacaattattatatgcatgcataagcttgcatatttactcgtcaacgagaaaggtaacgtaggtttggaaagagaaccacacataaacgcactctggccttagatagagatgctgttgggaattcctctgaaagtaaggccttcctcactggtaggaagaagcacagtataaggcatctgaaccggtccattac

SEQ ID NO: 7373 - DNA, 580 bp, Glycine max
  unsure at all n locations
  Clone ID: jC-gmle01810025d12a1
gacgcactataagctaaagcagcaatgagtactccttctaagcttttatctttattctttgtactcattgtcttgctgatgcccttagtttccttactcaacaatgatttctctatcttcaccattaaaaccatttcatacctagtttcctttagtgaaaagccaaaccattactctaatttcagcattattccatacaaagcccaaaatagtaaacaaaatggccacatcaccacaaactccaatggaagagacaaaccacgtctttggaggaaagccttcattggcttcaaaaatactcacgagccatcttcgaatatttctcgagcaatatcccttaatgtaagcaagtgttttcccgttgagttaccttcttttgcaataaccaattcccattgttgtccacctagaccacctncttctaagatcatagatttcaaagattttgcttctccaaacgccacgcttcgagtaagaaaaccggctcacatggtagatgaggagtacataagcaaacttgaaaagggcattgcactcatgaaagcactccctgatgatgacccacgtaatttcatacaac

SEQ ID NO: 7374 - DNA, 502 bp, Glycine max
  Clone ID: jC-gmle01810025d12d1
acatcaaactcaattttttattatgaaaattagttctagaaaatcaaattgatttatttgattttctttacatgcactagtgttgaaagacatgcaccacaacaaatttatatctacttctaggagtacttccccacatccaaaatttcaacttccttcacattctttcccttccccaattgctgtaaaatatatagcaaattcgacatctcatatttcagttagttggacaaaatccagccacagagaatacgagctcgacttgctacactaaaaaaaggaaaaaaaaaaaactaccttttaaaagcataaacaacaaaacttgtaaaaagtgtaaaattttcacacccacaaaataatcctagtattttggaataaactcaattttgatgcctcctattatggcatccccttttcccaccttaggtaccaaagaaaccagcacctcatcgtcttcttcagcttctacactctccagcactttcgatatccctaccttaaa

SEQ ID NO: 7375 - DNA, 500 bp, Glycine max
  Clone ID: jC-gmle01810025e01a1
gaacggtctcaattcccctctcgtcttccaagacgaccctctccgcttcaattgccccaccccgcaccagcgtcgggtcggggacccgcctccgaagacccgcgaacttggcgccttcatcgacgacaacaagatgttcatcgaccgcgaccgcttcttcgccgccgcccagaacccccgaattccgccgctacgccgactgctccgcccgccgcgacccgccccacgcccgcaattggagcgccacagacgatgacgaagagtctgacgacgacgacgaagatgacgacgacgatgaagcggatgacaccgaagtaggaggactcgttggtgatggaaccaaaagcgaacttaacaacaacaacaacaacaacggtggcgctaatttacctgctgttgcaaacgggaaagcccactcttacgtttctggaagagagctattggtgaatgatggtggtgatattggccaattggtgcatagcaatgtgagtggtggtgat

SEQ ID NO: 7376 - DNA, 547 bp, Glycine max
  unsure at all n locations
  Clone ID: jC-gmle01810025e01d1
aataatggtcacaaccatttccactcaaacatttatctgttcatgtagaaaaaataaaaaagagaatatatattctgtcagtgtatctataacaaaatgattacgcagatactaaaatcttgactagcacaaagcatggtaaggtttctatatttacaaactcagcagctagcagagttttctcgcaaggaatacaacaatggaattacaaagaagaatttttgtaggtatgtaagcattgaacgctaaaaatctagtggcatcagcttggtgtagaagtatttgatcacggaactgtgctgcagaagtgcagatctaaagccaattaggtggcatcttgctggaggctgcaggttttgaaggatcatccataaccttggcaagggatcgatactgcaactttacactctctgcattgtccaatgtcttcaccacataccatccattcaggcattgcgttgtaacaatagcttcgcgcccaacatagcgttgtggtgtccctttatttccctttatgataaacccgtccatcacagcanatggaaac

SEQ ID NO: 7377 - DNA, 526 bp, Glycine max
  Clone ID: jC-gmle01810025e02a1
agagaatacaccaaaacccaacatgaaaacccttaacaaagcctcacttattttattccctctcttgttcctttccctattcaagcattcccatgctgcaggaatcgctatctactggggccaaaacggtggagaaggcaccttagcagaagcttgcaacactagaaactaccaatatgtgaacatagccttcttgtccacttttggcaacggccaaactccacaactcaaccttgcaggtcattgtgaccccaacaacaatggctgcactgggttgagcagtgacatcaaaacttgccaagaccttggcatcaaagtgttgctctcccttggtggtggtgctggaagctactccctcagttcagctgatgatgccactcaacttgcaaactacctctggcagaatttccttggaggtcaaaccggatcagggccattaggtaatgttatattggatggcattgactttgacattgaatctggtgggagtgaccattatgatgacctaaccagggcattaaatagc

SEQ ID NO: 7378 - DNA, 572 bp, Glycine max
  Clone ID: jC-gmle01810025e02d1
atatagtagaaaaaccaatcacgagcggtgattagtattatttaaataatggaattaatgacatagtttttctataagtctataacatgattaaacacttccaataatagcattactataaccattttggacatcattgaatctgttccagagcatgactccaccatactttgaagactgtttaatcacaggaagaacctgagaagtcaacacatcagagggcacaaagccaccacttggagcagctgcctcagatgcaggaagccccatgaagatttgagaagctggcactgtgatccattggttccatgaattgatcaaattgttggtgtttccactggagtattggcatgaagggttgttgtagaattgaacccacacatagtcaaaaagcccagtttggatggctctatccaagtgagcatcagggattatgcactgtggggctgcagacaagtacaccttcctttgtgagctgaagctatttaatgccctggctaggtcatcataatggtcactcccaccagattcaatgtcaaagtcaatgccatccaatataacattacctaatg

SEQ ID NO: 7379 - DNA, 479 bp, Glycine max
  Clone ID: jC-gmle01810025e03a1
cttgaaaggccgtttaggtccaggcatgatgataacggttgatttacttggcggtcagcagttgtagcatcacccacttggaggtctatgagaatacagaagttaaaaaacgagtagccttatcaagcccatatgggaactggatcaaggaaaatttgcggactttgaagctcgggaacttcctttcagcctctgtgttggacaatgaggcagtattaagacaccaacaggcatttgggtactctagtgaagatgtccagatggtgatcgagagtatggctgctcaaggaaaggagcccacgttttgcatgggagatgatattccattggcagcattgtctcagaaacctcacatgctttttgattatttcaagcaacggtttgcacaggttacaaatcctgcaattgatcctcttcgagaaggattggttatgtctcttgaagtgaatattgggaagagaaggaatatattggaaatt

SEQ ID NO: 7380 - DNA, 467 bp, Glycine max
  Clone ID: jC-gmle01810025e03d1
gcaaggagaaaacaatattttttcattaatcagaggagagaaaagatgactaggcatatcaagccccaactaatttattttcaccgtccacaaaaatcccaatcagattcgaatcaactgcattttatatacagttttgctttcacatggctatacaaaagagaatgctaatgctttagatggatgtatacggggtgcatcgtactgctggcaaaaatgatcttgagaatcaatgcagcgaccatggtttcaagggatagtttaatccccatattttggctagcatttccaccttattgatagcttctccaattcctgtacaaatcagggatacaacaatggctccatagcctggcgtaatcaatgtaatgtaaccttgcatcgtcaccctaagcagactgataagtgacctgatctgccgtagttgtgtcgtacttggcatttgcctcaggggtatcctcttcact

SEQ ID NO: 7381 - DNA, 518 bp, Glycine max
  unsure at all n locations
  Clone ID: jC-gmle01810025e04a1
attttgcattggatcttgtaatgaatagtgatggcacttgccaaggagtgattgccttgaatatggaggatggaacactacatcgtttcaaagctgcttcaacaattttggccacagggggttatggtagagcatacttctctgcaacctcagcacatacttgcactggagatggcaatgccatggttgcacgtgctgggatccctcttgaggatttggagtttgtacaatttcacccaacaggtatatatggagcaggttgccttatcacagaaggatctcgtggtgaaggtggaattcttaggaatagtgagggtgagcgatttatggaacgatatgcccctactgcaaaggatcttgcatcaagagatgtagtttcaagagcaatcacgatggagattcgggaaggtcgtggtgtaggacccctgaaagatcacatctatctccacttgaatcacttacccncagatgtgctcaaagagagacttcctggcatctctgaaactgctgctattttt

SEQ ID NO: 7382 - DNA, 520 bp, Glycine max
  Clone ID: jC-gmle01810025e04d1
aacattgagacaagtctaatccatccattagctagtatattaatacacccgagccttgggagggaatgattcaacctcatcatccaatacattcaaatgcactggcctgtagtccaaccggactttctcgttctcccagaatcccacagtgtgtttcatccagcttccatcatctctaaccttgaagtcttcacgggcatgagctcctctactctctttcctagcttcagcagagtacattgtgatgcatgcatttatcaaaagattttccaattcaatagtctcaatcaagtcagagttccagattaaactgcggtccttcacctggacatcatggaagctctcccatgttttatcaattaattgacaaccttcttctaatgtttcttgtgtacggaacacagcagcattggtttgcattactcgttgcatattcaaccgaatttgcgaagttggcaatgaaccatttgaatttctcaaattgtccagccatgcaattgttctctgaccagcatccttc

SEQ ID NO: 7383 - DNA, 435 bp, Glycine max
  Clone ID: jC-gmle01810025e05a1
gctaaaaatatggcaatgcgctacaattgctatcgtgttctttttcgccccgctcgtctcgttcaaagccgcgcttgtgattatgcttgctctcctttgcttctcattctgcattctcctattgctcgctctgaaggtcgggaagacatcatcaccctccaccagtcagcgaatttaaaactgcttaaactgtatattttttgtatacaatctcagtctgtctttctcgcgtgtagcacgtccactctggactatgtctttatttttgtggtgaaatttccgtcagttgaatgagcttgtacaaattgtgacaaatcagtgtgtttggtaacacatttgttaccgctctggatggacgtggttccgcgaagcaattaatagttgcttttgcattgctttttttacgtgaatttctgataaacatgaatttccaat

SEQ ID NO: 7384 - DNA, 545 bp, Glycine max
  unsure at all n locations
  Clone ID: jC-gmle01810025e05d1
tccttttttttttttgttaacaaaggtcaaaaggatttttcacatcatacccgagacatcctctccaggttacatatattgatccgaaacagattttagaacctacaaaaatgtgtctgaatttggctcatatgacatatttctaggaatattcttcagtgaataactatatatagccacgtgacaaatgagcttataacttataatgcgtatttgctttagtattggccattgggaattcatgtttatgagaaattcacgtaaaaaaaacaatgcaaaagcaactattaattgcttcgcggaaccacgtccaaccagagcggtaacaaatgtgttaccaaacacactgatttgtcacaatttgtacaagctcattcaactgaccgaaatttcaccacaaaaataaagacatagtccagagtggacgtgctacacgcgagaaagacagactgagattgtatacaaaaaatctacagtttaagcagttntaaattcgctgactggtggagggtgagatgtcttcccgaccttcagagcaagcaata

SEQ ID NO: 7385 - DNA, 356 bp, Glycine max
  Clone ID: jC-gmle01810025e06a1
ttttatctttattccactgaatagaacatgagcatataaatggataccctttatattatctatctttatattatctataaagggtaaagatatccgatgtgaatctatttgtttagttttctatcggtatgtatataggtgaataatccaacatgcctttttgtgaagtaaaaaaactaccctcgatccatgcctcaaaagggttgatcataagtaaaaaaaatcaatgaattcatgataaaacccttctgcgtttttgtattataaattcttttgtcaataaaagggatcaaggggttgggggaatcaaatggtaaagttcttttgttggtaaattggaggattagaaacatgac

SEQ ID NO: 7386 - DNA, 519 bp, Glycine max
  Clone ID: jC-gmle01810025e06d1
atgtatctatataatcgaattgaaattacgattctatcaaatctttttatttactttttttttttttaagaaaaaagaaagttctaattattaataaattatatctatatatatatatatacagatagatattctatatcttttatcttaattaatatttgacccctccttataatgtgttatagttttctttatttttaggaacttatccattccttttttaatgtgcccgacaatccgaaagaattctgggggaggggtcatttcgtttttgatctagaataaatagagcttcaagaaatgagagaattaagaatacccacgagaaacactaatccaatccataatgatgtaccggaaaatacaacatttttgttattcgaccaaccttcaggagaagcaaatacaacaggtacactaatcaataaaataaatgaaatagcaattaatgcaaaaacagctaattggaaagcaatagtcatgtttctaatccttcaatttaccaacaaaagaacttta

SEQ ID NO: 7387 - DNA, 470 bp, Glycine max
  Clone ID: jC-gmle01810025e07a1
ttttctctctctagaatttttttttttctctctctctctcccatctctcggaaaatttttcagagcttcctaaagcctttagaattctctggaacctttttgttcgtccgccgaggatcgcaattcctccaaatcggcgacactcgtcgcttagttcggctctaactgcatgaactggttcgggaagctggattcatcatcgtcgaacttgaacttcaatcacttcgttacttgcctgttgattgttatcctacatttttcgcctcaatcgctctcttccaccttcgatagtgacactaatctcgaatttaattccgaatatggagtcgagaactcagagtgatccccaattaacaagagctctttgctatgcaaacgatggcaatcagcaggggaggtcaccatctgttattgtcattggaggtggcatggctgggattgctgctgctcgttcgctccatgatgcttcg

SEQ ID NO: 7388 - DNA, 579 bp, Glycine max
  Clone ID: jC-gmle01810025e07d1
aaaatacgagaaaaacacataaattgttgtcccaattttattataagtatactgatagaagtgacaacgcctcttaggtgcgcaatattcacattaccagttactggaaacactgactaaggaaatccaacacaaaatgtgatttcacaagtggacatatactcttaaagactatttgccaaaacatttgctatataacttatatataggttgataacaaaagaacaagcatagatagattgtgtttctgtccactagttgtgacccaaagacgattaaagacgcgatatctgaagcgggatagacatggaaccctcttctcccatcactggctggaataaatcaacctctccatatcgctcgagcacacgcatccggcaatcttcagcagccatcgttccagtggagtatgccccatggacagatcctggatagctcatgcttgttgcttcccctgcaaagaacaagttatctactgggacccgtagcctctcatatagttcatggggtttcccaactgcatcatagctatatgaacctagtgaatttatatctgatccccaacgagacacaagatac

SEQ ID NO: 7389 - DNA, 589 bp, Glycine max
  unsure at all n locations
  Clone ID: jC-gmle01810025e08d1
tcgcgatctagaacctcgagccgattcggctcgagcagacctaaccattaatcgagaagtgatgggaacgacgaaacctgcaaatacttaagattttattaaaaacaaatcttaatgattcattaggtgggatggcggaagaaaccaaaaagcaatcctttttttaggagttgtgccctacattacatctgaatttgattgataataaaagagtaaatattcgcccgcgataattttgattttattgaatttttttttttatttttgccaattctatttattctttctaataataaaaaatattctaataactaataataaaaaggaaaataaagattcattagaatattataaaataacaaataatagaacaaaacaagattctttagttatatatgtaaaaaaaaaatggtttatttataagaatacatattccattctatatcaaaacaaaatataaaaatttggaatagattctatgaaatctcaaaaaatcccgctattcaattattcattaaacatatgaatattagtgcatattantttatcgattagattaaatagattatctatatatatagatagatat

SEQ ID NO: 7390 - DNA, 414 bp, Glycine max
  Clone ID: jC-gmle01810025e09a1
aggaattgttgtaactttttgattcctaaattctctaaaattcgaaattctaatttcgttaggggaaagagattgtttgtgtgtgagtgagtatggctggaaaaggcgagggtcctgctatcggaatcgatttgagaacgacgtactcttgcgtcggcgtgcggcaacacgatcgtgttgaaatcatacccaacgatcatggtaacagaactaccccatcctacgtggctttcaccgacacagcacggttgatcggcgatgctgcgaagaaccatgtcggtatgaacccaaccaacacccgtttttgatgctaaacgtttgattggaaggcgttatttcgatgcatcactacaaggtgacatggaagtgtggctcgtcaaggtgattcctggccctgctgagaaacctatgatt

SEQ ID NO: 7391 - DNA, 550 bp, Glycine max
  Clone ID: jC-gmle01810025e09d1
gagcaaaaacttatatcattgttcaagtagaaacggggaaaagtacattaaaaaaaaaagagaaaaataaaatcgcaataaaaacataatgacacgctgttatctaaacttcaaaagggtctttgacaaaatcaagaacaacccatgagaatcttctgcttaatcgacttcctcaattttgggtccagcaccgcttccactgccagctgcaggaccatcctcatccatggctccacccgcatcaccaccagcaccctggtacatctttgctatgatgggattacaaatgctctccaactccttcatcttatcctcaaattcgtcagcctcagcaagttggtttccatctagccattggatagcctgctcaatcgcatcttcaattttcttcttatcatcagaagacagtttggaagcaatcttgtcatccttgattgtgttcctcatgttataggcataattttccaatgcatttttggcctccactttcttcttatgctcctcgtcctcagacttgtatttctcagcttcctgcaccatcttctcaatc

SEQ ID NO: 7392 - DNA, 419 bp, Glycine max
  Clone ID: jC-gmle01810025e10a1
ccctttctcccccactccctagtcagctagctcctgcaacaacaaccactcctcttctttttctcacccaaatccacgcttcccttacaccgcgtttggatctccgttatacaaactcattaaaatgttgcgagagaaaaacaaaacagaaaaaaaattcagttaattattaaattttgttatggctttccacgaccatctccagcacgagatagcgttccagcgtttcacggaggagcaagagttgaacgagaatagagacatgcaacagaggctcccaccttcgacatggctcaacaacgttaacgtcaacgcgcgtcaacagaatttcctcgacagcgagaagagcgtggatccggaaccgaagcgagagcaattgcgaatccgaggatttgagggattacaaagcggacattcta

SEQ ID NO: 7393 - DNA, 525 bp, Glycine max
  Clone ID: jC-gmle01810025e10d1
aaaaaaataagtagaaaaatttatatgtacgtatcagcatgctacccattaaatcgaatagactgtgcctgcatcaatattcagtatcagatatcaagcggcatgcagcagcctcatatacaacaataccagggttaattttctgtaattcaaccaatacagtgattttatcatgaatttccctttacatccagaatccatcacgttcacgctggaccgtaagatctatgaatcccacgagtatgcattaaaaggaagaacaataccaataatttttgctcaaaatatgcgaccgttcacatgaagctctggttactggtttctcctgcactactcttgcgcttgcttttggagttactagaggatgaggggttattagtatgccagttccttttcctctgatttatgaaccaattatttatctgctttaattgcaagcctgtttcctgcaccaacctagccttgtcttcctcagtggggtaaggccatttagaatgtgactgccaccaagctttcaaaagggat

SEQ ID NO: 7394 - DNA, 277 bp, Glycine max
  Clone ID: jC-gmle01810025e11a1
cggacatcgacatgttgacaggtttgttttacgcaccgcagtcagggctaactggaggagttcggactaagaatgggcgcactgccgactgtttgatgcgagcactgaaggtcggaacagtatggatcacttgcgttaatgaattcgatgcttgtatttctagaggttgttacaaatagctcagagttggcaaggatactactatctacagaatcaacaatgcacctacggctgaaagatgaggtataatcagtgatgaaacgtgcgttgttgtgaa

SEQ ID NO: 7395 - DNA, 221 bp, Glycine max
  Clone ID: jC-gmle01810025e11d1
cggggcgcgttcaagaatggttaaaaaaaatgtgcttgtcaagaataattcgttttaaaagaatgaatgcggaccggcaaaggggcccattaacattcacgggtgggtcaatttcacttatcccccttccccagagggtgcctttggacttcaccccgaacccctccccgaaatgatccataaatggggtttggtggcggaaacattttgggatggggggg

SEQ ID NO: 7396 - DNA, 578 bp, Glycine max
  unsure at all n locations
  Clone ID: jC-gmle01810025e12a1
gtttcttacaagcctctactatactgcttcaccttctgctctagaaaattcagtgctgaaacatggcttcggctactctctctgtagccaaaccagcccttcaggcaaatgggaaaggcttctctgaattctctggcctccgaagctcatcaggcttccttcccttttctagaaaatcttcagaggatttccattctgtcattgccttccagacctatgcagttggaagcagtggaggatacaagaagggtgtgacagaagcaaaactgaaggttgccataaacgggtttggaaggattggaaggaacttcttgaggtgctggcacggtcgcaaagactcccctcttgatgtcattgccatcaacgacaccggcggcgtgaaacaagcctctcaccttctcaaatacgattccatcctcggaaccttcgatgctgatgtcaagcctgttggcagcaatgtcatctccgtggatggaaaggaaatcaaagttgtttctgaccgcaaccctgccaaccttncttggaaggactnggggatagacttggtgattgaaggaacctgggtgtttgtagacaga

SEQ ID NO: 7397 - DNA, 394 bp, Glycine max
  Clone ID: jC-gmle01810025e12d1
caaggtaagaattttattgcacaatgagaaggcagagaaaattgatggttctgtttctcagtacaagtttaaaagaaaaatgaagcaacaagtgttgtagtggtagtagtagtagtaagcatacaaaattacaatggcatggtacatacataataatttaattaccaatgagaatttgtttggctctcacttccatttgttggcaacaatgtcagccaaatccacaaccctttgggagtagccccattcattgtcataccaagcaatgaccttcaccatgtcatctcccatgaccatggtcaacgaggagtcaacggttgaggacacatcagtgcacctgaagtcaacggacacaagtggctcatcacacacagagaggattcccttgagctca

SEQ ID NO: 7398 - DNA, 438 bp, Glycine max
  Clone ID: jC-gmle01810025f01a1
ctttacttcgagttgcatgagctcccatttgtcgcaaagacataaagagttctctacaacaaccaagttctgtacaaaggaaagatggggtgcttcactgtattgaagagcaaaaagaaaagtgtctgatactaattacatcatgtagaaaccgagtaatgccatatatgagcaaccgtacgctactctgtccttggactcttaacctttaataacttaataactcgctcactacagtctgctccttctagttttaagaccagagtgaaacccattctacccattaataaagtcagtaacaatttagcgcgaacattatctgctccatctactattgatgcagcaaaacaagatgctatggcttcaaatgagtatgacgaacatcaagagtttaaactccgtcctggatcaatgaatgagcatcggacatctagtcca

SEQ ID NO: 7399 - DNA, 395 bp, Glycine max
  Clone ID: jC-gmle01810025f01d1
agcatccgtgtcaattcgaatttgaatttagtccggcgtggtcgctgctactaggccgcggtcgccctttttttttttttttgcttgttacacatttccttgttacctcaacgtgtgtgtgtagtccaatgtcatacaccatccacagttcccttaacaatcgagcttctaatgggcctaactcatacggattttacgtgggagaacctcacatgttatgtcatggccattatgtgatgcaccactcctcttacctatacctgccatgaactgtacattatacacaaccaacatcctccaacaatagcgctcgtaaaggccggggactaatactggcgggatgactgcctattgtgttcctgtcaaagagatgctggtagcacaagcgcacgtgg

SEQ ID NO: 7400 - DNA, 567 bp, Glycine max
  unsure at all n locations
  Clone ID: jC-gmle01810025f02a1
ggtgctatgaatcaatgagggantccgaatgcacgactacgtatgctcgcattcttggttgagattacacgatcaactaaaaatttatccatcaaaccctcgaacttcacactgcggacactcttaaaaatagggaggaagttcaagaccaaggaaaatcgatgttttgcttgaacctcacaaagatggtgtcctcagaacctgtgccttttcgctccctgcaatctgttctttcggtctgtgctcagccattttgaggtccattgacaataacccaacttcatgcactacttaacgctcgttagccgcccaaattcagtgtggtctgagagaacttagaacccgaattgttatcgtgaagaacactcataaagataccgagggtgtgaagcttgcggctgtggccaaagtgagaagagcttatgaagctggtgtgaacggtagacccttcttagagaccctcgttggagtcctctacaacataaacgagcagcttctaactgaggacgtagacatccctctaacaaaggttatgcctaataaaaaagttgcacttgttgtggtcac

SEQ ID NO: 7401 - DNA, 334 bp, Glycine max
  Clone ID: jC-gmle01810025f02d1
gtctatctgttttttttttttattttttttgtgggcattattgccaccatagcctgtaaagtgaagcattatgattcatgaaaccgaaaagtaccaacaacagtactcaactgagcagtgattatgttgtattttccattaaagtgtgataaacgcacgataaacgcgtgtacattcaacacatacgaccataaggcttatgcacatggcacatagtctgacttgaacggcgactcatttcgacatatattcttaatacactgtcgacttaccgaatttgattaaaattacaagagccttgtcactgtcgaaccagccattcttgtgaacctgt

SEQ ID NO: 7402 - DNA, 458 bp, Glycine max
  Clone ID: jC-gmle01810025f03a1
caaaaacgatagagaaaaaatttcccttagccacctccaaccctcacggctaactctgtttttaacatgcgaaccttgaccgagaacactgctatcaatgtcttgatgaatttgaccgtgagggcggtcgcaaagcatcctttcacatccctgcgtctctccttccgctgtgcccttaacaccttttgagatggtcctcaccgcccaaagttctgcactcctttacgcgagcaaatcacataattccagagcggacagagagatctcgactcccgataggacaccgtgaggaacactcataacatcaccaccgctatcaagcccggggctctggacgagagtgacaagagcatgacgaagcggttgtcgccctgggaccaccctcagagaccctctttgaaattactgtacaacattaacgagcagctcctaggtgaaggcgcggacctcccttttac

SEQ ID NO: 7403 - DNA, 183 bp, Glycine max
  Clone ID: jC-gmle01810025f03d1
cctattccttgtcttattgtttggggagtctttattgagaacaacagtggaacaaccaatagaaacacgcaggaaacatgacatgactataactacgcacaatgctgttccacccatgaaacaaccccttcacacatgaatgaacaagaaacacaccactcccatggcaacttaaccggtatc

SEQ ID NO: 7404 - DNA, 379 bp, Glycine max
  Clone ID: jC-gmle01810025f04a1
tgaggcacagtggatcaagtagctcatgccgctctagctcggttcgtcagcactagagagagagggaggccgccttgtacgcagaaactctttgtttgaagatacacgacatagccttgcgtaacatatcactccccctccgtgagtcggtgctgcttgaatcggggggcatgcaaaaatggcttcgagagttacaactcaaaacgcgctcctggttgaagaaactgcgccgggatcactggggtgtgaatcaaacagagggatgactgcctactgagtgttgtagtaataagctggagctacgtagtgcaatgatatggggacggatggatgctcggatgggcattgaacagcgtggggctctacatggattctgtgc

SEQ ID NO: 7405 - DNA, 421 bp, Glycine max
  Clone ID: jC-gmle01810025f04d1
gtgaaaagggccaccaatgatagtactaggggcctacaatacaaaacattgttaactgaaatttatgatttcaaaggccgaccaccgggggtgatggctatctgaagcttctctacctcctgcttgggacttattcacaagaccctattaccacaaggatttctacaatttgtcaatgcttttgcattgcatccttttgaacaatagctgtgtaccatgcacaaaatgcacaacattccttctacaactttctcgaaatattgtactgaccatttcctactttcatatgatcaacagacctaacaaacatatatcagtgattccgttgaatgcatcgcctatgtctctctgggtattcgaacgtcctgctctatcttgtagaagactgcctctgaacttacaattgggatggccttaagat

SEQ ID NO: 7406 - DNA, 344 bp, Glycine max
  Clone ID: jC-gmle01810025f05a1
ccgcgagattagagacatgagacacacccccctgtttcacaacagaggacatctcattcttcaatgcttcaacggcagaacctttcataggttatcactccttcttcctgtgtcagtgtgctcttcttctgggggcaattccactttgcttctttagctacaactacaaccgcgcttttggcatgacaagctacgccgggatcactgtggtgtgtgtgagagatagggattacggctcagcgggttttctgtaacttagacagagctactataaatgggacacggggctgggagcacacatggttaagagacttgtggtggtgatgctatgattagaatctggg

SEQ ID NO: 7407 - DNA, 244 bp, Glycine max
  Clone ID: jC-gmle01810025f05d1
ttcttttttttttttatgtgtccatgcacacgaattgaactaacgatactatcggagcgtttagtcaaccttatgtacatctagggaaaatgatagcactatacacgaataagggaggtctgtatacatatatagaccgaccgagcttatctctatctgagcttggacacaatcagaccctcacgtaacacgagtcatcacctgatacaactactggaactctctcaatactgttttactgggc

SEQ ID NO: 7408 - DNA, 316 bp, Glycine max
  Clone ID: jC-gmle01810025f06a1
gttgggaattcggctcgtgctaacatacaatgaaaacgcaaactggatcaagaagggaaagatgtgcgctttgttcatcaacgaacctgacgcatgagctggtcgtctgggcagaaccacgcaatacactgcatagatggctatggagaatgccacacctaatgaacacatgttgctacctccgctcccaagtggaggatgagtggaatgcatgcaggggagagcaatccccgtgagcacataattggagactgtaacgataccttccacactttgtggacgtataattcgcgatgggcgtatggagaatttttac

SEQ ID NO: 7409 - DNA, 529 bp, Glycine max
  Clone ID: jC-gmle01810025f06d1
gtcctttttttttttttttcaatttaagtggacactttaactcaaaattatagaggaggacagtccaatatgaaaaatatagtaaaatcatctcaaacttggcatcttctctttgcacctaagacattgagaattctaagaatgttacacgcaagtcccatcacaacttctagcacttggatcagcacaaccttcaggaacagaaatatttacttgccaagtttgctttgcctccaattcaagattggaagaaagttcccctgttaatagcatcctcgttagcatttccaagtgcagcctcgttcaagtacttgtcagccaattggactctcttgacattctcttgttcttggacaagcatgttaccatacgtcaagagcttctccagagtcatcttgggctgctcaaaggttggaggtccatcttttgagttcacaagcttcttcccaatgccgtcaacaccaacaccagaaatccacttcctcacttcgtcatcatatactctggccctcagtgcaccaaagaaatc

SEQ ID NO: 7410 - DNA, 352 bp, Glycine max
  Clone ID: jC-gmle01810025f07a1
ctatctctcaccaatgtcttcctaaaacgaatatgctctgatgagcaatattgcctcaccgctagaataagaacatgcattggctcttaaatcttaccgacgaacagatctccgagaccaacgaagccgtgaacttgttcgaccaggagcggcaggggatgatgaatgtctctgtctatcaaggtttgggctttcgaatggacatgatttatgcctttggggctttcgaagagcggcgttcattgttgcgatactggataaggaaaattagatgacatctgattgtatttataaccactttttatgttgagggttacatggtgagagtggaccttggattagctgtactttg

SEQ ID NO: 7411 - DNA, 524 bp, Glycine max
  Clone ID: jC-gmle01810025f07d1
ttctcgatctataacctcgagccgagatcagatagtgcagacctaaccatttatgggagaatgagatggcaacgacgaatcctgcggatacttaagattatattactaacaaatcgtaatgattcattatgtgatgatggcgaagaaaccaaaaagcatatccttttttataggagttgtgcactacattacagtctgactcagatcgtgtataaaagagctaacccttggccttcctgcaacccgattttatggaatttccttttaaataacagccattcctataggttcttgctgacattaagtgatgatctcatggctaatattacctaggcgaactacgattcattaaaatattcttcgatatcaacttctatatcagaacaagattctttagccttatatgtagaaagaatctggccgatgtagaagattacatgttgcattttatatcaaaacaagatctccttctgtggaatggagtatacgaagaatgctaattcacgatattcaattattcattg

SEQ ID NO: 7412 - DNA, 453 bp, Glycine max
  unsure at all n locations
  Clone ID: jC-gmle01810025f08a1
gggtntggtgggtgcacgtcattgtgcgatgcaagagtgcacacgtacgttgcccgcgtacgtgagttcggctctctctcaccggagccttactggaacgaaaccaaaaacaagagcctttctccctcaccaaagaagaagaggcgcacgatggccgatcaacttaccgttgaacagatctccgagttcaggcggagtctttatcttgttcgacaaggacggcggagggattgttctctctctctctctctcaaggtgtgcgtattcgatttgatttgatatatgcgtgtgcggtacttgtagagcggggtctcttttcatgataatggattaggaaaacttgatcacttctgattctattttagaatcctttttttgctgatgctgatttggtagaggtagatcttggataagctggactttgtggaaagggtgagagataaagagttcacg

SEQ ID NO: 7413 - DNA, 563 bp, Glycine max
  Clone ID: jC-gmle01810025f08d1
gccgatatacctccggagttattaattggcgggtcgacctgattactcgtcggccgccgtccttttttttttttggcataaagtgaatagacattaacattacaaccctttttttggataaaattacaagacaaactaagaaggttcagttccactacagcctagtagcaggacttgccactaattgacattttaaggttggattcaaaaaccatcaaataaaaatgtaggaagaagaaaggtcaaggactactacatcactgttataccacccaaacccttggccttcctgctacccctttttttgtcgtttccttttaatcaacatttcttcatttaggtttttgtggccataatgtgatgatcacttggccatcatcaccttaacgaactcctggtagtttatttggccatcgccatcaacatcggcctcgcgaatcatgtcatcaacctgttcatcggtgagcttctccccgaggttggtcatcacatggcggatctcagcagcagagatgaacccattctggtccttgtcgaacacccggaatgcctatttcagctcc

SEQ ID NO: 7414 - DNA, 473 bp, Glycine max
  Clone ID: jC-gmle01810025f09a1
gctcgacaagctcaaagctgagcgtgaaagaggaattaccattgatattgctttgtggaagtttgaaaccaccaagtactactgcacggtcattgatgctcctggacatcgtgactttatcaagaacatgattactggtaccttccaggccgactgtgctgtccttattattgactccaccactggtggttttgaagctggtatttctaaggatggacagacccgtgagcatgctcttattgctttcaccctaggtgtgaagcagatgatctgttgctgtaacaagatggatgccactacccccaagtactctaaggctaggtatgatgaaatcgggaaggaagtctcttcttacttgaagaacgttggctacaacccagacaagattccctttgttcccatctgtggttttgaggttgacaacatgattgagaggtccaccaaccttgactggtacaagggaccaactcttc

SEQ ID NO: 7415 - DNA, 558 bp, Glycine max
  unsure at all n locations
  Clone ID: jC-gmle01810025f09d1
aacaaaacttccttataaattaaatgcaaatttaagacatccctcctcagcagcaaaggaaatggactaaaaccctatggctgcttgtgaatttgaaaatctcagacttttaccatcaaaacataaaacagtactcatcaaaaacatacagcaacgaaaatgttaccgccgatcaagaacccagttttgaaggctacggctacatgaaatcggcggacacttcaaaatataactggtaaaacaaacacctaagactctgcaaagataaactactgtaaaggaacaagtttttttgaaaccacgttgatgatcacatgtgctagcaaaattgccaaaatgcaatcacttcttcttggcggcagcctttgtgaccttggctccggtggggtctttcttctcaacactcttgatgactccaacagctactgtctgacgcatgtccctcacagcaaaacgaccaacgggaggatactcagagaaagtttcaaccaccatgggcttggctggaaccatcttaaccataccagcatcaccattcttcaaaaattngggctcctt

SEQ ID NO: 7416 - DNA, 346 bp, Glycine max
  Clone ID: jC-gmle01810025f10a1
tgagtgatagaaacagatctcatacacagatcagaatggcttctacccaatgttggttgcaccaccatgctcttaccacccctgccagtgccagatgcccatcactacccatcttggttaggaccaagcctatccaggtcgtttggaaggcacataaacaacaatcaccacaagaggatattgatgtcaccccaatctcttgccgtttaactctaactgtgctcattagagctcgctgctgctggctgcaaaatgcaacctgctgggcagcctatggtgagactgccaatgtgttaggaatgccaaagacatactcaggttttctgccatacagtggtgatggatt

SEQ ID NO: 7417 - DNA, 499 bp, Glycine max
  Clone ID: jC-gmle01810025f10d1
gtcctttttttttttttttttccttgagataattgtttctcttgaataaaaattgaagccttgttacgaaaatgcatactccttgtagcagcttaacgaaggagacattaagtattcagatactgaatccatccaagtcccttgaattatgaaactcgtgaaaccatagatagcactgaaaggttgatttacacatagcatatatatatataacccgctgttgaagttttttaagcaacactgaaagaacttgctgcgctctccacaaatcttcttgctcccttaaaccacctcttgtctccagcttgagccttgcaaatgaacagtttgtccatcttttacagttgctctaattatgtggtgcttgccaccttcatctccatcagcagttcttgtcaacacagacaagaaatatgtatggcttcccgtcaatcacaggtgttgcagtctctaagatgatagccgtggacactgcatttggatcaaaaccaccctcagc

SEQ ID NO: 7418 - DNA, 508 bp, Glycine max
  Clone ID: jC-gmle01810025f11a1
gtttcttacaagcctctactatactgcttcaccttctgctctagaaaattcagtgctgaaacatggcttcggctactctctctgtagccaaaccagcccttcaggcaaatgggaaaggcttctctgaattctctggcctccgaagctcatcaggcttccttcccttttctagaaaatcttcagaggatctccattctgtcattgccttccagacctatgcagttggaagcagtggaggatacaagaagggtgtgacagaagcaaaactgaaggttgccataaacgggtttggaaggattggaaggaacttcttgaggtgctggcacggtcgcaaagactcccctcttgatgtcattgccatcaacgacaccggcggcgtgaaacaagcctctcaccttctcaaatacgattccatcctcggaaccttcgatgctgatgtcaagcctgttggcagcaatgtcatctccgtggatggaaaggaaatcaaagtgtttctgaccgcaaccct

SEQ ID NO: 7419 - DNA, 425 bp, Glycine max
  Clone ID: jC-gmle01810025f11d1
caaggtaagaattttattgcacaatgagaaggcagagaaaattgagggatctgtttctcagtacaagtttaaaagaaaaatgaaccaacaagtgttgtggtggtagtagtagcatttagcatactgagttacagtgccatggtacatacatattaattcaggggccaatgagaattcggttggatctgacttccatttgttggcaacaatgtcagccaaatccacaacccttcgggagtaggcccattcattgccatacgaagtaatgaccttggccatgtcatctcccatgaccatggtcaacgaggagtcaacagctgaggacacataaatgcacctgaggtcaacggacacaactggcttataacacaccgagaggattgcctggagctaattggctgcgctctctctgaatgcagaaatca

SEQ ID NO: 7420 - DNA, 485 bp, Glycine max
  Clone ID: jC-gmle01810025f12a1
gcagcagatctatctcgtgcacctaatattatatgccaacttgccagtgccagtgagaacgcagttacttcaccatttgagaatgaaaaaggttcaaatctaatgatgatgagaggaatgacagccaaggactttgaccctgtaagatattcaggaagatggttcgaagttgcttcacttaaacgtggatttgcaggacaaggccaagaagactgtcattgcactcagggtgtatatacatttgatagggaagcaccatctatccaagttgataccttttgtgttcatggaggccctaatggatttataactggaattagaggaagggttcaatgtctttcagaagaagatttggggaaaactgagacacagctagagaagcaggaaatgatcaaagaaaaatgctatctccgctttcctacactggcattcattcccaaggaaccttatgatgtgaatgctacagattatgcaatttttctctt

SEQ ID NO: 7421 - DNA, 543 bp, Glycine max
  Clone ID: jC-gmle01810025g01d1
gctactaggccgcggtcgccctttttttttttttttgtgtaatgctaatgtctctcttcagataacgcatgagggaatgctgtcatagttagaaatacatacctgctacggcctataggctgttgttgggcccatgctactgcgggtccattactcaggatgacatgcagatgcaaggcccagaacgtccaagccttcactatgggtattgatatccaacatgaaacctactggatgactaacttctttgttatctccacaacgaactgataaaccttgggctgatcaggatgagacttcgcaacactctgtttctgtaggcacctcttggcccaagcagcaaacctggggctcctattgtcaatgacgaagctggcgacggtcctctatactttggaccaagtgcttaatggaacaagtgctctgtccacataaccaatgttgtctgcttaaaataagtttcatcgcccagctgcttctgcaacaatataacggcctctatgaactccttcttggcagcttctttttgttctgcctttgatg

SEQ ID NO: 7422 - DNA, 84 bp, Glycine max
  Clone ID: jC-gmle01810025g02a1
cctggtctaggattatgctcgtgaagcgttatgacaggatagattttgcgatgggtggtgtagctgggaatctagttggcacac

SEQ ID NO: 7423 - DNA, 482 bp, Glycine max
  Clone ID: jC-gmle01810025g02d1
cattcgaattcattttatttatatattaatattatattcaaatgaaataaaaagatattaaaagatactaattataagaatttgaaagtgaaattataaagttattaaatgattaatcaatttttttctacctgttcctgtagtaaaaagagttccatctgttcttgaatagcttccttcaaaaggacttctgcttccccagtgaatgtcttggtagaagatatgatttctttgaattgaggtttattcgtgtttaagtaagcacgtaactcaacaagaaatttccttacctgtccaatttctaatgaatcaagataaccattcgttccagtataaatagatattatctggtcttccacggtaagaggagctgatcgggattgtttaagcaactcgcgcaatcgttgacctgttgctaatagatattgagtacgcttattgtgatcagaagcgaattgggcaaaagcttctaattctgcgaa

SEQ ID NO: 7424 - DNA, 355 bp, Glycine max
  Clone ID: jC-gmle01810025g03a1
tactattacaacatcgcccgctaccatgaccattgttgcgatcgtgctcctgttgacggtctttgtcgggtactccgtcctacacatgtctatgatctcatactacaacgcccacgcggtctaggtgctccacgtggcgcaccgaggaggagctgatgtccatgtgcgagcaggggcttgtgaagcacgggaaggtgtgcagcgcgctccgcgagaaggagaagcgcttacagatcttaaaggacaacctgcgattgataaacgagctctaacttgccgtggaccgaacctaccagctagggctgaaccggttcgctgatctcaccaacgaggaattctgggccaatgacttggg

SEQ ID NO: 7425 - DNA, 502 bp, Glycine max
  unsure at all n locations
  Clone ID: jC-gmle01810025g04a1
ggcnagtatctaggcangtgatgctatacaagaggtacgactacgtatgctcggtatcgtggttcggaattatgatagcgtctttctatacatatgaccggttgatgcaatggtactattacttacggactatagaatactctacaaaagtacacatgactcttgttttgttccactttttgctcacgtgtctctgccttctcttttctgacctatgttgaagaatggtgtcattacaaaaattgtgggcagagtgacataagagctggcccatctcgaaatggggttgtgatctcaagccagatggtgaatgtccttaaacgagccatcctgtcctggcccttttggttgtaaaattctgcagaacaaacctaggcctcactaattttttttacaacattgtggaccataactgtttctattgatcatctgatcttggatatcggtgcaaccaactacttgagtcattcttacgtcgctttgggcttcaacaatatgtctg

SEQ ID NO: 7426 - DNA, 398 bp, Glycine max
  Clone ID: jC-gmle01810025g04d1
acatatcgtgtgacattgggacccttccaattattgctcgagattggtcacacatatgccactaccctgaaaacgatagaacattaatgctgttcaccattaggctaccgtatcccaaggcagcgtctctgtgccatgaccttttgtacgaagccgggccatgactgtaatgtggtacaacacatataccttagaggttcctaatacagtggtcaagctctttatgccgctcgcattcttgagtgactaagggggaagagcgttcatctgatggtgcattccttcgttccatcttagagtcaaaggttgcccattggggcgcgactacagacagctttgctactgtagctactagggacctcgttcctagcctttagagaacctaggggatccactgg

SEQ ID NO: 7427 - DNA, 353 bp, Glycine max
  Clone ID: jC-gmle01810025g05a1
tctttctatacatagagtggataagccaatgtaagtatgactgaagtacaatagaattctctacaaaagcacaaataactcttgttttgatccaatgttcgcccagttttttcttcctttactctcctggtttctcttaaagaatggcgtcattaaagaaattttgggcaaacgcacataagagctggtccatctggaaatggtgttttgttctccagcaagattgtgaatgtccttaaacgagccatactgtactggcccttttgcttttaaaatttttcagaacaaacttaggcctcactaatttcttttagaagattatggaacatcaatgctgtgattaattatccgat

SEQ ID NO: 7428 - DNA, 412 bp, Glycine max
  Clone ID: jC-gmle01810025g05d1
ttcttttttttttttagaaattataatgactggctatgctttaatctaacagatggataatttatcctacgtcagaatcctagatcaaactgaacggctcgatccaatagctattaacgagatcccagagcaaacacctatctagctctgagtaatgtgggacgaaacatcgcggtgcactaattgcgccccggacttggtgaccccgtcagtgaaccacaatagacccttcagatgaagatatcacttaaatgggactgtgaccacgttctacatgataagacgcttatcatactcgggcgatggcatacgccgaacactcatgtttcggcgagtttcaagagctgaatagtctgcaccagacccgtcagcgttcctttgcatgatgcccaatagcccatgccgataaaca

SEQ ID NO: 7429 - DNA, 341 bp, Glycine max
  Clone ID: jC-gmle01810025g06a1
agaccgctagtgcacttctggaatccacaggcacgattacgtaagcacgcgtacttgggttgagaattaggcgcgtgcatgagagcattgtgttgataaaataatgctttcgtactatcaggatgaggggtaggctttccaactttctagatcataagatgatggccgttctgtttgctatcattgttaaccatgtgggtgcgggggacaattacactatgcctatctacattgaaacgcgggcaaggccatgccacatacactgtggactgcgcgtactctttccattcgcatcgcttcaactacttatgtcgaaacaaggaaaccacgattcggtctga

SEQ ID NO: 7430 - DNA, 423 bp, Glycine max
  Clone ID: jC-gmle01810025g06d1
atgattactacgtcggcggccgtcctttttttttttttttagaaaataaaatagctagctctacttttattaaaaagagtcaaaatatatactagtacagagtctgatagaaacacagaaaggatctatacacgagtccctaacatactctacaagcaaaaccctcctgaaattttgagttcaatgtgatgaataatcttggtccactaatagaccgccggacttggagaagcatgcattctaccacaaatgaccctccagaagaagaaaacaggagaattggactatgaccacgtgttacatcggaagattctaagcagaacccgtcgcaaccttcttccgaacaatgctttttcggcgagttttatgagctgacgattctgcaccagacccgtctgtattccgttgtttgatgcccaagag

SEQ ID NO: 7431 - DNA, 415 bp, Glycine max
  Clone ID: jC-gmle01810025g07a1
atttttgagcctgcttactgaaaatgggaacaccaatgatgacctcccgcttcccactgatgagagtgtgctcactcagataaaggattgttttgctgagggcaaggatcttgacgtgtcatgcatgtctgctatgggtgacgaacatatttgccccctgatcgatgttgggccacagaactacctcctggtgctggcagcctgttgtttctatttacgcctacatcctcttgaaagcttatatattggctgggtcacgacctggcttatggcttatagattcttggcaccactagtcttatccatggtgctgatggatgtgtgcacacaaactatatcacaccttgtctggttatctatgctcgtcctatgactctgttattcaggacgaatcgtatgcgggacggtttttttt

SEQ ID NO: 7432 - DNA, 325 bp, Glycine max
  Clone ID: jC-gmle01810025g07d1
agaagcaaatatattataccatatgtaggtaatctagcgatgatgaaattcacccgtacaattcaagccaagcccataggtcatgtgcatcactcatgatcacactgaaatattcaacctgtccctttcagccattcattatctgcaccaacccatttacactttctatattcttggcaaaatcaggaattttgtcctggtaaaattcctgactttccattatacccaaccttgacaaaaaccaaaatcaaaagggtcaatttagattagaaacttgaaggtttcccctcaagtatttgcataggccatgcataatattcccaac

SEQ ID NO: 7433 - DNA, 374 bp, Glycine max
  Clone ID: jC-gmle01810025g08a1
attttgcatcggatcttgtaatgaatagtgatggcacttgccaaggagtgaccgggttgtatttgggggatggaacactacatcgtcacaaatgctgctataacaattttggccacaggggggagtgggagagcatacttctctgcaccctcagcacatacttgcactggacatggccacgccatgggtgcacgtgctgcgatccctgttgaggatgtggagtttgtacaattgcaccccacaggtatatatggagcgagtcgccttatcacagaaggatctcgaggtgaatgccgcaatcttaagaatagtgtcggttaacgatcgatgaaacgatgttgccctactgcgaaggatctcgcataagagatgta

SEQ ID NO: 7434 - DNA, 110 bp, Glycine max
  Clone ID: jC-gmle01810025g09a1
acaccgcttatattgagacgtgtgggtgcgcataaatctgaccattggcacaatcgtgctttcttttacatggcctagacaggaaccggaaatcccctctgacaaaaccc

SEQ ID NO: 7435 - DNA, 420 bp, Glycine max
  Clone ID: jC-gmle01810025g09d1
gtccttttttttttttttttttgttaaatttctgatgtgaataaaaatggccgtatttaaaaaaattccagattcattgtttgtcatcactctaaagcgtaaaaacagcctgttttcaaccaagttaccatgtctctaggtatgcaggcatagaactaacaatttctaagccaagtacaagggactgctcttttcagcaatcattcaaaaagctaatgaagcatataaaggtagctacattcattgcccatgtcacttggaagtctcttcatcttttgccgccttacgatgtattcccttcaacttaagaaattgatacggagaacagataccatattagagaatgatcacgatccaattagatcacgagtttcagcctcaatggacagcagtgcagtgtgaacttttccagtccaactg

SEQ ID NO: 7436 - DNA, 412 bp, Glycine max
  Clone ID: jC-gmle01810025g10a1
cgaaactccacagtccagtgagaggaagagaaagcatgaagttcacagactcgccggtgatcgagcttgcggtgaacgacgccgttctgtcgcttcagcaagacaacgggtccatgcacgtgggaaccaccgtgtggccatgctccctcgtcctcgaaaaattcgcggagcgctggggcccaccctatgacaacaacccctacgctcgcgtgctcgacttccaaggcaagcgggccgaggagctcggcacgggctgctgcgtggcgggaaggggcctctacctgttgggcctgactgacctgcttctcaccgacattggacacgttatgcgcggcctggagcgcaacctgaaagtcaacaagcccatgcttcgcgaggccctcgaacactccgtgctctactgggacaaccc

SEQ ID NO: 7437 - DNA, 575 bp, Glycine max
  Clone ID: jC-gmle01810025g10d1
tcctttttttttttttttagacagaataacaactgggaatcgattaactaacatttatattcgatgatgcatgaaatcaaaattatctttgtatacagaaagggcaaagtgcacacataaatagtcagcttctcttcatctgcgtcttcttctcggtcttgttcttacatcagtggcagactattcaccatctgccattcggtagcttgtttgtactaaaataaaataatactgatggtgtattgacttgtggtgcaatcaagtctactactttatgccaccaaaccaagtcttgcagagccataccttcaaccataagaaatttgtatttgcctatgatttgcatattcatttatttacaatgagatgtattgcaaaccaggtctgcacactcctactcacacatgggacatataccagaatccgaatattaatgattaaaaagaaggttaaatgagctatgattaaataataaaatttatgtaacaattagatataggtagctctactctcatatgtaataccctacattcactaactgttttccccttatgtcaagggagcctaatgctcag

SEQ ID NO: 7438 - DNA, 526 bp, Glycine max
  Clone ID: jC-gmle01810025g11a1
aaacaatgttcgagacctggtttccagacttgatggtcctgtttcgtttatgcaaatggtacctaatccaattgcgtctaagaaatccgaagacaagtatgcaaacagccgccagctgttggtagtttgtactgatgggttctttgctggaagtaacaatgttcaggatgggtcgaccaccccttacaatggaagcactacaaactcccatgaccaaataaatggaagctatctgccaactaccgttcggctttattctatgaaatcccaatcttacgttcatgtactgaagtttagatcagttgtttattctgagaggtgcagttctcgggtagttgcggtttctcagtccactcagatacactgttttgatgctaccacattagaaagggaatatactttacttaccaatcctatagtaatgagttgccctggttccggaggcatatgttatggaccacttgctgagggaccaagatggcttgcttatagtggaagtccagttgcaatctccaattcaggacat

SEQ ID NO: 7439 - DNA, 277 bp, Glycine max
  Clone ID: jC-gmle01810025g11d1
cttcaaaatgattcttcattttcaggctttctgtcactatttacatacatgaaatgagccccggtgtttaagtcgctccattctattatttacaatctcatgctgcgtatttggtctaaaggtgtcatcgttatttccaacgctcattgctccagatgccaccctttgatcatgccactcggtttctccacttccacttgtaaagataaaaacatttttaccagacttagtcacactcttaggagattccaaacaagacctgggtgaaaaactgcca

SEQ ID NO: 7440 - DNA, 379 bp, Glycine max
  Clone ID: jC-gmle01810025g12a1
cagcagtttcagtggtgtaggaatttcttttggagcactaccgacttctgagatacccaagcaagggaaacaagctccagtgcttcatggtttgccagattttgctgaagtttacagtttcattggaagtgtatttgatccagaaacaaacgaccatgtccagaagctgaaggaaatggatcctataaattttgaaactgttttgttgttaatgagaaacctcactgtcaacttgtctagccctgactttgcacccactgaaaagcctgttaatgtaaccgtagttcattgtaaccacaaccaaaatagtagttaatgttagaaagctaaagagcataatgtattttcagatgattcttataatacaaatttaaaatta

SEQ ID NO: 7441 - DNA, 299 bp, Glycine max
  Clone ID: jC-gmle01810025g12d1
ataagaaacatctgaaaatacattatgctctttagctatttaaccttgactaatatttcggttgtggctacaatggactacgggtacatttacaggctttatagttgaagcaaagacctggttaggcaagttgaccaagcgggtgttcatcaacaacaaaacatggtaaaaagttataggattcacatccttcagttgaagggaaaggcattttttttctggatcagacacacttgcattgaatctgtagacaagaccaaaatttttcaaaccatgaatgacttgctctcgttgtcctt

SEQ ID NO: 7442 - DNA, 590 bp, Glycine max
  Clone ID: jC-gmle01810025h01a1
ctctctctctctctctctctgaagatggcttcacgcaggctcgtatcttctctgattcgatcctcccttcgtagatctcaatcgaagccctcaattgccgcatcgacatcgaggctcacgtcatccaaccgtgcctcaccgcacggatacttgctgaaccgcgtcgccgagtacgccacccaccgcgggttgctgctaccactcctccctctcctcctcctccggggaagaaggagctcggcggcggcgggaagatcaccgatgaattcaccgggaagggcgcgatcgggcaggtctgccaggtcattggtgccgtcgtcgatgtcagattcgacgagggtttgcctacgatcatgaccgcgctggaggttctggatcactcgacgaggcttgtgtcggaggtggcgcagcatttgggtgaaggcgttgtccgaaccattgctatggatgccaccgcaggtgtcgatagaggctggagcgttctcaacactggctcccctattactcgtccagttggtagggctaccctaggccgatcatatatgtcattggagagcctattgatgccatggagaaatcaatactgagca

SEQ ID NO: 7443 - DNA, 342 bp, Glycine max
  Clone ID: jC-gmle01810025h01d1
gaacggagaatactagcgatctccaattaattccttggtcgacgatctacaatctcactaggccgcggtcgcccttttttttttttttttttttcattttggaactaagattactctgaccatggaccaatgtgtacacaatccaatgttaaagcataagcgcctatatccatttctgccagaaacttcaaaaggttcatactatcgacgttactcctttacaaaccaacacaactcagataccggggggccacactgctatgtacattggccggaattcattatacagatgattactattaatacgcatgaaggaataacactgatacacaggttataccc

SEQ ID NO: 7444 - DNA, 548 bp, Glycine max
  unsure at all n locations
  Clone ID: jC-gmle01810025h02a1
gctgatatagctcagtgangaaatccagagcgangacttcgcatgcacgcctatcttagtctcggattctgctcacgatgcgagtgaaaacaaagtcttgcccttctgtattcaactccgaacactaggacagtgatcatgcatggctgcctccgcctcaactggcggtgctgtgaacagagctcttttgaacctgattgcgcttgggccgggggtttcagcttccagttcatccttctttgggagcagattgaagaaggttattggctcgagggtccccaacacaaagatttcctctggaagcctcaagattgttgctgtcccagagacgagagagattgtagagaccccgcggaccgacaaggacagatggaagggtcttgcctatgatatctcagacgacccgcaggacatcacaagaggaaaggggttgggttgactccctttttccaaggtccacaggacgctggaactccctatctgtcatgagcttcttcgagtacctttcaatggacttcttccgtacttggacaacaacaggggtggat

SEQ ID NO: 7445 - DNA, 380 bp, Glycine max
  Clone ID: jC-gmle01810025h02d1
aagattcccatgaaggtggtaaatttggcaatttctaacagcaattatgttaaaagaaattatatgatcaaattacacatcgaactgccctacactattccaccataaaaccctgcatatatatgctacaattttttgcgaaaaaataaaccatacagaaaaaagttaaagagcacattattacagaatcgaaggagaataactaggatgcctctataagtaggcattctgtgatgcccttattgcgaagtgatcatacttacaatgttcacactgaatcacacccaaaaaaaaactaattataataattacaggctccgaacgccacgttataaagcaagcatacggacccttcattaatggcaaacctgaacaagggc

SEQ ID NO: 7446 - DNA, 297 bp, Glycine max
  unsure at all n locations
  Clone ID: jC-gmle01810025h03a1
tgggggctgctccttatggantccagaggcacgttcttcgatgctcgcgttcttggttttgcattttgttagtgttccactttaataataatattttcactcgtctcttcaactccgaacacaagacgtgatcatgcatgggtgtctacatctccactgtcggagctgttaacagagctcttttgatacccgaaggggagggacctgggttttaagatcgcagaatgtgcatcattgggcgccgctcctggaaggacattggctcaggggtgggctgcacagagattttctcaggaa

SEQ ID NO: 7447 - DNA, 143 bp, Glycine max
  unsure at all n locations
  Clone ID: jC-gmle01810025h03d1
ctatatattttgagttattacattcatactgttatctgtatctaatactccaacatatatagtatcttactcctttctatagaatctatattatattaatggtatttgtnggctgtgacttggtccgttattaactgggtgga

SEQ ID NO: 7448 - DNA, 553 bp, Glycine max
  Clone ID: jC-gmle01810025h04d1
aaaagaagaaaaaaaactttgcatgcacttgccattaaacttcgtagtacatacaatacacatcaaggcatttaattttatctatctatctttcacacaaaatccgcacattaccaaaaaaaatagaaaaagttctcttcaaactgatatgtttgccacaccatatattaccgtccagcttttcttctagctatacacaaaaaaaaataggctatcaagaataatcaaggaaatggaaacaacaaagaaaaactgggaagagttggaatgcaggctagaatgcactccagttatctgaacctttcttcggagaatgattttcagaagagaccttaaaagggccataggagccgaatggatcagagtcatcaaaagagaatggaccactgtgaccgaagtccttggtgctactaattgagtcaaaccttgcatgtccctgacgaccaaagccaaaatcgttgctgctactcatggaatcaaaccttgtgagcgtctcaggattggagccaaaatccttgctgctacttatggagtcaaaccttgtgaattatga

SEQ ID NO: 7449 - DNA, 404 bp, Glycine max
  Clone ID: jC-gmle01810025h05a1
tgcaatatcagtcagtatgtatccaatgcacgcctcgatgctgcaatttgggtctagagctcgggtcaagagcatatatggttggtgggtttgggcatttgtcagcttggctgattgtcctcacgccagcccttgatccaccaacagcgccggtcgttggtgacaccttggccttcatacaagtcatcggttgtctgagtctccaaaggcatgacacgggtactgctgtctctgagcccgagaaaacactagctcctgcaattgaagagagagccctgcatgaccccgacaagactaactgaccttccacagctgattttgagtatgctgaggagttcaggaatggcgtggcagcacaggatactgttgttcaagctgtatggactgctgagaaacatgactga

SEQ ID NO: 7450 - DNA, 518 bp, Glycine max
  unsure at all n locations
  Clone ID: jC-gmle01810025h05d1
aagctgaatccatttcgatcagaaatcattgaacatccaatacatcacatgtggaccagaatgtagcccaattctgaatatacagctaaaatggactgaaaataacgattatgatttataaaaaaaaatatagatataaattatcagattttcatccaaaacttatttcaattcacagaaaaataagaatcatatccccatattctatataggctagcataaccttgactatctcatcatgcagtgctggcagatgccttcaatttcttaggcgggggatttcctccagatataagcacatataaataaaagcagagcattgcagaacttataatagcactaatgcccgatggaaatattttctttgccaatgagtagctctggaagttcttccagataagaacccctgccaaagctgcttgtcctagaataaatggtaaacttgagtttccttgcctccagaccttcatgctaaaggtgctgaggaatagtaaagcacccncaaagagcacaccact

SEQ ID NO: 7451 - DNA, 322 bp, Glycine max
  Clone ID: jC-gmle01810025h06a1
cgtcgcgcctcatggatcacacctttatctgctgaagaacatgtggctcatgaagaggtatatgaagacctagaagattattatgctgacggggatgatgatgactggggtgaagcttgctgtggtggctcctcaactttgctgtgcatcggcaaccgactacggggagataacgtatatgtcagggccgctcgtggcgaaggtcaggactgcacatctgatgcacgcgcgggattgaggacccagaacttcttctcgcctgccgtagacgaaagcggttgggcttgtcatgacctgcgcatcggcgaggaggtctcacttg

SEQ ID NO: 7452 - DNA, 390 bp, Glycine max
  Clone ID: jC-gmle01810025h06d1
gggaaaaaagaaataaatttaaacattgttgaggtgtaaatgatatcaacatcaaaaaaactttacaaggaaattatgttcaacttaaacctgcattgagcttaatacctaaatttaacctaaattgattatggtttagtgagtttggaatttccataatccaaccaccccaccaagccattattttaaaacaacttccccaaaaatttttacatgctacaaagaaaaaagcacataaacaatgtacaaaaaaaaaaaaattttttaaaaaaagaaaatttttaacttatgggaaggaaagttaaaggccatgaagatggcctgatttaaataaaatagaatcactttctacccacaccttataaaaggccgcaaatgctttgctttggc

SEQ ID NO: 7453 - DNA, 247 bp, Glycine max
  Clone ID: jC-gmle01810025h07a1
cttgatcacaatcggatcgatgcggattgagcctacttgtactttcctttgtgttgaaaccttatccatgatagctgaaggaccaacccatgtttaccttcgcttggtgtctatgacggccgaccctgactcttagaactcgactgcctctctggtgactacaaggatactactattccctctatgtgaactatagtttcgagcctattttcatatgagcagcttgcctgaaatcgacacaccaaca

SEQ ID NO: 7454 - DNA, 409 bp, Glycine max
  Clone ID: jC-gmle01810025h07d1
tcctttttttttttttttaaccaatgaatattagagacatctacttttatagtgagaatacggactacaaattgaatacaaatgacatcaatcaaattaggaacatacatttaaacggaaagagacactgatatgttcgcctgtgtcagatgttgaaactgtgtggacacttaggctcaatgcatgtaagtgtctatgtagtacaaactgagtgtcaatgacatatagcaggtgtataactggcaagttccaactaccgagatgctatctggggtatagaggacaagctactgaaccgattggggttggaatctgatcatgagactcgactagctatgtcattcaagtgcagaccatctaaagactgaagtgtactttcgatctcatcagggctaccgaaagtaacgaa

SEQ ID NO: 7455 - DNA, 379 bp, Glycine max
  Clone ID: jC-gmle01810025h08a1
tcttctcactccacccacccacacacactctctccagcgtttgtggcaattggaattgagatattgcaagtgaaatgaaggccaggcacatctcattcttctcttgatatttctgatggcactcgctgcaaacaaagttcctagcacatcctattgcgactaaaagaacatctctttgcagatcacatgaaaaacactatttttgctcgtgaacaaggaccaatacactacagttgttaagacatacactgggacatggacatctgagctatagatgtgtacgcacacagagatcaaccttattcagtgaccgatttatggtcttaaacggcaaaactgctgggatgatctccaagagatattctatctcatgtcaatc

SEQ ID NO: 7456 - DNA, 484 bp, Glycine max
  Clone ID: jC-gmle01810025h08d1
tcctttttttttttttctgttataggacaaagaaacatcccatttctttgcattagacgtttatttaatccatgaaatccttgggaggaattgtattcacataatctaacattacgggatgaaactgctctattgcttgcacgtatgctatgctgaaacaaccttggtactataggactaccatccaaccaaactatgcagtatcctaggtgccttcatcatatatatcaggacaattaactgccctaagtgctgcagcagacgcagtaagacatctttcgatcaaacgagtttaatcacaaatgtgcatataagatctatgaatacgagcaaagaactgcatcttatgatgcacataatcagcatattggcatgttacatctagcagttgacactctctagggaatgcgtgggtgaatcctatactagttagtttacttgggatgcctctatgctgatcagagcaatgttgaaaatatggctc

SEQ ID NO: 7457 - DNA, 401 bp, Glycine max
  Clone ID: jC-gmle01810025h09a1
cgaaactccacagtccagtgagaggaagagaaagcatgaagttgacagactcgccggtgatctagcttgcggagaacgactccgttgtgtcgcttcagcaagacaacgggtccatgcacgtgggaaccaccgtgtggccatgctccctcgtcctcgtcaaattcgcggagcgctggggcccaccctctgacaacaacccctacgctcgcgtgctcgacttccaaggcaagcgggccgtggagctctgcacgggctgcggcgtggcgggaatgggcctctaactgttgggcctgacggacctgatactcaccgacatcacacccgtcatgccggccctgaagcgcaacctgaaagtgaacaagcccatcctgcgcaaggacctgaaacactccgtgctctac

SEQ ID NO: 7458 - DNA, 536 bp, Glycine max
  unsure at all n locations
  Clone ID: jC-gmle01810025h09d1
agacagaataacaactgggaatcgattaactaacatttatattcgatgatgcatgaaatcaaaattatctttgtatacagaaagggcaaagtgcacacataaatagtcagcttctcttcatctgcgtcttcttctcggtcttgttcttacatcagtggcagactattcaccatctgccattcggtagcttgtttgtactaaaataaaataatactgatggtgtattgacttgtggtgcaatcaagtctactactttatgccaccaaaccaagtcttgcagagccataccttcaaccataagaaatttgtatttgcctatgatttgcatattcatttatttacaatgagatgtattgcaaaccaggtctgcacactcctactcacacatgggacatataccagaatccgaatattaatgattaaaaagaaagttaaatgagctatgattaaataatanaaattatgtaacaattagatataggtagctttactctcatatttaataccctccattcactaactttttccccttatgt

SEQ ID NO: 7459 - DNA, 269 bp, Glycine max
  Clone ID: jC-gmle01810025h10a1
tgcaattccaaatctctcttctttctcagccaagcatttccccctttttcgtttcgaatctccccttagacaacaccgatttcgccgtcttctttctctttaaactttaagctcgctagggttagggctagggtaagggataggccttcggtgaggcgagagagtatgaggttgagggaggacttgccgtgtaaacactatgacgtttgtgtgaaagaggaagtgatgatagcgaatgacgttaccgtggcccaaaatcattggtgtcc

SEQ ID NO: 7460 - DNA, 476 bp, Glycine max
  Clone ID: jC-gmle01810025h10d1
gttatcaaaggtcaaaaggtgtacttagatgatactcgtgacatgatttctactgtacatattttgtgccgtatctgctgttaaaacctgccagtacgtgtgtgattctggatcatatgacatatggctatgtatacattcatgggggtgactatacatagcctcgagactgatgacttgatcacttatgatgtgtatctgctctactattggacattgggaattgatgcatctgagagattctcgggaaggacacaatgcagttgccgctcttcattgctctgacggaccacgtgcacccgtagcggttaccgatgcgttaccaatctctctgagatgtcacaatcagtactggctcattcgactgtccgaaactgcactacatatgtgctgacatactgcagagtggacgtgctacactctagaaagacacactgagattggtccggaaagtgtaccgtttacgcattttaaat

SEQ ID NO: 7461 - DNA, 638 bp, Glycine max
  Clone ID: jC-gmle01810025h11a1
aagtatagatcaacttatggatgacttgaaataatctatagataaatcagtatagactagactaatagcaatctaacatattactacatacatgagtatactagataaatagaatcagaatatatttattattaatctacaatatagatagaagggggtatatacgcaagcatagctatgaatgcacatgcacgcatgcgcggaattggaattgagaacaaagaaaaataaaaagaattatccattacaaccatcatggccaccgatgatattgaggaatgagcatttactggtcaaactgctcagaagcaggtaaatgagataaggcgtaaaaccgtgggcaccggcaaaggacacactaacatgcgccgaactgtgaataagtgcttattagagcaatagagatggacatggacgattcaagaaatcgggttcattctgagagcaaagacacatcatgacctgacaaggagaatatacctggagaatactgaagggacactgatgaataagcaagtgacacaaaaaccttagataggaaccaggatactgaggagagtgacagtcaaaaggggaaaagacatggagcaacttggaaagcaccttactaggaaatgggtgatgaagaatggagaaaa

SEQ ID NO: 7462 - DNA, 436 bp, Glycine max
  Clone ID: jC-gmle01810025h11d1
gttgcaattatttgcatatctttactcaaccataggaaatttcaggcataagcattacaaagacagggcaaacaaaaacaaagtttttggcactgtctttttagtttgccatatagagaagttttggagatgtgagcactgagatgagtgcactttacagtagtcaaaataaatgtacaggattacgggacaggaaatgtaaataactaccttaaatgataagcacaaccctgagttttaagagaggaccaaaggtccaaattaaatagtggctatttctcctccacaatacaaatttatactatacagtatgcctacaaattttgtacaagagagcaaaaggcaccgcagatgaaactactacccgcttgaactgaaaatttcatacacattggaggtcagccgttaataatgtgtaaagacaggtttaaggatg

SEQ ID NO: 7463 - DNA, 432 bp, Glycine max
  Clone ID: jC-gmle01810025h12a1
ctcgagcctatcatgatcgatctgtgagttaaacatcactgatatccctgctaacggagatagtgtgaccttaagcatgtgttgaacgggaggtgccatttcaaagacacatttctgtggggacagctggtactagggaagagcctcgcgtgcatctatccgcgaagcttacggtagtagatgcaacatcaaaagggtcccctataagatgaagagctgccatgcccgtaagagctgctgggtcagagtcagcgtgaaagcctgtgctggctaactcgacctatctgacatcacacgctgcacaggcttgatgtgctcaattacgtaagcttgccaggaggctgggactgactgtgcagttgcgagcgccgactaatccctaagctataggcttgaccacgactagaaagactcgcggactgttaataattg

SEQ ID NO: 7464 - DNA, 313 bp, Glycine max
  Clone ID: jC-gmle01810025h12d1
tcgtccttttttttttatgaccaatggaaactggaccgaaagaaaaatacctgctgcccgttcggggatttcatccactggcaattgtccagcgggacgcaccagaaaggacaatttggtcaggtccttttattttgccaactaacatactgcagctgatacaaccgttacgctcagtgttcttcacgggagccctattgaaggtacatgcattcgggtcagcaaaagggaatgactgcctcacaggatttccttgcccccgattgttaacacagagacccatgccctaagagaaacacgccctttaccacat

SEQ ID NO: 7465 - DNA, 527 bp, Glycine max
  Clone ID: jC-gmle01810026a01a1
cggctcgagcggctcgagcaggtcttattgattatgatatgctggagaaaactgctactctgtttcgtccaaaactcattgttgctggtgctagtgcttatcctcgggacattgactaccctcgtatgagaaaaattgcagatgaagtaggtgcttttcttatgatggatatggctcatataagtgggcttgttgctgcatctgtactttctaatccctttgagtattgtgatattgtgaccaccacaacccacaagtctttacgaggtccaagaggtggtatgatattcttcaagaaagatactgtgcatggggttgatttggagcctgccattaacaatgctgcttttcctggtctacaggggggtcctcataaccacacaattggaggactagcagtttgcttgaagtatgctcagtctccagaatttaaaaattatcacaatcaggtggttgctaactgtagagctcttgctaagcgattaattgagcatggatataaactggtatctggtggtagtgacaat

SEQ ID NO: 7466 - DNA, 404 bp, Glycine max
  Clone ID: jC-gmle01810026a01d1
ggccaaaaaagggtacaacatttttttagcaccacaccttgaagcatggttattggacaaaattttttaacagcggcttagttttaaggtttcattatgcgggtacacttaaactccgggttttgggtaccgggtaaaaagagctttaactttcctacccaactttgataccttttttcccaaagggaattcagaagatgtttcaaactttaaaaaattttggggctttgttcctgggaccaaacttttggcttcaaaaattatttgcccacccttttgaatgaaaacagggatgagtgaaaattttttctcaccaagtccttttggtgtcattggtggggccccaaagcaaatgccttctggaactagggcgcttttattaccaggccctgaatttttgttgg

SEQ ID NO: 7467 - DNA, 534 bp, Glycine max
  Clone ID: jC-gmle01810026a02a1
cgttgtttgagaatgcagcgcattgcaggtggtaaattccatctaaagctaaatattggtgcgagacgcccattcaaccataccgtaccagcagaggaaagagagaaaatttcagaacaaaaaagaagcagaggaaaagagagatagagagagaagaaaagctgtgaagagaagagtctgaaatctgaatcataaataattggtttttgagatgaagaactgcgagttgtgcaagcttccggctcggactttctgcgagtcggaccaggctagcttatgctgggactgcgacgccaaggttcatggagccaacttcctcgtggaaagacacacgcgcacgctcctctgccacgcgtgccagtcgcccacgccgtggaaggcctccggcgccgacctcggaaacaccgtctcgctgtgcgagagatgcgccggcggaaccaccgaacaaggtcaagagagccaaggaggcaatgacgacgacatagacaccgacatagacaccgacgatgaggatgactacgatgagagcgagga

SEQ ID NO: 7468 - DNA, 401 bp, Glycine max
  Clone ID: jC-gmle01810026a02d1
catgaataaggaatcacattcatttgcttcgtggtttttcctatgtattcatcacaacataaagcatcctcacctacttataaacagaagaagaaaaaaatgttattttacaacaataaaatagaagtaaagagttacatcacccccacaaccatgatcctcaaaatatcaaaacaaaaaataataggaataataaaaaaaacgatccatacacttgattgccattatcaaaacctgagtgctgtaacgttagagaaagttaataatcaaagagcccataaataatatccaatggtacggccccgtagatcacgcggttgagattcctcgtgtcccttcagatcaaacgtcttcagatgctctatcaccacagcaaccgtctggagacgccgctctagcac

SEQ ID NO: 7469 - DNA, 139 bp, Glycine max
  Clone ID: jC-gmle01810026a03a1
tgactacttgtggtaggtattgtttgtcctttcccgtgaccttttaactcacctttcctttcggtgacagtgttgatgtagagatcatgctgtattgattcacaggccaatttgtgtaacaaaaaaaaaaaaataaaaa

SEQ ID NO: 7470 - DNA, 120 bp, Glycine max
  Clone ID: jC-gmle01810026a03d1
gttacacaaattggcctgtgaatcaatacagcatgatctctacatcaacactgtcaccgaaaggaaaggtgagttaaaaggtcacgggaaaggacagacaatacctaccacaagtagtca

SEQ ID NO: 7471 - DNA, 541 bp, Glycine max
  Clone ID: jC-gmle01810026a04a1
tatgaatcggcactctctttgaaaactgttatgcgttcaccggcgtcggaaaggtcgtccggttagggttccggccatcgctaagggcacggatcgtaaaatcttctcgaagcttctatgctattactcatctttgcaaaacaagggattttggatggtaaagggttctggacaaattaatgacagagagacaatatttgataatcctaccaaaattgaaccaaaacgacctcatcaatggtttgttgacgctgctgaagtagatttttttccaaacaagaaacaagctgtagaagatgcagatgaaaaatctagtcctggattttcaaatgtaaatattcctccctgggagaacaatcccaattttcattcggtcccaaaccaatttattggccgattatttgggtctgaaaccaggcctgtcaatttcactgagaagaatacttcatatgttttggctgatgattctaatgtgagatcaaagatgatcaccaatcaatatggagatgatgcattctttggtttgtctatatctcattct

SEQ ID NO: 7472 - DNA, 570 bp, Glycine max
  Clone ID: jC-gmle01810026a05a1
atcacagtctctgtctatgcattagacaattacagttctttaaaatgccgaagtacaaggattgaatatataaggagggttaaaccggatgctggctttgctctttttgaatccgagtcattaaagtggccaggttttgtagagttcgatgatgtaaatgggaaggtgctcacatactctgcacaagatagtatatacaaagtgtttgacctgaaaaactattccatgttgtactccatttcagataaaaatgtacaagagattaagatcagcccagggatcatgttgttgatttttactaaatcaagtagccatgtcccactgaaaatcctctcaatagaagatggtactgttttgaaatcgttcaaccatctccttcatcggaataagaaggtggatttcattgaacaattcaatgaaaagcttcttgttaaacaagaaaatgagaatctccaaattccgatgtaaggacttctgagctaacagaagttagcagaagcgaattatgacaccatctgcattaatattctatatgagaaccaattattcctgactttcgaaaccgaactg

SEQ ID NO: 7473 - DNA, 345 bp, Glycine max
  Clone ID: jC-gmle01810026a05d1
ggaacagagaaaagggaacatttattcacatttttcactacatagagctgactccataaatggaaatatagattacatcttcaatattggggagggggcccaacatactatcactttaatacaggggggttgccacctacggattaaactggcctaagacatgacaaaaaaactaaaaaacgaatgatccaataccccttaatggttaccgctctcccaaaggttattattatcaggggaggactatcaccgcaaccatggataaatgctaatgagaaaacacagggcaagaataagcttaacagtgcattagttagaccagacatgaaccagaccgagcctatt

SEQ ID NO: 7474 - DNA, 472 bp, Glycine max
  Clone ID: jC-gmle01810026a06a1
ccgagaacaaaaaaaaataaaatttaaaaatccgcgattcgctcttctcttggaaaagtgaaaaccagaagtacgaacgaaagagaagagcgatttagaagtgagagaagatggggttgtcgttcacgaagctgttcagcaggttgtttgcgaagaaggaaatgaggattctgatggtaggtctcgatgctgctggtaagacaaccatcttgtacaagctcaagcttggagaaatcgtcaccactatccccaccatcggatttaatgttgagactgtggagtacatgaacatcagtttcactgtgtgggatgttggtggtcaggacaagatccgtccactgtggaggcattatttccagaacactcagggtctcatttttgcgggtgatagcaatgatagagatcgagtggttgaggcaagggatgagctgcacagaatgttgaatgaggatgaacttagagatgcctgttt

SEQ ID NO: 7475 - DNA, 468 bp, Glycine max
  Clone ID: jC-gmle01810026a06d1
caagaacaaaacgcatggaaatatattcaatcaaaaatcaaacaaacaagatgtaagcaacacagcacgcacgcacaagagggtgcaagagttccaattatagctaaaagtattagctaatttaagcaatcatacaaacccaagttacacaaaagagaatacttctagcaagcattctgctattacaacattcgctagaaaagataagcatctttctccaagaaccgccagactcgcatgaaatcaccagacaagaccaaaatttttcaaatgtctcatgctttgctggcaatgttgttagaaagccagtccaaaccctcatagagaccctctccagaagttgcacaagtgctctggatataccagtggcgttgacggagtgaatgaagtccaagcttgtcagttatttctgcagcattcattgcattaggaagatcttgcttgttggcaaaacaagaaaacagcatc

SEQ ID NO: 7476 - DNA, 468 bp, Glycine max
  Clone ID: jC-gmle01810026a07a1
ggggatccgaatgcgataaaaggtggtgaattagtttttggtggtgttgacccaaagcacttcaaaggaaaccacacttatgttccaattactgaaaaaggttactggcagattgaaatgggagattttttcgttggaggtgtttcaacaggtgtttgtgagggtggctgtgctgctattgtggattcaggaacatctttgcttgctggtccaactcctgttgtggctgaaatcaaccatgccattggagctgaaggagttctcagtgtataatgtaaggaagtcggttctcaatatggagagttgatatgggatctcttggtatcaggggtgaaaccatatgacatatgatcacaaggtggttcatgttctttcaaaaggcatcaatctaagagtgcttgaattgaaatggtgactgaataggatcaggaagaagtggtagcgaaagatactcctttgggttcttct

SEQ ID NO: 7477 - DNA, 481 bp, Glycine max
  Clone ID: jC-gmle01810026a07d1
gaaatgaggatggttttttcatataaaaagcacacaacacttgcaagtgggatacttctacgtcttaaatggataaatacattcgtggtttcaaaaagtaaccagagctacaattataacagcttatttacaacacgcttaacaaatttacaaagaaaatcctccagaaagcgtaattagactgcttcggcaaagccaacttggagatttccatagtcaaagacggtgtgatatgccctcatgaaaacatcgccaagaatccacaatggaccctttggaggaggaacatcaaaagcaataaacccactaaggcagacttctgtaatgccttctccagttcttagaatatactgctctggtgtgaggacaaaaggtttatttccaattgtgaacgtaatgtttggcatcttggaaagactattacagcttatcactgactctccagatggacttggcaggctctcacacagttgattcacat

SEQ ID NO: 7478 - DNA, 291 bp, Glycine max
  Clone ID: jC-gmle01810026a08a1
ggtcgagtagagccgcacacagaggatttctgggaaattttggagcttaacgcggtccaagtcgaagtttatatccttatccagggcatgattgatcatgaagggatgagagttcctacgtggttgcatggacatactgtcgtgacatacactgcggctgctgatgattcgatgaacgtggtggtacaactgatgctacgaactggagtcgttgatagttgaatactacgcaccaacaggactgactcagaaagagattcacatgtcgacgtcctctgtatatagcatact

SEQ ID NO: 7479 - DNA, 512 bp, Glycine max
  Clone ID: jC-gmle01810026a08d1
ggagaaaaacacaccaatgctttattttttctaacaaagaccacagaacaaggttctataatacattgttcctcgaagtcagaaatacaaaatacaacaccacgtttagacattattcgaagcacacataactagagtttcatgctttcattttcacacaaagacagaaacatagttgccttctgcatcaggatatcaagtcattagtttgtaccatgccaacaacatttctgtgcagaaagacaaattactgcaagtacatctagccaaggatgagtcgccttcagttacaatgagccaaggatggattgccaaagtatgagccaaggatggattgcctagaccagatgtgaggacgatcttaccgagcgaaacttgtcacagtcagcacacgcaactgaaacgaagcttcttcatctggccttatcgaggatgggcctggtgcaatgctacagcaagcccacccttgattctttgcaaatcaaactttaaggatgcagcagttacctgct

SEQ ID NO: 7480 - DNA, 338 bp, Glycine max
  Clone ID: jC-gmle01810026a09a1
atctagatttgcgcttgatttccttaatttctcattgccatatcatcgcccatgaatggacataggcagactattggctcaccgtgatgtcgattgtgcagtatttgctcaccgcgaggatgcataacgttctaatgctgatctttctcgtgctattgcatcaggtctccaactacggctagtacatcttcacttaccatacagtgacgcaggactacctgaaaggtgcgagaattctgacgtggtgacatcactcgatatggagtccaatatgtacactgtcgtcatcatgcttcatgagctagccgaggatgtttttgaagctctaacgcctacat

SEQ ID NO: 7481 - DNA, 512 bp, Glycine max
  Clone ID: jC-gmle01810026a09d1
actaatatgttgcacaatcacctttaattcttaactgccggagttgcgagcttgagttaatgaaacacatcctaagaagctaaataatttcaaaaagcatcttctctaaaaagcatctttaagaaatatgattcagcatgattttgctgcgtcaacatgctaaatgaaataatacatgagattagacaaattgagtgcacttcacttggagtaattacgagtcgtcattcaatatcaattttcttaatttccagcttgaagtttcatccgccgcaatgaaagatatgccaataaacggtaaccaaaaaccatggccgtcagagcagcaacctctctgaatccactgtcaattctgatcccatctatggtaggtgtaatgtgttcatattgaaccttgagcaaaagtgtatacgtatggtacgctgaaagatatgtagcgaatccatgatataaatatggggactttcttcacagaaaacccttcagccagcatgaaagtcatcacagttact

SEQ ID NO: 7482 - DNA, 446 bp, Glycine max
  Clone ID: jC-gmle01810026a10a1
aacaagttgtcgagaactaattttgattttcaaatggcttcctcaatgatctcttccgcagctgttaccactgtcaaccgtgccggagccggcatggttgctccattcactggccttaagtctatggctggcttccccaccagatagaccaacaatgacattacctacattgctagcaacggtggaagagtgcaatgcatgcaggtgcggccaccagttggcaagaataagtttgcgactctttactacctgccataccttgatgatgcacaattggcaaaggaagtcgaatacgctcttaggaagggatggattgcttgcttggaacttgagatggagcacggtttcctgtaccgtgagcacagcacgtcaccaggatactacgatggacgctactggaccatgtggaagctgcctatggttgtttgactgacgctcttacgtgt

SEQ ID NO: 7483 - DNA, 525 bp, Glycine max
  Clone ID: jC-gmle01810026a10d1
cataacaatagaaagtaaagaaatttattcaaggaaactgggatttatacaatattgatattgtatatgcaagtccacacccagtactacatttggccttgtggacatacgacaaatattattaattttaaacatgcatagacttacacaccgaaattatgagtattagatcctcacccaaatataccaaataaaatattgttaataacttccaactttgctggcgagtgggcgggctttacacatagcctccaatggaattaaccttgacaaggtgatccaattattctctgtcatatcaagcttcttctcacttactcgtttccagtcaaaacattgaatcattaatcccaaagtatagctaacactttgcatagccatgggttctcctgggcaagcccttcttcccataccaaatgctaccaacttcttctcctctccttcttcatcaaacctctcaggtttaaagcttgtcgcatctttccatatcttaggatctctttgcatggcccaaccattaataat

SEQ ID NO: 7484 - DNA, 449 bp, Glycine max
  Clone ID: jC-gmle01810026a11a1
ggtcaccgttgttcaggttggttacaggcatattgactgtgctagtgcgtataagaatcaagcagaggtaataatattgttgacaacggttatataattatgggttttttttctcttttttaattactttttttataatatttggcttttctcaactataagaattaaaagatgccaattgttgtttatttccccaatttattggtgttgctagtacgttatatgattttgttttgcaaaatagctagaaaacagtaatttttttgctagccaattgacattttatttttttaattttggtttttatagattggttctgctcttaagaagctttttgatgatggtgtggtgaagcgtgaggacttatggatcacttccaaacttctgtttgttgccttttagtaatggtgatctctttttgatattgagaaagattgtatgtgtttgga

SEQ ID NO: 7485 - DNA, 583 bp, Glycine max
  unsure at all n locations
  Clone ID: jC-gmle01810026a11d1
acaacataaaaacccaaattgaattgtcgtaattttcaaacaaaacatcaatcaatatttcattcaaatctcaattcaaaattggatttagaattcttaatttctatattttttttttcttaaaggtagtagttctagcggttgactcgcttttttcaaattgtttttcattattaagaaaaggtaacaaagataaaatacgagcttgttttatagcaattgttattaatcgttgttgttttaaggtcaatctatttacgcgtctggataatatttttccttgttcactaataaatcgactaattaaacccatgtttttataatcaattcggtcccccgattggatcgggggcaaacgcctacgaaaagatcgcttggatttcataaagagtcgcttagatttttccatggtttatttatccctattccaaaaatcacatttattacaagagatactataaaggatttgtttttttattctgactttnntaatatatggtgtatttttttaatatatgtggtatatactgatatttgatatatcaactgaaatgattgaatccagatgatctatctattgata

SEQ ID NO: 7486 - DNA, 231 bp, Glycine max
  Clone ID: jC-gmle01810026a12a1
attgaagcactgcctaggacttttgcaaacttattgagacagtggatggagcttatgcagcattcaactggttgagaacttttagcgtgcaagttccattttgtgagagagggtctgctccgtatttcatatatagtagacaattgtacagtgactatacagtactacatttcaatgtacagatgcttcttctttgactacgaaaaaaaaaaaaaataaattatatatatt

SEQ ID NO: 7487 - DNA, 509 bp, Glycine max
  Clone ID: jC-gmle01810026a12d1
cactcaactcactttattatattgaataaaagatacaatcattaaatgaaaaataactcttggctacttattcggggttaccatcaatagtaacacttctcaaaatctcacctggaatcactacaactagtgggtataaggcagaataaatttgctctaggagcaatgtatttttcaacgtctcaaagatgcatattgctcaaagttcaccatcccagaagtcttcaatgctcctataggcaccataggtctcgtgaacaaaaaaactggccttaactagcctttcctgcatgagtaaactccatgtgttaactagcatttttgttgatgtagtaaaagatgtataggaaatagtaagaatcaagaaaaagaacaaaaaagaatatcatacgaagtatctaactacttgcctgcttaatttcagagatcttggtcatcaaatcttgaggaatagaccagtcaaagatatcaaaatttcccttgattctggactcatagtgctcttagga

SEQ ID NO: 7488 - DNA, 353 bp, Glycine max
  Clone ID: jC-gmle01810026b01a1
agacatggggaggccgcccagataatgtgaaggcggcacaagatgcacttcttttccgtgccaagtccaactcgctcgcccagcttgggaagtacaccggtgagggtgaatctgaggaagccaagaaggagttgttcgtcaaaggctactcctactaagatgtttgtagtgaatatgatacatgttaggcagcagcaacaccagcagttgtagtaggtgttgacggaggatgaagtggaagaagactaatttgtctaaaatgtaatgtttttatagtcttggagactatttttgtttatggttacatgtacctttacagcttataaacctttttgctgtgagttgtgtacttg

SEQ ID NO: 7489 - DNA, 353 bp, Glycine max
  Clone ID: jC-gmle01810026b01d1
caagtacacaactcacagcaaaaaggtttataagctgtaaaggtacatgtaaccataaacaaaaatagtctccaagactataaaaacattacattttagacaaattagtcttcttccacttcatcctccgtcaacacctactacaactgctggtgttgctgctgcctaacatgtatcatattcactacaaacatcttagtaggagtagcctttgacgaacaactccttcttggcttcctcagattcaccctcaccggtgtacttcccaagctgggcgagcgagttggacttggcacggaaaagaagtgcatcttgtgccgccttcacattctctgggcggcctccccatgtct

SEQ ID NO: 7490 - DNA, 535 bp, Glycine max
  Clone ID: jC-gmle01810026b02a1
tggaggcaagaaagggtgttggttaggctttcattacggcttttagatctggtgcagttatgggttttctccttgctgcaaatggtcttttggttctttacattgccatcaacttgttcaagatttactatggtgatgactggggtggtctttttgaggccatcactggttatggtcttggtgggtcttctatggctttgtttggaagagtaggtggaggtatctatactaaggctgctgatgttggtgctgatcttgtccgaaaggtcgaaagaaacatcccggaagatgatccaagaaatccagctgtgattgctgataatgttggtgataatgttggtgatatcgctggtatgggatctgatctttttggttcatatgccgagtcatcctgtgctgatcttgttgatgcttccatctcttcttttggggtgaatcatgagttgactgctatgtcataccctctaattatcagtgctgagggtatccttgattgaatgctcacaactttatttgcaactgacttctttgagat

SEQ ID NO: 7491 - DNA, 463 bp, Glycine max
  unsure at all n locations
  Clone ID: jC-gmle01810026b02d1
aacagacaatataaatatatataaaatatggtaaggaaatattaagaaaattggaccatccaaaaggaatatataagaaaattgaccacgcgggagagatggtaaacatcatcgtcgtcgtcgtcgtcgtcaacctcctctttacaaggaaaattttcgctgcaggctcagcctaatcgagtgtcttaaaactacatgagacaaattatacttttgtttcaaggtgggggatggaaaggtttcaaaaacaatggaattgacatgacagatgagttaaagactaacaaaaaagagaaggcactggtaaaggaacgggcttttccttgttctgccattgtagaaaattgatggacgatgctcttttttctattaaatcctttagatcttgaagagtaggccaccatgtgtcgcanagaagggagcaaacacaagagactcaacggccatgagcttgataaggatg

SEQ ID NO: 7492 - DNA, 484 bp, Glycine max
  Clone ID: jC-gmle01810026b03a1
caatggttttaacttttaagtgttttaactatataaagtgcgcaagtaagccttacttgttccttttatgctaacatactgacaaggagtgttctagttttcgtttccagcacaattttgaaaatgcatgtatagtacctgatgtagcatgcggatacggtattggatcaagtcgctgtgtattaagaactgagcgggatggattgtaaaaaatatatgatagtttagttcgctggcgtatatgttatgatgatactgcttgcgtgtatatgcatggacattgctattggtttaagtgtttggattttagggttcgggaagtacgtctttttcctcttcacagagggaagtcagtgacaatgcaagaaccaacatcagcaacagtttggtgcacgctcggcagaaatcaatgaaacatcagagttcgaatgcatcttataatggtggccacgctcaacactctgtgccccaggtctcgatagct

SEQ ID NO: 7493 - DNA, 425 bp, Glycine max
  Clone ID: jC-gmle01810026b03d1
atactaggtattttccttccgtttctcaatcatgttttatccttactaaatatgcttcgaggcatatcatttcccattgtgccatgagaaaaaaaactgagaccattcttagatacctgcttcccgtgtccctcttgagagctctccaaaaaacatagtgctaaagcacatctacagctctaatttcttgctggaatgaagtgatctgagccttgaataccaacttgactagtggagagctgctgcaaatccccaaatgtagatctatgttgtgaagtatctggctgaacatccagtcctcctgcaccatcatagttacttgtctccagagcaatattctgtacttgttctgccagcttgtcaggattcaacactcctatggttgtagcattagaaaattgaacaggaggatgcataatccatct

SEQ ID NO: 7494 - DNA, 510 bp, Glycine max
  unsure at all n locations
  Clone ID: jC-gmle01810026b04a1
caagaggaaagggtttggttgactcccttttccaagctccacaggatgctggaactcactatgcagtcatgagctcctacgagtacctcagcactggacttcgccagtacttggacaacaaaatggatggattctacattgctccagcttttatggacaagcttgttgttcacatctccaagaacttcatgaccctgcccaacatcaaggttcctctcattcttggtatctggggaggcaagggacaaggaaaatctttccaatgtgagcttgtctttgccaagatgggaatcaaccccatcatgatgagtgctggagagttggaaagtggaaatgcaggagagccagcaaaactgatcaggcagagataccgtgaagctgcagacatgatcaagaagggaaagatgtgcgctctcttcatcaacgatcttgatgcangagctggtcgtcttggtggaaaccacacatacactgtgaacaaccagatggtgaatgccactctcatgaaca

SEQ ID NO: 7495 - DNA, 408 bp, Glycine max
  Clone ID: jC-gmle01810026b04d1
ggacaaaaggaaaaggcaccaaattcaatttaagtggacactgtaactcaaaattatagaggaagacggtccaatatgaaaaatatagtaagatcatctcaaacttagcatcttctctttgcacctaagacattgagaatgctaagaatgttacacgcaagttccatcacaacttctagcacttggattagtacaacaaccttcacgaacagaaatatttacttgccaagtttgctttgcctccaattcaagactggaagaaagttcccctctgaatagcatcctcgttagcatttccaagagcagcctcgttcaagtacttgtcagccaattggactctcttgacattctcttgttcttggacaagcatgttaccatacagcaagagcttctccagagtcatcttgg

SEQ ID NO: 7496 - DNA, 542 bp, Glycine max
  unsure at all n locations
  Clone ID: jC-gmle01810026b05a1
ccgagaacaaaaaaaaaaaaaattaaaaaatccgcgattcgctcttctcttggaaaagtgaaaaccagaagtacgaacgaaagagaagagcgatttagaagtgagagaagatggggttgtcgttcacgaagctgttcagcaggttgtttgcgaagaaggaaatgaggattctgatggtaggtctcgatgctgctggtaagacaaccatcttgtacaagctcaagcttggagaaatcgtcaccactatccccaccatcggatttaatgttgagactgtggagttcaagaacatcagcttcactgtgtgggatgttggtggtcaggacaagatccgtccactgtggaggcattatttccagaacactcagggtctcanttttgtggttgatagcaatgatagagatcgagtggttgaagcaagggatgagctgcacagaatgttgaatgaggatgaacttagagatgctggtttgcttgtttttgccaacaagcaagatctttctaatgcaatgaatgctgcagaaataactgacaagcttgga

SEQ ID NO: 7497 - DNA, 550 bp, Glycine max
  Clone ID: jC-gmle01810026b06a1
ttacaagctgttcccgagtccattctgaagaagaggaaacgccgggatgaacggaagcaacgccagttgttcagatcagttaaaggtaaccttaacagaatcaggaagcgtaggcagatcttcttgcgtgctgagaaatatgtcaaagagtacaggatgaaggaacgagctgagttgaaaattgccagagatgccaggaaacaaggaaatttctatattccaggagaggcaaaacttgcttttgtcgtcagattgaagggtatcaacaaaattcctcccaagccaaggaaagtgatgcaattattccgtctccgtcaaatcaataatggtgttttcattaagttaaataaggccactttaaatatgcttagaataattgcaccttatgtcacgtggggctaccctaacttgaagagcgtcagagaacttctctacaagagaggttttggcagaattcgtggtcaaaggattccaattacatcaaataggatgattgaaacccatttaaaacgatacaacatcattcgtatggaagattaatacacgaaat

SEQ ID NO: 7498 - DNA, 515 bp, Glycine max
  unsure at all n locations
  Clone ID: jC-gmle01810026b06d1
aacaaaagtcagtttgtttattgacaagatggaagtcaacatgagatgaaatgtaaaaactaaaaaaaataaaatacaagtataaaattaaaccatcgatctgagtaatttgttgatcaagtcttctctgttgccaaagtcaccaccgtcattgtagtggacggacttcctcttccagccaccagttggcgtgttcaatttgaaaggccataagaagtgtgtggcgtacttgaagttcctaccaacagtgaaaatttcgtgtactaaatcttccatacaaatgatgttgtatcgttttaaatgggtttcaatcatcctatttgatgtaattggaatcctttgaccacgaattctgccaaaacctctcttgtagagaagttctctgacgctcttcaagttagggtagccccacgtgacataaggtgcaattattctaagcatatttaaagtggccttatttaacttaatgaaaacaccattattganttgacggagacggaataattgcatcactt

SEQ ID NO: 7499 - DNA, 508 bp, Glycine max
  Clone ID: jC-gmle01810026b07a1
ttggtgtgttgttttcgattacacttgtacgctttcatctcccttctttctttccttttacttccactctctctctctctcctttgtgtttataatttgcttcttcatattgcacgtaccgacatgactccaacctgatggggttaaacactgcttctgcgtacgattcgatgccgctactccttcttcagtctctacaactgagtttcatataaagctgcttactacaaaccaacaagattaactcagaaatcatcttttgggacgatgcaaactggatatcttaaagagcactaaggaaatgcgcacaattttgagggcacgttgtcttctgcagcttcagcaccctggtggagtgctatcggatctcaatctgatcatcagggagaagtctcgtggtcaagtgaaacccttttcattggagctgccagactgcatagaccaacttgctgccactaaggcactagcaagaggagctgaccaaagtgtgtgtaaagggcacataact

SEQ ID NO: 7500 - DNA, 410 bp, Glycine max
  Clone ID: jC-gmle01810026b07d1
ggagaaaaacacaccaatgctttattttttctaacaaagaccacagaacaaggttctataatacattgttcctcgaagtcagaaatacaaaatacaacaccacgtttagacattattcgaagcacacataactagagtttcatgctttcattttcacacaaagacagaaacatagttgtcttctgcatcaggatatcaagtcattagtttgtaccatgccaacaacattcctgtgcagaaagacaaattactgcaagtacatcaagccaaggatgagttgccttcagttacaatgagccaaggatggattgccaaagtatgagccaaggatggattgcctagaccagatgtgaggacgatcttaccgagcgaaacttgtcacagtcagcacacgcaactgaaacgaagct

SEQ ID NO: 7501 - DNA, 395 bp, Glycine max
  Clone ID: jC-gmle01810026b08a1
cagatcccggtggcctttactttctctttctctggaaaattcccccgattttctcgagaaagtgaaacggaattatgagctttcaggacatcgaggctgggcggaccttcagttcgaggcgcgggttgatgaacgggaagcaagacccgacgcaagcggtggctgccggaatattccagatcaacaccgacgtctccaccttccagagactcgtcaacaccctcggaacccccaaagacacccccgacctgcgcgaaaaactccacacgacaagactacatattgcgcaattggtgaaagatacatcatgctaacttaagcaagccagtgacattgatcaccatgctgaagttaatgcccgcaagaggattgcagatgctaaacttgcgaacgat

SEQ ID NO: 7502 - DNA, 142 bp, Glycine max
  Clone ID: jC-gmle01810026b08d1
aaatccaaactctactccatatattatccaacaagtcacattaaagtttaaaaaaattaaggaaaaaagggccaaacaaaactatgaatcaatggaagtaatgctagttaaaagacttttttttgggcacatctaaatgaaa

SEQ ID NO: 7503 - DNA, 402 bp, Glycine max
  Clone ID: jC-gmle01810026b09a1
cgtgagctcggatttaggctcgaggagaaagatgggtattagagtttatcagactctgcacattttcttctttcccttcttggctcatggccacatgataccaaccgtggacatgggcaaattatatgcctaaaagggtgtgaaagccactattgtcaccacacgcctcaacgaacctttaatctacaacgccattggtatgtccaaaactaatggcaacaaaattcacatacaaaccatagagttatcttatgcagaggctggactacttgatggctgtgaaaataccgagtcagttacttccgcagaattggtgaatgcgttcactatggtcacccatgcactacaagagccacttgagcagctactgcaaaagcatctttcacatagcgttggtgctga

SEQ ID NO: 7504 - DNA, 528 bp, Glycine max
  unsure at all n locations
  Clone ID: jC-gmle01810026b10a1
ggaatgtcaaaggaggagcattatcaagttagcaagaagtgagacttttgccattagagtgtcaaacgcagcaaacatggttctttttgttgccaaagtttatgcatcagtcagaagtggttccctagccatcattgcatccacgttagactcacttcttgacctcctttctggattcatcctctggttcactgcattttccatgcaaacaccaaacccatatcagtaccctataggaaagaaacggatgcaaccattgggaattcttgtttttgcctctgttatggcgacacttggactgcagataatcttggagtctacccgcacattaatatcttctgaaaatgcattcaacttgaccagggaacaagagcgctgggttgtgagcattatgctttcagtgactntggtgaaattcctgctgatgatttattgtcgttcttttaccaatgagattattaaagcctatgcccaggatcactttnttgatgtgatcactaatgtcattggccttattgctgcactttt

SEQ ID NO: 7505 - DNA, 497 bp, Glycine max
  Clone ID: jC-gmle01810026b10d1
aacataaacatgcatccgattatccaaatatattattattttatggttttggtaacagagttagaacaccaatttacacttattgagcaatccaaaatccaaatacacgagatatattaagaacttttcagggcattatattaattgatgatacatattgctacttgtccttcgaagacaccggacagattgcctatgtcctcagcacattagatatgtagaataaaatcttagtactcaagattgcaagagcttctcgatgtctttctcgattttcagaggtgaggtggtaggtgcatatctgtccacaaccttcccttctttgtttactaagaactttgtgaagttccacttgataccatcgccaaatattccccctttcttctcctttaaaaacttgtaaagtggcactgcattcttcccattgacttcaaccttatcaaagataggaaattcagccttggaccttgtgcaaactacttcctgaatttcttcat

SEQ ID NO: 7506 - DNA, 492 bp, Glycine max
  Clone ID: jC-gmle01810026b11a1
ggggaagcggttttacggagattagagtgaacttaacaacgttgaggaagcgaaggagttcagagacactgtgaatgagatgctgcaactcatggggttggctaacaagggagatcacttacctttcctaaggtggttcgattttcagaacgtggagaagaggttgaagaatatcagtaagaggtatgataccatcttgaataagatccttgatgagaaccgtaacaacaaggaccgcgagaattccatgattggtcatctcctcaaactgcaagagacacagcctgactattataccgaccaaatcatcaaaggacttgctttggctatgctctttggcggaacagactcgtcaactggaactttagagtgggcattatctaatttagtgaatgacccagaggtgctgcagaaggcatgagatgagttggacgctcaagtaggaccagatcggctgttaaatgagtcagaccttccaaaacttccttatct

SEQ ID NO: 7507 - DNA, 509 bp, Glycine max
  Clone ID: jC-gmle01810026b11d1
atattatatacttgcacatgttagaaattaacaaacaccagcacacacacaccttaaatcctgaattaaggtaaaaagagtgcactgtacaaaaaagggggaatggaaaagaaggtagcaaattctatttcccctaaatggaatctgaaagggtcttgcctgataagcctatcgtgatatacatttggaatattatcagggctgccagaaagttgagattgatagctagcaacttctcagtgacttgcacttaagttcagattctgaacaaccagaaatggttcaaatttacaactgacgggagatgaaagggcaactgaaataaacaagaaggcagtgctttcctgattgctgctaagagtgtgcttgagcatgctcaggtttgtgactgtactcataatcaagatgaacaaaagcacgctcaatctcgggcaaaagctcaagcttttcttgcaacgattccccaatatcatgagcctcttgcaagggcatatccgatggcaggacaa

SEQ ID NO: 7508 - DNA, 155 bp, Glycine max
  Clone ID: jC-gmle01810026b12a1
attccacttgaattcgatccatttcattttataaagctggcttcccctacttgccttacaattccaaaaaaaaatgggcgtgctcatgatgacattgagatgactgattgtgccacactatcgatgtatcatggaattcgtccgccgtcgtcaca

SEQ ID NO: 7509 - DNA, 456 bp, Glycine max
  Clone ID: jC-gmle01810026b12d1
aattaattgcaccattttcaaattgagattggtttttttaaccacgaatgacttaagaccattttggtgtgcattcatgactgaattacaccaaggtaccacccttaacatactcagtaaaagccagagcaaccaaacccaacatagcaaatcttccattccacagttctgcatctgaggacatgaaccctttggacttagactccacgctgatcccttggaagagtggaatcaaggaagcaagggtaaggaccacacttgttcccaagaaccatgggataccaccattggatatttgatcaaacacaccttgccctttggctacttccactgccattgcacccacaaacccaatcatggccaacctgacatagatcctctcaggtgctggcccactgaacgccaacacatcagaacacttggtgcttacctttggtgaaggagtacagactggct

SEQ ID NO: 7510 - DNA, 593 bp, Glycine max
  Clone ID: jC-gmle01810026c01a1
aaaagaatatatattttgtgttaatagaatactatactgatttatgtagagcattttgctttgctaagcattttggaagtgttgtagtatactgtatgttatgaaatgattatctctttatttatttaattaaatataaatgaacgagcatttattttatagtgatagaaggtcatattgatttatgttaggacattgtgcctctctacacattatagtgttgtcgtgactatttgatataacatgataaggttagtatttggcagttttgaagttttttaatactcatggtaagcttacagatttctccctttttatatgaaaagtatgaaacaaaagatggttgagctattattttctcacgcctatcatttgaattcaaatgcttaaattgtttggattaagttggtatttggttagagtttcttagttcttttagactttcctatttcctagataccttatctcattgctattccgatctaattgcttctatatatttagggtaggaaattctggacacttgctgtaaatggttcatctaattctttgaatggttgtgattcaattatgcagtgatgtaaatataaatc

SEQ ID NO: 7511 - DNA, 453 bp, Glycine max
  Clone ID: jC-gmle01810026c01d1
gtagttgttaataaaaatcattatattaagcttcaattgtatagcaataagcatcccatacaaactttaattttatagcaattacagtcaattattatcttccaacataacattttttggaagacttgaagtttccaatggatttaaatatacttcaatgtctcagaatgttgtgcttaataacatactgatcagcataaataaataaataacacacagatgcattcagtgttcctctgcaagaatacgcctgacttcatttgcaagatcaatgacatgtttgtctttgcatcctatttcatgaagagccttttcaaggttgaaaagataatctctgttaggtcctgcgggacctttagcttgaattatttgccttgcaatgtcttcaatcgatgcagggcccaaataatttacattagatttcttgtcgggagttgctatatataccatcac

SEQ ID NO: 7512 - DNA, 335 bp, Glycine max
  Clone ID: jC-gmle01810026c02a1
cttgagaggctctcacttatccaatggggctcatggctcgagggccatgatattcacatatgcacaacggtgaagattggctgcattggtgctggatatgtgtaggggtcctactatggcagacattgcactgaaatgcccatccaaagaactcgctgatgttgatatgtataaatccctcattgtaccactgacacagggaccagcttactatctatcaaccaggacctgatggtgctgcgaaaccatgccactgcgagacccttttcttatccctgcagatgataaccctgtatttgtagctcacctagggattgtgtctcgggacgacacaa

SEQ ID NO: 7513 - DNA, 394 bp, Glycine max
  unsure at all n locations
  Clone ID: jC-gmle01810026c02d1
tgcgatgatgtttttnaanaccggcgaaaccgggcccccgggtcgacgagatacggcggccgccctttttttttttttttttttttttttttagaaattaaactgtacgtttatctaattaaccaagtatatatagctttatgtatggaattaagcattaattgtgtactatataataattttgtacgtagctagctaaaagtgaaaaaaaaaagagactaatcttaatttgctgttgattatactcaccattttaatctcaattcctcaaatcaagaattaatatatataatctatcctgccaagtcatgcagaagctgtgctcccatcaaattcctgtaaggcaggttatgtccttcaccgtccaaaagagagtactgatgaactggttgac

SEQ ID NO: 7514 - DNA, 494 bp, Glycine max
  Clone ID: jC-gmle01810026c03a1
ttctaaaacacttgagcagtggaaccaacattcattttaatgcatttgatgctctacgtggctggaaacaggaagccttgccgccagttgaagttcctgcggcggctaaatggaaatgtagaagcaagccctctcagcaagtaatactagattacgactatacatttacaacaccttattgtggaagtggcactattgagattgataaagatctgaatgagggagagacttctaaggaaaccagtgatatccattgggaagactgcatggatcatatcgatgtatttgcacttgcatccaaggagcccatacttttctatgatgaggtggtgttatatgaggatgaactcgctgataatggagtatcacttcttactataaaagtgagagttatgcctagctctaggtttcttctgatgcgttgctggcttagagttgatggagtggtgattagactgagagaaacacgtatgcattgtgtatgcggtggaagt

SEQ ID NO: 7515 - DNA, 381 bp, Glycine max
  Clone ID: jC-gmle01810026c03d1
cgtatcataaattatagaattaacttcaacctatatataagtaataaacttctcaatttttcatgtaaaatgaatccctcgcatattagttagatctcaccccaaccctccctccaacctttcgtacaagaacagaacatgattagcatgcatctatgagcttatctcataagaagcaatttatggttccaaacagccatggtaaagatgaataaatatgaacaagaacccttttgcattatggggatttacagtcttataactttaagaggaaattacaagcttttgggtcttatgcattatgatggggagcttctggctgatgaaactcggatcaccatacgcaccagaatcaaaagggtgcccttttgcagacaaagc

SEQ ID NO: 7516 - DNA, 543 bp, Glycine max
  Clone ID: jC-gmle01810026c04a1
taaaaatatactgataaagatataataagagagagagagagagaatggaagggagagagagttgtcacccattgctgagaggaggtaggagaagagaggagaaaggttacaaccatggcttatccaccactcagatgcatgtcatggctgccatatgtgatgccctcattccttccctcccactcaacaaggacacttcacaagaccaagctctctcagacttctacaatacctctgcttctcagctcccttttcctgatgaggctgcagagctgttgtacaagaggactgtgccagaagcggtgtcgttggtgagttgggttctgtggatactgtctttcagattggggacactgttgctctgtggaagactttccttggactggaagtggcctttcattcgcaagttctctgagatttccttggagaagagagaacaaattttcaggaactggaccagggaaaagagttgggtagccttacgggtagtgtttgtgctcatcaaactcttttgcttctataatttcttctcaaggactgatg

SEQ ID NO: 7517 - DNA, 515 bp, Glycine max
  unsure at all n locations
  Clone ID: jC-gmle01810026c04d1
aaataacattttattacaaagtcctccatagcatacaataacaaagttacatggaaattcattaactaccactaacaataccgttatagccgggtcaaaatgctgaatttaaacaaaactaaagagatgaagcacatgtacatttatttttatttttatgaaacttagattgaaacaatacaacttaactatatgttgatgctttgccaagtgattctgcaatcttactggcaatacagtaagatgtagactgaatggttaccatggggttgacaccaactgcactaggcaaaacactcccatcacacacatacaagccttctgcttcccaagtctcaccattctcatcgagtgcaccttcttcttcagaggcacccattctacaacttgacatctgatgtgcagtggtaaacactgtccacacttcattccttgaccttggacccncaactattgtcacagtgtcaagaaactcctccaaatcttcctccttcatccccttacacttgattctt

SEQ ID NO: 7518 - DNA, 587 bp, Glycine max
  Clone ID: jC-gmle01810026c05a1
gttgaagaggaagaaacatctttataccttcgaaactcggctgcagacagcagggccgaagtgcctataaatgtgaccacacaacaaattgcaagagagacagtgaatcaaggggtgttactgaatgcaaacagaaacactcgagtacagaataatgctactacgtggctgagaaatgcagctgaagattccacagcagaatcttcaagtagtactaggagagaaagggatgggggtgtagttccagtatggtctcccccagcttctaacttctcagaacaatttgtagatgatgaaaatggtataggagccggttcatcttacttgcaaaggcagcatcctcagtctcatcaattgatgaactggacacggctacctcagacagggtaatttacgtctagaacatgccgattaatatcagggggaaggaaaatgcactctcccctcttcttctgggaatcgtgggatggtgaaccgcattggacatacatgtgatcatattctacatccttaaacctgtcttgacacatgattaacggctgaacttcaatgtgtatgaaattttcagttaagccggtagtatttca

SEQ ID NO: 7519 - DNA, 461 bp, Glycine max
  Clone ID: jC-gmle01810026c05d1
actaaattgttgcaattatttgcatatctttactcaaccataggaaatttcaggcataagcattacaaagacagggcaaacaaaaacaaagtttttggcactgtctttttagtttgccatatagagaagttttggagatgtgagcactgagatgagtgcactttacagtagtcaaaataaatgtacaggattacgggacaggaaatgtaaataactaccttaaatgataagcacaaccctgagttttaagagaggaccaaaggtccaaattaaatagtggctatttctcctccacaatacaaatttatactatacagtaggcctacaaattttgtacaagagagcaaaaggcaccgcagatgaaactactacccgcttgaactgaaaatttcatacacattggaggtcagcccgtaatcatgtgtcaagacaggtttaaggatgtaggaaatgatcacatg

SEQ ID NO: 7520 - DNA, 475 bp, Glycine max
  Clone ID: jC-gmle01810026c06a1
ctggattgagtggaggatgttctcttggtttgcagtataaaggggcttggtgtacccctcctagggtattcgtggattatcaggatgaagttgtgcctcacttggagcctggaatgctaccatcaactgttgatccagatgcagctgggattgccgaaagagggcaaaagatgccaaaaagacctgttcgtattagtgcttggaagcttgctaagttggattcacaagaggcagtgagagcagctgcaaaggccagggcatcttcttcagttttgcgacctgtagataaccaccgtctaccagatgtagaattgagttctagtgggaacatgagcatcagaagtagtttgagcacagagactggaactaacaaggaaataaaagccgagttgagattgtctccagtgagaaattctattgctcctagtcaaggaagtcgtgatgagtatgagactggaactcaaagtatgagtag

SEQ ID NO: 7521 - DNA, 487 bp, Glycine max
  Clone ID: jC-gmle01810026c06d1
ataagccacaagccaaacaataatattctattggcaaggtaatgacaattttagtatcaagtggaacaaaagctacaataacaaattaaaatccattaaggaggctcatgtcatgcttactgaagtgataagggaagattcacatttctcaaggcatgttcagcaaatggaacaatgaagttgatttcattctctcaaacgcccagatggattttgatgacaacacacgttaaccctagatgattaggccgaataaacaacaacctgttggagtcggatgttgttcaccatacttttcatttgtatggtcttaaaggctaaaatcgtgtctaccacatagactcttttaattgctcttcactatcctttcgattccaacaaaaactttgtccactcattggaatctcaaaacaacataagttaattcatgccagaacgaggttgaaggttattctcaaatccaccagggacaaacacaggaagctga

SEQ ID NO: 7522 - DNA, 569 bp, Glycine max
  unsure at all n locations
  Clone ID: jC-gmle01810026c07a1
ctcgagccgaatcggctcgagcgttgccattctcatcctcttctttctctctctaccattgccatggatccctacaagcaccggccatccagcgccttcaattctcccttctggactacaaattctggtgctcctatttggaacaacaactcctctttaaccgttggagctagaggtccaattctgctggaggattatcatcttgtggagaagcttgcaaattttgatagggaacgtatcccagaacgtgttgtccatgccaggggcgctagtgcaaagggtttctttgaggtcacccatgacatttctcacctgacatgtgcagatttccttcgagcccctggagttcagacgcctgtaattgttcgtttctcaactgtcattcatgagcgtggtagccctgaaaccttgagggaccctcgaggttttgccgtgaagttttacaccagagagggtaactntgaccttggtggaaacaacctttccgtcttctttgtacgtgatggcatgaagtttccagatatggttcatgctcttaaatcaatcccaagaacccatccagagaattg

SEQ ID NO: 7523 - DNA, 496 bp, Glycine max
  Clone ID: jC-gmle01810026c07d1
atataaatactaacaaatacaaacggcatttattgagataggtcaacgagttgcattcatggagttatgggtacacacaacataatattgcaagaaaaggattagttctttcaggtaatccaaaatcacatccttatcgtactctttgcacgtctgcaactctaacaatcattctggagttggcaacaacattaaatatttggcctcgtgctgagatgagaagctatcttttggcctagagaacggtcagcctgagaccagtatgatatccagacactgcggatctcatgggtgacccgtgggtcagataaagcatcaacccatcggcgagcaaatctatcttgcctgtcaggtgcccaagaccggtatctctctccgggctgcttgaagttgttctccttctcaattccacacttttcacgccttccactgcagatagcaggaggtatggggaacctttctgcatgacgaacaggatcataccttgaagggaagt

SEQ ID NO: 7524 - DNA, 416 bp, Glycine max
  Clone ID: jC-gmle01810026c08a1
aattcggctcgaggtttcatgttacgttaattttttcttgctcgatctgttcaattgcggccttataatgcaatcgcattctctggtccaattgctgattttgattctgtattccttatttatccactgggtcagtctggttggttctttgctcctagttttggtgtaacagctatatttcgattcatcctctttttccaagggtttcataattggacattcaacccatttcatatgatgggagttgctggtgtattgggcgcggcactactatgcgctattcatggtgccaccgtagaaaatactttatacgaagatggtgattgcgcacatacattccgggcttttaactcaacctaagctgaagaaacttattcaatggttactgctaatcggttttggtgccaaatctttgg

SEQ ID NO: 7525 - DNA, 450 bp, Glycine max
  Clone ID: jC-gmle01810026c09a1
cggctcgaggctgtttactcttctcgtcccgtctgaggttgaggtcggaattgcctcaaagcttgttgcattccagatgcaaagctgcctttgtatggattcaagaaggctaatattgggaaggatttggccctgcatgcatgcgccggggagcctcccctcgcattcctcgactctcttcttcttggagagtgggaagatcgcatgcagagaggactttttcgctatgatgttaccgtctgtgaaaccaaagtgattcctggtgaatatggtttcgttgcccagcttaacgagggtcgtcacctcaagaagaggccaactgagttccgagttgataacgtccttcaaccctttgatgaaaacaaattcaactttaccacagtctggcatgaaaagtcctctttcaatttgaagctagcgaggatggacaagtcaggtcttttccaatgc

SEQ ID NO: 7526 - DNA, 530 bp, Glycine max
  unsure at all n locations
  Clone ID: jC-gmle01810026c10a1
aactgctgctgctgaagcaatttccatgtgcaacaacattcagaaagggaagaagaagaccttcatcattgcaagtaactgccaccctcaaaccattgatatttgcaagacaagggctgatggttttgatctgaaggttgttactgcagatcttaaggacattgattacaagtctggggatgtttgtggtgtgcttgtgcagtaccctggcactgagggagaggttttggactatggggagtttgtgaagaaggctcatgctcatgaggtgaaggttgttatggcaagtgatttgttggcactgactgtgttgaagcctcctggtgagttcggggcagatattgttgttggatcagctcagaggtttggggtgccaatggggtatggagggcctcatgcagctttcttggccacttcacaagagtacaagaggatgatgcctgggagaatcattggggtcagtgtcgattcttccggaagactgcttgangatggcgatcaaactagggagcagcatataaggaaggaca

SEQ ID NO: 7527 - DNA, 556 bp, Glycine max
  Clone ID: jC-gmle01810026c10d1
aaaataacacacacttcacacatcattacgacaattaaaagaggtgtggaaattttcaaatagacagagcatactcaacaagagggtcatgtctaatttcctttattgaattaaacaaacgaacaaacgaaagaaaacacaaattccagatcatgcagaggattccgcattttcagaagatctggcagtagcctgtggaacagaaaaagctggcataagagtattaccagcaatttcaaaatcttgagaaattcccaagagaatatcaaaaactgtagactgtttgggattgtcaataaggaaactcaagtgccatgaagtttgatttgcccactcagaactccacatttcaaaaccattattaggaccacatacctctattgggaagatcaattcccaggaatgtggttccgattttgtccacttacatgcatcgaaatgctctgtactggtgctgtttgttaaaaacacttgtaccaatgaggcccaatcactccttttgactgctgcattcccagacatcacaattttaaccattaaacagccttttttcaag

SEQ ID NO: 7528 - DNA, 583 bp, Glycine max
  unsure at all n locations
  Clone ID: jC-gmle01810026c11a1
ttcttcttctattctcacacattcccatctactccttccctcatggctgaacaatcttccaactccatttacgatttcactgtcaaggacatcagtggaaatgatgtgagtctgaatgattacagcgggaaggttctactgattgtgaatgtcgcctctcaatgtggtttgacacagacaaattacaaagaattgaatgtattgtacgagaagtacaagaatcaaggatttgaaatcttggcatttccgtgcaaccagtttgctggacaggaaccaggaaacaatgaagaaattcaggaagtagtttgcacaaggttcaaggctgaatttcctatctttgataaggttgaagtcaatgggaagaatgcagtgccactttacaagtttttaaaggagaagaaagggggaatatttggcgatggtatcaagtggaacttcacaaagttcttagtaaacaaagaagggaaggttgtggacagatatgcacctaccaccttacctctgaaaatcgagaaagacatcgagaagctcttgcatcttgagtactaagatnttattctacatatctaatgtgctgaggaca

SEQ ID NO: 7529 - DNA, 183 bp, Glycine max
  Clone ID: jC-gmle01810026c11d1
acattactggaacagataggccaaatttacgtttataatatgcagcagcagctgcaaaggtacaagtcactcaaagaacttaacacgggagcggaggaaaaccatggagagaaggaacaccatcattgaggagacagatgaaaccaccgtaaacaagcgcagaaagcgtataaaaccgaacaa

SEQ ID NO: 7530 - DNA, 583 bp, Glycine max
  Clone ID: jC-gmle01810026c12a1
atatgcaaatgatgtcatgcctttggctttgaatatagaagtacaagatagtagcaaaacatttaatgagattgtagaagtagattgtgaagaaattgtacaaggtgaggaaaaagatgcatctaaggaagatataagttatcgatatgcaaataatgtggtgccaatggcaatgaatactaaagtactagatggtagcaaaaaatttgctgagattgtagaagtagatattgacgaaattttacaaattgaggaggccaatgaagaagtagaagacattccaaataaggaagttgacatgagtgttctaaggggcaaaaggagtacatatatcagaatcagaggtagaacatgctctagaaacattagacaaagccatttcaatggttcgtgaaacagcgacttcattatcgggtggcattttttagcgttgccgatgaagagttccattttctgaaaaatgatgacagagttgatacttattccttaaaactcactcaaccaagttcccaaaatgatgttagtgttgacgtaccaaatggagatattccgaaggagcttacaagaagcgttgggaataacc

SEQ ID NO: 7531 - DNA, 501 bp, Glycine max
  Clone ID: jC-gmle01810026c12d1
cttaaccaacacccctgtcttctcttcctctccaaacttcatgggaacctccatcccaacactcacaccaatcttcaacacttgagtgacgagcttctcattcaaaaattgatcagcaaatagaggccacgtaatcattggcacgccagcacttatcccttcaagtgttgaattccaaccacagtgtgttaagaatcctccaatggaagggtgtgataatattagcacttgtggagcccaacctcgaattataaggcctctccctttggtcctttcctcaaacccttcttcactgatccattttttttccaactcttggaacttatttccctccctaatgacccatacaaatggtttcttagtatcttccaaggccaaggccagctccacaagttgtgaaggaatcaaattgcacaagcttccaaaacaaacataaaccgcagactttggtggctgcaaatctagccatttcaagcaatggtgctcattaattgaggcatg

SEQ ID NO: 7532 - DNA, 540 bp, Glycine max
  Clone ID: jC-gmle01810026d01a1
cttcaccttcaccaccaccacctattgcttatgttctctcttctcgaaaaccctaattcatacgtcgccgttttgtctttctctctgagttctccacaggatcaggaaccgaagcgttggaatgggagaatatgatgataatggcgatgaatcgaatttgcatttcctgatgtgaggaacaaagcatcaacaccttggctaggttcttgtagggtttgttgagaatcttatagtttcgttttttctttctcgaattcttcttcgcttgatcgggaattggaattgtgagttagatcaggagataagagagagacatttgattgcgaatggattaggaatttaaattgtctgaggatttattaattagtttgtgagaagcaagcattgaattggattctacttgaggagtagtagtattatggagaacgtgtgtgatgataatcacttggatgctgatgttcttttgcctcctcggaagcgtcttcttgctggattgaaacaacagagtttagacggtgatgctgctgcatcctcacctat

SEQ ID NO: 7533 - DNA, 422 bp, Glycine max
  Clone ID: jC-gmle01810026d01d1
gaagactaacaagttttctcattttattctcaatacaaatgcgagatggaataaaaagcttataaccagcacaaatggaaaagctgttcaattcatggcatcttcctatctaaactcaagcttggccatcaattaacctgaggcacaacttttgaaccgaaagaagtaatgcaagcaactaaaaatctaaatttacatttagtcagttcaaattcattacagaaccaaagatgattgcgaaaaaagaagaccatatatgtaaaaaaaaaaaaaaacttgatgatttctacctcagctatcaacttctgtaatggtagttttctagcccccagccatctcaatttaaatctgaatctgaatattatgattgcacagctttattctgtttgatacaagccggtgccttgaactcctggcatttg

SEQ ID NO: 7534 - DNA, 517 bp, Glycine max
  Clone ID: jC-gmle01810026d02a1
cttctttctctctcccttagtcaaagggactcgttgttcttctcccaggttatttagaaaagcaaaatggtgaagatttgctgcattggtgctggatatgtggggggtcctactatggcagtcattgcacttaagtgcccatccattgaagttgctgttgttgatatctctaaatcccgcattgcagcctggaacagtgaccagcttcctatctatgaacctggccttgatggtgttgtgaagcaatgccgtggcaagaacctcttcttcagcactgatgttgaaaagcatgtctttgaggctgacatagtgtttgtctctgtcaacaccccaaccaaaactcagggtcttggagctggtaaagcagcagatttgacatattgggagagcgcagctcgcatgattgctgatgtttcgaagtctgacaagatcgttgtagagaaatccacagtcccggttaaaacagctgatgcaatagagaagattctgacccacaatagcaagggaatcagattcc

SEQ ID NO: 7535 - DNA, 453 bp, Glycine max
  Clone ID: jC-gmle01810026d02d1
caccaatatgatattaagagaagaatcagaagattaatcaaacaaaacaagtttccctagtacattcataaaagattggagtacaaagtaacatagaacataaaccctcccatttcccacaatttataccccatttatgtcaccaactattatgagaaagttaagcaggaaaagaaaaactcttacaaaaaataataaagaattaaactgactgcctcaacatttgactggtattgcagtgtacttgatcaatgatctattttacgccaaagcaggcatgtctttgagccatggatccagtggcttaccaattgagtaaactatgaagccaatctcacgcaacttatcagcatccacaatgtttctgccatcaaaaacaaatgctggtttttgcatgttgtcaaatatcctctggtagtcgagagtcttgaactcatcccactcggttagaat

SEQ ID NO: 7536 - DNA, 536 bp, Glycine max
  unsure at all n locations
  Clone ID: jC-gmle01810026d03a1
aatggacatgacaactcctgtgttagcaccatactttgatggcatgacaaaagacattttccaattatcttgatcttccatctttgttgttaacaagagttttgttggccatggagactccgtaaatgaaatcaggactcanacattaaagccatcacttgtgatctctgcaagcaaagatgaatctgtccggttatggaatgttcatactggaatatgcattttaatatttgccggagctggaggacatcgtaatgaagttttaagtgttgattttcacccatcagatatatatcgtattgctagttgtggcatggataatactgtaaaaatatggtctatgaaggagttctggacatatgtagaaaaatcatttacatggactgatcttacttctaagtttcccacaaaatatgtccagtttcctgtatacaatgcttcagttcatttaaattatgttgactgtaataggtggctaggtgattttatcctctcaagagtgttgacaatgaacatatcttgtgggaacctaaagt

SEQ ID NO: 7537 - DNA, 378 bp, Glycine max
  Clone ID: jC-gmle01810026d03d1
agtaaaaatgtggtgttggcactagagaactttctccattgccaaatctcaaacgaggaatcacacaacttcaaaacaaacattaacttagcttgaggacgcactcgcggattcacagactaaacttaatgatttattcagtgatataggtacatcagattgatatagtatgtgataagttagtctggggagtttgtaacatcatcccaacgccatattgtcccatcctcacagcaactcaatatagtacttccatcaaaggacgtagcagtctgcctgattggagattttgattgaggatgtgacaaccttgcaacaagtacaggaggacttgactgcaattcccaaacaaaaatctttccttccctgttacccact

SEQ ID NO: 7538 - DNA, 504 bp, Glycine max
  Clone ID: jC-gmle01810026d04a1
ccagagagaagaagaatcttaattgatcatcacttcacttcactaatacatcatggcagacgagacccagaacaagtatgagagctctgaggttgaggtccaggatcgtggtgtttttgactttctcggtaagaaaaaggatgaagaagacaagcctcatcctcaggaggaggtcatcgccaccgagtttcaaaaagtcactgtctcagaccaaggagagaacaagcacagcctcttagaaaagcttcaccgatctgacagcagctctagctcttcaagtgaggaggaaggagaagatggagagaaaaggaagaagaagaagaaggaaaagaaagggctgaaagagaagatcgaggagaaaatagagggtgatcatcatcatcacaaggatgaggacacaagtgtccctgttgagaaagttgaggttgttgaaacagcacatgctgaagaaaagaaggggttcctcgacaagattaaggagaagctaccagggcacaagaagac

SEQ ID NO: 7539 - DNA, 308 bp, Glycine max
  Clone ID: jC-gmle01810026d04d1
aaaaacccaaataaaacccccttttattccattttaagtacatatttaatttttttttacttaaaagaaggaaacccccacaaacttttttttttgtaaatgggaaaaataaatacccaataataaagttatttaagtttgttttaaaaaaccccaaaaaaacccacaggggtttctttttgtgaaatgaaaaccaagcccacccaattgttgcatttccaaccaacaaaaaagccttgtttaaattttaaataaaaaggcgccccaccctccttttcctttaacttttcccccttgggattggaggg

SEQ ID NO: 7540 - DNA, 431 bp, Glycine max
  Clone ID: jC-gmle01810026d05a1
agaacatgtgatccattatcagttgggaacaatcaatttcataggttactggtgaaaatgcggcagacagaaatgcctgcctcgaagtatggaacaaatggtaaagctgttagaatggtagggacaaatgagttagtgaaaagaaagagaatgttagagaataaggtgttgaatggttcagcaacttcaaaggtagtgagaaaaaatggtatcacaggcttgaacaagacagtgaaatctagaaggtcattggaagagctaaaggttttagccacagatgaaggtttcagttgggccaatgaaaattacagttcctggcagaggtctattgatgtttggtcttttgtggcttctttacgcattcggattatgttggacaatgcacaatggacatatttcggaggtttcacagaggctaagcagaaaagcag

SEQ ID NO: 7541 - DNA, 366 bp, Glycine max
  Clone ID: jC-gmle01810026d05d1
ggggggaacaaatagcaaagccgtttacatttcaaaaaatcgttaatgtttccaacaactttttcccaaattacttttgcaaaccgccccattatgacggaaataatagtcaatttccaacaaattcaactccccgtttttttgtggagggggaaaagccccccgggggatttttctttatttttttaacccccctggggctttgggtgagggaattatgagttaaatacccggctggctccgtgttaaaaatgatgccaaaatttcccttacaggaatttacaaagggtgtaggggggaactcatttgtttgagaaatatctgcactgggtttacccccccaacgccaaaaatcataccttaagt

SEQ ID NO: 7542 - DNA, 496 bp, Glycine max
  Clone ID: jC-gmle01810026d06a1
agaacatgtgatccattatcagctgggaacaatcaatttcataggttactggtgaaaatgcggcatacagaaatgcctgcctcgaagtatggaacaaatggcaaagctgttagaatggtacgtacatatgactgagtgaaaagaaagagactgttagagaataaggtgttgaatggttcagcaccttcaaaggtagagagaaaaaatggtatcacaggcttgaacaatacagtgaaatctataaggttattggaagagctaaaggctttagccacagatgaaggtttcagttgggccaatgaaaattacagttcctggcagaggtctattgatgcttggtcttttgtggctcctttacgcattcggattatgttggacaatgcataatggacatatttcggaagtttcacagaggcaaagcagagaagcagatagcggaaaactgcctcgtggttaaggaagtgtgtattgcatcttggaccaactatcattaaac

SEQ ID NO: 7543 - DNA, 231 bp, Glycine max
  Clone ID: jC-gmle01810026d06d1
ggggggaacaaataccaaagccgcttacatttaaaaaaattgccattgtgtcccccaactatttaccgaattccttttgcaaacccccccatccgggctggtattgtgggctatttacaaaaaattcagctaccgctctttttctggttggggagaacccctcccgggaattttcttttacttttatacccccccggcgggttgggaggaggggaatatgcctaaaagaac

SEQ ID NO: 7544 - DNA, 413 bp, Glycine max
  Clone ID: jC-gmle01810026d07a1
gtaactcggtcttgtttttttgttggtctgtgtccgcgaaagttaattctcggacgctggaaacgcattgatgcataccgtaccgtcggtggagaaactgctgcatgtgcggcaacggctgcggaggctgcaagagggacccagagtggagctacgctgtgaagagcagagtctgaactttgaatcatagataatgggcttgtgagatgaagaactgcgagtcgtgcaatgcttgcggctcggactgtctgagagttggaccaggctagcttactgtgggagtgcgacgtgcacgtgcatgggacgagctggctcagcgaacgacacacgcacacgctcctttgtcacgcgtgccgatcgactacgccggggtaggtctacactgatgtcctatgaaacacctggttgctgtg

SEQ ID NO: 7545 - DNA, 357 bp, Glycine max
  Clone ID: jC-gmle01810026d07d1
ccagaaatagtatttaatattataagcagagattcataattcagattagccgaactttatacagaagcgaccaattaccaaacattaaaaaaaaaaaaaagaagcaaccatgagcttaacacacccatcacaagtccaaaacacttgaacttgctgaaaggcaagacatgaccactttattctaaggatgttggtttaacacaaaacaccagagggcacgaaaaccatcacagacataatacataagttgttagctacacattaatagtttatcattattcctaataaagggctatctctgctggaagcttggtctcccaacacctcacttgcaagtgcaggggttgcaggagcagt

SEQ ID NO: 7546 - DNA, 452 bp, Glycine max
  unsure at all n locations
  Clone ID: jC-gmle01810026d08a1
tcgtcaaggaaaactaagtttttcagtcttgacttgagtgctttgagttcatggatccaatccaacacaagttcgtcaacgttggtgctctcaagctccacgtcgcataaaccggaaccggtccaaacgccgtcgtattcctgcacggcttcccggagatatggtactcgtggcggcaccagatgatagctctcgccggtgccggattcagagcggtttccttcgattacagaggttacggtctctccgacccgtcacccgaacccgataagacctcttggtccgatcttctcagtgatctccttcatattcttgatgctcttgctctttctaaggtgtttcttgttgggaaagactttggagctcgtcctgcatatctatnttcaattcttcaccctgaaagggtcttgggagttgtcacgttgggagttccatattgttccccaggcccc

SEQ ID NO: 7547 - DNA, 476 bp, Glycine max
  Clone ID: jC-gmle01810026d08d1
tttgttttttttttttttttttttttccagtaatagtatttaatattataagcagagattcataattcagattagccgaactttatacagaagcgaccaattaccaaacattaaaaaaaaaaaaaggaaggaaccatgggccttaacacacccatcacaagtccaaagcacttgaactggctgaaaggcaggacatgaccactttattctaaggatgatggttgaacacaaaacaccggagtgcacgaagaccatcacagacataatacataagtttttagctacacagtaatagttcatcatgagtcctaattaggggctatgtctgcttgaagcttggtctcccaacacctgacttgcaagtgcaggggttgcaggagcagtttggaccccattggccgccatcgttgtcagcgggcacacgcattgcaggaccctcaaattgagccttagcaggtgccactcccatgaccaag

SEQ ID NO: 7548 - DNA, 421 bp, Glycine max
  Clone ID: jC-gmle01810026d09a1
accgaagttcacatttgtttgtgaatcaactaatctaccgtacaattgaatttttagaattatggctcaactattgtcaccagcttgcatggcggctctgaaaattcacaatgcatcattgaatctttggtcaagaagcatcatggcagatgctggtgaagggtgcaagtacttgcacctttctgacacacagtggtagtaagcgaagagggttcggcaaagtaagaattactgctggagactgacgttctccctctgagaccattgcagacgactattatgaagctctaggactgcttacagaagcgacaccatagcacatcacgaaggcatactaccattgcatgaaatcttgacagccggatttgagtggaaatgatccttggaccacaaatagctgcatgtgcataaatggagccta

SEQ ID NO: 7549 - DNA, 495 bp, Glycine max
  unsure at all n locations
  Clone ID: jC-gmle01810026d09d1
acagaacgaaattattgatgttaccttgtcatctcatcatatatgaacatagtacaacccttttttttttctttccattattcaacaaaactatttacatatctggaaggttatttccgtctatagaagacgttaatacaatagataagagatgaactagcctaagaagtttgaggcctggtttattcagcaaatatctgctcaaacaaacagagactccccacataagttctaatcacatattactgctgagtttttccatatagcttgatcagatatagctactcaactctattttcttcctactaaatcagttttaagtcattcattccctcttgacatcagattcttcagtccttgcaaatcttccacggattcttggctgactgtcagcaagtgccttcctgcaagcatacttgattttcctcccaaaattcctctntgtcttcttattcctgtatctggagagcttttggaagcgttcctcactggtgc

SEQ ID NO: 7550 - DNA, 457 bp, Glycine max
  Clone ID: jC-gmle01810026d10a1
ttgggaagaagcttgtgaactttaaagatggacctccaacctttgagcagcccaagatgactctggagaagctcttgacgtatggtaacatgcttgtccaagaacaagagaatgtcaagagagtccaattggctgacaagtacttgaacgaggctgcacttggaaatgctaacgaggatgctattaacaggggaactttcttccaatcttgaattggaggcaaagcaaacttggcaagtaaatatttctgttcctgaaggttgtgctgatccaagtgctagaagttgtgatgggacttgcgtgtaacattcttagaattctcaatgtcttaggtgcaaagagaagatgccaagtttgagatgattttactatatttttcatattggactgtcttcctctataattttgagttaaagtgtccacttaaattgaatttggtgccttttccttttgtcct

SEQ ID NO: 7551 - DNA, 511 bp, Glycine max
  Clone ID: jC-gmle01810026d10d1
aagtggacactttaactcaaaattatagaggaagacagtccaatatgaaaaatatagtaaaatcatctcaaacttggcatcttctctttgcacctaagacattgagaattctaagaaatgttacacgcaagtcccatcacaacttctagcacttggatcagcacaaccttcaggaacagaaatatttacttgccaagtttgctttgcctccaattcaagattggaagaaagttcccctgttaatagcatcctcgttagcatttccaagtgcagcctcgttcaagtacttgtcagccaattggactctcttgacattctcttgttcttggacaagcatgttaccatacgtcaagagcttctccagagtcatcttgggctgctcaaaggttggaggtccatcttttgagttcacaagcttcttcccaatgccgtcaacaccaacaccagaaatccacttcctcacttcgtcatcatatactctgggcctcagtgcaccaaagaaatcaatgga

SEQ ID NO: 7552 - DNA, 573 bp, Glycine max
  Clone ID: jC-gmle01810026d11a1
ggaattttagtggacaaaactttagattggatcacacttatacaaaattctccaattagtaacttgttgagagttgctgcttggaagaaaggctgtttaatggttaaaattgtgatgtctgggaatgcagcagtcaaaaggagtgattgggcctcattggtacaagtgtttttaacaaacagcaacagtacagagcatttcgatgcatgtaagtggacaaaatcggaaccacattcctgggaattgatcttcccaatagaggtatgtggtcctaataatggttttgaaatgtggagttctgagtgggcaaatcaaacttcatggcacttgagtttccttattgacaatcccaaacagtctacagtttttgatattctcttgggaatttctcaagattttgaaattgctggtaatactcttatgccagctttttctgttccacaggctactgccagatcttctgaaaatgcggaatcctctgcatgatcttgaatttgtgttttcttttcgtttgttcgtttgtttaattcaataaaggaaattagacatgaccctcttgttgatatgctctgc

(The sequence listing continues in the following parts.)

1-7. (canceled)

8. A substantially purified nucleic acid molecule comprising a nucleic acid sequence wherein said nucleic acid sequence:
(a) hybridizes under stringent conditions to a nucleic acid sequence selected from the group consisting of SEQ ID NO: 1 through SEQ ID NO: 27278, a complement thereof or a fragment of either, or
(b) exhibits an 90% or greater identity to a nucleic acid sequence selected from the group consisting of SEQ ID NO: 1 through SEQ ID NO: 27278, a complement thereof or a fragment of either.

9. The substantially purified nucleic acid molecule of claim 8, wherein said nucleic acid molecule encodes a soybean protein or fragment thereof.

10. A substantially purified nucleic acid molecule comprising a nucleic acid sequence that shares between 100% and 90% sequence identity with a nucleic acid sequence selected from the group consisting of SEQ ID NO: 1 through SEQ ID NO: 27278, a complement thereof or a fragment of either.

11. The substantially purified nucleic acid molecule of claim 10, wherein said nucleic acid sequence shares between 100% and 95% sequence identity with a nucleic acid sequence selected from the group consisting of SEQ ID NO: 1 through SEQ ID NO: 27278, a complement thereof or a fragment of either.

12. The substantially purified nucleic acid molecule of claim 11, wherein said nucleic acid sequence shares between 100% and 98% sequence identity with a micleic acid sequence selected from the group consisting of SEQ ID NO: 1 through SEQ ID NO: 27278, a complement thereof or a fragment of either.

13. The substantially purified nucleic acid molecule of claim 12, wherein said nucleic acid sequence shares between 100% and 99% sequence identity with a nucleic acid sequence selected from the group consisting of SEQ ID NO: 1 through SEQ ID NO: 27278, a complement thereof or a fragment of either.

14. The substantially purified nucleic acid molecule of claim 13, wherein said nucleic acid sequence shares 100% sequence identity with a nucleic acid sequence selected from the group consisting of SEQ ID NO: 1 through SEQ ID NO: 27278, a complement thereof or a fragment of either.

15. A substantially purified polypeptide, wherein said polypeptide is encoded by a nucleic acid molecule comprising a nucleic acid sequence, wherein said nucleic acid sequence:
(a) hybridizes under stringent conditions to a nucleic acid sequence selected from the group consisting of SEQ ID NO: 1 through SEQ ID NO: 27278, a complement thereof or a fragment of either, or
(b) exhibits an 90% or greater identity to a nucleic acid sequence selected from the group consisting of SEQ ID NO: 1 through SEQ ID NO: 27278, a complement thereof or a fragment of either.

16. A transformed plant having a nucleic acid molecule which comprises:
(a) an exogenous promoter region which functions in a plant cell to cause the production of an mRNA molecule; which is linked to;
(b) a structural nucleic acid molecule, wherein said structural nucleic acid molecule comprises a nucleic acid sequence, wherein said nucleic acid sequence
(i) hybridizes under stringent conditions to a nucleic acid sequence selected from the group consisting of SEQ ID NO: 1 through SEQ ID NO: 27278, a complement thereof or a fragment of either; or
(ii) exhibits an 90% or greater identity to a nucleic acid sequence selected from the group consisting of SEQ ID NO: 1 through SEQ ID NO: 27278, a complement thereof or a fragment of either,
which is linked to
(c) a 3′ non-translated sequence that functions in said plant cell to cause the termination of transcription and the addition of polyadenylated ribonucleotides to said 3′ end of said mRNA molecule.

17. The transformed plant according to claim 16, wherein said nucleic acid sequence is a complement of a nucleic acid sequence selected from the group consisting of SEQ ID NO: 1 through SEQ ID NO: 27278 or a fragment thereof.

18. The transformed plant according to claim 16, wherein said plant is selected from the group consisting of soybean, maize, cotton and wheat.

19. A transformed seed comprising a transformed plant cell comprising a nucleic acid molecule which comprises:
(a) an exogenous promoter region which functions in said plant cell to cause the production of an mRNA molecule; which is linked to;
(b) a structural nucleic acid molecule, wherein said structural nucleic acid molecule comprises a nucleic acid sequence, wherein said nucleic acid sequence
(i) hybridizes under stringent conditions to a nucleic acid sequence selected from the group consisting of SEQ ID NO: 1 through SEQ ID NO: 27278, a complement thereof or a fragment of either; or
(ii) exhibits an 90% or greater identity to a nucleic acid sequence selected from the group consisting of SEQ ID NO: 1 through SEQ ID NO: 27278, a complement thereof or a fragment of either,
which is linked to
(c) a 3′ non-translated sequence that functions in said plant cell to cause the termination of transcription and the addition of polyadenylated ribonucleotides to said 3′ end of said mRNA molecule.

20. The transformed seed according to claim 19, wherein said nucleic acid sequence is a complement of a nucleic acid sequence selected from the group consisting of SEQ ID NO: 1 through SEQ ID NO: 27278 or a fragment thereof.

21. The transformed seed according to claim 19, wherein said seed is selected from the group consisting of soybean, maize, cotton and wheat seed.

22. The transformed seed according to claim 19, wherein said exogenous promoter region functions in a seed cell.

23. The transformed seed according to claim 19, wherein said exogenous promoter region functions in a leaf cell.

24. A method of producing a genetically transformed plant, comprising the steps of:
(a) inserting into the genome of a plant cell a recombinant, double-stranded DNA molecule comprising
(i) a promoter which functions in plant cells to cause the production of an RNA sequence,
(ii) a structural nucleic acid molecule, wherein said structural nucleic acid molecule comprises a nucleic acid sequence, wherein said nucleic acid sequence
(A) hybridizes under stringent conditions to a nucleic acid sequence selected from the group consisting of SEQ ID NO: 1 through SEQ ID NO: 27278, a complement thereof or a fragment of either; or
(B) exhibits an 90% or greater identity to a nucleic acid sequence selected from the group consisting of SEQ ID NO: 1 through SEQ ID NO: 27278, a complement thereof or a fragment of either,
which is linked to
(iii) a 3′ non-translated sequence which functions in plant cells to cause the addition of polyadenylated nucleotides to the 3′ end of RNA sequence,
(b) obtaining a transformed plant cell with said structural nucleic acid molecule that encodes one or more proteins, wherein said structural nucleic acid molecule is transcribed and results in expression of said protein(s); and
(c) regenerating from said transformed plant cell a genetically transformed plant.

25. A method for reducing expression of a protein in a plant cell comprising growing a transformed plant cell containing a nucleic acid molecule wherein the non-transcribed strand of said nucleic acid molecule encodes a protein or fragment thereof, and wherein the transcribed strand of said nucleic acid molecule is complementary to a nucleic acid molecule comprising a nucleic acid sequence selected from the group consisting of SEQ ID NO: 1 through SEQ ID NO: 27278, a complement thereof or a fragment of either, and whereby said transcribed strand reduces or depresses expression of said protein.

26. A method for increasing expression of a protein in a plant cell comprising growing a transformed plant cell containing a nucleic acid molecule that encodes a protein or fragment thereof, wherein said nucleic acid molecule comprises a nucleic acid sequence selected from the group consisting of SEQ ID NO: 1 through SEQ ID NO: 27278, a complement thereof or a fragment of either, and whereby said nucleic acid molecule increases expression of said protein.

27. A method of producing a plant containing reduced levels of a protein comprising:
(a) transforming a plant cell with a nucleic acid molecule comprising a nucleic acid sequence selected from the group consisting of SEQ ID NO: 1 through SEQ ID NO: 27278, a complement thereof or a fragment of either, wherein said nucleic acid molecule is transcribed and results in co-suppression of endogenous protein synthesis activity, and
(b) regenerating said plant comprising said plant cell and producing subsequent progeny from said plant.

28. A method of growing a transgenic plant comprising
(a) planting a transformed seed comprising a nucleic acid sequence selected from the group consisting of SEQ ID NO: 1 through SEQ ID NO: 27278, a complement thereof or a fragment of either, and
(b) growing a plant from said seed.
